United States Patent Application Publication US 2015/0376612 A1 - sequence listing, part 35

SEQ ID NO: 84403 - DNA, 1049 bp, Homo sapiens
caccgcggccgcgcgtggcgtctgccgaggccccgtttctggaagcgtctctggccgaggctcccggccaccttgacccccggggcgctcggtgcgggccagtctccccgcgggcgcccccaagcccgaccccttccagtagccccattcatctgtcgcgaacgccctccgggtccctcccgcctacctctgacaccctccccgcccttcaactcctcacacacccccgggtgccccagcccggcagaaacaacctaaagaccctgagctttgagtcgcagcggcctccccagcccagcagtctaattggacaggttggaaaacggaagcccagagaaggaagatcttgctgaaggccgcacagctgtccagaggcagaaatggggctggaaccccgggaccagggcttgcgtcctgatcccaggaagttgtctcaggatcgatgtggaccgtgtttgtttgtttcggtttttcttaggtgcagacactcctgcagcagatgcaagataaatttcagaccatgtctgaccagatcattgggagaaatatcctttttatctgcagtcggcctcctgtgggcctttggagcctatttgccgggcagtggtggggataaatgagtagttttcaggctagcttcagccattcacttgtagaatttgagcttggattgtactgtgtttctgagaaggactgcgccgagagctaggggcaaagctgagttagactcctggctcaaggagcatacgtctaccaatcctaatagctggtgtggtggaccatgcactgtgaactaagcgcttttgtgtgtgtcttttgatgctcagcatgaccttatgagtgggttgtagtgttatcatctttagcaaatgaataaattgaggtttaggggttccatcactagtaagggtcagggctggaatccgatgcggggtagccatgccccacagtcctgtactcttacccaccagcgtgtaacagtgtcgaaagaaaattggaagaccagtttccctaaagtcgttgtgtttaaggctgtagtctgcagggac

SEQ ID NO: 84404 - DNA, 1918 bp, Homo sapiens
tttaagtcactgtgaaatacagatttgggatgttgaagacagactctaaaatttgcttttatcttcacagtaggtggggttcattcactgtgtgagtaaatcacataactgctttctatgggttatgtcatcgttattcttatccagagataatttggaaaaatgtcctaccagtctcagatgcttctgtgggtctctttttatattatgtggcaatcaaaactgccatcaactgactgattatcttaccacaagaatttcaggatggtagactggctagtgatgggggtcattcaaagaaaagagtgggagtaggaaactgactctgaaacttttaaagatatttccagttaaatctattgctaaaatattgccagaagaaaataagtttaactcagtaggagagtggaaagggatttgtagttgataggtctatatgtcatttttacttgtgctcatataatgaaaaacatgttgatgatttttccttcttcaacaggttgctaataatttatactggaatctggcatttttccaagccaagagaagatcgaatggctttttgcagctaactactatgtgtagacaggttttatattataaagtatgcattcttatcacctagtatatagttagtttgtagagtgatttccccccagtttcttgaacatggtatcttcacatcttggaccttggtcagttgtgctattcattattaaacactaaaactttggcggttcttgcataacattgtcagattttttagtgtatttctgtgaagtcattttttttcttgtcattccttttgtagtagttgctgtttggataaaagttgatgtgtgattttttattaaacaaatagtaaacccttcaattatagttagtcttggtgaagtaagatgtttgtagactttagagttctttaattcttggcacaacgtgactgttgagctaacaccaaatagtgtgttggcaatacttttcaaatggctgaaaacacctaaaaattgttcattcagaaatatctgtcactgctctgttgccaaaactcagaatagaacttagacgtatgtctgagtccctgagatcacatgctaaagtcgatgaaaagtaaccactgccactgtcttgtgtcagaacttttacagtacagaaaataacagaatagccttctgtaatgaggcgtttgttagagttttgcatgagattctaatacttcagtaggaccctacctacgtggttcatctacaatggttaccataaaaaatctggcaggattttaaaactcaatcagtctttcctttgagctagtgacttgaaaagaaagagagaaggaaaagagaccatattaagtccatgccagttgcttggctagaatatgatcaacgacttgtagtagactcaagtttttaaaaaacactattttacttaaactgtttcttatctaaattcttgcagagtgtcaatgttatcattgattatagaagacagggataatacctttatctctggccactcaaaaatgcagtgccaggagtgctaaacctagaggccaatactgatgacctggaaggtgatccatatgattgtcaccacaaagtgcttttacacaaaaacttgaaaatttgaaaaacatgatttttttaagtttctcatctcaccagtcttggtgtttatattgcaaatctatcaaagtaagaaataatttgtgctgtatacaaattacatggggaacataaaggagtgagatccttctgtgataaaatgaattcaccactctggttacccaactacagaacctcctttgatcaggccagtaggttgtgatgcaggctggagcccccgaatgccccacacacactgcagcattgaccagaccatccgaaacctgcgtccctggtgatgttctcaagcctcg

SEQ ID NO: 84405 - DNA, 1055 bp, Homo sapiens
tggtacaaatcaacaaggccaagagcaggccgaagcggaggaagcccagggtgaagcgcccgcagctcatgcagcaggttcacccgccaaagaccccttcggtgtgaccggcagcctggctgaccgtgagggccagagagagccttcacggacggcgctggtgggtgagccgagctgtggtggcggctggtttaaaagggatccagtttccagctgcaggtttgttagagtctgttctacatgggcctgccctcctgtgatgggcagaggctcctggtacatcgagaagattcctgtggatcccgtcaggagggacttagtggctctgccgccagtgagacttcccgccggcagctgtgcgcaccaaagactcgggagaactggaaaggctgtctggggtcttctgactgcaggggaaggatgtactttccaaacaaatgatacaaccctgaccaagctaaaagacgcttgttaaaggctattttctatatttattgttgggaaaagtcactttaaagacttgtgctatttggaagcaaagctattttttttgtcagtggaatgcagtttttttactattccatcatgaggaacaacatagattccatgatctttttaatgacagtacagactgagatttgaaggaaacatgcacaaatctgtaaaacatagaccttcgctttatttttgtaagtatcacctgccaccatgttttgtaatttgaggtcttgatttcaccattgtcggtgaagaaaattttcaataaatatgtattacccgtctgaagcttaaagatactgtgtaacggactctttccacttgtcccatttctctttgatgacggtctggaatgggttctgaatcaacctgctaattttgtgttcactgagacgtaattcacataacattctccactttatagtgtagagcgcagtggtttttggtgtattcacaaggctgtgcaggttccggaacatttccatcaccctagagcaaaaccccactcccaccagcagtcacccgcgttcatcacctgcccctaggctgctggcggc

SEQ ID NO: 84406 - DNA, 1486 bp, Homo sapiens
tttcttcagagacaaagatgctgtctggttcccggcaccagtttgcccacttccttatatgcagtggttctggaatcaccattgcctccgactgctccaggccttagggagaggacctcgatagccccaggctcaggtccactcagcaggcttcagctcctccccctgacaggctccttccagggcctcgcttggagtgtcctcccgaggcgcttggtcatgtttagctttatgcaaaaacaggctcctgctggtcatattgtaaactcagtagaatctcatgaacagggacttgattttgatctttctccctcgggacgtggaaacggccaccatagttgctgtcagtggcatttaggtggccgtggacgcaaatggcatttcacatctccccgtagatcacttgctctgtcttgagtttcagttgaacttcctagactagtacctagactagtacaatggcttatttttgttttgttttaatccattttcctgaagtaacctttggaaacatcagaagctactctccattgacctggacaaggtggtgttacccaactttcgatcgaatcgccctcaagtgaggcccttgtcccctggagagagcggcgcctgggacattcctggaggtgagttctcggctgctttgtgattgtgctcagtcatcctgtattttgttcaaaggagtctccctccctccccaggaggcgggccagactctccctgtctctgccttcctgggagctgtggtggccttggctcttggcttcttttgtggcacaaaccagcatgagcaagggcaggcctgacagattaagagattgttgtttcccttagaaaatgctacctagattttcacatttgaatttattttacaacggctgggtgatctacttaaacatgttcaaagtaacttgcacgctctttatgaaagttctgccagccacctattaacgtcccttacaggatgcctgtctgctggtttgggtcccagccaatggcagcagccgccctggctcccagccctcagcccagaaggccccttcagttctctgccctgcccccctgggagggacttgactgagctggggtgtgtcccttaggtggtctcatcctgtctgtctctccagggatcctgactggctacatagactgcctagggcaggttcttctccactacccaaggcaattggtaccaggcctttccagccgagcctgggcagttcttttgctctagagtcccctgtactcttccaaagagtttatagctaccaagaggagtttctctgggttccaggaattgtccagaaatgggatcaggaaggggcacccctgtctgtgcagtccagccctggacaccacgtggtggtgccagggtcctgagggccttgcgcataggtcacggggtgcgctgaaggtaaattccagagcccttggccttgcccagtcgtattgacattctgaaccagggtcctctgatggcctc

SEQ ID NO: 84407 - DNA, 1779 bp, Homo sapiens
ttaaaattttccaggagctgcgtttaaaaagtaaaaagaaacacagatgaaactattttaataatatacttgagcccaagacatgaagaatattagaatttaaacacgtgataccttatttcacttgctcagtagctacgtgtggttggcacaatggtgcagatctaagaaatagaaagaattttgaaaatgcagagtggttttttatttggccagagaattaaatattttagaagagaagtattttttccatgaaaccggtctgtagcttagatttcgcaggtgtagccttgcgtgtgtcagtggtggtcagcaaagtttgaccagccagtgctgtgcacacatctgcccatcttcaagggaacggttctgattttctcacccaccttcagcaatggaaacacacattgtccgggaggaaccaatcaggcgtggctcctgcggctcatggaggatagcttaatagagcacaggggctctgtgctgtgttgtgggaaagcagacagactcataataaggccctcctttttcctttgcattttagtaatagagatgattttcctttttgttgatgttgctgctaaccacaggaaaccatcttcatcggtactccaaggttctggaggcccatttgggagacccaaaacctcggcctctaccagcctgtccacgcttgtcttgggccaagccacagcctttaaacgagacggcgcccaggttagtgtccgcctgtgcccttccactctttccacggggcttgtgagtcattgcttttcttataggagagaatggaattttactgacatcactatcgaattgtcagatcttcaagcttgtcatttgcgacagttatttagtgaacctcgtattggcctttggaaataggctctttggtggtatcctgcataaaaagtgctttggataattagcattttgttacatttggttaattcttttttaaaaagctgggatccaacagagtgatttcatgggagctggagctctaagtcctgtggttggggagttaagagctgccggctgcagtgtgttccctgtttcagacattgatgataagatacagatagttcccttcttctgtcatccccgggggccgcggttgcagcctgtccaagaagagcatgcttctgtgtcattacgtcctgtgctgactgtgactgggggtgaaagcacccgcctccgatggcaggctgtgacctctgctgctgtctccacactcctgtttgcagtgccgcctggatcccttctccagctcactaactcggcttcttcatttgcatcgtttcctttccgtacccagtgtttgaggtggacctgctgtttccctctgtggctaggaccagctcggcatggctggtcccctttttctccagatgccacccccttactttttctgtgacgtccctggcccaaacaggacaatataagaagaaagggggagcttctcctgagaaaggggatgaagccagggacagctgtcagagctgtgtccgtggccgggcaggcacacctcccaccccatcaagcaggagtcttgccctccgaggccccctggccgcctggtacccggcccctctccccagcccctcaggcaggaggctaccctcttgacaggccccctgcctgccttcttttcctccagtgatggtatggggccagggacggaggccaccttccgtcctgtaaggcgaagaggagagtgcccgtgtgaaggtggcgaggctgccttccgcctttactcctcatcataaaccgaaagtg

SEQ ID NO: 84408 - DNA, 1019 bp, Homo sapiens
caggtcatggctgtgtgtgcttatctggctgggctgggccactgagaatgcatgtcttatgagaataggggaatctggaacatgttggatttactttgacctaaactcgtgacttctgaactcccatttcccccacttttggggactaacttaaaaaaaattcctttagagatttcttcttaaaagctaaattccgggccacgtgtggtggctcacacctataatcccagcactttgggaggctgaggcaagaagatcacttgagcccaggagtttgagaccagccagacccatttctgcaaaaaataaaaaattagccgggcatgctgtcatgtgccttcagtctcagctacttgggaggctgaggcaggaggatcacttgagcccaggagctcaaggctgcagtgagctatgattgcgccactgcactgggtgacaagagcgtgactctgtctggaaaaaaaaaaaggaattcctaaacaggcttgttgacttcgcagactgcttttggcttctggatgccctcctccagtacacatcgtatggggtgacaccgcctagcctcagtcactctgggaaccgccagcgccctcccagtggagcaggctcagtcactccagagaggatggaaggtgagtggatgggcaggatgccttggggagggaattggatccagctgaacatgatgctacttcagccagtggctgtgcctgccagcaagtggggccagtttgtgtgcgccgctgagtggttttcgtaatggctgcgggtagagcagcactcagcggctctaacctgccgagaggccatccttagtccccagagggccatgatcgaggacccagtgtgcagctgctttcccacgtgcaccccgaccctcacgccactctgagtgtgtttaccgtcccgctctcacaggtgaggacagtggctcctacagatcttcaggaagaatcaccaacattctagagcacttgccaggtcccatgcagcaggctgggatgctcccatggattacc

SEQ ID NO: 84409 - DNA, 2231 bp, Homo sapiens
ctgctggctgccctttgtgtaggtgtctgaaaacataggcctttcaggataataagaggggacacaatttaggttttttttttaagatagaggcagcacctttgcaattgtaaatattatgtactgccatggcaagtaaaaatgaaagtggatagatacggaaatacacacaaagtgaattttgctaaaacaaatcaatggcacttaagacatttctattctaaaaggcttattcttaaggcttttctattctaaaaatttgcaatgttttaattgaatattagattttgtaaatgtggtttatttgtcacgtggatgaaatatcaggaaataactcactgctcagtggaaactctcatggctgttgttttttgttgtgttgtttcaggattggaggttttaaagcaggaaacagcagttgttgaaaacgtccccattttgggactttatcagattccagctgagggtggaggccggattgtactgtatggggactccaattgcttggatgacagtcaccgacagaagggtaggaaaaacgcagatggactttgtgacttcggcactcagatcctttcttccctttgtctctggaaaggcgcccgtgagatgctggcagatcagccgacatctgttcacttgagccaggctcagctggagatgttgcagtcactttgattgcttggaatattttgataggtgtctgagtgtgcacacatttaataagcaaaacaaagctacttgttggggccatgatgcctcttctccatcttcaccttcctgaggccagcggaggcgggactcccgcgttgtggtggagagtcccttccctgacttccttggggcctgcccctcccaggcttcctacgccgtgctgcctggactttgtgggcactgccacgagggggcgcccttctctggtctgactcactcttttactggagggctggctcttggctgtccttccagacctggaattcgggcttttcttagcctttatcagtgaagagcgtttgttatctcgaggcgtgaaggggaggcaaataggcatgccagtcctcttccctccgcgtctttatgtcagtctctcgatgcatccgttggatttgggggcttgaggttgggcacagactatttttctcattttgtaaaggggagaaagaatggtaaaagtgctccatgtttttacctggtgagatgataatgacaccaggactgaaaggcaaccttctaatgcgctgtgaccactggggaactcgaggcacagggcgggtggtgagtgacaagaatgaggcactaacagcgtgcgctgagaggtgtgtgtgtgcccctccgtttcaggctgaagttgactacattcctggcatttatgtaaatccctagactgggatgggtctttttaaaaatcaaaaatgggccgggcgcggtggctcacgcctgtgatcccagcactttggtaggccgaggtgagtgggtcacaaggtcaggagttcatgaccagcctggccaacacagtgaaaccgcgtctctactaaaaatacaaaaattagccaggcgtggtggcgtgtgcctgtagtcccagctgcttgggaggctgaggtgggagagttgcttgaacccgggaggcagaggttgcagtgagccgagatcgtgccactgcactccagcctgggtgacagagcaagacactgttttaaaaaataataataaaataaaattaaaattaaaagtgagggttaaagtcacagttaaaggaggttaatgttttatttccacagagattttaagacctgagatctcctggtaagagtctttattaaattgtaaatgcctgagagggtggtcctaggccttacatttaaaatggcagcttttttcatctttcaggggcattaagcacttgaccagaagtgccctttaatgagaggaaagtacttaatggcatttttctcacacggatcttgtctagtccaggttgatgttaatggaacttgaaggggcagacacaggagaaacaagatggaaacagaagctccaggtttcaataccaggttgcgccttccctctcagaaaggatcctttgtgaacgggagctgttgctagcccagtgcctcgactctgaggtgtccctgaaaacaaattgccctttctctgctgtcacacttccagtggtcagggccctgccgactcgaagcccagctcaagtgaacagatgctgcatgggtgttgag

SEQ ID NO: 84410 - DNA, 2009 bp, Homo sapiens
atatgagatacttcaggtttaaacttctgtttaattcttttccactctctgttactgagtatatataaatttaaatgcaccaaaggaactgtttcttaaagaatatttcgagtaaattattgtatatttaaatattgtatatttacaataattaatttacttatatttatagtaattaatttactcaaagggaataatgtccttccctttattgggatcaaggactcccaatgtattataaacataatcacctttatgttttgaatcggtttctttagaatctgtgactgaacatttctatgcttctttctcatctccttctccttcactgaaccttgctgggtctaggctaagcagttatctctggtgcatttcggtaaagtactgattttcatttcataaaataaattttgctttaattaattctacacatcagccgaagcacttaaatttgcagttttacccaaacccagacagttggtttcagttgaagccttagtgtggaaggactggattgtggcaggagaaattgagttttgtcacagagactaaataactgtgtatggagtgtcttcattccctgttccctgtgtgtctgttaccactttcccaggcagtggtggatgccggataccggaggagctaacatcccagctctgaatgagctgctgtctgtgtggaacatggggttcagcgatggcctgtatgaaggggagttcaccctggccaaccatgacagtaaggctctgtttcctgagggcgtggtcttaggtgtgagagcagaagctctacacctctgaagtctagatttcttgagaaagagaatggtgatccctcagttagctggagtctgtggaaagaactcaccagtattttcaaaagtacatctgtgaggctctagttttgtccagattttttttaaatgaaaatattttatgtagccattcctaattttagtgccacctattagagtctttatgtagtagtcccaaataggaactacctcacagcttcttaattatttacaaagtgctattcatgaaataactttgtgtttcccgtgtaggaagttcccccacaggtaaggttttggtagctggttttgagaacaacgtcgtaagcattcttactacccattctgcaggtctggacagcttgttttgagcctttcactgctctgagttataacatctattcagaaacctaatgttaatagtatttttctttgattataaaatgtattcagaaacctgatgttagtagtgttttttacttgaattttgaggagattacttgtactttatgtgtgacaaggcaatagcagctcctccctcaagattaaaaacaattaaaaaaatacatagcatctgaagaatgtattttgggtaaacgagtagctattatttattaaagtgttcggcgttcctgtgttcccttgactttgaacactctttcctagtgtattatgcgtcagggtgcagcatcgcgaagtttccagaagatggcgtcgtgataacacagactttcaaggaccaaggtaaaggatgccattcatgggccttttgcttcttctttctctcgctcccttttcccccgcttctctctctgtctctcatctctgtctcttttttaataaaagctttattgcatataatttacataccataacagttgcccttttaaagtgtacaattcggtggtttttagtgtatttacaaaattgtggaaccatcaccattgtctacttccagaacaattttatcaccgcaataagaaatcccatgcccattcgacattttggtttcttttaaaatttattgcaatattacttgaatggtacccaccactttgagaggctgaggcaggcagatcatgaggtcaggagatcgagaccatcctggctaacacagtgaaaccctgtctctactaaaaatacaaaaatttagccgggcatgatggcacgcgcctgtagtcccagctactcaggaggctgaggcaggagaatcgct

SEQ ID NO: 84411 - DNA, 1066 bp, Homo sapiens
cagggataatttaaggatgaagaatgaccctttagactggtaagcacctcacaggatgcacttcacctccccagcctccgtggtgggaggaggcaccactgttcccgcaactcttggaaagatgttgctcagcttctcgtggagcctggactctgatgacgctgagatgttcaggcttttgccatgcacttagggcagcctgacttctcttttgaaactttcacaagtatgattatgcagtaaaaagcttgaagttctcttttccttccttctcccattgcgccagtcagcaaagctgtcagtcttaccctcaaactgcatcctggatccttccatctctggccttctccctgctcccaccctagtccatgccattgtcatctcttgcctggaccacatcagcagctcctgagtgccactgctgttgctgttgttgccctaaattccactcctcttctggcaaccttggtaatcttaaaacaaattctaacacagtttgcctcaagctctccagtgactgcctattctgacttcctcacccggccaagccccctggtgtgacccatgcagcccttcagaagctggcactgcttcccccgcagtccccatagccgctctccctgtgcctgttccctgcagggcagctgggctgactttctcttggtgcattagccaagctcatttctgcttttatgtttggactacgtttgaactccatgctgaaagtaggggaaggggaagcattgaaagatgtgaccaggatagttacagagtcagacttgccttttaaaataagatgtctctggcagccagattggaggggctcagaccagagacgggtagacaggaagtggtgggaagttcatagaccaaggcaagcccgttggcctgcaggagaggacctggagtctgtgctgctgggaggtgagaatgaggtgacccctagagggtgtatacagtgtcccataggaaagtgagctcatttgggagggacggggatggaaagttgaccagtggcagtgatatcagttagctgtgccgctgtcttagcaccgtggccctgcgt

SEQ ID NO: 84412 - DNA, 1056 bp, Homo sapiens
tgtttttgcccagggaagccctctagagactcaagtccaagtttccattagggctggtcacgtactcattctctgccagtgacaactcccaaagctccagacttgcaaaagcagaggtgtccctgcacatcacactgtctgtatagacagcaggctggcacagaggccttatctgtgcaggagcattccagagccaagttcccagatgccagcctagggcagcgctgtaagcaagcccttctgaagctaggtctgctttgttaactctgtcttgtacagttgtgttgcttcattgtagttttctcatatgatctactctaacactgtattctttatttcagtttgagccccagctacatagatctgactgagtgtccctacatgtggccctactgctcccagcccatctactatggaggaatgccgacagttgttaatgtcaccatcctcaacggcatgggagtcacaggaagaattgtagataaggtgaaacttctctctgacttggtctctgacttgatggtgaacttagacacagcccagacctttaggccatagttacttctgctgaagttaaaaaaggaaaagttctaggccgaggagagaggatcacttgagcccaggactttaagaccagcctgagcaacaaagtgagacctgtctctacaaataataaagaaattagccagggatggtggtgtgtgcccgtggtcccagatacacaggaggctgacgtgggaggatcacttgagtctaggaggttgaggctgcagtgagccaagatcatgccattgcactccagcctggatgacagagcaagaccttgtctgggaaaaaaaaaaaaaggaaatagccctgtctagggtaccagggctattggaagtagtgatttgttatatgctaagtctgttacagaataagtcagggtataaattaatgaaaccaattttacttttttgctttggcatcttgagtttggctcctgagtcagctaattacatttgatttttcatctatacaattttgcgcctataattaaaggcccagttgtagtat

SEQ ID NO: 84413 - DNA, 1043 bp, Homo sapiens
cgtcagctctctgctgttgagtaagcgggcagccgaggggttgttccttttcccagcagcttctttaagtacagatattttcagcaacaaggaagcctttcagtctcctcatctccctgcagcagatgaaactgccgttgtgatctctgtgtgtgacagtcgctcataatggaagccgagcagcagtggcgggcctcccgagctccagcctgatgatgctgtgaaaggcagtggaacgcaacccttgagttcactttataggcaggaagaggaggaagattgttgacccatagctttgagcacttcttttcttctgtcattaagaatctactttatctcctctacttatgtcagatttcccatttagaaaacctgcctagactccaacaccaaacatcatcacatacgaatatttaggaacttaggagagttaagttttccttttttgtgtactgatattcccacctcaattttaggaattaaaattcacttgtatttataatacataaatacacaaaaatggatgttgtaacgctagtatcaccaggctaagttcctagccaggtcacactgtgtgttaaagcttgttcagatgcattctcatggtgaaactgaaggtggccttaggtctatgtcgttctgaaaggcatcatccatcagggtggctcatcccagacaagcctcccaatctggaaacaaaaaggcaaggattggctttggaggcggcggtcctcactcagacctgtgcctcctgctagtcctgtgtcgtggcccctccccaggatctgaatgtgctcctccttctcccagccaggcggtgtcccatggcatcttcttcctgtgaccagcaggcttcctctccccagaggagtcagtacctcctatacattcatgccttctgcagcctatgtggttgtttagttgaattatcacaaaaatatgtgttactgatgcatttagcataagtgggtcccgtagaaggttgcggagtggtcagtcctggattgggtacagagatgagtgtgcactcattctctcatgca

SEQ ID NO: 84414 - DNA, 1049 bp, Homo sapiens
gcgtgcggggttctggcgtgaaaggggggtgccgggccctctcagggaccagtgttgcttctccagtggttgcaggtgctgtcaccttgttagtgaggtgagtgctgccccctagagaccagtagctcccacgtcaggacaggagcactcggtgccagcagagcaggagtcgtgtcttgcttctgccctgtcttgggtttgagagcttaggcccttcacagccttgctctgtctctccttcttcatctctgcaaagaggtaggagtcacttcttttatagttagatgaagtgaatgtgaacacactttataagcctaagtaaacaaagtgctgataggcaaaataacctgtttctttatgtttgtgttctgttttctaatatcccatttatgtgctagaactgtgatttttatatccaagcaagcataaatatcaggcagggaacaaatagtaagatatttccctgccatatatcctccatttccttggggattcactttaaaaaagaaaaacaaaaaacaaatcctactgcgtatatgtaagatatacaacatgatgttatggaatacatatagatagtaaaaaggaggttactctagtgaaacgaatgaacacatccatcttctcacagtgttacccatttgttgtttttgtgaaggggactcaccttttaatgttctctatagcaaaggatgtcagagccaccagggactgacagtcaccactctgctttgtctcactgaatctcatgcagttggaatggagcttagtgactggcccttaatcttgcagataatgaaactggaagaaagttctcaaggaggccgggtgcggtggctcacacctgtaatcccagcattttgggaggctgaggcagcaggtcacctgaggtcaggagttcaagaccagcctgatcaacatggtgaaaccctgtctctactaaaaattacaagttagccaggtgtggtggtgggcggctgtaatcccagctactcaggagattgaggcaggaaaattgcttgaacccgggaggaggaggctgcagtgaa

SEQ ID NO: 84415 - DNA, 1912 bp, Homo sapiens
agctgctgtgatgagcaccggctgattctaagcggtgtttcccagtttaacttattaattgatttctgaggaactcacctttaggtgaattgggttcctgcccgtttaccctatctagtagtggtaagcagtcctcctcagtggtaggtgagatgatattttttgggggaggggagccttaagaagttggagaaaccattgagaacagcttaatatcaactctgctaacacagaaacaattgtatttagctggacaaattcaaaataactgctacagttaataattcagctgtttggggtttaattatgcagcacattcacccacctttacctgtcaaagtttgatgaaaaattagacgctcgtgcagaacagcagttgggcacctttgccctcgctgtggccgaggggagcatctgcccttctcattcttcagggtcagagcatctcttggtgtttaacgtcacatgccacactcggaggcctcagataagtccctggaaagattcccaactgcctgggaacactgtgggcctcgtccacactgtagccactttacaggatagccttctgcctgagcctttgtcctgtgacagcgtcagcccccagcgtccccgccactcagccccaccaggggtccccgcctcccacactcacgtgcctcttcctggagctgacctgttggctggggaccattctctcatgtgacagtctgtgcagggcaggctgcgtgtcctcccatccacgctccctcagcatgttccttgtgctgccggataatgggaaactgcatccaccactttgtccccagctccctgtgtaaatgctctcaccgaactgtggtgagatgtcatccactttgtccccagctccccgtgtaaacgctttcaccaaaccgtgatgagatgtcacgtccatggccttcatcaccagccagctttttaatggcatttgagaaatgtccttccatcatcacagctgcagtggaggatgcctttactcggtatcccagtatgtgcatccatggtccttgggtttgatggtcagaaaagggcttcccttcaaattgggctcctgttttctgacagaatatgagatcctattctaattttcgttttgccccaattcttaagaagcttaagcaagtacttattaaaacgttatcccaagttagtcgtgtggttatcttgttccttctcagtggtttcttatttcctcttttacaaccgtttgaaacatccactcataccgtgtacttttttccttgtaaagaaacatgtttgggtttttttacattttaattttctaatttttctaacatatttctaattttaacttatctagagataaagcagtttccagtttctggtcttggtgataagccagtgtccactttccagtctggcatgtcagcaaaattaaaatacttatcttttaattgctttatgcctttgccattgttctggttgttataaaatatatttttaaaaatttactttctacattatcgtttaagcttattttctgtattgtagtgaatttctttgtttttttctctttttttttggggggggggcgggtgcggggctgagggggacaggatctcactgtgttgcccaggctggagtgcagtggcacaatcacggctccctgcagccttgacctcccgggctcaggtgatcctcctgagtagccgggactacaggcttgtgccactacatctggctaatttttgtattttttgtggagatgggggtcttactgtgtagcccaggctagtctggaactcctgggctcaagcagtccacctgcctcggcctcccagagtgttgggattacaggtgtgagccttgcgcctggcctggagtgaatttcagactaaaaccagtaccttcctaaggttatacagttttt

SEQ ID NO: 84416 - DNA, 1113 bp, Homo sapiens
caacctccgcctcccaggttcaagcggttctcctgcctcagcctcccaagtagccgggattacaggtgcacaccaccatgcccggctaattttgctatttttagtagagacggggtttcaccgaattggccaggctggtctccaactcctgacctcaggtgatccacccacctcagcctttcaaagtgctgggattacaggcgtgagccaccatgccctgccaattctttcttacctaaacatgcaattcgtgttttcctcaaagtgactagaaagtcagcatctgctctgtgcactgcgtgcttctccgtcccgggtggtatcctctaaaaatgcaagttgccagcacatccgcctttataatgggccagtgctgcttttttagaactgtttttagacgttgtgtatggttttttttttttttttgacagttatatgtttaatgaaagggatactttcattaaataaatgctccttttgtaggtgtgggaattaacagctaacaatgtaatcatggtttctgctattggcaatgacggacctctttatgggtaagtagccccagcagggatgacctcggggattttttcccccttaaataactgaaaaattgttatctgtttgtgtatctacctatggttacttgtttatgtctgtctaaaacttgtcttaaggatgttttcctcatgtaaaaaaatactataggatgtagatgaacacccaggtactcaccactcacctcagcagttgtcacctcaaggccggtcttccttctatttatatatttttaaaattttgttacaaatagtaatttagaggcctaaagtttttattctaactactttttttccccaaaaatcaatcagaaaagtgaatctattagggattctgcagtgttgatgagatctgtgtgcaaagcatccgggtaaagaggcaaacggaagaggtttctgcctctctctgaaagagcaggtgcgagcacagtgacactcattcacaggggaagtgctggcgggcctaacggcaacatggccggtgctttgggagttgatgagagggatcatttaggagggaggcagggaggacagtgtcacaggggggcctttgtgctaa

SEQ ID NO: 84417 - DNA, 1056 bp, Homo sapiens
agccttgttccttcactcttcatttggaaactatagaaaagggagagggtcctagtatttgtttcttttttcgttatttattttttaaggttaatttttgaataggtaatgcatagctcagaaatgtcagaaggtaacacagtgagacccccacccctgtccccgtccagcaggttctttcctcactggcccgtgtgtcctgtgtgatgatgttcctttcttatacctcctcgtagaatttctttggtgtatatgagaaaatataagtacctggtcttttaaaaacctttaaaaacataatcttaatcattacattgcttctcttcctaccataaacttaattttatattttttaaaaaagcaacagctaaaggtgatccacaaagtaatgaagcttttgtaaggaacataggagcacttgaacatcagaagactaatactgtgaaataactgttactgctgccatttgtccttcagtctgtttaggaatgaagaaggttagatagataagttgaactattccaaaatgcttaacttaatagaagtgccttgggataagtccttttgtaggagaggggcggttgggagcttgggtgttatctaggaaggcattctttgtgtagagagctgtgcatttcacctagagagataggccacctgcagaacacagctgcctcttccttaggttcagctccaaggacttagaacttctacgtgttgtattttactctccagagcattatgcatgctcaggattcatttctggttttaagtaaaaaaaaattaagagaactacttgtaattttaaaagagccttagaaataaaaactgtcctagcactttaaaacttgattgaaacactaagcagactgttataatatttaactaggtatcttacacatcttggtttttggacgccttcaactatgccattttaaagaagatcgacgtgttaaacctcagcatcggcggcccggacttcatggatcatccgtttgttgacaaggtttgtggagtcactgcacacggggtttgggtgacagctcctgctctttc

SEQ ID NO: 84418 - DNA, 3890 bp, Homo sapiens
gccttcttctctttggctgctagaatgctcaggtccagtgtgcttaatatttttggtgttattttgttgtccttacttttttccatttttctcattgattttattgttttatttttgaagatgcctaaaaaaaattttcccgtgaaagcagtgagtaataagtaaataaaaatgaaataatatgtttcatggttgtatggcacattaatttgtcttaaaaccaggatatctcttttaccctcttatttattttattattttattattttagacatagggtctcactttgttgctcaggctggactcagactcctgggctcaagtgatcttcccacctcagcctcccaagcagctgatctacaggcacctgccaccttgcctggctgacccacttgcttaaattataaatacaactaaatcatacctggctatgtcagtttgctactaatgtctgtgtgcactgttttttgtttcatagattggctcacagtggttgattgatcaaccccattggacgttggttctgtggtacaaatggagtacaggactcagtcgtcacggcctgagtgagagaagccttatttccaagatggagaagaagcggagaaagaaatgaaagcctctcttcaggctgaaccacaaaaggccatgggatttaacttttatttatgttgggcaagactgtaagatggctgattagtaatgttgcagcttttagctgaaacaaaaattcacttttaatcaagaagaaaaaagtgtgatttgaatatatgcaattttatgatcatattcgcttgtgaccatgaagcttgtcaacatctggctgcttctgctcgtggttttgctctgtgggaagaaacatctgggcgacagactggaaaagaaatcttttgaaaaggccccatgccctggctgttcccacctgactttgaaggtggaattctcatcaacagttgtggaatatggtaatgatgttgtcttaagtattaggaactcccatcctatttttttaaagcttacttaatataaaattagctattgctgaataacatgttcctcttttctacagtaaatttctttcttttttttttttttgagacagagtctcactctgtcacccaggctggagtgcagtggcatgatctcggctcactgtaacctccacctcctggattcaagcaattctcatgcctcagcctcccaagtagctgggattataggtgactgccaccgtccctggctaattttttgttttgatttgttctgttttgttttgttttgtttttgagatggagtctcactctgttgctgaggctggagtgcaatggcacgatctcggttcactgcaacttccacctcccaggttcaagcagttctcctgcctcagcctcctgagcagctgggactacaggcacccgccacaactcccagttaattttttctatttttagtagagatggggtttcaccacattggccaggctggtctcgagctcctgacctcgtgatccgcctgccttggcctcccagagtgttgggactacaggcatgaactatcgtgccaggcctttttttttttttttttttgtatttttagtagagacggggtttcagcatgttagccaggctggtcttgaactcctgacctcaagtgatcaccctccttggcctcccaaagtgctgggattacaggcatgagccaccgtgcctggccttctgtagtaaatttccaatgggttgagtgcacagcacatgaatgttaactttgcttaagtttgttttcccagtagagtaagcttatatgataaaaggaaattgacatgaattatttacctacaccttcttttctttttcttttggagacagagttttgctcttgtcgcccaggctggagtgcagtggtgccatctcagctcattgcagccttggcctcccaggcacaagtggtctcccacttcagcctcctgagtagctgggactacaggcacctgccaccgtgcccagctaatttttttatttttgttttttcttttttcttttttgagatggagattcactcttgttgcccaggctggagtgcaatggcaccatctcagctcaccgcaacctccacctcccaggttcaagcgattctcctgcctcagcctcccgagtagctgggattacaggcatgtgccaccatgcccggctaattttgtctttttagtagagactgcgtttctccatgttggtcaggctggtcttgcactcttgacctcaggtgatcctcctgcattggcctcccaaagtgttgggattacaggcatgagccactgtgcccggcctgcccagctaatttttttattttttgtttcaccatgttgcccaggctggtcttaaactcctgagctcaagcaatccatccacttcgacctcccagaatgctgggattataggcatgagccactgtgcccagcctacaccttgattctttggaacaggtgccattgtaattggtgaaggtggggagctgggaggtgcagaatgtttatgttctaaagtttgagtgaccagatgtgaagaactgagcaaatagtctcacataatccactctggaattttgttactgttttcgttttaagaaacactaactgagcattcagttctctgaatttctttttcctacttgataaaaattatatacatttctttgttgtgtattcaaacttctgtaggtatttgctttttaaaaaaatatcacgggtatctggtttcgaatgatgtattctttgtggttaggtgattcatagagatctttttttttttttttttgagacggaggcttgctctgtcaccaggcaggagtgcagtggtgcaatctctgcttactgcaatctccgcctcccaggttcaagtgattctcctgccttagcctcccaggattataggcgcccaccaccacacccagctaattttttgtatttttagtagagatggggtttcactatgttggccaggctggtctcaaactcctcacctcgtaatctgcccacgtcagcctcccaaagtgctgggattacaggcgtgagccaccgcgcccagccccatatagatcatttttcctcaaagctctgcagacagctgtctaggtacttaaactagtctttgtgttttctctcgtctgctgtgggctttaagataatttttcttttgccagattttagattagatacaatatagtatatgttataatgtatgtgcgtaaatcttatttttgtttgtggtgattggtttcagaatatattgtggctttcaatggatactttacagccaaagctagaaattcatttatttcaagtgccctgaagagcagtgaagtagacaattggagaattatacctcgaaacaatccatccagtgactaccctagtgattttgaggtgattcagataaaagaaaaacagaaagcggggctgctaacacttgaagatcatccaaacatcaaacgggtcacgccccaacgaaaagtctttcgttccctcaagtatgctgaatgtgagtattgtgactgtaggcaaatttctctctgctgtttactttgaaaatctcaaactgcagagtagttgaaaaatagtacagtgagtatccgcatccttccatctagtttgctaattgtgaacattttcctggtaggaattttttagtttagttttgtttagtgcgcagggtcggtgttgggggggcagaattattttttaaaaagagacttcgtactgttctggtagaagaaaatctgagggtttgcagtagtagatggtagtgatctttgtttctgttggaagcgattttcgccagcttcatctcaaagccttcagacttcaaggctgcggccgccttctcgtgctgaaagac

SEQ ID NO: 84419 - DNA, 1923 bp, Homo sapiens
caggatggtctcgaattcctggcctcaggtgatccacccgccttggcctcccaaagtgctgagattacaggtgtgacccatcgtgcctagctgttttctctccttcccaaatgtagtttttatcaccagctaaatactgtatgttttacttgtcttagttacggtctgtctccctgcactggaaggtaagctccgtgaggtcagagatttctatggtattttgttcattactctatccctactcctagaacagtgcctggcttttagtagtttctcactagatgagttggatgggtgaacacaggagctcagcagtctcgtcgttgggctgtgttttatctctgtgctcttcactgccattggatggaagaggtccgtatttccggctgttggctggggtgtacctgcttgaggtcctctcttcccccctcgtctttcagcctcgctagacggacacctccttgcctccctcctcaggctgggcagtgctgatccttgtgcacatctgtgtcttcctgtggttccagtgttgccacgcttgggatgctctgctcctccctccctcacgcccatctttcagtgctactgagctcagattcttccagagctgctgcagtgccccctccccagcagaagccgcctcttcacagcccggagagaactgtgtgtcagttcagcatctgtggcctggatgcctgcctctcctttcacattttcatttcctgcattttgtttagttgtccttaaatttaactacatcacacttggaaggttgtgccctgactagctaatagtccgtgtttgttctgtagtacctgatagtatcttaacttggtaagtattctaaaattgcctgatctaatgaatgagttaaggtaaaatgtcttatgataataattgccttctctgttttccacataccccacatttattattatttttaatttggggaagaactgattaccttagagagtttttttcatttatttattttttttttttgagacagagtctcgctgtcacccaggcgggactgctgcagtgtcccaatctcagctcactgcaacctctgcctcctgggttcaaacgattatcctgcctcaccctccggagtagttgggattacaggcatgcaccacaatgcccaactaatttttgtatttttttttttgggtcggttggttggtttttagtagatatggggtttcaccatgttggccaggctggtctctaactcctggcctcaagtgatccgccggcctcagcctcctaaagtggaatcacacccaggattacaggtgtgagccaccgcgcctggcctttttttcatttgaaaaccgccaaatcctttcttttcatttcttttaaaggcaagtacctgcctaagttgtaagagaacatcagccatctcttctgcatgggctgtgttaaaatttcttacctaagagtctttacctttgagtgaattattttagaacaggttgaattaaagttgatttaacccagttaggtctaagattttctcagtactattacttaattatatttgtgttatatggagcccacatgtgtcatagattctttagcttgaggcagaaaagttttaagaggcttttttgtttgtttgtttgttttttaagtggagagagagtctcactgtgtcacccaggctggaatgtagtggtgcactcttggcccactgcaaccctccaggctaaagcaatcttcctgagtagctgggactataggcgcgccaccatgcctagctaatttttaatgttttttttgtagagatgaggtttctccacgttgcccaggctggtctcaaacctctgggctcaaatgattgttccttcctttttaacaacaacaacaaaaagcctgccttgagtgagaaacgcatttaataaatatcttttaaat

SEQ ID NO: 84420 - DNA, 1041 bp, Homo sapiens
gggattacaggcgtgagccactgtgcccagccagcctgttgctttcatcatcacatctattactacctgttgtcatctcctgcctctctcttatagacacccttgtgatgacacctggcccacctggatcaccgaggatactgtctcagtgccttcatttagtcacagctgcaaagtccctttggcctgtatgcttttgtgtgtaaagtaacattcccaggttctaggaatgaggatgtgagcatctttgtggggaccatttttcagcctactgcaggaggagcatttgaaattgctgcgtggcgttctgtggtgtgcaccgaccataattattgagccagtctccttgtttatgcacattcagatggtctccagcttttcctgctcataatcttgcagtgtgtatctttggacataaagccttatgtgcttccagattcatacttcttggattgaatccctaggggagattttaggaaagcaggcgacctgcctctgaagagtgtggcctctggagccaggctgaccacctgagttctcagcccagctgttctacttgctggtgttgtggccccaggcaagttgcttagctactctgggtctcagttctcatctgaaagtgggggtagtaacgggttgttgggaggattaaattagttaatatttgcagactacttagaatggcacctgctacatcataaatgctcagtgagtgtttttcttattttggatttgttagacgaaaagtttttaatgttcatttttaagcgttttaatacatatgtgaaaattgccattctaaaaggttgtttttttttaatattcaccagcaacatatgagagtacttattttattggatttgttaacttaataaacataatttttattctagagggggtgcctcaggtttttctgtcaaaatgttacttgatttgtttaatgtaaatcatagaaacacaggttaatgttagcagaaatttaccatgaatcctttcaggaattctgtcaatttcctagaatgagatatgcttttagtttcc

SEQ ID NO: 84421 - DNA, 1405 bp, Homo sapiens
tggcggcagagcgagactccgtctcaaaaaaagaaaaaaaaaaaaaaaaaaaagggaagacacctttgttttaccatagtttggtctggcatgacttaattgttagcctgttaaacaatggtaatatagccaagtatgcaattagttctgaaggtggtagtttttcagccgacttttaattggactggatagtaacctttcgtggtctaaacacaattcagtctcctttggagctattttagtaaactagtttattacaaagcaaggcatagctgcataattagatgattgtcgggtgatacaagtcattttcactcacctaaattatgttctaattatttttaaagagataatttcagatgtattttagttatgcccagaattataatctttgtgatattcttttattgtgaaaattgtaagtgggagactccaagagctgcaaagaatgctagccaccagctaggccagttgcttgcgcaagtaatacatttcttctactgagtctcccttctactcaaatcccattaaatactattttctatttctataatttgaacggtgtctttttcagttagtacttgatgtcaaaaatttttaattatacgtgtattagaggtgtaatcattctcatgaaaaacccataggtacgggaataccatctttgaacgttatgcctttatatggaaagataaccaggtcttctgcataaagaatttatagaaattaaatccagttaacatttagtggatacagtaacagccctaagtaggctctctaagttaagtgatattacaaatgataataagcctttcagaatgaactagccaaaagtttaatattttcaaaggctatcttttccttaggctggcaagtagctgtagacagatctttgagaacaatttgtaggagatagatcccttttaagctctagtatatatacaaataaaattaaatctagcatatatatttgaatttttgtgccactctcttaccagaaagtatgatttattcttttttttttttttttttttgagatggcatctcgctctgtctcccaggctggagtgcagtggcttgatctcagctcactgcaacctctgtctcccaggttcaagcgattctcccacctcaacctcctgagtagctgggattacaggtgtgtgccaccacacccagctaatttttgtatttttagtagagatggggtttcaccatgttggccaggctggtcttgaactcctgacctcgggtgatctgcccgtctcggcctcccacagtgctggggttatagctgtgagccaccgagcccggcgtattctttttttgtttttttttgttttttttgagaccgagtctcgctctgttgcccgggctggagtgcagtggcgtgatctcagctccc

SEQ ID NO: 84422 - DNA, 1040 bp, Homo sapiens
tctttgccttatctcggtctgtgcatattgcgctgctggtttttggaaatgcggggattctgttcggcgaactctcagaaccagattgccttttaaacctgtagcttcttaaaaatcttgcctcgccttggcatggttgcgctacctaagaccgttgtggatcgtcagtatttttattaagatgtttacctttcatattgggttgagcccctgagaatcttggcctatttgtctacacaaattaagttattagattctgattgacacttcgaaattacgtggagtggaatacgacctgcgttgaattctggagactcatcctttagtctgaactgtgtaggtaagccctcctaacgtcaaggtctccaattgtatgtctacgaaaaggagggcttgcagaagagaagtaattcctctcatttttttttttttcaatctggagaatccgcttttattatttatacttattttttaatgtaagagcttcattgaagtagaatttacataccataaaatccacctgttttaagtgtactattcagtggtttttagtaaatttacagcagcacagccactaccaaatccacttttagaacatttccgttaccccaagacctctgatgcccagttgtagtcaatgcccatttccaggccccgccacaggcaacctttcatctactttgtctttctagatttgcctttaatgactatttcgtatattcagatggaaacatatgatatgcggccttttgtgtcaggcttctttcacttagcatgttttcacagttcatccatgttgtagcatgaatcaggatttcattccttttatgaccaaataatattcagttgtatggctataccacattttgtttaagcatttatgcagaacacttttgacaaataaaagtttattttatgctctaatgtgtgatgcggatgacagcaaaactgttgattgagaatgggagctgggacctgacccagacacgtgtcaaacgactgcactccccaggcaccccgtataatcaagagttggtcct

SEQ ID NO: 84423 - DNA, 1042 bp, Homo sapiens
gactccatctccaccgctctccacctcgctcactctggctgcctcattttctcacacacttcactgctctaggattttcacagttgttgaccgttcggcctggaaccctcttcccagttgcgtacatggttctctccttcactaggttcaggctgtgctcaaacgccaccttctcaacgaggcttttcctggctggctttgctgaaaccacgccctcagcccactaccagatccccttctcctggacgggtggttggctttaatacagttctcactactgcttggccttgggctacatatttgttttttgttatctgcttcctcaaagaacatatgcttcccgtagtgcacttttcactcctcaggaactctggcgccccttaccagcttccagtctctcgaggtggccagtgtggtgcttggtccttgtttccaggatggacttccccagctccctccgccctgcattgtttctgaccggcccccttggtctgagcgacgtccctgacctctctttcatgtgcagctggcgagacgcactgactctgccagaggcccagccccagaactcagaggtgaggatgcaggcagggggccctggcagctccagggacatcccttccctgggtcccccgtctcacattcacatcagttgacaaggccacagagtggtggcattcacacgagtctgctgagacacaggctctgccacctcctctggggtacatgggctaccctgccatccctagacggatgcccccactatgccgggtcccttatgagaccgtgagaatgctgcctgaatcagtcggttgacccctcccttcctggaacggagagctgagttgagcgagaataaacaagtgaactttatccaatggataaggtgtttacaaaatgtgatcagagcttggaatgaaagcagaaggatgctgaaacagcatagtagggttgggagaggggaggatagacctgcagggtttctgctgcctctggagggacactggccctttgcttggaatcctcagccgcctagttcccc

SEQ ID NO: 84424 - DNA, 1788 bp, Homo sapiens
gccagggtcagaagagcagccctgaagctgatgtctgtccccacccggcccgcagcctgccccccacctcggaaggtggcctcccgcacagcccacccatgcgcctgcaggcccatgtgctcgggcagctgaagcctgtgtgctacgtggcgccctcgctctgtgacacccacgtgggctgcctgtcagccagtgacaagctggcacgctgggccgtgctggggctgggtggtgccctgctggcccacctggtgtccccactctacagcaccagcctcatcctgggtgagcacgtggtgagggctgggggggtgagaagggagggcagggaggtcactcaccttgtcctgtcccttctgccctgcagctgactcatgccacgaccctccgactctgagcagggccatccacacccggccctgcctggacagtgtcctggggccatgcctgccacctccctacgtccggaccgccctgcacctgtttgcagggcccccggtggccccttccgaacccacccctgacacctgccgtggcctgagcctcaactggagcctgggggaccctggcatcgaggttgtggatgtggccaccgggcgtgtgaaggccaagtgagaagggccccctggggccgggctgtggagcagtgctggtgatggagggctcatgcatgagcttcctcacctcagtctaatcccagcgcaaccccttcgctcaaccccttcgctcaaccccttcctagctccgtagtggtggccacacctctgtctgccctgtgagtcctgtgacattgtcacagtgtgagaggaggtagtgtgaggtgtgtagcaggcctgctggtccagcttgtatctctctgatctcagtggtatcctctcttcatccagtgccgccctggggcctccctcccgtctctgcaaggcctcctttctccgggcctttcaccaggcggccagggctgtggggaagccctacctcctggccttgaagacctacgaggctgccaaggttggttccccaccctccccccgtcccggtccctctccagccctgcagtccctgccccctgcaggtacctcctctcaccccacctctcatctcccgccctaggctgggccctaccaggaggctcgcaggcagctgtctctcctcctggaccagcagggcctgggggcttggccctcgaagccactggtgggcaaattcagaaactgaagccagcctcggcgggaccgaggtcccggagccaagctgtacccctgctgggggagtgccctatctgaggagcgttgtggggagaacatgggttgtgcggggtgaaactggggctggagggaaggaggagcctgctgtggttgggaggcggctgctgcacgtttgggcttgaataaagaagtatttctggttcctgtgtgtgtagttggctgtgtgtgtgtgtgtgtgtgtgtttatgtgttggggtggccaggggccctttgtttgcggagagagcccctcactcctcctttgggaggccctgtgttcactgggttcccacctggatcctctcactgagccactgaattgtcacccccgcccctgttcacagggctggaggcaggtttaggaggggaggtgacctcccctggttcctcctgttttccagcctgtgtgctggaggagaccacggaggccacgggttgcgggtgttgtaaagggtgggagggcaggctgcttggatgtgtgagcattttgtcctctggccgctattggggctccaaatccttgcctttctgggcccccaggatg

SEQ ID NO: 84425 - DNA, 1039 bp, Homo sapiens
tgtcttggcttttgttcctcaagtacagcagggtcgcgtcactcctgagctacgagggtttgacacaggtgcctttgttcctgaatctgtcaaacccgagcccgtgccattttgatctgttagtttttccctttatctataatgactcatgcctattataagaacctgttccggccaggcatggtggctcgtgcctgtaatcccagcactttgggagaccgaggcaggtggatcacctgaggtcaggagttcaagaccagcctggccaacatggtgaaaccctgtctctactaaaaatacaaaaaatagctgggtgtgatggcgcatgcctgtagtcccagctacttgggagactgtggcaggacaatcgcttgaacttaggagatggaggttgcagtgagccgagatggtaccactgtactccagactgggcagtggagcaagactctgtctcaaaaaaccaaaaccaaaaccaaaaccaacaaacaaaaaagaacccattccttttgagtaaattataccttgctggtagagtttttaaaacctcggtctttcaagcactttgaatagttgtgggagggaggtgtaggggcctcggtggggttggcagcaggtgcccagtgggtttcatagctgtgtgttttcatttggctcctcttccttggggattgccttgtctcctagcaagattcagggtgctggggactgtggctgtatttcttcagcagttcagagtctttggtttattggtcatcatcacccacttgtggaaaagacacattcatgtgtccagcacatgtcttgtctatccccggctccatcttatgcctgcgggaggggagattctagtccccacaccgtgttgtgagggtttgggaaggacctgaagccagcaggcagccttcattgtgagagctatgctctgatcccaaagctgacttttccatgccaggtttccccattgccctaggatctggtgtccctggtggaacttcgtcccgtgtctatgtgctctggaggcttaggtgtaggatccctg

SEQ ID NO: 84426 - DNA, 1083 bp, Homo sapiens
taaatttttatttttaaattttttttggctgggccctggcactgctggcggcacccacatctgtgcaatgggcccacccagactttgagccttgattgtaggaaggctgtaggcgttgcagccagaaaggcctgggtttaaatcccagcatgaccttgaattccctcacaaccttgaaagtgccatgtgacttctctgaatctccatttcccatctgtgaaatgggcatgaagcctgcagcactgttgccaggattcaggggagtgtgacaagggcagcggatgagtgcttccctcctgtcctctgcacatggtgctcccagggaactgcaccggtctcctgctgtgctgctccaggcgcactcgtggctcacagcctctccccagggacatgacatgggggtgttttaacgcagcaccatgttctcttttcgcttttggccacagatgacgtccggttgtttgccttcgtgcgcttcaccaccggggatgccatgagcaagaggtccaagtttgccctcatcacgtggatcggtgagaacgtcagcgggctgcagcgcgccaaaaccgggacggacaagaccctggtgaaggaggtcgtacaggtactgagttcctccagagtctggaggtcaaagctcgccaagggtcaccatcctgcaaggagggagagggctgggttcgactcctgggtctgtagcttagctgtgacttgggacaagccatgctatgtctctgcaccagtaaagccattggtgaaatgtcaccagaattgtttcaggatgctggctaggaggagttaactgtgtttacgatcccacctatcccataacagaagcttggcagctgggtgcctgcctccgtgggtggggcaggttgcttgcttctagagacgggaactggtggggggaccagaatagcggccactaccctgtggtgtcctggctgactgtcggcggtggtcgcaaggatcccgtgggagaattcatttgtaccctctctgaacagtgcctactttaagtcttttccattctggccattaaagaaaatggacatttgcaatgtcagaaacttccaaggttgt

SEQ ID NO: 84427 - DNA, 1054 bp, Homo sapiens
gtgggttcgaatccctgaacggctgcttcctggctgtgtggtttggaacgagttccttaatctctgggggtcttggtttcctcacctgcactctcacagtgctgttgcgaggataagtgagtcagtatgtataaaatgctcagaacagtgcctgtacaagctacatgattgtttgcgaaataaataaaaagtacaaaattgtgccagggatcatgtgggtgtttctttccttaactgcttccataatcaaattatattttgcatttagttcaattcaaagggtatttgtggtgtgactactagaggatgggtgatactgagaacccgcgtgcgcgcacacacacacacacacacacacaaaactaaaattactccttgagcgctgcctgtagacattcattcattgcttttgtaaacagttggcctaaaatcgcagcataaagcactgcaacgatgtggagagttggcagggcaggatttgaacccaggcctccgtccctccgcctctgtagttgaatgcttttgcaagtggagtaagtgcaaactcttaactttctcccctccggtccgtgaacagccaggagagtcagcagtatttctgctttgccggctctgaggctatgctttacagaccagcttccctccctaaattcagcttctttcctcccgctggtcacccatccctcccttcccccatcaaaccatgttctgcctctgaagctactgttctctccagcaagtagaaggggatgaggaaaagagcatccatcccatcaggaggctcctggcaggtgctcccaggcctcagcccactctggtgtagtgggagaacacttccctcctcccacaggcttgtggttttctgctcagacccacctcctgccccccagggatgggagtggggagtggcgcgtgtctggcgaggaagctaaaaatgcttccctgctgtgtgtggatcctcatgaatgggccatgggagcttcagctgcagtgctttctttccccagccatctgttggacaaatgcataggagaattatggttgccgtgtctgc

SEQ ID NO: 84428 - DNA, 1050 bp, Homo sapiens
ggggaagggagaaagagggggagggaagggagggggaagaggtcagggaagtgggggaagcaagcagtgggggaagaagaggaaggaggagggagaggaggaaggcggggtgggaaagggggttggggtagtgggagtttccagggaggggtcgggaggggaggaggggaagtgagaaggagaaggagagagaagagggatgttgggggagaagagagcgggagggaggagggagagtgagagggaggaggcaaagcccctactccagcccccaccgcggagttgcgcaagccttccggtctgggattggccgccagagaatcaagacgctccgcccccgcagcccgacggccaatgaagaggcgggccgccgcctgggcggccaatgggcgcgggggggcggggcgggccacggcctggggtccccgcgcgctctccgtccgcagtggaagccgccgccgcgctcgcagcttgcaggcgccgcgtagccgtcgccaccgccgccagcccgtgcgccctcggcgcgtacccgccgcgctcccatccccgccgccggccaggggcgcgctcggccgccccggacagtgtcccgctgcggctccgcggcgatggccaccaagatcgacaaagaggcttgccgggcggcgtacaacctggtgcgcgacgacggctcggccgtcatctggtaggaacttttcattcgtctccacgccccgctccccgggctcgcgcggggcctcgtgcaccgagccggcctccaggcgggacggattcgggcctcccgcgctgtcttcctcgccttattccgggacggcgtgccaggcccccgcgggcttctccgtggccagcgcgtctgttagattgtcctctgcaagcgccgcgtcgcgcggccaccagcgctgatgtgtgtgtgtgtttttttcttctcccaacccaaagggtgacttttaaatatgacggctccaccatcgtccccggcgagcagggagcggagtaccagcacttcatccagcagtgcacaggtagggaggcgcgcctgccgggcggatg

SEQ ID NO: 84429 - DNA, 1026 bp, Homo sapiens
ccatctacaaagacttcgtgtacatctcggggggccacgactaccaaattggcccctaccgcaagaacctgctatgctacgaccaccggacagacgtgtgggaggagcggcggcccatgaccacggcgcgcggctggcacagcatgtgcagcctgggtgacagcatctactccatcgggggcagcgatgacaacatcgagtccatggagcgcttcgacgtgctgggcgtggaggcctacagcccgcagtgcaaccagtggacccgcgtggcgccgctgctgcacgccaacagcgagtcgggcgtggcagtgtgggagggccgcatctacatcctgggcggctacagctgggagaacactgccttctccaagaccgtgcaggtgtacgaccgcgaggccgacaagtggagcaggggcgtcgacctgcccaaggccatcgctggcgggtccgcctgtgtctgcgccctggagccacggccagaggacaagaagaagaaaggcaaaggcaagaggcaccaggaccggggccagtgaccctagctgcgcctcttgggaccatcctcaccgtcacctcccagggctctgtagaccagcagcaacttcttagtattccggaaacattatgtacaacttagcagctttttttacttttatgattcttggtatttctatgatatcacagtaaccaattaaatactatctgtaactttacatatcttgcttgaataactaaccctgggcccaggcagtgagcaaccccttgtatcttcacaggtctttgccccgtgttatgattcctcatgggtccttgctgactgtccccctgagagtagctggcacgtgggtaacacagaaatttctgtagtgaagcttgggcctcaaagggttctcttaggccacctagtccaagcctccccaaacctggctgaacttttaagaatacagatgcgtgagccccgctcagaattatggaatccaaaaccaccaggaacggggaggaggtggtgcccagaagctgtattttaac

SEQ ID NO: 84430 - DNA, 1072 bp, Homo sapiens
accctgcctgaacagtagctaaagcttgggggccctttacaataatcccgtggtggaaagaaagagctctttttgggagatgtgcgtgtagagttaagctcttattcccctctcccaccccttctctcacatcttctcccccctccgccattataattattctggacaaaaatcggcatgatgtattatttgtcagccttgctttagactgctaatttgttgacatctggtccctataaattgttgcacacttttaaaccatctcattgtgtatttgtattaaatatggggaaatgaaacaaagtagccattcgggaaactgattgcgagtaaaatcataacccttcatgagcaattgggttttgttgcccttctgcagatgaagtcaatctgactacacctcttttgaaacatgattttcggaactattgtaatgaatgcgtgttgtggaatctaaaatgcgaaaactttttaaaaaattagatcttacgacaagcttcaattttgttaaattagctgtagtttagtttgcatcagaatttccccctttaacgttttgttcccttattcatttacttttgtaagtagtgtaggtctttgcgccaaaaaagggatcagtagttgaataatttttacaaatgtatagcccaaagattttaagagatttggtgtatttagctttgtttagacctttctgttaaaaaaaaagatttgatatttgcttttttctcaacttaaatcctaattaactagcttattagaattggtatgaacaagtaaaaggctcattatgaattaatgtgtaatattccttgtgattttgacatgaagaaagcatctttaggcatagctcacttcctttatttaataagcatcaatcacaattcaaggttgattgaaatgttaattaatggggatggataatatgtaaacttaattgtaatttcgtttgcattcattgtcccagtatttacgttttatacaacagtctaaagcgttatacacatctttagaaaattggagtagcaaaagttggcggaacgtaaatgttagcaacactttgggtttattc

SEQ ID NO: 84431 - DNA, 1446 bp, Homo sapiens
tgagcagccgcgccgtaccaggacctcaccatcatgctcttgagcccatctcattgagagcacagcgcactgaaattccagtgaatactaagcgggcctaccacattctaaattcctcactaaagcaaaagttaggacatgtattccagtgttctgttacgtggaactgataggatttaagcagtgattcacataggaaaacttaaaggagaaaaggattacgaagcttaatgattgctgtttaatgccaagcctaagcggcacgttgcactgtgctgtgctcagaatataacattcaagtaattgagaaaagtggtatcatctccaattgaattagttacatcagggtttttgtttcggttttttgtttgtttgtttgtttttaaagatataatttcagacatgtaggtacttcctgttaatggttcctggtattcaggtggcacattaaacgtggttgctgaggacacttattactggtactataccaaaatatgaaacgtagtgggaagagcttgcttttgaatttgtaattaggctgttacttttctatttactgccacacatgcaagaatcaccatcgcacaaaacagataaatctgtttgcaatggaatttgctggccttgggccattggattactgtcatttgtcactttagtgccacttcagcagtgtagatgttcatttccagagacttgtatgtgcttggactgcagttttcctgtttattgaagtgttctcccaaaaggtctttctttgaccatttctgtcaatacaggctggatgaagaattagtgtaggaaaataaaggtagcccttggggtatgtgtatagtatttgtttcaaggatcagaaaatgtagaatttatcataaacctcgatgtagaatcttcagatcctagattttttctgaactggctattttctggctatttgaaagctcctgggccatgatcccattttcatcagatgacttgagaacccagaagctctaccagcactgccattctgtcccgtcttgaaacatcatgccctggttgccctctcctggaatagggcaggtaaggtgttgagatagaaatgtggtttggggctgttacagcctgaattcctcgactttcccttttgggctcacatgagaattgttaggagaatgtgcatgtggagtgcgggcccagcacctgctaccgtctgcgctgtaatggtggctgctcctaagagtcctcagtctcctccccgttgggcttgtgtgtacagccttatcggttgtcattcttcggatccattctcagtttatttttctggtattagctggagggacatctccttaagcctgtactctatggctcaggagtctcaaaaccagtccattttgaagtgagagtatccctaataaaaaggtgagtgtccccactcctgtgccttgttttttttgtttgtttttt

SEQ ID NO: 84432 - DNA, 1055 bp, Homo sapiens
tttcaccatgttagtcaggctggtgtggaactcctcacctcaggtgatccacctaccttggcctcccaaagtgctgggattacaggcatgagccactgcccccagcatccctactcattctttgaaaaaaacaatttgttgttgttttgtagagacagggatttgctgtgtttcccaggctggtcttgaactcctggcctcaagggatcccttctgcttcagcttcctaaagtactgggattacaggtgtgagccaccgcgcctagcctccctattcattctgcaagtatcagtctttttacttttgataggacatgttgaagttttggttaaaaatagaagaggatttgaaaatgaagttcaattctagaggttttcgagattcctgcccaatataaaaaacttctgatacattaaaacaatttttttatacttcattttttagagcagttttaggttcacagcaaaattgagagaaaagtacaaagagttcctatataccccttctcttggtattttaagtaataatttcccttacgtggctgcaaagactatatatatatttatatgtatttatttgtatatgtatttatatttatttatatttttatatttatatatatttttatatatatatattttttgagacgaagtcttcctctgtcacccaggctggagtgcagtggcgcaatctcggctcactgcaagctccgcctcccgggttcacgccattctcctgcctcagcctccggagtagctgggaatacaggtgtgcgccaccacgcccagctaattttttgtatttttagtagagacggggtttcacggtgttagccaggatggtctccatctcctgacctcgggatctgcccacctcggcctcccagagtgctgggattacaggcgtgagccaccgcgccgggccaagactatatatatatttattcaagacctgaagtaggctttctgggtagatctgatcattggagaaggagaaacatatttattacgagatactaagcattgtagtagtcatcatttgaagcctataaact

SEQ ID NO: 84433 - DNA, 1045 bp, Homo sapiens
ttccatgaattttaacagatgtattcatttgtgtaatcacctccacaatcaagacaccagttctgtcattccccagaatgacattgagcccccttgcagcctcttcttttgttcgtccttggccccagcaaagatagaactgcttctgttacagtttcttttttattggtttcatcttccatttctttttttcttaaggtcagcaccaaggtgattgtaatgaatatgaaagttggtggaatcttgaacttctactagggctatcccagataaagttgactgaatttactccctaatttatctgctgtgtttcatacaatagcaattttacacaggaagttattcaataatgagggctatctatattaccttgctatttagtactagttaagagcaaagcgagttaaaatttaatggccattttgtaatacagttctaatatagacacaggactggaaagttggtaaaagtgggtttctgttaagtgaatcatgttttctaatttggagattcaatctgaattcaatctaaaatttctgaaggaaattttagctcggaatctccatgaaagcacttaatatacagccaacctgttaaaaaccatactttgagaggtaaaatgattactttttgatagcactttaatagtagaaatagaatatacaaacagggaagtagacactcaattgcagtactttgacatttgagtttcaaggagagaggctgcctgtgagagtgactttgtgatagtttgtctactttgttcgcttctcaggacctctttgccccaagaaagtaaagcaaaattttgctatagccctattagtgagggaacaaaacttctcttcctccttcttcctttgtctgcttctgccatttgtaacacttagttcagcttgcagttggcttgcactgtaataaaactgtaaatgtcaccatgccctgacccctgtgtgtgttgtgttcaaagttttactctcgtagtctcgcatagttgagtgtggattgttgatgctcagtgcatattgttaaattggcgaacttc

SEQ ID NO: 84434 - DNA, 1056 bp, Homo sapiens
taatgtagttaattaaggcactgtgttaaaaagggagctgcagtcaccaggctttttgtttatagtgcgctttcctctgctctccgaccatggacctggtcccagcctctactggctgtgttgcaatgtagtgatcgtgaataagaggtgcagtcaggaagagtcatcttcgctagtgcacaaacaaaagtgtctgtggtctggatggtcagtcactgacatcctgtggaaagaaggatgtatcataagcatttcattgtagctgatttacatgtccattggagttcatttttattccttttggcttcattttcggatctgtttaatagtgataaatatttgaaagcatttctattgtgtttttttcgttaaatgaagatgatttagattgcactgactcttcatgtatgttattctgctagaagtaacggcatgcaaagttgtatggattaagagttttaatgaattgttgccttaattaaatggtaagcgttggttttaacattttgttgaattaaaatttgttttctgattccttgtgcagcttcctccatacagtggaacagttctgtgtggcacacaggctgtggataaactacctgatggtaagctagttctctccttatttccctgaagggaatttggccatacgtgctgggtgggcaggctacctgtaaacattgtttcccatttgaataaacatttctttgtagcttgaagtttttgctgtaaactgtaatgtatttaattgctgaatcactttgactagtgaattggttttaaagcgtatcctgtgcttcggagtgccagccatgtaagatttagtttaggaaatggttgttgagttctttttttcctaacagttctgagtgcaacaggtatgttactcttcatcagcacatgctggagttgaagcgaactttgggtcttgttgctaagcagcctgctggctccagcgccagctagcttctgagcctgtgttctttgtaaactaaggggcagctggcatctgttgttcttgcagttcacattcatgtcctggtctgtcgctgactc

SEQ ID NO: 84435 - DNA, 1113 bp, Homo sapiens
gcagaatttatgggtgacatgcccccgtcagttacgcccaggacttgtaacagcccccagaactccacagactctgtcagtgacattgtgcctgacagtcctttccccggagcactcggcagtgacaccaggactgcagggcagccagaggggggccccggggctgattttggtcagtcctgcttccctgcagaggctggcagagacaccctgtcaaggacagctggggctcagccctgcgttggtaccgatactactgaaaaccttggagttgctaatggacaaatacttgaatcctcgggtgagggcacagctaccaacggggtggagttgcacaccacggaaagcatagacttggacccaaccaaacccgagagtgcatcacctcctgctgacggcacgggctctgcatcaggcacccttcctgtcagccagcccaagtcctgggccagcctctttcatgattctaagccctcttcctcctcgccggtggcctatgtggaaactaagtattcccctcccgccatatctcccctggtttctgaaaagcaggttgaagtcaaagaagggcttgttccggtttcagaggatcctgtagccataaagattgcaggtatagttgaaaagatacaaatctagagtgaagatgggagcagacctcatcaactgggcttatagactgtggtgttacccataacaatggcagattacctgtgtgttaatagcaacgtctgaaggatgcctatgtcttaaatgttctctaaaagtaagataatatagaaacaaatgggaggagagggttgtcgtaactttatgttaagtgaaagatccatgtctgttagcagttcttttctgttgacaagttacatttccatttcttgccttttgttcaagtaattctgctccacggtatgaatgtataatggactttttctgtgatatacctttggtatgataatcctgatttgtactcactgtgtgctccttttttatatttcttaagatacaagaaatcattttgtgaaataacatggttttttttttttggattgagtaaatggattttattcagaattttgatacaccaaggtcagctcttgaagagaaaaaaaa

SEQ ID NO: 84436 - DNA, 2518 bp, Homo sapiens
agtatttttactcactgaacagccattgaacacacacagtgatgtgtagggtcagcattagatgctggggatgcagagaggaatgagacgtgggttctgcaagatatctttctatctagtgtctgaggcgccttgctgctgatgagacacacctggctaatggtgtttaaggaagaaaggctgtatctctcaaatctattctctaataatgatactgtgttaacatttttttgtttctcattaaaataggtagttcttgtgttccctaattctgttccccccaggaagattaaatgttgctatttgagggaaaagattagtttcaaaaatgttctaattgaataatgtacttgatgttgaactgaatgaagccttaacagtatgcattttctttggctgtgtgttttactgaagggattttaaatgctgtcccagagtagagcatgtgaaatgatttgaatgttcttcactagatgtcatcaatttctgaaatatgcttcttcactctttcagagttgctggagaatgtaaccctaatccataaaccagtgtcgttgcaaccccgtgggctgatcaataaagggaactggtgctacattaatgctgtatccttcctggacgccgtccgcaaggccagcttgttgcagctgtccctcctttgggtgcatgtgacttagctcagcttccgtgggccatctagctctccatttgaatccctaagtctggtttattacttggtctgcctaccttgcttataaacaggattattcctgaccccagtccatctccctctaaaagagaggatatgttggcacgtgaatgagggctgcagacaagctggctctcattagaatagtcacaaataatagggcagagcaaccacttacaactggaaatttggttttaactgattgaactgtcttggttaggtcaagttcttgaatacaaacgactgactgcttcgtagatccttatatggacatcacaggacacttaccctagtaactatttggtttattccttttcgtggtgacatatctaagtagttcaacgtccttagcttccttgtgtttttataaacattcttgtgcttcatgtgccttcaggaaatgtggtgtgtctgttcatttcctttacgcttccttactgccactacatagacactgcaggcattggttgcttgcccgccgatgtaccacctgatgaagttcattcctctgtattccaaagtgcaaaggccttgtacgtcaacacccatgatagacagcttgtaagtaaggtggtgaaagatgtgttaagtggtggggtttttcccgtctgataattagaattgaaatagtttagtaaagctcttgatttcctgcaaatgagtcctataattctgtctttttttaaaaatagactgttggcgattttatatggaagttaaccagaaatggaattggagcattgatgatctgtgttctttagattcagtagaaaatattttagcgtttaccagcatatatcacttgaaatagaccaaaaatgcatatagaagagacttgagttcactagctgttacagcattggttacctaaaatctactatactcgtatagctgatattctacttagccatcaaagctctttagtaaaagtatatattgtttaaaactgcactatttaacattttttccccatgtttagtgttcggctaatgaatgagttcactaatatgccagtacctccaaaaccccgacaaggttagtaaaaatgagttttgttgatgctattacatattgggagttatggagacagatgacttaaatttggtaaattcagtcttgttgggaagatagtgtctttacacctatgccattctcaacattcagccaggtgggaggtgggggagttttgatgatgttgcttttttcatcatttatgagttcattgtagttaggaaaacctgtgtcctctttccattgcagctcttggagataaaatcgtgagggatattcgccctggagctgcctttgagcccacatatatttacagactcctgacagttaacaagtcaagcctgtctgaaaaggtttgagacttctctgttgtcactagtatcaagtgttgccttttgttccagtgtttgtgtggtaactgttgcttattgatatttgccctctgtctccagcgctataagtagatgtaggtttataagagtccattgcttggatgatatggtgcaccaagcactgctctcagtactttacatatattaacttagttgactctgaataaagtatgattatggtctccttgttacggttaagagaagtgaagccactgtctgaggtcaggtagctaatgtacatggcagaacccagctttcaagtcagttctcttaaccactgcactatatgccactggggtagaatggagtgcactgggcctggaatgatggcagtattcagaagagcttatgtcttcatcatacttacaggctttagtagctatttgatgtacttgattcctttacc

SEQ ID NO: 84437 - DNA, 1043 bp, Homo sapiens
agattagccaggcatggtggcacacacctggagtcccagctactcgggaggctgaggcaggagaatcgcttgaacccgggagctggaggttgcactgagctgagattgcaccactgcactccagcctgggtgacggaatgagactttgtctcaaaaaaaaaaaaaagtatatttattgaagaaaatttcaaaaatacagaaagtataaataataaaaatccccattagtccacccatttagagatatgtgtttagtcagtttctccttttcctcctactcttgggatttcagctatgcaagggaaacccatgtcatcatgtcattgtttggaaatactttacatcttccatttcagaggaggcatggttggactttgcaagtactgcatgtcctgcaggcctttgacagtgatcagttcacagtaacgtgattatatttgaccttttcagggtcgacaagaagatgctgaggaatacttaggcttcattctaaatggacttcatgaggaaatgttgaacctaaagaagcttctctcaccaagtaatgaaagtaggttatggtccacttgccgcagagttgtgcaagagttcgctgtaaacaggtgttgcatactcatatgttatgttgcttccctgcccctcagtcgttttcctttcaaatagcatttattccctacgataacttacaccatcgagaaggttatatttaggtaaattacagtttatcccgaacctctgccattttcctttaacttttaattaggaaaatgatcaagcctataaaaaagctgaaagaatcgtttgatgaatacctttataattgccgagtgtacagttttaaacatattttctgatgctatacacacactgtgtatatatatatatgtcttatctgtccatccatatatacatacatacgcatacattttccctgaatgattcaaagttaagttgcagctaacagtttagttcatctcaggtgctaaagcatctcctgcgtaaccacagtcccttatctaactgagaaaaacaactgtaatgac

SEQ ID NO: 84438 - DNA, 1024 bp, Homo sapiens
tcaaatttcgccagttgtcccagggatgtcatttctaggagtttatgtaaacaaggatccagtggtggtgcacctgttgcgattggttgccgtggatcaagtggcattgcaatgggttgcagtggatccagtggcattgcgcctgttgtgattggttgccgtggatccagtgacgttgcacctgttgcgattggttgccgtggatccagtgacgttgtgcctgttgggattggttgccatggatccagtgacgttgcacctgttgcgattggttgccgtggatccagtgacattgtgcctgttgcgattggccgtggatccagtgacgttgctcctgttgcgattggttgccgtggctcctaatgtagaccacaccctgatttcatttttaaaactgcaatcgacagatctgtgccttttttttttttgctgttcttgtcgtaaatagtagtgtaagcagatgctctccttttcagaacttacgatttccaacggccccaaaaaccactcggtcaatgaagaagagcaggaagaacaaggtgaaggaagcgaggatgaatgggaacaagtgggcccccggaacaagacttccgtcacccgccaggcggattttgttcagactccaatcaccggcatttttggtggacacatcaggtttgtgcttttctggaataacttaatatttgccttttctagggttttgccatgttggtgaagggggaaggtgtgaggcttgttttgagacttcttggacgtaatggtttgcatcttgctcccctgcctgctcttctcttgcacttcctgatgcttcccttgtcagcccccgtggcttattctctccctgctggcgcatgtctgcaggggacagggagctcctcccttctactctgtcaagttcagctgctcactgctagggagtaagagaaaagccagctaattggccatacgcggtggttcatgcctgtaatcccaggactttgggaggccaaggcgggtggatcacctgaggttagaagttcgagat

SEQ ID NO: 84439 - DNA, 1857 bp, Homo sapiens
tgcagccatttttcacgttgcagttggatatccagtcagacaagatacgcacagtccaggatgcactggagagcttggtggcaagagaatctgtccaaggttataccacaaaaaccaaacaagaggtatgttcacacttgattttgaacctttctactaaggtgctctggtttggtggaaagaacacaaaattaggaatgaggggaaatgggtttgagttatgcctcttaaatcagttgcttaaccattttgtactgaaagtttttatggttttacaatgaaatggttgaaacgtgatcccaagggcctcttttagctctaaatcatattacacaaggtaatgatctccttttggattgtttatcttgagctacatttaattttctggcaatctaatgatgatatcacaacatcaatactacctctgacagaggccaaatagcttatttatgttcatgataccgtagggtacaactgtcattagattagttaggatgtcagagagattccagacacatctgttttgcatttgattgtagatcttccaggtcattgtaaatataatatagtcattgtaaatataatatagtcattgttctgatgcttgttactctttgatttgatctggaaaaggtaagattcttgagtctttcagtcttcatgaatttaagagtatcacattatagcttggtggagtccttgtcaactcagttgggcgagacggatagcattctgccctgtgagagcttattagttcctggctgtccagatgtgccagcttatagctattttgtactctgcagcagagagtgtcttctctgttatatatcttaggttgtggcagtgaattcataaaaatgcactggggagatgaatgcaggctgataattatggacggtccatagcattcctgcaaagcgatatttgaataatgggcagtggatggcagctacaaggtaaaataaggtgccccaacgtagaagacctgtcatcacattgcatgactgggatggatctatccttggcttatcttgtgtgctctgagtcagaaagagcaaagtaggacatagggacccttagcaccttcggggtgtcctgctgtggactggttcacccaggctctggggggatcagtagaagttatgcctaatcttctaccgtatttgcagacttgcatctcatgggtgattttgtttaaaaaatagaagcagtaggagccagaggcagaaacttggtagttgacttcagtgaatgagctaagaagagtctggcggtggacctcgtggaagagagagagggaaaaagtggtatttgtgttggggaggttggttgggtggttcagttgtgcattgtgggtgactgtcggcttggctcacttctgtggcagctgcaactccagagatagctccctggccctggctgctggtgcactctgcttatgctgtttcttgagccagctatgggagtctttggccacccatgctgttggggaggtggtcagcctttccatgggctgcctagggaagacccttttgtgatgtgtctgtttttctcttttgcttctgctgcaattacagtttgactttgctggggtgggctggtaggggtggcggtgtgggggcaggggttgaggcgcaggtagttgttagcctgttgttagacggtagtgaagaaagaatggtttatcctaaatagcaggtttggatgaaggcttccagaaagaaggcgggccaggtgtggtggctcacgcccttagtcccagcactttgggaggctgaggcaggaggattgcctgagcccaacagttggaggctgcagtgagctatgatcacgccactgcactccagcctgtgcgat

SEQ ID NO: 84440 - DNA, 1440 bp, Homo sapiens
cttgcgtgtttgagttgaaatagcattggtttgtgtgatgacatctctctgtcccacctgctttggagaggggttttacacataggatgcatccctggagggaagtcggcggagacctgtaatgattcgtgtgcagtgctgttctcactctgctgcctgctgggctctcttccagtggtctaccatcacggcaacagtgcgacgggcggccattacactacagacgtcttccagatcggtctgaatggctggctgcgcatcgatgaccagacagtcaaggtgatcaaccagtaccaggtggtgaaaccaactgctgaacgcacagcctacctcctgtattaccgccgagtggacctgctgtaaaccctgtgtgcgctgtgtgtgcgcccagtgcccgcttcgtaggacaccacctcacactcacttcccgcctctctttagtggctctttagagagaaactctttctccctttgcaaaaatgggctagaatgaaaaggagatgccttggggttcgtgcacaacacagcttctgttgactctaacttccaaatcaaaatcatttggttgaaacagactgttgcttgattttagaaaatacacaaaaacccatatttctgaaataatgctgattcctgagataagaaagtggatttgatccccagtctcattgcttagtagaataaatcctgcaccagcaacaacacttgtaaatttgtgaaaatgaattttatctttccttaaaaaagaaattttttaatccatcacacttttcttccctaccctttagtttttgataaatgataaaaatgagccagttatcaaagaagaactagttcttacttcaaaagaaaaataaacataaaaaataagttgctggttcctaacaggaaaaattttaataattgtactgagagaaactgcttacgtacacattgcagatcaaatatttggagttaaaatgttagtctacatagatgggtgattgtaactttattgccattaaaagatttcaaattgcattcatgcttctgtgtacacataatgaaaaatgggcaaataatgaagatctctccttcagtctgctctgtttaattctgctgtctgctcttctctaatgctgcgtccctaattgtacacagtttagtgatatctaggagtataaagttgtcgcccatcaataaaaatcacaaagttggtttaaaggtgtgtgcgtgtttctttgaatgcgaatgccttttcgggtaactgaaattcatgggggcatgagtttgcctgcagaattaaaatctgcccttcgatcagctcgacgtgtttgtggaagctgaaccaccactcaggttatgcttgtttagtattttcaaatggattagtgatttgggtacacgaagtttttgactcttcgattggcagaaaggaggaggttttctccccttcccctc

SEQ ID NO: 84441 - DNA, 1006 bp, Homo sapiens
actatgaatgtattgctgttggaggacatctcgatccaaagaacagccgttcctgtgcggcccttcgttgccctcctgctttcattttttaaagaaatcttgagtgcttgagggccttggaactgattttttttttttgttccagccaaattagcagtgtataaatggcacctaggtaagagcagagctgcggctcggtgacttgatacttggggcagcccgatgctgtgtgtggggcaggggaggcatccttactggagaggcagggcccagccattgggcacctctgggaaggggaggggaccatgaggcagccagcccctggcaggggcgactgtgccaccgcaggcagcgctccagtcgggaatggccaggatggcgccctcttgttggagtttttggttagcttttacgttttcttctccacccacggcacaggtgataaaataggatccttggtgcggagcttaaaattatgccagaaagccaacagctcccctcgtggggccttgccttaaacttgcctggtttgtacattttttgccggacgcatcaagaagcaatctgtgacaaagtctgagggtcttcctttatgcttgccctccacactaagagaagttggcgtctccctcctgggaattgttttgcctttctgttcatctgtgaactgttttttgtttttaattactctgtaccccatccgaatcagggcttctaccactgctgatgcaaaaccacaaagggacctacctgagccaccgtcctagccaagcgagcaaacctgcagggggtttggaagtggacttggtcaccgcagaagcgtgtgcgccgttgggggaagagctgcgtcacagccagagggacaaagtgtgggtgatcctggagacgccagtttccgagattgttctgcatattcatttgcacattgttgtctgggttggacatgcgtgtgggcttcagtgtgaggcttttaatatgtatatcctgttatcaataaaacaattat

SEQ ID NO: 84442 - DNA, 1730 bp, Homo sapiens
gttcaaagcaggcttcacgttgcttacgtgagtgaccgaccctaagcaagtgtagtgaaaataggtgctcgttatcctaccttagatatgcagtgaggtctggacaggctcatcccaccccaggggaacatggtgaacagactcctgtgagcactgctcactggtatgggtgcacacaactcttctggtctggcttcatttgccatttaattcataaatacagtgtcaatagaaacctcagaaaatacagactcttttgaaaccactggccaggaagtcatggtatgaatttttgcttggaagggtggccctcctctgctccttggagaacaatgaatgtgcccatttagaaagtgaacaacttccccctggaagctggccaggggctggccctagaggattcttctctgagccaaacattctgccactcggggtattcaggaccagttataaccaacttcctcttgtccgcagaatgcagtgatttttcacctccgataactgtaatcctgttgatcttcctgtgccttgagggtcttctgtttttcactttcactgcagttatgtttggcacccaaatccactccatatgcaacgacgagacggtaagctttgttctcggctgtgtggacttcatatgtggtccaagcttgagtaaatgaaaagtcctaatgtcaacaataggtgcctgtggactgactcgggaacgtaatgggacggtcttgatgagctgcaaccagctccctgtgtttgctgtttctttcattctgggcagtgcatatttctagtctcagtttgatttgcaagtcagcagagccaggcagattcccagctcccagtgcagtcagtaaatttcagggaactgactgcctttagggcctggctctgcaggcctggagtggcgctcagtaaatgtctgtacacagtaactaacgagcgacaaatgttggtgcctggctgggagggccattgtggtagtctgggctggccacgtggctgcagccgggctgggctcacagaggccacggggtctggatcggggcagagctgggaaggagagttcactcacctaccctccatcgagcccacactgtgcttgagcacggtgtgattctgaggcttggtggggtctgccgagcttcctggagccgctgccacttgcttttctttctgcttccaggagatcgagcgattgaaaagtgagaagcccacatgggagcggaggctgcgatgggaagggatgaagtccgtctttggggggcccccctcactcctctggatgaatccctttgtgggcttccgatttaggcgactgcccacgagacccagaaaaggtggcccggagttctcagtgtgaggcgtggctcatcagactgaaacttgctcacagacttccagttatttatttggggtctgaaggatatcaacagctcatctgtgaccaacagggcaactggaacctacacaaaccaattgcttgcagcaagcagagttttatatatttatagtcacagatggcagaggaagaggctctcagtccccacctgtacaacaacggaaaggtgtgtggccacacgaagaagccaaacgccgtggcctcctgcagagctggggcttctgtggagaatacttcgggttattacatgggttattcaaatcctgggtcctgagctgctgtttccaatcatgaagaaaaacagtgaatccagtgaacagggattctccaagca

SEQ ID NO: 84443 - DNA, 1163 bp, Homo sapiens
gccggcatctcaacaggcccctgatttgcagcatgaaattcacagcagccatttatgtggtttgtccccaagcttcccagccacggaggtttcttggtggggcacagtgggcggggtgggggcacaagcaaagggagacagaagccagagcaaccgagaagtgccatgagggcacccggcatgcagtcggcgcccaatactaaccagcgtgcaaccgagaagtgccatgagggcacccggcatgcagtcggcgcccaatactaaccagcgtgcaaccgagaagtgccgtgagggcacccggcatgcagtcggcgcccaatactaaccagcgtgcaaccgagaagtgccgtgagggcacccggcatgcagtcggtgctcaatactaaccagcgtgcaaccgagaagtgccacgaaggcacccggcatacagtcggtgctcagtagtaatcagcgtacatcctgcaatgacaatagctgatgtttaactagaagccaggtaccatgttcacagctgatagtcatattattatcccatctggctctctcaacagcctaaaaagtaggcacgattacactcttacagacaaggacactgaggcttggaacagcaaatccatgtccccagtgtcagagctgggaagtgttaaagctggactgagacccgatctggccggagcgcctcactctcatccgccctgctgtgtgctcagctcctggcctgttgggccaccttcccagatccttcctgctagaggcgtccttgtccctcaaggggtcctgccagggaggctgatggtcaggcctcgctgcaggccttcgagtcctgcctatggcttcatcagcggccgccaacttcaggacaggtttccccagctctctggcactggaatactcagtgggccgtggcaggtcccccgagctgccgaacaggagggcggtgaagtcaacagcagcagattatttccagctgctgctctgagtcaccgaagcatgttccaaacccagccgccagctcgacttccctggcctctgatttatgcggctggtgggtcgttgctggactcacggatggggacgtgaggtgggactgaggcatgtgtctgacgctacactggggtgtcatttttaaaaaacctttttacactgaagtgtcgcctccgtac

SEQ ID NO: 84444 - DNA, 1065 bp, Homo sapiens
aaaacacaagaggaaacatgagaaaaataaagagaagaaagaaagaagaggaggagggtgtcccctgcaccttctgctttggataggatttgcacttttccctccagctgggccccgggtccccagagagcaccatgctctgcaggcacctgactcgtgcctccttcgccagggctgtgtctggggtggcctggggagggctgaagcctgctcttctgggctgggcacccctgccccaaggacggacccttccctgcaagcttcccaaggaagctctgtgaaaccctggaaggaccccgggcttgccttaagacaagcctggcttcaatcttcatgctgctgggagtcggctgtgtgatgttgggtaagactcttgccctgtctgggccttggaaccgagtgagccggcctgggtgagagcgcctggctcgcagtggggttgcggatgcgttgacgcccccttccccccgcccccgtgaagtgctgctggcgcgacgctgggtttctgagattgcagcctctgcctgctgcctttctgctgggatggggaacggctgtccctcccttcagagctagaaacaaggccagccaggatgttgggggcggcatttggggacgtgataatgcgggtgataaccattatggagtgcttcccaccctccaggaggcgtgcacacttcacctgtattcacacatactgaagcctcgccgcagcccggtttcaggaggtgccactgttcccttttcgtaaataaggaaataagttcagagaggttaagcaacttgtccaaggtcactcagctagtaaccccaggaccagcgtcgggcctgagtccagctcttgagtctgtgctccagcctctacttggtcttgcctttttgtttgcttcttttcttttgttttgagacagggtctcactctgttgcccaggctggcgtgcaatggtacaatgtgcactcactgcagcctccccctcctgagctcaagcaaacctcccaccccagtcttctgagtagctgggaccataggtgtgcgccaccatgccaagctaattttttgttgtt

SEQ ID NO: 84445 - DNA, 1047 bp, Homo sapiens
atccttctttgccaaggctccctgtgttgggagggagtcccattaggccctgtgtttagaccgcatgtttagacggggcgggggggcctgccggaattttcattccctcattcagaagctaaatggatcttttattaagatcagcagaatccatttttaactgaatttgaaggtcaccctgggcttgggtttctcccctgtgaatatgtgtccaggacacttggagaagcctgtactgcgtcagaggatgagcactggccagggagtctggagaccccggtatgggacctgctgcttatttggtgatctcaggccagccgcttaacttctgcgtttcctgtggggtcagacgaggggttggatgtgattgatttatcgatcagccatttattgagcacctcctgcatgccaggcacagagacaacaagacctggcccctcggagctcggagcctggcggggaagccagacacagggacgggcagttcagaacggtggacccagagccacttggggatccacgtgggaagggggattgtgggaccccagtgagccccctccgtccacttggagaggggcgggaagggagtcttcccaatgcctgggaaagggagagatgaggctcactagccacagagagaagagcaggcagttaattttaaaggactccagccctttctcttcctcggggaatttcttacatataactggttttttgcttacagcgtctttaactcaattcctgttccagcataacacccagggtgtcacttctagctttaaaatcccaaatcttttatctcagcctagggcctaaaacccaaataattcaggtcttccacttggttccagaagatgggtcctggggacagtgtttcctgcgtcgccggcagtcacaagagcgctggcctctctgcagactaaagtcaatccctctctatgctaggaagcttggcagctccctccgggatcaaggccctccctggtcctggcgtccccactctgtgtcaccttagagcaagcaacttcatctgcctgccccatctcc

SEQ ID NO: 84446 - DNA, 1028 bp, Homo sapiens
ttggggtttgccgtgtgtttactgagtccagtgtttctgttctctgctcactgtggccctggcctgcagaagctgcgcaggaattggctcctttaactctcacaacaaccccacgaggtaggcacaatgctcccattttacagatgaggaaactgaggcaccgaggattaaggaacttgcccaaagtgtcatagctggccagggcaacatcctccgtccttgttcgtgacctcgatgtgcacctcctggctgtcagtgcctggctcccgtgcccccgcccctgctctgatcatttggcatgcagaggaacctgccgcattctgttcttgaagtcttctgcatctcttgtggcccccagctggcgtgcatccccctggaccactgacccctcccaccctctcccccatcaccatcgctgccccacattagggagaaacccataagcaactcacagttccagaaacggcttctgcagcaccggcctcccgcggccagcccaagggtcacgcaaggccaggaggtgttccccggctgctcagcccacattctgcaaccctagatcgaggtgcatggccatggtcacgacacgtgatcccgaggctgggagggagagtctggcaggccgcctgacgttgcctgctgggcctgccctggtgatccaggcagctgaggctgagggggccgctgggagagggttaggggtccctaccctaatcctgcctttgacctggtccagaaagtgaccagttggtgacctaaagctgttggccaccagagactggtactgagctttcctacctccaggggtgctgtgatttagcaggggattttaacagctaattcaaatgagaggagacacagcagtaaatacatggggacacggttacagtctaaactattagcataatagtcccaactattagcataccaaaaagatggtcagactcggtgctggtgagctgcaaaaatatggctcattcatattgccgctggcagcatagttctgtgtcgtattcgtctttactgaa

SEQ ID NO: 84447 - DNA, 1069 bp, Homo sapiens
gagctgaccttacgggcgccggggcagctgttcgcgatgcacatctggcagcggcgcccgcgccccgcccccgcgctggccgggcgctaccttccaggaatgcgcgcatctggggagcgaggctgcagcagccggcgccccctccggcgccgggcctgggcctgggcctgggcctggggctgaggctgggcctggggctgcggctggggctggggctggggctggggctggtgccgcccctcccggatttcccggctcctccctccctggctgcctgtgtggctcccgggcaggctgtaagctgggccaccggaccggaaaagagggcggccgggctcgggtttctcctggtgggggctgggaccggctcttggggcccccatagtacggagggagaaactgaggcccggaggggtgaagggccgggtcctagggcaccttggctggcccccgtggtgcgagctgtggcacaacagatgctgacttctgtgtaaaagtcaaataaggatctgagtgtggtcaagtccacagagcttcattttcacatcccccaagttgcatggccctggctgggtctgggcctctggcccagtgggctaaaaactctgagacttggggtcccactgggggcataggaatgagcggaggcaagcacatcatgtgtgactcccgttgtggggagaacggcctgtgcataggcctgggtgtgggtaccttccgtgtgtctcatggtgtggagagagaacagtgtgtgcataggcctgggggtgggttgggccagcttgaaggctgtgaatgcctgctcttgggtcccaacagcctgtatttctttggactttgtggttgagtcatagggagccattgaaggttcctgagcaggagagtggcctgtggagtcctggccaaagttctctctccagcctgggtagagtgccccagagattatgagggaacaactcctgctgcctgtaatacctctaaggtgtgcctcccctgtacctacaaggccccctgggaccttgggacctctgcctggctccccccgaccatcccttccttagacctcaca

SEQ ID NO: 84448 - DNA, 1101 bp, Homo sapiens
cacacaccccacacgctgtctacacacacacacacacaccccatgctctctacacacacacacacacacacacacaccccacacgctgcacacacacacacacacacactctacacacccccccccccccgacgctgtctgcaggagatgtgattagcagctgtgcaggagcagccgtgatttatgtccccagtcgtctaattatccccggccctggaggaggagaaatgaggcgctttgcagggctgggagcctgaaatctcagcaggggttctgggcaccaggcccaccccactcccaccctcggaggccccagaaccctagtggactagagagggcctggggggcagccaaaggcactgtgcctggaagcaatgaaatgggcaccctctgggggagcctcccccctggatgtctgtggcccctactgagcaccagaggaagggggtgctcaggaaatcagcccctttgtcacggagtcctggctggtttgtcccccacaccatagcccaggggagcttggtagaggggctaggttgggttaccccctgctaatgttgccaaggcgcttcccagtgctcttagaatacaattttaagtggctcgggggtgggggtccctagaggggggcaccgccttcttctctgacccatctcgtcacctgccccaccccccagggctgctgctgctgctctttgctgtcccggaagctttccttgaccgcctctggtacacctctctctttcttctgtttccacccaggctctcatctgtggtttctctggtcacaagtgtcctggtcttgatttcgccacgggctggatgctctgaatgggagggtgtgtgtctccctgtccatgctctgtccccagcacctagaaaagacctagtgggtagggagtgctccacaattgtgtgttgtttggacacataattgtccattggacattggatggacaatggatgggaaacccaccgcagcactgggagatcctcagagctcagtggggtccctgagcagaggaaggtggcttggaggactgtacaggctccagaaggcagtggctgcatgcagggaccgggcctgagccagagaggagg

SEQ ID NO: 84449 - DNA, 1075 bp, Homo sapiens
cagcagcgttggggctccccggccagctggccctgggcaggtcattcacagcccctgcctctcatctttcacttcattgctgcccctggggctgctgtgagcactcagggagggaacgcggggagggaggggctgggcacatgggggacatgccagggggctggtctttgagtgcagtggggacacctgagccccgttctgaacagtggcacaggccctgcatccaagcatgcacctgaaggccctttctgcaaggaggcctgggctctgccagatggtggcttccatcttgtcacttctggctgtaggaattcctcggggacaaattgcccagtgctgttgggctcaggacagctaggggtgaccctggctttaaaagagcttacttaaggcctgcctggtgcccccagctctgtccacctgcctgtggggctgagagtgggtggggtgcgtagagctgcaggtacaaatggagaaggatgggcaggaccctgctgctcatcttgtggggaccccgctgggcaggtgggcttgggacccccagatccctgtacccctcagagagtcttcacagctgcctactccgcctcggcctccctctgcctccctttacctttccccttctctgaccgtttgtcttcccgcctctgcccggtttggattctgggtccttctgtgtcctgtgctgccatcctcagtagctctgtctttctctctccttttgtctatctctccccttttttccctcttctttctgtttcctctgtctcttttctcttcccgcatctctctctccctttttctctcacgctccctcctttttccctccgtctttctctctccctccctttctctgcctcttcctccctctttgcctctctctctctctctctctgagcagctgttacctaataggctgttaatgatgatacagtaagtggaaggcagagtcctgggggagccgccatgatctgtgtaattggtctcgaaggagacagaagtatctaatatttacacaccagtattagtcctttgggaaccttatcttggctagaaccaagcagggaggggggtg

SEQ ID NO: 84450 - DNA, 1050 bp, Homo sapiens
agtgaccgcccagcggggtcaccatgcactcctccaggagggacacgcttgtcatgttggcgcttgtcaggcccgcgaagggagctgtggcggtttagcctctgccccttgtggtccccgtgccccagcctgacctcgccctctccccgttgttctgcccattgttctgccaacctccccccgccagctgccctgccgcgtggttgctatggcaatcgctcagctgtcaggggcccactgctcccccttcttctctgggggctgagcttctgggaggcttcttctgggaggcccccaggagctgccaggctggggagaagttccccagaggcccctcttggtcctggagagaggagggggccttgacctctgcccgggcaggataggggctcagtgcaagggaggaggagggttctgcaggggccaccgcgtctgtggaagggagaagtaacatcatgtcaccaggggcgggggctcgtgcccctggtctccaaggaaccccggttgcctcccggctgcccatccgcacggccccactatgtgcagcccccgtcctgccctgtgctccaccctggcccaccctgtgctccaccctggcccaccctgtgctccaccctggcccaccctgtgctcgccccttccctccgtgctccacccctcctgccatgggctccaggcacctgaagacttgttttttgtgtaaagaggccaaggatccacaaacagccagacaggggatctcagaataaagaccgaagtcacagctgtcctgcggggtgtgggctggaggccctcacggccggcttgttttgccccagggcagccagggcacagagagggtgggcagctgcacagagctgcccagggctagtgggaggagctgcttgtcctgctgctggggttttgtcccctgtggaagcatcagtgccagatgggggccacacaggtggcagaggagaggggaattgagagcagtaacagtcccgagggcagggctgtgcccctgcccgtgtgcccaccacctgctctctgcttccctgttgctcctgc

SEQ ID NO: 84451 - DNA, 1007 bp, Homo sapiens
tttgtcccctggtcaaactcctcatctcgggcataacctccttcaggaagccttccctgattgcctccaaatcagctgactccagaggctgatgcctaccctgctattgctgggagcaggcactgaaagaccatgtgtttggggcaggttctggttttcatgagggaggaatgttttgatcaggccattggggggctctctgctgtgctcaggacctggggtgcccgaacatcccatgcatcgccggggtccaggcttgtgtgacgtagatgattgaattttcctgatgagcagcccagggccagggcaggtgaggtcccaggtccacggtcacagggctgggtgagcctgggtctctgcagtctctggccttgacattttctgggtccgctgtgcctggttctgcccgagaatgtttgctgtagtccctgtaagagtggctgggtggcctgcgggtccttggacagacaaagtggaatgatggatttcaggccgcggcgctgggctctggagtgaggaagggaatcgctcatgctgtcatgggaaggccgttccaaggagcccgaggctccccagggaggtgggggagcgccccaccccacccatctgacaggggcctccctccccaggaagggcaaacttgtccctgtttctgggcaccttgggggccgtagtgcccccttccagctccgggcgagactgctgggcatgcgtcctctctctctaggaaaactctagcaatgagcgagcttgattgctcagttagagaaactgaggcccgaggagtgaattccctccctgcttctgttgagccaaattggagattgccaatggcaagcattccagaagcatcccgaggcctccctctaactggacagggatggcaccgtctgccaggcagggagcagggctggcaccgagggtctccggcacaaggacctgtttcttcccaactttgaggtagcttctgttgtgcccacttcacagagggcaaggctgaggctgat

SEQ ID NO: 84452 - DNA, 1179 bp, Homo sapiens
ccctcccagcaattaaatgcatgcccgtggctgtggcatgcgtgaggacagctgcctgccagccttcagaggccagttgttcagctttcaagatgcccccggcccaggagaaggcccggcgggtcgggaggccgggagaattgagaatctgcccggcgggtcgtgctttagctgtcgctgtagggcgactcttggcgtgtaatcacagcatgtggcgcgaggacaaagaacatgacagcagagaaggatcagacagggagaaggcgggagagggcagagcaggccgagggaaagagagagaggtctcccggcgggggccgggcgcgagagcctctgcttccatctgctcggcgaggactctgggaggtgccaggtgagacctgcctccctgccctgcgctcagcctctgtcccagaaacctgagctccaagcggcacaaactccccaggcccccaggactctgttattacagcacaaagccctggattttcatgtccaccaattaagggatttgctgggttgacgattctcgggaactcggtgcagatgctgtattcgagccagcgagggggtggtgagaacctgctaactggatattaaacgcccgctgctgggagagtcgtggtccacagtaggatgtgatcgttcaggctggagggatcgtggggaaaatggtggctcatggaatactaaggggaaggctgtcaggtgcgggcggggctggcacacacagctcaccttcagctgaggaagctgcctgctccgctgccgtcctggcagtcagtgacaggtattgctgagatgtcagctcaagggtgtctgggttcttttttggtattagagtaggtctgtaatcacagaccagaatttgaacttaaaaattaataaacctagaggggacaatggaaatagaaaatcgccgcttacaaatagcactgtggtcatcgtttcaggcaaaaccatcaacggatgctgacatcagcgagcaaaagtgtgatgaagaacggcgatttgcatcgtttcaaagtatctctccatgagatacttactaatttcaaaggggacaatggccaggtgaagcctggcagatgtcacttacactgagtgatccatgttgccatctccagggtgacacggtgtgcctgtgacatgaagcgccaaggggaacccaatgtcatt

SEQ ID NO: 84453 - DNA, 1059 bp, Homo sapiens
tcacctggggagaggagacacagcccaggaagggatcgaggaaataaaagagagagagagaggactcgaatgcacactctaatcttcgcttggcggttcagctttcaggagccccaattaatcattattaatttaatccggggtgactcggagtcatcctgacagagatcagccacgatttatcccacctgctaaggggcgaccttagcagaattcaatgaattcgtcattgtgttaagcaaggaccctaatgaatctcttgtcggcccagtttactgaatgaccattagccacaaatgagtcacagcacaccgcccccccccgcccccacacacacaccgatagtactgctatcaaggctcttcttgacagtaggagggggctgggctcgggaggacagcaggcgtgagaggttgtgctttcctgcgctgatactgacagctctgaaatgcacgcatgcctcagcatcaccagggctgctggtttaaaatgtggattgcaggacctcatccccagagcctctgaatcaaaagagctgattgggcccaggaatctgcattttcacaagcacccctggtaattctggtgtagggggcccaggcatctgaacctgagaacgtgatgagctccaggaggtcaattcttggccttggccttgtcgaggtgcggtgtgctgggcagggtgggtgaggtcagcggctgtcacaagtaaccctgcgtcttcagtggcgtgatgcagccgaagcgcattctccttcaatcgggtccaacggggtgctcagtgggtcttccacaaggtgactcggggtccggtttcccggagcctcggcctccccactgctagtgatgagcagaggatggcacagaggtgacgtcacctcgacctacattgcgctgactggagccagtcctgtggcccccgcctgcagcgagggggtgaaaatgttgcttagccatgtgtccagagcgaggaaacgggtttagtgaccatccctctggccgttgttgcccagcccggaggcctagtggggtgcccggcattgaggacaggtggccaag

SEQ ID NO: 84454 - DNA, 1089 bp, Homo sapiens
gacctggcaagccaggagcccctgccctgcggccgggtgggggcaggtggggcagggccggggcacgaacctgcgtctgccagctgctccctgtcaggctgcagccaagtccgggcagctcctcagccagagacccaccaggagcatgtcccgcagtcaggccccgcctgggcagccactgctgctcagaaacgtgacagtgactaatggtttattacacacctgccacctctcatccggcaggcgggcgggcgctgtctcccgggcccagctgtgcactgccagctgggcggcggggcgggtgcagggggagggggcacgtccagacatgcagacgcacgagacagacacagacacagtacatacacgcaaacacacagacgaaagcaggcactcggagacacagctcacagacatggcataggcacgggtgcacgcgtaagtcagacacacacacacatacgcagacacatgggcagacccagcacacacacagatacacacacagaaacccgtgacacacacacacacacctgcatagatttttcccaagcacacgatatgcacgtggatacacagacttacaagcacagggccacgtgcagacagacacagaccctgtctgcaccacaaacataccacacacagccacacacacagaagccaaacatcctcgcataggtggatacaagcacagactcacatacacatatgcgatacacatatggatacatacacagagtacccccacaaacacacagacacacacgggcagagacagacagagacaggcacagaccccccccacacaaacacacagacacacacaggggcagagacacacatagacaggcacagaccccccacacacaaacacacagacgcacacggggcagagacacacatagacaggcacagaccccccacacacaaacatacagacgcacacaagggcagagacacacagagacaggcacagacccccccacacacaaacacacacacacacacacaggggcagagacacacagagacaggcacagacccccccacacacaaacacacagacacacacacacaggacacaca

SEQ ID NO: 84455 - DNA, 2286 bp, Homo sapiens
aggaagcaggtacaggaggagcctgtgccgacctgggccctgggcagagtcccccagggaaacacgtggccgtcagctgccttggtctcccccagaggcgggggttgtgtgtgttgtggaaggcggtgatgagtttggtaacactgggttccctgccgtcccagactcccggggcagcccacagagcttatcagacttgcgtcactacggtcggatagggccactgccgtgtccagagtggggccactcccgggcaaaggctcctggtggctggccaggctctcaccatgtgggcagctttggttcccaggtgttgcatttgaagtggccgtctgggaggtggccacttgctggctgccgggagtacagctccagggctggggactctgccctcctgtgaaggccatgaggaaccctggggctgggattcctctggcaggcaaggcccaaacggactgaccaggcatcttcagctgccgggagaagggtgcaaccgaaaccttgtgatggatgtccttccctcgtggggcgggtgagcagttgagctcatctctttccaatactcttcggcctttagtcaaatgaagacccatttctcatgtgccatcgcatgcagtataaaatctattgagaggacactcctaatttatcaccagtggatgggaacaggcttccctagaacaattatctttgtgttgtctgcagccaccttgggagagaagcagcactggttggtgataggagggaggggcttggactcaggtccaagtttccaagtcctagcattactacttcccggccatggagccttctcaaggttcaggaccttccctgggctcagctgctctgactactgaataggcatggtaaaaataaaatccttctggtagcgtggtgtcagtgacattggatgaacattgagaaggcactgagggctgccatgcaaggctgtgcaggttgcacactgcacaactcccggaggcaccattcttattgtggtctctgtgaatgtgctttctgcatggccattggggctgccgtgtggcacatcagtggtggccctggagtagtgccacgtgggccctgggtatccttcctgagctgtgaaaccgtttctgaagtggttattgatatcttttttttttttttttttttttgagatgaggtctcactctgtcgcccaagctggagtgcagtgacatgatcttggctcactgcaaactctgcctcccaggctcaagcaattctcccacctcagcctcccgagtagctgggattacaggcgtactccaccatgcccagctaatttttttgtattttaatagacatggggtttcaccatgttgcccagggtggtttcaaactcctgaactcaggaaatccacctgccttggcctcccaaagtgttgggattagaggcgtgagccaccgcacccgctggatatcattattaatacagatagcagatgccacagaccctaccgctgagtttggggtggggttgcagaaaaccaggccaagattgactctctgcttatggccatgttccaggggctcctccctttctcacctgccatactggggtgttgccttgcttgacaggggtgctggggctgattgcccctttggggcagtctatgggttccttctgccccagtagctgtctgctttgcctccacccagagatcccttgttctcagcagtgcttgctccaggctttggggaaccactgggccaggccttacctccaaccctggccgaccaggactggacttgcgttccctatacatgggtgtcagagcctgtggtgtctccacctcctcctggctcttcccatggggtttctctctctgttcccagggcagggctgatcccagcatccacacacagcagaggaaggagggagcgagggtaatcaagagaatgaaagcactgagctgttttcccaccagagggtgcagttgcaaaagcctgattttcccatgctgtgcctcagtttacccgtgggtactgtcaccaccagttgccctctgttggccacctgaggaaaggaaagccagcctctccctgtggtctgggacagtgggtggggcgggggagaagaggagggggctggcagggtgggtgggagctgctgcagaagacacagcatgccctccgtctctactctgggctgatccagaaggtcccttccctctgcctgctcttgtgacttctgccttgccgatcaccatggcaggggcttacttaagaagaggtctgtgtttgtttcccatggctgctgtg

SEQ ID NO: 84456 - DNA, 1094 bp, Homo sapiens
ggaattcccacagggaaccagaccccacactccaacttggcctcccttctgctatgtggatttctccttgggcctgagcaactgcccccaaccctcacggtcctcacccccgccaaagaaggtacagactccaggcttctctcttttcatccccagcccaaacaagctctgcacccgctgttctgcctcccctggcaagcagaacatggtgagatggccgcagagaggcccaggaaccagaccccacaggcacatctgagcctgagtttctctctccgggaaatggggatgatcgaggagctcgacctcggttagtcctggggaggtgcctgggtgcctggcacagtgcccctgcccgttaggattactgcaactgttggaaccctgcccttctgctcccggcccattagggctgggctggggtgagttcggtggctgcgcgggctggtctggccacctcctggctccttgatggcagatttgggcacagaaagagcctgtggccgggtggtgtgggcagagtgggctgggggctctgccctccctgcctgcctgccgggcgtgtggtcctggctggagacacaggaacacagccctggctctgttctcgaagtcgtgggaggcgggctgtcaccacagtggctgggagctggaggccagcccagagggagagaggacgccatgtctgtgccctcacccttcagcacaggccctgccaagccacaggtgcctctgctgcacagggagtgagagggggctttgctgggcagagagcagggggctggggctgggagatggaggtgggggctgtgaaggggaggacaggacagcaaggattgctgggaaaagaggctgtgtccgtggtgccataggcctctctgcacacccctccgcacaccgcacaccgcacacccggccccgcgttacccgacggcccctcctgttgtgcaggttgcacgctgtgcagtcgcgggtggccgtttggccagagttgcccagtgtgagtgacccaggcctgcctcccaccttcaccgaccacgtgttgatttttggttctggaattctgatcaccttattttttattgtaagcctgg

SEQ ID NO: 84457 - DNA, 1649 bp, Homo sapiens
aatggaatcgtaccgtttgtagccttttgtgtctggcttctttcactcagcgtggtgtcttccaggttcatccacgttgcggcccgaatccgaacttcatccctttttatggccgaataatatttcattgtgtggatagaccccatgttatgtatttgtccttctgttggtgacacttgggctgtccccaggtttgggctatggtgaagaatgctgctgggaacatgagtgtgcaaattggtccttgaacacctgttttcccttcttctgggtatagatctccacagaggggatctgataggccacggtatccttttcattttgtttaacaagcacatacgtagctcttgttgggtgccaatttaatattcataacctcactaagagggaggtactgttacctccgttttacagatgagcaaactgaggctatgtgggtttaacaggcaggatttgaaccaggcagccagatgctgctggctttcactagtcagtgtagtaatttggcatcaaggccaccaggtctgagcggcccttgggaactgcttctcagggttgcaggcccaggaggcctcccttgtgcaaatcactcctcaggatgctgttgggtgaccctgaggccggtgcatctgttcacagaaatgtcactgcaaagcaagctagaggggcagcctctccctgtcagggtcccctgcctgacacccgcctgggggcatctcaccgggctggggccaggcttccaggcctgctcacagagtgcctgaggaagtctggtcccaggcccaggaataaataacaggcgtgcaggctgtcagccaagctggctctcaggtctcctggagctccacagagccccggctttctgttgatctgatctcctgtggtctcttggctcctccgctgtgatcaatcttgcggccctgggctggccgggcagtcacccccacgcaatgtggttatctcctggccacacatcgctgctggggcccggggctcgctcaggcggccctcgatggctcatctcccctgcctgatctcccgtcctggtcattctccagcccgcccttatctcagtgtctgggctcttcctttacttgcaaaccgtgactgtggtgggggcagggacggccgccttgtagtcaccagaccctctgagacaggatttgcttcccacacaaggctaatcaggtccataggccctggacgagggctcctctgtttcagaggccacatggtgacccgctgcccctgcaatgtgcagaattgggtaaaatcgctcccagtcacacagctgggagggaccctgggaagatgcacgtggtctgcccctcactttcccgatgagacagcagagcccttgaaagcagggggtacctgcctgtgcccgggctcggagcccacacccggagatgctgggtaagatgggagggacagaatggggagcagggaagcagatccagagccaaagcactgccaaataacagcagaagccccaggccatcaagagcatggcacctcacacatgcacacacacacacagccatgtgcacactcaagcatgtgcacacacatgtatgcacacccatgcatgcacacacacaacacatgcacacacactcatacacacatgcacaaacacactcatgcac

SEQ ID NO: 84458 - DNA, 1137 bp, Homo sapiens
caagcggagtttgtggctgaggtggaaccctggtggaggaggggtgtccgcagcctctgcacccagcaagtcccgtggcacccccagggccagcctggctgctgacagatggtcatgagacccggggagtctgatgaagttcatttttcacctgcacgtgttttcgcctccccgctctcgcgaggcagccggccatccatcctggagcccttccgaggcctcggcggtaatggggtcatagatcactccctggtggagacagagctggacagggggaggggagccattaagaatgaccgcgggtgacccccgggccaggacggctccagctccagctccagcttgagacggggcgtgcacagccctgaacctgggtgtgggctagataggggtatggggtgctttcaggcctggctcaagccccattggggaggggtgggcagggagcgaacccccattccccgagggtacacccagggagggcatcactctgcggggctgtctgggcctcccgtggccatgggatagcggcgcttctggtcaaggcctctctgtgacaggtcagggttgaggggtcactggctcagagactaccaccccctcccaccctgtttaaatatggtggttcaggtggaaccctcccacgccctgccccctgtttgggctcagcattgtggccagcagagctgaacaaggccctgacgccgtggcaggtgcctggcccaatgcatcctgcctgcgtgcctgacaccaggatggacggctgactctaggtggggagttggatgctgcctgggtcaaacctggtcatgccatcttactgtgcaaatgagtaagtctcttgccccatcttacctcagtttcccccataggcaaaatgacaataataaagatatgacgtaacgcacgggggtttgagatgatagggtgagctgtcgccatgacgggctatgtctggcagcttgggcacctactgcctcagaagcggtgtctgtggttattgtcatccttctcatcatcactgtcatagtggtggctcagagcatggcttctggtcccagctgtgtcggctgtgtggcctggaggagatgctaaaccctctctgggcctccctcagttttgtgacccgagtgttca

SEQ ID NO: 84459 - DNA, 1099 bp, Homo sapiens
aagctgaggccacaggggacttgtgtgtgcctaagtccttggtaccccaccagccccatgtagtcaccccagaaggcaggtggggtctggggctcccggatctcaccagtgtggttggcgtgggtctgcatttccagggccagaaccctgctgggcagcttccagaagcttctttaagctgtctgcatcatcgtaccccccaacctctacagccttccagaaacgttaggagtcaggggtcactgagtggccttgcccagccctgggttaatggggtagctccttgaacttcctgttctctcctccaaaagttcacccctaaactcctctcctctccttcccttgctcttagcaaagcagcccgtgaaggtatcagagcgcaggagtcctgcaagccagcttttcttattccagttctgcaggtagggaatttgcccagagagctcaagacactgtctccggccactgtggatcctggcccagcccatcctagccctgagtccagccccagcatcccggcgtctctgctcagtcagccacactccagtgcgattctgccaatctgccctctccctggttgatctttcattttacttggggtaactcttagcctagaatgcaggaggtggaatttgtttttcccaggaacagggggcctcccttcctctgtgggggctaacagtgaaactcggcccagagtgtgaaggcggggacctcggtagccccagtggggttaggatttgacctcccagagagtcccgggaggcagctctagccccaggcccggccaactgggcaaggcccaaaccccgaagggcccgtgggcgcctgtctcctgcccgaggggcgggccagctgcctggcagagtccccgctggccaggtgcctggttccgggctgggaccccacgcgcgctgccaggctgccgggctggtggtgggagcccgcaggccagagtgtgggctgggctcggttcccccatcccacgcagtgggcggcccgggactgtgggggcgggctggaggcaaccttgagctcatcagtgggagacatctgcttaaaaaatgtggggatggggaggggaggttaccgtcgaggt

SEQ ID NO: 84460 - DNA, 1029 bp, Homo sapiens
acatgcatgcacacaggcatacgcagagacactcaggtacacagacacacattattacatatgtgcacatgcatgcatatgcaaatatgcacagtacacagactgcacagagctccacagacatacacttgcaccttcgggtttaagccctgagcaaattgacatcccgtgtcttgttctccacagtgtctccagtgccaagcatggggctgggtgtggtaaatgtttgtcgagtcagtgaatgcatggatggctcgaaccgtgtcttgactcagcaacaccgggaccagtggggtctggaggtgaggatcaggagacagtcagccctctgctttgctggagactggggaacacctttaggacattcagagaaggacagctgcaggcacaacttgctctagcaaatcacaagcctggattgaggcctcaggattccttgtaccgtgttcctttccactgcccagagatagccagctgctggactaagcacttgccatctgggggaggcgcttccttgggttccagaagtttcacgtgcatctgagatgaacctgctgcagcaggagacggacagctggccagtcctaaacatcgtctttctcacacccaccccagaatgaggactcggctgctgatcttcagccgacactgggaggacctggggttaactttgccaagggccacaccagattccctggctggggtcagtggtcactggtcagctggatgctaacctgactgggtctcattccctgcagcttttacttttttcaggttgggtaagttctggtgctgaggccccaggaaccatcacgggggcacagcgcggcctggaatatgcccgtggaggtggggccttgctgggagcttttcctgcagctttggaaactgtgggctgcagtgaagccaggcaggccacatctgtgccctgggaggccaactggctcagccccggcctggcttcccgaggacgcggtcccaccggagtcctcacccatcatgcggggcctcgtggcaattcgagccctg

SEQ ID NO: 84461 - DNA, 1012 bp, Homo sapiens
ggggtcaccacacgggtgtctcacggagggtcagctgccaaaatgacctggtggagaggcagcccccaggagggaagggtgtgggcaggtgcagtccttcctgccctaactccccagcctccacctgccctcagctgccgctcctcctcctcctcctcacaaatcatgaccacctagtgaaggacctcggccttgagagaactctggggcctcttgctctgagccaggtcagagcctccacaaaattacagctgtgagacacggcgaggggagcggggcctctggccctgctggtaattacggcccacggagctctgattgccgcagtccaattaattaaacaccgcagcgacccaaattatgatctcttgccttgtaccaagcagtatttttaaccttaactgtcggggctgaacttaaatttcctatctggacagaagtgtcacccgagggagaaaaaggcagtgtcgaagcaaacctcgccgatgacagaccctgtaattagaaactgtagtgtccccgagactggtctttaaaactgtcagaagccaagcggccgtcatttgatacaagactatcatcacccgtgaacccattagctgcaggtaaataacatattatgccagggacggaaagcagccaggctggggaattcgccggcgcttaattaggaccggcagtgcggaagatagatggtcatcctttttgctcccttcattaggagggagggtcaggtgtggcggtggtcaccggagcccgggctgccgaccctgcagaaaagcgccatcctccgcccgccctctgcctcccacggtgctgcccgcacctctcttccaggcctgtgtttactgctgatccctaccagctggtagtgttctgcaggagtccatgtgtgaagagaggttgcgtggaacaggtaccccgctcagcagagggaatcttggtgaagtgggctgaggagggtgggtgtggaccgtccctgagggccacccccaaagcccacgatgtaaga

SEQ ID NO: 84462 - DNA, 1020 bp, Homo sapiens
cgaggaggccaaggccaaggccctcccagccagctccagagtacgaaggggtcatcgtccttggtcacccacctggagggtccgagctccgtttggccagcgacccctggccctcgctgtcatcagcttgcctggtgctttgcgggtgcctgatgactgtggagtgacgttgaatggaaaggccaggaggctccatctgaggatgtatgctggccctgaaggccagcgtggggaacaagagccgaatggccatgccgggtgggagacgtgtgtgctgttcacggcacacctcggctgcctgccttctccctgactgtgtgccatgagccacattcgtgagggtaaatgtgtgtgtgtgagtcccttcctcgcctctgtcagagactgcaggaaccttggaggtgtttggaagggataggagacccccccagcccccacgtcctgatcccttcgtcccctgcagacggttcctctgacagaagctgacaagagccatttccaagatggattgattcaatttagcacaaatttttgccggatttggtgacgtatggctccctgttggaaccgcattgaatgtgactccaaagagagaggctttattaggccaagccgcgctgagcaggtggggccccgggggccaagcacccccatgccgccaccatcagatgtacccgccctggagccctcagggctccctgcctgcccctcggctctcccatcattagggggccgctcagctgctcagaaagaaagtgctttgtgagccggcttttcattatactctgggggctgaatttccattttattcccagaagcaaagttttgctgccacgaggaccccactgtgtgaggcccagcacgaaagactccttccctctgggctgataaattcttaatggggctgtactccagcatcccctgggctcacccaccgcttccccgcagcccaggaccagggcccgagcgtgcgtgtgtgtgtgtctgtgtgtgtgtgtgtcagtgtgtgtgtgtcggtgt

SEQ ID NO: 84463 - DNA, 1129 bp, Homo sapiens
tggggccggaaagtctcagccggggttgaggagcctttgggagcccaacgagccggtttgtctgggttcttcgtgaagatctcagggatcaacatgctcatgctgacaccctgacctccgggctgcacctccgtcttgactagtgctgggaggccttggactcctgaccaccgattgccatccgctgatacttgatgtggtcccggggcagggtcagagatcagaggcactggcgccaggcgtgggagctggttttctgtttagatttagagacataaacccaaagagtgaccctgtgcctgtacttaaacctcacctcgcgctcacctttgtagaggaggaactggagctcagagcaaacttgtgaagcagccaggatggggtccaaagctcctgtctcccatccactgccgtcctcccagcccagcctccttgggcacactcactctcctcctgcctgcagcagaatcctgtccagggcccagcctgcgggcatcaataggccagggtttcaggcccagctttacctgcagcagttcagctctgggcacgtttgggtcctctgtggacctcggtatcttcttctttacagtggtgtccctgaagtccccttcctgctcaggcatccttcccttgcagtcagtaacatgtgtttgcagcctccctgtccctctgcatctgagtagcggctaaggggtttccatctcccgcctggaggagcaggagtgtgttgctctgtggagggcaggggcctggttgtgcactggagccgccctgagaggggccagcctctttctgtctgagtgttctcaccccataaaatccggagcgcgctggcgctcagcccagggggtcgtggagggttcccacacgactcttgtaagatcctctgctaatgaggtcccggcagtgccaagtgttcccgtgacagagcgtgccagcgtgaagctgggccccgctcacagaagccaggggcatcttctagctggcaaaggtggcaggggaaccagcctcccatgggaacctctccagagcctcctagaaactccaggagaccccatgggaagacggtctttggaagccaggcaggcatatctgggcggatggctgctctaaggatttaatgaga

SEQ ID NO: 84464 - DNA, 1144 bp, Homo sapiens
gaccagcctgggcaacatggtaagaacccctctctacaaaaaatgcagaaacaattagtcgatcgtggtggtgcctgcctgtagacccagctactcaggaggctgaggtgagaggatcacctgggcccaggaggtcgaggctgcagtgagctgtgattccacgactgtactgcaacctgggtgacagtgagaccttgtctcaaaaaaaaaaaaaaattattcatgaggaagaggcagtggctgcttcgtctactattcccattccacgccagacacggtgcttcctcagaacagctctggaggtgaggctactcttaccccccttgacagccagggaaactgaggtacagagagattgaggtcacatgtgcgctaaatggtggagcagggcgccgatcctgggcagtctggctccagagtccctgcttcataaatatttgttgactgtgttgagtgggagctggccgctggcgttggcagcggcgccctccgagccccttatctggttcctgtcgtttctggagggaggactgactcctcagccatcagctgaccccaccccagccccacactgaactctgggtgaccctggccttccctcaggatcactgtccactgctagaaaggctgccctcggccctccagggaggaaactgaggcccagagagagctggggcttggcccatagccatgaagcctgctggtggttgctctaggactcggggtccccctggaacatttccccggccccagctgcccccggaggccagagcaagtcataaatatctcatccggcctgtcctaggcccctttcttgaccatcctgggaggggcttgcaggaggctgaggcttcccctgctgagagctggggtacccagagtgaagctcggcctgtgggggccgctgggttctatttcccacccatctaaactgcttccagaaagtcaaggtgtgaggcaggggctcaggcccacctgggttgggggtggtgtctggaggtgaggtcaggctggaacccaactcccagggtgcttggagccgaggcggggacggggcacccgcagggaccaaggtcttgcatagcctcaggcttgtcatgggacgttagcaaaccatagctgtggcgccggagccacccaagac

SEQ ID NO: 84465 - DNA, 1004 bp, Homo sapiens
gccttttagggagctactaatgagctatgtctgatttttatgaaactccatggtaaattattaatttgggccagaaatgaaagtgtggaactggataggctcatgaatattcatcgttgacttcagtacagggttggttgatcagtggctagagcaggcagccagcctcgtgacccagatacgggcttattacccagggcggaggctcttgggaaacccttccccattcactcccttagtttcttggtccagaggtggggctggtaactcacagctcattagcaaagttgaagctcgaccagggctgggctggggccagctcaagatgggagcagaaatcagagggttcttgaccccctggatcaccctgggttcacagcggtctgttctcactttggagctgctgtggatgagggtgacgtctgtgcagaaggagccggaagctcccacttctctgcctctactcccctcttagagcctcctgggaaggatggagacccctagaaatgagtccctttaacagataatctttggttctggagtatgatcatggttagtgtcattgaggtcactttctgggtggcatgcaacggagcctcctcccaaattcaagccttcttgaaatagtaagtttgcattttttccaagatggttctgctgggatccttttctccccgacagggccaaccctgcctaacactctagcctgcccttctctacctgtcctccacacctttggccaggctgttcctgctgcctagagcgctgagcccaggtgtctgggaacggtcagtgctcactcctgttaggagtggccgctccctgctctgtgctcttgggtagatagtaagcaaccgtgacctaccactgtagctctttatttagtagctgagcccctgggcctgggggccaagtggtcggatgtgaattcttgctccgccttgagtccttgtgtatgagactgtgggcaagttactgaaactctctgggcctcagtttacttg

SEQ ID NO: 84466 - DNA, 1064 bp, Homo sapiens
ctgtgtgccctgtggggaccggcttccctctcgtctcccctctcgtctcccctcttttctgatctcctccttgggctttcacattttatttttattttttcacttgggcactgcaaaaacacacggctaattgcgatttctttttcatgacgggcgggaggggcatatggatgtgttcattttatagggtttttttcctcccccttaataataatgctttaaagatgtttgacatctgtaactaacagctggcatcctgttatggaagaatgtccttttatttcaaagcaggttgaactgtcattaatagtataattaggtgattatcactatatagcagaaaactgcttaattgtagagatcgcttttctaggattccagtctttttatggttatatttgttttagctgttgaattttcattatattttggcatttggtatgctgcctcgtttctgttttttttttttttttccccttcctgttttttaatgtgtctgacagctgtctttgggagcatttggttttgaaggtgctcctggtgttagagcagtgacgggggagtattacctggaagaggtttcttatcctgggccctgcttaacacattctgtgccaggccagaggcccacaggagcaaggccaggaataccggtgccctttgatttatctgatctctctctgggtaatagtatggaattagacatttaaccctggagctaaggttgtctgttaagaggccagcttttacaatgcaatttatttttatggtgcgtccttaatacacaatattaccaaatgcttcggagtctcttggattccagagggaaaggcacatttaaagggacatggtctccgatgtaactggaatttgaaaataaatgggttttccagactctacgaggaaatagtttatctcttaacgaaggactttgaaatgagcatagaggtgggcttgcttttgaaaagcgaagggaagccaaacgctgccccttccacacttttggagcctagacgtccttattggtctctgctagaggcctggggtagatgctggagctcgga

SEQ ID NO: 84467 - DNA, 1370 bp, Homo sapiens
gggagaagtggggtgaccttggtggtgtcagcttggagcttctgggcttgggggaacccgagtggtttaggagcaacgctggtcggggtggaggggaccctcccctctgggtggggcttggggtatcagagggctctacccttggggcggggcttctgcctggagggtagaatggggtttttccaaaaactaacccacccacttcttttgaaattctggctggggccagcttgggtcggtggcagacacagcaggtctttgtatccttggaatccttctgaagccaacttggggagggcgctttgtattgtaaatttccgcagagtaattatgtcttaatgtatgataatccggcctggccctggcgctgggcagcctgtgtctgcagcggttgctgccggggactcacaggccgggcaggcaggtcagagggacgcgtcctggagatccagggccagcagggtcgatcctgaggggcctgggggattccccagacctacgcctgggagacccatgaagggcttgtgtttttggtgcggcctcccgtctctcttcctagtcagagtcctccaaggagccccatctcagatcccagtcccgggttcctgctgaaagttccttttcggtctgggccaggaagagagtcatggaactaccaagtcttaggttagaactagccctgaaagatcgtctaggcttggcttgaaatagctccatggatggggagctcaccccagtcaatcagcaagcagttattgagcatctactggctgctaggcactacacactagtcactaaggccctgaggaaccagggctaaactgaaaagacaaaaatcctggagcggctggaactgacttagtagttagagaggcagacagtagacaagggaaataaagtggaatgcatgttagggctgcagagaagggatacagctgggaggagggtgagagaagggtggagttttgatgggacaaccagagagggcctcttctctctttctgggggaagggcaggccatgtgaagagaacagcagtgcagaggccccatggctggaacgtggctcctggactatgttgcttggaatgttcactctgtggatgtttgctgagctcctgcaggggaagaggacattctgggctgtcccgatgatgttccagtctcacagtggaaaagcgtgtagggagagggagaaggggtgagtgcagagagggagagagcaagggagggcccttcctggagaagcgggaggccttgggcagcagccggccagccctgaaggctggccagcatccgaaccccgccaaggagggaggctgcgtgctctctgcctccccactgaactgggctccttcctgccattgagcct

SEQ ID NO: 84468 - DNA, 1798 bp, Homo sapiens
ccatcccttcgccttcgggtggaactccactgcagaagctggctgcggttcatgggggatggggaagcccccacgtgctgggttcctgggaatgctaagtgcaggagaggaaatggtgttcttggggcctttttggggactggccagagcccggtcacttgggaaagggtgaagcttccttggacccgacatcccctgggaggaccctccttggcgaggggaggagccctgcctggcttgcttcctgggtggctcctccctctggtggtcctcagtcagcactggtggcatccccagagctgacacccagttcccccttacgcagccgcctggggtgcctggagctcagtcctccccgtgttgataaattgagcttctcttctccacggttcagggcgtcggggtggggacggggccatcctgcacaaccccccctcgcctcttaatgccttttcacccctgagagcctgtctgcacagcctgcggttggtcggccgccttgtcatttagctgttccgagccagtgatcgggaggcagcacaaactgtggcatttgctgagcgtaaaaattcaattaattccagaaggcagattaaatataagtgagttttaataatttgctgtaaagtcggaggattactgtgggcacggggagggaagccacacatgcgtgcttgagcaggctggcacagtctcggggatgccagccagggtggcttcctggagccactcattcctccccgcagggtacacccccagctctccagaggacaccctcctgcgagggtggtgtcctgggggtctcccgctggaattctgggggacggtaggaaacgctggcccagtctttgattccaaccctgttcccccgattacaagggtaataggcaggacatacagcgattctcagttgggggttccttctaggatccccagggagtgagctgtctgcccaggcagacctggccatgtgtgccctgtgccctgcagctctgccagcagcccctggtcctgttccctcaaactcacctttctctgcctgcttccagggtcctccatagctgacggcttccaggtctgggccccagggtggttttgttgtcataactttttggaaagtaaagcagtatcaagaatgggctgcagactcctcagattccaaggctctcggcctttccaggaccgccccccacccccattccaacacacacacaaacacacacacacacacgcctgaagtcacacacgcaggaactcacacatgctcacacattcgcacgcaaactcacacacgggccctgtgctctcccagcatgccagtgagtgagtcaccttcctgcagcacccccatattcagatgcatgtgagagtgggggcttttcatgcctgccttttgtctttacccactgccaaaacacaaaaaaacaaaagaggaggcctcacccgccccccgtcctcctcctgtcgtgccacgagaaatgaggcctgacccagaaaaggcaattgctggaggggctgtctggagcctgcctccccggcggcctctgctcccagggaggggagtgagggaaaggaggcaggcagcttttatgtaaagacagtgatggtccagtgagtacaaaacgctgtttcaaagccagcgttcatcactaccacttcccactgtgatctccatagatttctttgtctccttcaattggccctaattatggagctggaggctgcctgatcagtttcattcttgtcatgaaatcctgagggcacgcatggggacggggacacaggctcgccagctgca

SEQ ID NO: 84469 - DNA, 1371 bp, Homo sapiens
agccgtttgccgctttccacctgctgttgtctctggcgaggccacagaggatgggacaataaaaacgtgctggcctgcaggaacccctgctgcagccctgcctgccctgctgtgtgtcaccggcgtcctggggtccagaggcttctacccattggtccccaagggctccaggaaccagaggcccatccaggatggctccaagccctgccctggggctttccttctctcttccctttttggcggttcttctgtatggcagccgagagggcattttcagggtgcccaggcatgacccctgagcttggaggcccgtgccgtgagaccccatggagtacgcccaggacagcaggactctcctctgtgtcgcctacgtttctccaaacactcgctttggcacgtggttgcctttggggtgtctttctgcccagctgggtctccatgtggggaggagggagggagactttcctgccctgtcccagccccagtctagacccctcccatcattgcagtctgctgcagggcccaaggggcccatcctggttctggaactcttcctgcatggccatgggcaagtgccgtcccttctctgggcctcactttccttgtttatagagctgacggcgatgacacgagcatcatcccactctgagagcttcccagccagtgtcttaagtgtctgatccacatacatttcctttggctgcagggtgcgacttgggacctgtgtgaggagtgtggacttggagccagcctgcctagggtcacttcctgcctctgacaattgttagctgtgtgaccttgggcaagttactcaacctctctgtgcctcagttccctcacttgtaaatgggggtaatagaagagcctgcatcttggtgggaggtgcaggttcaccccaaggctggctccctttgagggctgggagggaagggtctgtccaggcaggcctctctcccctacttggccgtccgttccctgtgtctcttcgcatcatcattctgctgtctgcatctgtctctgtgtccagatttccccttgttagaaggactccagtcagtgggttcaggcccaccctaccccagtgtgacctcatctgaactaattaattacatctgcaatttccagatgagggcacattttgtggcactgggggttaggacttcagcgtaagaatttgggggacacagtttagcccatgacataggtgttgcctcggacggcggagccctggcctggatgcctttgtccgtgaggttcccgagtgccgagtgccgggagggacagcccctctcctccagccccatctctctgatctcgccttcccatgggctcagcccgaaggctgtttcatgagcgtcatcatcggtcggc

SEQ ID NO: 84470 - DNA, 1088 bp, Homo sapiens
caaggagcactttcctggagggaggggggcctttgtcagggggcccggggacgctggagggctgaggacagcccagataagcacccgaggcctgctgcctcccaaaacggccctcggcctctgtacctactgccctggggggcagctgtgcgcacagctctggggaaatgagagtccccccagggactttcacatgttcacactcacacatattcacacacacgttcacactaacacatgttcacacatatactcacacatctgcgggtggggtacactcctgcatgccaggagggccatgggctgtgctgacttccaggcccccaaatcctccccttcccgggatccccgtgtacccgcctctcccctccctccctcctctctgcccagctggggacttttcaggccccacccccaccggcttcctagcaggagctgaaaggaacgttggtgaccactctgcaccccagacctcctgcctggggcatgggagacccaggatgccacctgagcacctgctggggtggggagggtttgtgggtggcttctaggtcgggcagggccctgtttctcagctgtgcacacaggtggagagggagagggctgtggacctgagagccctggacgctgggcagagcctggatgctgggtgggcagggcctgggctgggtgggagctttgacacggcgcgggtggagcctgggcacttttggaagaactccagaggagccatggcgggaacctggtgggttgagtttccctggcatctctggaaggtggggcggggggtccctggtatttgtttaccagctctccaagtgaataacatttctgaagcatcgtgcctgagcatgtgtgacccagtgtgtgtgtgtatgcgcatatgtgtgaatgtcagtgaatgtgtatgtgtgacgtgtgcaaatgtatggcggtgtatggaatgtgaacgtgagatattgtgtgtgtgtgaacgtgtgaatgtgactgtgtgaatgtggatgactgaacatgtgtgaacttgtgtgacattgtgaatgtatgtgtgaatatgtgtgagacgtgtgtgaatgtgagtgtgaatatgt

SEQ ID NO: 84471 - DNA, 1042 bp, Homo sapiens
agctctggaggccacaggagtgcctcccctccagggcctggcaaggctggctctctgcagggctggtcaggtcagctgccttgatttccctctcccaggggcctgatgtcatcattcaggggcagcctggggacttgagggaggatgcagttcccactgccttctcccgtcctcccctccccttcccttgcttctccttctccttcctgcttccacgtcctgaccccctggccctccccagcccggccccttagcctcccctccctcccggcccctcactccccccctaccagggctgccctgtgctagcgcctgcctgtgtgaatgtctaatctccaattttattcgctgggctccagcccatttgcataatccacacagtcaccctggttttaattgcccacaactctgcagaaagatcatgtggttaagtggtaaatcataattagataaataattggtttggccacagcaagctgcttttgttacacctgccatctgctggacccgttttttcttctggccagaacaatgcggttctgatgacagagcatgctgcttctctcttctgggggggccggagggggctgaatggaggggctcggaagcagtgcctggaaaattgcccggttgctggggtccgcgcctggcctgcgcttctttctctccaagcgggcacaccacacactcgccattcattacccggcttggttaatgcatcagagtggcaaatttgacttctttgcagaaaagggagggaggaaaggggcctggaggaggagggggaccagccagggctgcccaaggcctggcctgcctgccggttgtcggtggccccgatgggccagggcaggaggcctgctgtggagggcctgggcccgatccctggggggttggggggggggggcggaggggacaggcgggcaggggttggaaccgccagacctccctgccccaccgcggtcagcttctccatctgctctccaccgaagcctcctttattttccatgccccaggccccatctgtgagccctgagtctcc

SEQ ID NO: 84472 - DNA, 1050 bp, Homo sapiens
ccattctcccatctgcccacccatccatctacccatccacccattcctccgtccacccctgaacccatctgtccctcaacccatgcactcatccactgtctatccgtggtccctacatttggtctaaaggtaggatcttttctctggcagagacgtggctgcctcccccaccgctgcatcgcagctcgaaggacggatgcatctgctcttctcacatcagcatgatggtccgcctaacgtgaggggagggggcctggcccaccttagctgcagaacgcatcactgacttgggaaatgaagcctcaagatagttccccggggaggagcagtgttctcagacttctgtgacgcttctagactcaagctttcagagagactcccatgacagcagccgggcacctggctcactgtgttcatcatgtgtgtgctcgtgtgttctggaatcctcccaggaagattccgccttcaggtggcccaccttgttttctccataagcccacatacacctcacagaccaaatatcataaacgttggctcagaaaatttaagttgtttctgtattctaacattatgctgcccaatacagtagccactatctatttatgcttaattttaaaattttaaattaatgaaataaaatctagaattcagttcctttgtcacactggccacaattcaagtgcttagaggccatgtgtgccagtactggacagttcagatggacaacgttctcttcatcatggaaagttcagccaggcacggtagcgcacagctgtaatcccagcactttgggaggccaaggcgggcagatcgcttgaagccaggacttcgagatcagcctggccaatgtggcaaaaccctgtctctactaaaaatacaaaaattatctgggcgtggtggcacacacctgtaatcccagctacttgggaggctgaggcagaagaatggctttgtagttgtttttttgtttgtttgtttgtttgtttgtttttgagatgaactctccctctgtcacccaggctggagtacagtggcatgaccttggctcac

SEQ ID NO: 84473 - DNA, 1049 bp, Homo sapiens
ccactgccagcctgggcaacagagacttgccacctggaagacagatgaggctgtcaccccagtcatgggcaaggctctgagacttttcctctctaaaatgggagggcggcagctgtcctccctgtgacggggacctggcaaggtccctcctgtgtgagccccttgaagccgtgcctggctacccctctgggtctctgtggcctccgagggcggctgcgggtattctctatgcattgcagccagagagacacggggtccttcctcttccaggcccgctccatccacgtggcttctttgagctgagcctgcttttaaggtgccaccttgggttattcacgggaacactcacaggtggggtctgagcggtgtggggactttcccaaggtcacaaagcagtttgctggctgagccaggaatagaactcctgagccgggctgtgatcaccctgtgcccaaatggccaggcaggagggggctgggcctcctcgatgcttccatgtgggccaaggggaggggctgggaagatgtcacccaggcctgatggggaaggccaggctgagggctctctcgaggaccactgtctttcgtgggagaggagagtgtctgaactccgggtgagaggctagtgttgagaggcagtggctggctgtggctaagaaggctgtggtgtgtgtgtcttaagatcatttgggagccttgttaaaaaacacacacacacacacacaccccaaacacacacacacacacacacacaccccaaaaacccagcatttgttttcctggtggctctttgcaaaacactccagctatgaagaggggaggggctggcgtagcatcgcagatgtagggactctgaaggctgatgaaataaacccatccttgtcaactggggaaaggcactcagcaatccaggacaagacggcatggtgcggatcctgcaggaggttcccgcatccttttttggctgggtttattttggggacaggagggctgtttggcgctgatgagggtttgtgtcctcctaggggcttcttgatttcatttagctca

SEQ ID NO: 84474 - DNA, 1029 bp, Homo sapiens
cagaggcagggatgggaaaagccttcttgcaagagataagatgtaagccgggctttgaagaatggggaggatttctgggccagtgatagcagggcaggaaacagaaagaggagggtggaatctaagtggtgggggcttgcaccttcaccgatgcgtagggcagggctgggggctgagggcagatggggtagctgggcagccttccacccctcagctcttcgtgccccccggattcagtgcactctgtggacttagccccccgccccttgcccctgcaccggggctggtagccttggggagggtggactgtgcatacaggggagctgggtgaatcccagggtgctcagctctaggcagctaacggctccctcccccggcccccaaccaaaatggttttcaggcactggacagctgcccagaggtaagagcgtagacctgaaaccgcttgagacctgtcgtacccctgcaggtgtatctttcttaataatcagagtgaccatggcaggtggttaccgagaagtgctgccaggtgtaagagccacgtctggatgagactcgtgctggaatgtgtgtgcctgaggcaggccaattaaccttctcaggtctccccactcgggctgtgtaatggaggtcactgcctgccttgcagggccgggagggcttccagtgacatgcgctgagcagcgctggctcttgttaggtgcttggtgaatggcacaggtgatctttacctcctggcccacggacatccaggtccctgatacttattggcggatccaggcgctgaacaaggtgcccaggcaacataatgaaggtgacatgcagttcctacgtgctaggagcaactggccaggatggagaaggaccttgggttaggctgtgtgctgtcctgctgagccctagaagaagcaagaaccagaaagaacgtgtccgggatccatcctccgccagggctaggccgtgtgctcagacttagtgaggttgtgacagtcacgggtggcgcccgcacccctgagcacctgacgtggc

SEQ ID NO: 84475 - DNA, 1012 bp, Homo sapiens
ccaggaatggggaggcgctgcgctggggccagaagcgcaatgggtcgtgccagtttctggaggcgggcgacctcgcctctgaccgcaaccccagctacttaatgatccccctggcgaagcggcgcctccgtgggttctccagcccctgggccgcgggttctttaaagaacaccccccgcagcggcccgcaattgtggccttcccaaaagttacttaaaactggggggtggggtgccttatggaattttgaggccaagttcttagtattcagccttttctagttggggtaataaggtcaggcatggggggggtggggcttgggtacacagtctgttttgtgtcgcctccccccaccccacgcgccaccagcgcccagaaagttgttctccaaaaggcctccaggacacggagttacccgtccgcccattattgggcctgctctgtgtcaggcactgttctaggttcccgggacgcagctgcgagacagggctccgctcacgtggcgagggtgctgcactactttaagagttaagtggccggtcttagccaccaaggtccccgggacccccgagcagtccagccaggggctcccgagagtgtgggggtggcacctccgcggccccgctggtgtccccggctcacctggccggccgggccggggaggggcgtgtgcctgggcgggtggatccgggcgcccgtcggtgcgcgcgcgcgcgcctgtgtgtttgcggctgaaacccgacacctcccgctggctgaggtcagggagccgggagcgagccagtggcccgggagtgggcggcgttgcgtttgggtgtgtcctcggcggcgacagcagcaggtgtttcttggccggggccccggaagctccacctccccagcgggcccgagctgccgccgccgagcagccccgggtgagataagcagtttagacaaacactgggcgacggtggctccagcatgtatcagccgaggtggagctgcggggccctggcatgaaaggtgagcgcgc

SEQ ID NO: 84476 - DNA, 1021 bp, Homo sapiens
ggaagcagcccatggggagaatgtgacaagggaccccaggtaccgccaagggcacagggtggcggaggggctgggaatcggccggcatgggtgagcccccggctctgtctcagctgagctgtgtggccccagcggcctgtgtcactttgctgttcgcagctttgctttctggggtctgcttacgtaaagggaagtaagggtacaggtagccggcgccctgtaaaagttgccccctggtaccttgatcgctgttggtgctgggcaccatctcccagagtcacagctctggacaccgaccccagccttgactcagggccccgccctctcccttggtctgtcgtgcccctttaggaggccgcctccctgccgaggccaggctgccgcccgcatctgccagtcccgcccttcccgccgccctcctctccagcccttcatctgcccggcctgcttctccgcacacacagcagccgcttaggataatcgcgtcaaatgttgctgccatctgttgcctgacttcccgtccctcgcctccatccgggaacctccgggaccagtccgtggccgtgaacctcagtcgcaggaccgtcggctcctaggaggctgctgtccgcgggtccccagaatgcaacctcagcatccagcgccttctgtgcagagcccccctgctgtcctcaaaactgtagtgtggcgtccaacctgggaagcccctccaggtgacctggccccccaggtgacacccctgggattgacctgctcccttgcactgtccaatgctgttgtgtggacgtctcccgagagctctgcaccccgtgttcttctgcagaacacggcctcctttgtgttcccagcatggcagtgagcaagagaaggctggggagaaaccggggtggccagccccctccccgtcacccccattcacagcaggactgcagcttcaagggtgtcgtggggctcgggcagaatatggggttcagggtggctgctgggggccctaggcattgcttgggagatggctcattgc

SEQ ID NO: 84477 - DNA, 1052 bp, Homo sapiens
ctcccttgcctccacccccaagaaaaattgctttgtgccactgagcttggagcacgtggagggcagatatgataatgaatttatcatgaagccgcccaggctcctgcgatcacgtggtgcccgtgcagcctcagccgccagggtctgtagcagggtgacccgacctcgttagggccacggaagcttcgcccctttgggggagtggggatcgcgggggcgggcaccagtccccgagctgggggacgccctttatttgttcacaaacatttctttctgcggtaatgaaaaattaccaagaggggtgattagagaatccaggtccagattgtgtgtgcggggcctgaaagtgaaggcctgctgggcccagcctcacggggtgtaattaccccacggggggctgtcagggggaaggggcggattggtgcttgaaccgggacccagcagaaaattcacctcagctattagcttgtaattacagagcacagagggagcaggcctgaggtctggtgccggggaagagccgggatgaaaggaagcagtaattacgggatccgcgggaggccgggagggcggctggcacgctgattaataagcccctccagcctcgtggggagggggagcgaggaatgggacaccatatttaatggagtagagaggcctcccccctcgtttaaatcctgctgttggagcgtttggacagcaggcagaccggtttggggtctgttctgaagaactaagaacgagatgggttccggaaaatagcagctcgctgggccagccagccttgtccctctccactgggactttgcttccttttcttcttgccttttttttttttttttttttttttttttttttaaagcattgtgctgcttctgaccctattagaaacctagccagagaataggagaaagtattgattcaagaagcggtgctttgttacggggggcggggggtgggggcctcacccgggggcggtggtctttgcttccccagacctttcctgtctgtgaaatggtgggacctgagggttttgcggtgctgtgggctgc

SEQ ID NO: 84478 - DNA, 1041 bp, Homo sapiens
ggtggcactgtggtctggcctgggtccgtggagaagctctgcccatccttgtcagaggtcagaggggcctgtagtcatgtcatggaccaccccacgtcagggcagcccagcctgctcgccagccttggaagggcctgggcgcttgaccactctgtgctggtctggctgagccgagggaggtggcaggcggcgccctggaaccccaagctgtcggcacctagcagcctccggcatcaaggggctttggggctagcagcaggcatggtcttcatccccagccattttgtcacgttccccacgctcaggcaggtgtgtgtacctggctgagacacacctgtcgacagggctgggtcttccccttggttcatttgctgctcacagccccgtcttctctgcacaggatggacgactcctactgcctgtctgccctgaggtccccgttctaccccatccccacccccggctccctgcccccactgcacccatcagcgatgcacctgcacctctctggggtccgctaccctcccgagctctcccactcatccctggcagcgctgcactcggagcgcatgtctggcctcagcgcggagaggtaagtgcgtctcgagccgaggagcccctctgccctccctgtcccttgatggcagctgggcagaaagcctgggctggaacctgactggactccttggccatgcctgtcctcacagtttgtccacctgccaaatgggacaatgatcgttcaggctctgctctgaaatagcgcctgtctcggtagccgtggtctcctgcagtaaacctgcaggccgaggagctctcgggcgtgcttgggcattttgtaagccgctttgattgtatggaccttaagttcttcctgcaccagtgaaacccggctcacctcccgtcactgttcagattagcgccctggctcgttcctggttatgctttttaagggcctgccccaggtccgtctcttgttcctggtgcagcagagcccccaactctttccatgtgctgcaggctgcagatggacgaggagctaag

SEQ ID NO: 84479 - DNA, 1456 bp, Homo sapiens
gcctggctaatttttgtattttttagtagagatggggtttcaccatgttggccaggctggtctcaaactgctgaccttgtgatccaccctcctcggcctcccaaagtgctgggattacagggatgagccactgcgcccggccgagtctttaaagaaaagaaaggaaaagagaaaatgaaagacagaaacaatgatccttggggtggagtgtgtgtcccctccctgcagccctgttggcactggctctctaaggggctgcgccatctgtgtcatcttaggagcggcaggcagccagggaagcctgtggatgactgaagggtcttttctccctgactgaagggttggtttcactccctaggccaggaccaaaccgtcacgagccaggtggccgtgaccctccgcagcactttggggggccaccacctctgatttcgcccaagccccagctccatgctgcacccacggccctctggaaccccgtgtccctgatggacaacaccttggagacgcggcgggccgaaagccactctctgcacagccacccggctgcatttgagcccagccgccaggcagccgtgccgctggtgaaggtggagcgggtcttctgcccggagaaagcagaggaggggccacggaagcgtgagcctgcccctctggacaagtaccagccacctccgccgccaccacgagagggagggagcctggagcaccagcccttcctgcccgggcccgggcccttcctggctgagctcgagaagtccacccagaccatcctgggccagcagcgggcctccctcccacaggcggccaccttcggggagctcagcggacccctgaagcctggctcgccctaccggcccccagtgccacgggcccccgaccctgcctacatctatgatgagttcctgcagcagcgccggaggctggtcagcaagctggacctggaggagcgcaggcggcgggaggcccaggagaaaggtctgcctccccgcgggccccgagctgctcagggagagccgcacagtggggatggggagcctgcatgccagccacctgcccctctccgtccactcctgctttttgcctggggtagtcccaggccccaggtggcaagtgcactggcttctttgtagcagcatgacaccctcgtaggggaggcagaccctagtccccgtgcctgtcctgcctcgatgcaaattgtcccaaaaagccaaatcaaagcccgcctgtgaagatagttccgcagacaagcatgatgaataagtgatgagcggaggctaataagatagttttaaatattaatagtgcagcataacaggagagccggcctgggctcagcgggggctccacatacagggccgctgccacgagctgcagcaggtgggtcaggggttgaggacgcggcggctggcactgccccgggtcagggtaggaggtcaggcacttcattcttatt

SEQ ID NO: 84480 - DNA, 2466 bp, Homo sapiens
cttgaaagatgcttccagttcagtctggccacacagggccacattgggacagaccctctgggctcgaatccatatagcagaagaaacaatgcagccacaacacctgctcagggttttggcttccttggcctgcagcgcaggctggcttggtgcccagatgttgacgttcctggccctgccccttacgcacgctttcaagtcctcgtgggcccctggcctcctctctgggagaaagtcgaaggaaagcagagttacttcttggaccttgagcagcttcaaggtgttgatcagggtgtagccgtttactttctccttttaaccagtcagtagttttccctttctcttagcgggctagtgacgtgttgattgccagcccagttccctagatacaaagcatctttttccctgaatttttggaggaaaaaaaattaagggcgatgcagcccttgagtttcacagtcaagaagggccgggtgacatcagggatctgctgcgtggaacatcgtggggtcatctttccccttcaggaagtggcagtaatggtaggagtgggggagaaggcaccctgcctcagaggccaggcctgggtctttggggtgtttctttgtgttggggccaccttgtctgacttgaaataagaatacatcctcgcacgtcaccaccgaggtccgtgggcacagtgattcacagaggcgtcgtcaccgcacggacagctgtctttggagcacgtctaggacattgtgtagtggatgccgagagcaatctgggctcgctttgagatggttgcttcctttcaactgggcctgccccatcacacctgcttttggtttttcgggctttagtgctttgcctgcccctcaaggctcggctagaatcccgctgtccttctctccaaaaaatgatgcaactggctcgttaatctcaggctgcttttctcatagacaaagagagacttgttgaaatgctccgtgccatgaagcagaaggcactgtcagcagcagtggccgactccttgacaaactctccgagggacagtcctgccgtctccctgagtggtaagggaaggatagccccacctgccaccacccaggaccatcccatgggctgcccaggctcagaggcgaccactcgaggtcttcatcattgtgaatgtggcctcctgcaggctgtcttcttccattcttgtaccagcgtacgattcttgcacagttgtgacagtcattgggacggaacgtcagtttgaaggcgggctcagagttgaggggagggtctggcttctgtggagctctacgtgctggtcactatggtcgtagtaaccgttgtccttcagttacggcacagaggctcacatggaggccaatccaatggtaccatcccaggagggagggcgtgctccagccttagtgcccgcagcctggtcctgccactagcctagccgccctggctctcttcctgctctttgtcttcctcactctgccctctgggccctgccggcacctgccgccacacctttcctcctcttacagttctggctggcctctgccctgtcagatgtcagagggaatctttacagtgcgtcccagtcctcggcccctcacacactctcttgtccggttggactgaatacctccatgctgcctccgtggctgggggacttccttcttcctgtggatctgcttcttccttcttgggacatctttcaaggatggacttgccactaaacaccccactgtcttcagagaatagccatgtgcgcggcggttacttaaatgttccccgggtcttggttctttgcgctaggtctttgttaagtgtaagctctagagaccaggatctgcgtgctggacactcagcctgttaacttgcatttcttaatattttccttcactttgtctctaaaagaaccagccacgcagcaagcctctctggatgtggagaagccggttggtgttgctgcttccttgtctgacatcccaaaggccgcggagcctgggaagctggaacaggtccggccccaggagctgtcgagagtccaggagctagctcctgccagcggggagaaggccaggctgagcgaggcccctggaggcaaaaagagtctgagcatgcttcactatatccggggcgctgcacccaaggacattcctgtgccgctgtcccacagcaccaatgggaagagcaagccgtgggagccctttgtggcagaagagtttgcacatcagttccacgagtcagtgctgcagtccacccagaaggccctgcagaagcataaaggtaatgaggctgccagtccctgctcagctctcggctgtggttgaggctgaccaaagttgctgagcgccacagctgctcagccgttcagccgtgggcacaagtttttataaactccaatcaccagaagaaaataatttcgttattatgccaaaaccatgtttgtttgtttatctccaagctctaaaacctgaa

SEQ ID NO: 84481 - DNA, 1044 bp, Homo sapiens
tgtgttagaatccttcactgctgaaggtgtgggctccttttgatgctctctgaatactcttaagggtgcaacctatcagaatgttagtcccaattcagtgctttattcctttaagattagaatgtagactaaaatgtggaaagtcccgtcttggtcacttatctgagacaacagattaggaacatgatattttatcatgtcagtctgactctgactatatgaagcaaaaataacttgtttcagtgaggaaccagataatttactattggaaggtatccctctgcagagggacagatggcagctcccttccaggtaatgtaggaagatggtctaaggaccgagccgagggctttcaggtgcatcctgacacacaggtggcataatcgactccagagcagatttgaggtactcagtgtgaagtagctgaacaaaaaacttaagagattgcatgtcaatttttaagcccaattgaaaacagatttaggtgctactgtgttctttgagaataatctgaaagtaagttttcaaagtatgaaactaatagttggatggggaaaccatgactgggtactgtgtcttgggtggtgtgctttcgtttttgagacagttcttacctttttcttagtttattcgtgttgccttactggtttgtattctgattgtcgtattacttcttgagcaagagtagagtactcagatcgccacaagtaggtggaaggatggggagacagtgggcaagaagctcaagggccgggcagaagtggggtttccactgacaggggagaagccaactattgctagcacagtgacactgctcccaccctgggcagacctctcatggtgtgccacctgtcccctgtgctgtcatagaaaatccaaccaagggagtgccccttggatggtaagggatgagctacgtttttaagttatcggatctacttttcccttttactttagccaaggccatttccaaaagcatccagacatctgtgatggaggaggaggcctgagagcggaagtgctaagatgtgactcttaagcctt

SEQ ID NO: 84482 - DNA, 1294 bp, Homo sapiens
cccatccttccacctacttgtggcgatctgagtactctactcttgctcaagaagtaatacgacaatcagaatacaaaccagtaaggcaacacgaataaactaagaaaaaggtaagaactgtctcaaaaacgaaagcacaccacccaagacacagtacccagtcatggtttccccatccaactattagtttcatactttgaaaacttactttcagattattctcaaagaacacagtagcacctaaatctgttttcaattgggcttaaaaattgacatgcaatctcttaagttttttgttcagctacttcacactgagtacctcaaatctgctctggagtcgattatgccacctgtgtgtcaggatgcacctgaaagccctcggctcggtccttagaccatcttcctacattacctggaagggagctgccatctgtccctctgcagagggataccttccaatagtaaattatctggttcctcactgaaacaagttatttttgcttcatatagtcagagtcagactgacatgataaaatatcatgttcctaatctgttgtctcagataagtgaccaagacgggactttccacattttagtctacattctaatcttaaaggaataaagcactgaattgggactaacattctgataggttgcacccttaagagtattcagagagcatcaaaaggagcccacaccttcagcagtgaaggattctaacacagggaatctgcagtttgtagcagaatggtattttcctcaagtagctcataatactgccaaatctcaaaagttaagctgaatttcacaccagatcctacccctttccctgagccacatgtttcacacaagtgtagaaaatgccagggatccaccacaagatggagatggtcagcacaaaccgattctgttcctctttaaagtgtatattagccacttagcaatctctatattctttcaagtaaccaagctgttgactttcttactacttgcagtagcctgtccccaacttttccatccagtgcttaacctaaaaaactccttaactctgccttgacctgaggaagaccatgctaactggtgttattttgtatgtaccctgtgcttaattctataacagtaaaccccatacgcaggtgggagggaggaacaccggtgcctcggtcactctgggggcagtttagatgctgtgaaattaaacctgttctaagtgtacttgtttgaattaattgtattgtaatattatttgttgaatgtagtaattaggtatttatgaatatattgctgtaatttc

SEQ ID NO: 84483 - DNA, 1025 bp, Homo sapiens
gctcctgctgcagtgcgcctcctgcaccccagtactgtctaatcagagagcccagtgtgggcggacagaggcgcaggtccttagctcggctgtcaaagtctcttccctctctgagcctgtgtcctcacctataaaatgggatcataccaccttccctgctcccaggaccagtgggggcataggggagacacagggttactctacaaagtccgagccccagggaggttcctgaacgctgggaggggttcctcttaaactgaagcagttccggggtccgattcacccagaaggatccagcatcactgggctgggtcccatctcagcctctggcagcaccagaaagcaaggaatcccagaggccccagccctgcagttcccagggaaacggggcttggtgtggtgggggcagggtgcatccaggtgtccatcccctctttctcctagtctggctggatgagacagggtcgtgcccagatgatggagaaatcgacccagaagcctgaggaggtgtcctgggtttggctggctggctcctgctccagcggcccggcttcaggtgtccgggggcgtggctgcctggagcaggtgtgctgaataccctggatgggaactgagcgaacccgggcctccgctcagagagacgtggcaggaccagcgaggaatccagcctgtccacttccagaacagtgtttcccaggccccgctgagtggaccggacctctgacacctccaggttcttgctgactccggcctggtgaaagggagcgccatggtcctggctgttggggtcccagggagaggctctcttctggacaaacacaccctcccagcccccagggctgtgcaaacacatgcccctgccataagcaccaacaagaacttcttgcaggtggagtggctgttttttataagttgttttacagatacggaaacagtccaaaatgggatttataatttcttttttgcattataaataaagatcctctgtaacaaatagtgaatcctttttttttttttttgagatg

SEQ ID NO: 84484 - DNA, 1060 bp, Homo sapiens
tgttttgcactcatcagggccaagggtgggggcccggctgcacgtggccaatacaaacaagtcgcgccctcccctctctcagcgctgtcctctctccacaggcctgcagaggtgccgacatggggcttaagatgtcctgcctgaaaggtaaggcctgaagctctgcccccaccagctctcatggcagagggggtgctgggttggggggcaggagagaggggagttgaagccctctgccctgcagagggagcagggcaccatcccttaaagcagtcctgtacacagcaggtgctctaaaaatgcttgtcctgactctgagcacccctccaggccttctatttcactagcagtgggtgactgggaaggtggcagtgccttggggcctcagtttccccctcagggtgcctaatcccaggctgtggagagtgagggaggaggaggcctttgcgaaggagccaggcatatgctgggctgtttgctttcccaaggacacacccggggcctgttatcacccagacaggaggtccagcgtccaggtggtaggagagaaggccagcgggagaaagttctagaaggacacaaaaccactgaagggtgttgtgggtgttagcaaaggcagcccagacttctgtcctgtgtgtggatggccctggggcacctcagaccaatgttgcaggaaacctcccatcccaagtccattgctgcccctcttctttaccttggtgacagttgctttgttctccccagccaaaaacctgggagtcacgtgggcggcccctggtctgacttgcggccccgctgcctgagaccgcctctggctccaggtgtcccatggccagtggtgtgagtgccaagcttctagcctgccccggggccacctacctgaccccagcagccccttccaggcagaggccacctacccacctggagaggtggttgggagctgagccaagcctgggatcagcctgcatggtgtgagttgtggcctcaccaatgcctctgtgagacctagatcaagggcctcagtttccttatcagtaaaatggggatcatggcggac

SEQ ID NO: 84485 - DNA, 1311 bp, Homo sapiens
cgttttctccagaagcatgataccaagcatattccccggctcctgtaggccccagtgttccagcgcttccaggcagtagagggaacctcagtggtacccacaggtcttcccaccccaggcgctagagcacagacactcttcccaggcctgtgctttgatgtatctgtggccactcagaaagcttcagtcatctgcctccaactttctcagaattccacgtgaaaggcgtcccttccatgtattaaccatgtcttctatgctctgtatacctcttcatgcgtttgaaatgcacatgtttctcagtactctgcaccatctctgttcataccactgtgcatgtggctggccttctctcttgatgctgttacaagccgcccgttttcactgttagatgctgacttcttcatgtttgacccgtagtgactactgtgaagactggccagaggcacagaggatctcagcctcgctcctggacagccggtcctacgagacgctcgtggatttcgataaccacctggatgacattcggaatgactggacaaacccagagatcaataaagctgtcctacacttgtgctaggcaggcaccgctgtgactgggctccgggcctttccactacgttgaagaagaaaacctatttttaaatgtaaataaaatatcttgtagcctgtgtggaaagctgaccgttttaagaagtggcatgtgccttgaaagggggcagaatgttcagtcggtcgtgtttttaacacagagtctctagaagaggtgcagacatcccgtctgactgtccctgtggactctctcagttgtatgttgctataatcctccaaatcaaagctctttctgcttgtgcaagattgttcctattaaacagttttaactaaccttttataatctggagagaatactttttaaggcttttgaactatctttttttaaaaaaaaaaaaaaaagcccacatcttatactccaatgagtgtgtttgtgagtttttatcctgtttgaattttgatgtcgtccaggcgtcctgggatcagggtagacacgtggagtgctggtgctgagctgtttgagaagctctgtgtgggtgtttctgtggtcaggtaggctgggctgtgaacagcactgctccacatggtgtcggctcacagagccaccgcaactctgcccagcgggagtgacaccactgatgccacagaagcctttatcgttaggggcaaaagcagacatctctggtagcaggagctcagtgtggtgctcttcagccacgcagaaagctcacgtgcctgcagggccaggaaagggaaatg

SEQ ID NO: 84486 - DNA, 1075 bp, Homo sapiens
tttgcagctggagtccatccacaaattttgtacttcagttaagctattaaatttatattattcactttttgacttagtgacttcctaacctgaaggcaatgaaaactctcagtgtttagagccatagtttatgaggttatcagccatagaagatgcagttttcacaaagcatctaaatccatgcagctgtgtaaatgaggccttgttctcatggctctgttccattcagagagcttcctattggaattgtttttgataaaggggaaagaccatagactgtctatcaaaggacaacattagattcctttgaaaggcttttcattattttccattaaaaaaatccttgcatttgtgcatgctttttgcatgctttttatgtttttttaagtacttacgcctattaacttatttatccttataaccctttgacgtaggtagtgaaggaattattcctaatagcagaaacccataaaatgttagtatggaaattagcttgaacccgcttctctaatccctttctgcccttttccccttgttgatttctagtgcggtggagtagctttctgttacattctgcgcagatgacttgctggcttgctcactggcctcatcaccatgatttcaggctagaattcttgctgtggcctccatgtgggcctgtcctctgctcctctgcacggcggctgccctggagctctcccatgcccctactccctcctgccctttgttcatctccagaacattcacgtgccaccttggggatggggagagggatgctgtggttccccctttgagttcttccccctgaacttcaccctctatctcggtcccattgacctcccaagctcttctttcatggttcccactccttctcattccatagaaagatcagcagctgacttgagaaggaactttccttctcagtgaaaataacagttgctctacttctgaactccaaggcctactttttgctgcagataggaaggctcagcaggttaccctcatcttgttggtaagtggcaagttgtggtccctgcctcgccttctttacggttattgtacagtcacaaggggc

SEQ ID NO: 84487 - DNA, 1054 bp, Homo sapiens
tggctcccggccccccgacccggcccggcctggcggcgccgcaccggccacctcctgtctcacctgccgccactgcccgccgcgaccgccctctacacccggtgtcccgcgaccggaagagagcaaggccgcgccgcggagcaccacgggatcgaggaagactccgcccgcacccggccgcacggaggtcaccgtggagcggaaaagggtagcgctgcgaacgtcgtaaaatgccgggccgggctgctttccggcaggcgttggagaggctgctttccggcggcgccgggcgagaagcgcgactggagtctggggctgcggcttcccagaggcgcgagtcgcttttccaggagccgaggcccaaacggggccgggcctgaagggtcccccgccagcccgcggccgcgccatcaatcgccgccgcctcgtcccgcttctcggctgaggcgccgcgcggccaggcagcgggtccaggcctcagccgcgcgcccaggggcctccggggccctcccgggtcagcatgcccggggtgaaactgaccacccaggcctactgcaagatggtgctgcacggcgccaagtacccgcactgcgccgtcaacgggctcctggtggccgagaagcagaagccgcgtaaggagcacctccccctgggcggccccggcgcccaccacaccctcttcgtggactgcatccccctcttccacggcaccctggccctcgcccccatgctggaggtggctctcaccctggtaagcgcggaaagggccccttccccttgcaggcagcctggcctcccctcagtcagcagagaggaagctggcccagcggtcgccctccagcaggctcctaggacccgctccctagggttgccgtggccaggaatggggtgatccacgatggcgcttgggtcttggcgctgaataaatagcgtcccgtagtagcagcgactttaaccgtcgtggatgcttttagaggcactttaaggcgacgagttatacgttagtttcctgaaatcagtagcctttgtagaaacaagtcatcgttcacttggt

SEQ ID NO: 84488 - DNA, 1011 bp, Homo sapiens
gccgtgcagcaccatcttgcagtaggcctgggtggtcagtttcaccccgggcatgctgacccgggagggccccggaggcccctgggcgcgcggctgaggcctggacccgctgcctggccgcgcggcgcctcagccgagaagcgggacgaggcggcggcgattgatggcgcggccgcgggctggcgggggacccttcaggcccggccccgtttgggcctcggctcctggaaaagcgactcgcgcctctgggaagccgcagccccagactccagtcgcgcttctcgcccggcgccgccggaaagcagcctctccaacgcctgccggaaagcagcccggcccggcattttacgacgttcgcagcgctacccttttccgctccacggtgacctccgtgcggccgggtgcgggcggagtcttcctcgatcccgtggtgctccgcggcgcggccttgctctcttccggtcgcgggacaccgggtgtagagggcggtcgcggcgggcagtggcggcaggtgagacaggaggtggccggtgcggcgccgccaggccgggccgggtcggggggccgggagccatcaagtctgcacgtccgcagcctggccgctcggcttcagcaggaagcaccgaatgggcctcggagccaggtgacattgaggccggcccgtggggactccgggctcggtggctccaggctcggggggccgccccgaagtgcccggtccatcttacccggtctcgcagcggctgcggaccggcctcgggcactgaccttggagcgcccgctggccgagggctcaggctgcggggaggcgggcccgcgctctgtgcctgcagcctccgcccttgctccttcaaaaggtccctgtgcaacccctcccgggttttgcggggctcccgggcggcgctcggctttccagcctggaaggcgcctattgtttgctcacgcaagggctaggcccaaggagagaagctagacgcgggcgttcagccctgacgtcatgcttgtttattc

SEQ ID NO: 84489 - DNA, 1097 bp, Homo sapiens
ggtgcggtctcggctcactgcagtctctacctcccgggttcaagcgattcttctacctcagcctcccaagtagcggggattacgggcgcccactaccatgcccggctaatttttgtattgttagtagagacgggatttcaccatgttggccaggctggtcttgaacccctgacctcaggtgatctgtccgcctcggcctcccaaagtgctggaattaccggcgtgagccaccgcgcccggcctctccttgtttttttaaaaagaccaatgttctgttaattacctgaagcgcgtatatattatggcagttgatttataatgaagctccttaaaagcatgccaattactaagaaaaacctcatcctaggtcattttgtgaattcagagacagtgataaagaatggatcatttgcgttggggagaagcaaacaaaaaaattccaaaatgctctggggcaaaaagaagactaattccttgctgtttgtccttattcatagagaaggtgtacatttttatctttcagaatgttggctaccagggtatttagcctagttggcaagcgagcaatttccacctctgtgtgtgtacgagctcatggtaagtgtgacttttcttacttttaaataggctgaactaatttcattttgctcctgctgtgtataaagccctgtgctggagttttaaagaccttaattcggctcttgagggtctttaggggagatataaatgttctcacagggcttggttctagattaagaagtgtttataagtcaaattgaatctcttctggatctttggttatactgatacttccccacttacccttcccttccgttccacttttttaagcttcgagatctacccctttcaaaagatcttctgcaccataactgactgaccttaatgacctccctccccaccttgcccccacaactcccaaccatttgcatcacctctgtttacattatagaggcaatggaaacgaaagagcctggacttcctagcctgagctgggttttcatctcatttctatcaaggactagctactgaagctcaggaatctctttgctcacctgaagtatatggacagagcttag

SEQ ID NO: 84490 - DNA, 2981 bp, Homo sapiens
acctccgcctcctgcgttcaagcgattctcctgcctcagccttccgagtagctgggactataggcacgtgccgccacgcccggctaattttttgtatttttagtagagacggggtttcaccatgttagccaggatggtctcgatctcctgacatcgtgatccgcctgcctgggcctcccaaagtgctgggattacaggtgtgagccaccgcgcccagccctgcaggtaactgttaatgtaggaagtgctgcctctgggcaccttggccccagggttcattagcagttgcccctggtgggtttttgttggctgtgatgagaagtgcttctgttccccctccaccacactcctgcaactgtttaaacagtggctgtgaccccctgagatgatccagggtttcaaggcgtgcacatgtctgtgtttcggttttcagaagtatcaccttggggtgactctcaacttacatggattttcaaagatttattcaatatgtttttcagaaagtgttgtgaagagcgaagacttttcgctcccagcttatatggatcggcgtgaccaccccttgccggaggtggcccatgtcaagcacctgtctgccagccagaaggcattgaaggagaaggagaaggcctcctggagcagcctctccatggatgagaaagtcgagtgtgggtattgaagggacccacaggcgcgcccagcagctctcggaagcgtgtgtgtgacagagcctctgctcacttctgggcctactgtctagaggcagtcttgcacaggagggttgctctgctgggtttcggggtcactgtgccagggccccagtttatgtgctcaccagtcacttagctctgccagctgacaggatcttttgctaggcccccttctctgtgctgagtggaggtagcctctcagcatatctgctgggtaagacatagttaactgtaaattattgaaagaaactcagcaaaatgcatagtgtttggtatgaaaggggcagaaaaataacaagattaaatagaccctaatactgtaattcaagtaagaaataattttgcagttttaatttgcacctgaagcgaactgtatgcattttcttctttccttgccctgtcacatgcctgcgtgggcacgtgtgtgcacgtacgtgcgtgaacatgatgtggcctgggttggtgtatccttcagctctgtgtttcctccttcacaagtgtggttttggggagaagtggttgaatgttgcagaggagggagctgctgacctttgtgcctgtaaatggctgtcctctctgcccccagtgtatcgcattaagttcaaggagagctttgctgagatgaacaggggctcgaacgagtggaagacggttgtgggcggtgccatgttcttcatcggtttcaccgcgctcgttatcatgtggcagaagcactatggtgagtagagagggaggaaggcatgggcgcctggactggggctccagcctgcagtgcccattggtgggctgtcggggacctccataccttgaggctatgagatagggactgcattccagagttcatctcaggattgtttccaggccttggtgacctggagaactgaagtcgtgggaggttagtttataagccagcatctgattattcatagccatgcttgttgggtggtgaaataccttaactactttgtacagcacaccacgttttcagtagcaatttatgtgctcaccagtcacttagcgaaagatgacttcgtgaaggttcgagcaaggataaggggactcattcattgaatgactgtctggactgttgtgaggactgcatctcaacagccagcatctgggggtcccgacctgatagtttgtgtgtgggcattgccgggttgctcgctcgtggtaatgactcttccccgaggttctttctgtccaggcagaacaggcatttttgcattctgaataggtatattctcgtacttttggtttgaatgtggatgtgggttaataacagacccgaatctatttgatcttccaggtcaccttgggctctgtttgtcagatcctgttatccatagcctttagagaggaccttctgcttttagcttattttgttgctaactttttacaaacaaagggctaattttaaaatgtcagtgttgtcagtggtcagaaaccgtgtgtttgagcgggtgttgagtggcaggtggctctgctgacctggtggctggtgtgtcgggaggatttaacctgtgtgagggattggcctagaaacaacctgttgagatagtcttgccccataacctgtctcacaccgtagtgtacggccccctcccgcaaagctttgacaaagagtgggtggccaagcagaccaagaggatgctggacatgaaggtgaaccccatccagggcttagcctccaagtgggactacgaaaagaacgagtggaagaagtgagagatgctggcctgcgcctgcacctgcgcctggctctgtcaccgccatgcaactccatgcctatttactggaaacctgttatgccaaacagttgtaccactgctaataaatgaccagtttacctgaaaccctttgtgatcagttctttaatgatacctaaatgaaagctaattaaaacaataggtttctcccaagggtctggagtaaatatattttgggtgcaaatgaaatggcaaaaatctagtatcttaaattgtataaggggacattatataaaaactgaaaatatagaattccttgatgtaggaaatttgaggtttttggcaagagatctttatataagtaaaatcccattatcgtaggcacaccggcaggagttaccacaaccctttttttttgttttgggagacggagtcttgctcttgtcacccaggctggagtgcagccgcacaatcttgggtcactgccacctccacttctcgggttcaagggattctcctgcctcagcctcccaaggagctgggattacaggtgcctaccacc

SEQ ID NO: 84491 - DNA, 1085 bp, Homo sapiens
actggccccactaaatgtcgcggcgagaaaagccaggtctgacttggccactcctgtctgggtaccaaggaaccaggccacccctttactccttagaagcatctgcctcattaaccacggcccccaaaagctccaccaggactgtactattagagatgaggaaaccaaggctcagaggtgacttgtcttgctcgggctggggtggccgcagaggaggaaccccagctccttttgagctcctttgagcgaaagctgcctgctggtgggtggctggaaggtctggagccatgcctttgtggccaccaaccccctcgagccccaaagagaaaagagaacagaaagagcacacctctgtggcccaggcgccttcccatcagaagcccacaccccaggcgccttccggccgggcgactggcgctgctggcctggacgggccctgggggtgagctccaggcggcgaagtcccccttgcctggggctgaggagctcggaggccgcgcccaggcgcttctgctgcccggggctgcaactagaaacccgctgaggctcgggtgcgtccaaggcgtcggccccgcgcggagaaccgcggcgtccgctgatgtgtaatccacacgcagaagccctgctccaagcagctcctgctccaagcagctcctgcccctgctccggggctttattacagggaggatttcatgtcaaggggcatcttgacttccctgttccagcgcaaaatccttaaaatagatgaagacattgtgaattaattctacgttattccaggacaaaaacccctaagataatcggagcgattatgaattaattctacctaggacgcctctgtgttagctgatcctaggggtccttcatgcacgcagggcgcataatttcgcaccagactcaggagccctttgcgttttaagcttgtgacttgcacatgctgggcgcgcttttgcggcgtcccgcagccgtgggagcttcactcgcgacccctgtgcgagcccaggacgcaatggaccccgaggaagacacagcccagccgagcgcagtctcggcgctgcagcagcggcagcgcgaaatctcggacg

SEQ ID NO: 84492 - DNA, 1054 bp, Homo sapiens
aggaggtcagagggggtctgtgctgggttcgggtcgaaccagcggctctctcgcccggaatcccgagaaagatgtcaggaaaaataaagataacgagaagacgaggcgggagggacacctgccgtgcacgtgggggagcccgtgggccccttgaggtcggggaaactgaggctcaggaacaggatcggaagccggtttgacctacacgcgggggtcgcttaactactgttaagcggtttcagcatgggctctggaattcctttgtatgttattaagtgggaatcttttgttgcagtaggtgtctccaaacaggacatacgtgaacaaatttggggctacatggaatcacaaaatttagctgactttccccgacctgttcatcacaggatacccaactttaaggtactgacatatttctggagtccagaaaaggaaaacaaaatattcttaaatgaataacactagtaataaaattctcttactgcgtcatggtggatgagaatgtggcgagcagtgagcagtggtgtgaaatcaaagccatttggccagggcgtccttagcatttagagacgtcatttactcttcacctggggcctcttgcgtctctgtgcagggtggtttggttgtctctaggtgaggttgtgtccagaattggtgggttcttggtctcactgacttcaagaatgaagcctcgcagtgagtgttacagtttttaaaggcagcgtgtctggagtttgttccttctgatgtttggatgtgttcagagtttcttccttctggtgggttcacggtctttgctggcttcaggagtgaagctgcagaccttagcagagagtgttgcagctcacaaaggcagggtggactcaaagaatgagcagcagcaagatttattgcaaagaacaaaccttccacaatgtggaaggggattggagagggttgttgctgctggttcaggcagcctgcttttaatctcttatctggccccacccacatcctgctgattggtccattttacagagagccgattggtccgttttgacaggatgctgattgg

SEQ ID NO: 84493 - DNA, 1138 bp, Homo sapiens
ttctccctggcttccgctgcacgcagccgacggtggcatcctcgagcgcctgccttatggttcttgctctgcagactgcataggttatgccaaatatctaagagaattgcagacattcatccacacaaggatcttgtacaggtgctcatagcagagtgatttataatagccaaaaacacaaaaaacccaaatgcttgcaagtgatcagtggatatgcaaaatgtcatctatccacacaacagaatattattcggccatggaaaggaatgaagctctggcacaagctacaaggatgaaccttgaaaacaggacacgaggtgagagaggccagatgtattaaatggatccatttatagaaaatgtccaaaacaagcaaatccacgaagacataaagtagattaggtgtttccagccctgggggaaagggagaagttggggaggggggtggtgatcactaagaggtgttgggtttcttttcagagtgatgaaaatgttctaaaattggctaaaatggttctgaacttggtggtggctgcaccactctgtggatacgctgaaaccccttgagttgtgccctttaagtaggtgaattgtgtggcgtgtgagtgacatctcaataaagttggtgagaaggtggggtgggggcgggagctccctgaaacaaaatcctttgttcaatgtcacttcccgagaagtctgttgtcggcagcctgccctgaacttatgagaccctgtgtggatcctttgtctgtgtgtgtggttgaggtgggtggaggctgtgttttgtgcgggaaccttgcctgggatctggtgttcagagacgtacccccctgggggatcctggggctgggaaggggctgagagtgcctcatctctcaaagatgttttcgtcttgaaaatggcgttggcggtgcatggattagcttgagcacgtgcttctaccgcatgcgtgctgagtttgcatctcattcactgggtgcctgtccaaagggcaggaggggactcagcgtggacgctgcacctccgcgctgagctttgtggttgctctgaggagcaaatctctgccatttcctgtctttgctcacaggcccccacataaaccaccagcttccttagttccctgacttggagcagcctc

SEQ ID NO: 84494 - DNA, 1022 bp, Homo sapiens
tggggaggcactgtctcctcctccatggcaatcctcttttggaattattctgtaattcaggctccctttttttttttttgaatcggggtctcactctgtcgccaggctggagtacggtggtacggtggcacgatctcagctcactgtaacctccgcctctggggttcaagggattctcctacctcagcctcgcgaatagctgggactacaggtatgcgccaccatgctcggctaattttgtatcttttgtagagacaggattttatcatgttggccaggctggtctcaaactcctgacctcaagtgatccacctgcctcagcctcccaaagtgctgggattacagttgtaagccagtgcacccagccaggctcccctaattttttagtgttgggggtcatgtttgtgctgagattctagccttggcttagaggttggaccccatcgctgccgattattccctgagaataagtccctctcgggtaagtccccttaccctttgggcctcagttttgccattagcaaaatgggcataataataaccttccctataaggttaaaggagttaatgtgtttaaagctgttatgatagcttggcacatatatcgtatgcaataaatctgggttattattactgctcccaactagtaaagatttagacacatttctagcacttcaaatgtctacattgtgtgtgctctctctggaataagctacatcctgaatataaaaaaggtccccatgcttaggtctgaggccatttatagcaattcctgtttccactgtggagttcagttttgctgatatggagggaaaatttcaagccctctgctgtataaatttagttaacattttattgcttgtgacttttttatcacatgacttttgtttctcattaagttagtgaatgagatttactaaaaagccaagtaaaatctaataagggcaggggccttttcctgcagaattaattctcttgtgaacccgcagatgtcaggagctcaggctgagtcacacaagtgt

SEQ ID NO: 84495 - DNA, 1066 bp, Homo sapiens
gtggggctctgggggcacctggcccaagtgggctgtggagtcagggaacttgggcagacactgatccccggcacccttgctcctcagagtgggcttgcacctgcagccccgggagcttgggaaagcagattctcgggccccagccagccccactgaaccagaattgcatttccacgagaccctcagggagtctgtgtgcttccaaggtggccttcccacagcaccgctcagccccggccaccctggcagccctgtggggtttaggaagtctggacagcagaccccacacagaggctcagatttaactggggacagcctgggaaaggggcccctccagcagctgcatggagacccttgtgcttgcagacagctcccaccctgtctgagcttcagcagctcctctccttggagtggcctgagggtgggctgtgtggtgagcccagcagtgaacaggggctcattgtcccatgccagggctcctggcacatgctgcccgcctgccctgaatggttattggggatcctggcagacagcgcctgaaggggcgaagcctattccccgagcctccagggatcagggccacatctggcataatggggcattccctggaccccagagttttggctcctggactcctcacggagttttggggctgacgcatcttcccagggctcggctcccgagctctgcctttcaggcagacagatgtgggctgcccccttgggctgctgcccagctctgggatgttctttgaacttctctgggcgcagttgagcaggtatgagccaccgtcctcaggggcactcataggtgttgctggccctgccactttctaagggattctgagacttcttcttctgtaagggacgttgctaagtcagtaggagggctggtgccagctcgctcagccagaggtggatctgggctggagcccacacagtggtactgctgctgctgctggcctgagccctgctgactgccacctgctccacagggcgaccccaacatccccgctgggcagcagacagtggagatcgacctgaggcatcggatccagctgcccgac

SEQ ID NO: 84496 - DNA, 1167 bp, Homo sapiens
cctgagagcagcattaaagacagattttcttttcttttttattttgagacagggtctcactctgtcacctgggctggagtgcagtggtgcaatcacagcccactgcagcctcgacctcccgggctaaagcgatccagcggcccccctcagacctggcttctgttttcaccaatgaaaagttaactgggaacatttatgtaggagagatgccctttttctcataacagaaactatagttattttcttttttgcttagtacttttgggttattctggaaaagtctctgcgaagagtgggtagtaagggtaggaaatgtgagactaacacatccgaacaaggaatttcctggaacctaaaagtggccctgagggtagaccagcaataatgccccatttttttcccattgatgtatggaccttgtatatactgtattttcagggttttttcccttggctcacctttattttgccccctcccctttaaatatctctttaatagtcactttgtagaaatgtgtcaaatatcttaacagctgttacctttccttgcttctgattttggtaattaaaaaaaaaaatctttctagttcatgaatattttggtaatgttgatcatgagtactgacagttttcagacatgtgtagcacagtaagtgagggaaatgaatccttagagagaacctctttatggagcctaagataagccccagttagcttgagtggtgttttctctttccaagtgagtgagtttaaggttaatactgaatatagctctgctgataaactctaccaggattgacagggttctcaaagttgaaatggattttaaggctcactgaaaacaacgccttccttttgtagctaaagaaactgggtggggcctggtggtgaagatcatggtccacctagtggcagagtctggactggtacctttaacctggcatgaattcttccagtctccagtaggtagccatcatttccagtatattaagtggaccaagactgtgtgagtcaggagacatagtgtgtccttggagatgtgttggaaatattgaatgaacttcaaaaattaaaattgtgtggggcatggtggctcacacctgtaatcccagcactttgggaggccaaggcaggatcgcttgagtttgggagttcaagaccagcctgg

SEQ ID NO: 84497 - DNA, 1004 bp, Homo sapiens
gttatcactcttaggtcagacagccatcagaattctcccacaccaagtgcatgtcagttgtggagaaaacatagcaaaaagagccgtacgctctttacagatactaatgtcaagagttaaacctcctcaggttcaacctgtgataaaagactagtgcttcccagtacttgcatggggttcactatttatagttttcttgggagtatcacaggaaaatcacaattacaccactttagaccctatgtgtagcaggtcacaacttacccttgtgtgtttagatgtgtatgaaatacctgtatacgttagtgaaagctgtttactgtaacggggaaaaccagattctttgcatctgggccctctactgattgttaaaggagttcctgtcacctgctccccccacccccgcatgcgtctgtccacttggctaacttttaatatgtgtatttttacattatgtatattcttaactggactgtctcgtttagactgtatacatcatatctgacattattgtaactaccgtgtgatcagtaagattcctgtaagaaatactgctttttaagaaaaaaaataacatgctgaggggtgacctatatcccatgtgagtggtcactttatttataggatctttaaaacatttttaatgaactaagttgaataaaggcacaattaaaaactgtcatcaaagcccagtttaatgggattccgtatttgagacttggatcccacactgtttgtactttccaaagccaagcgggtccttgtatttccaaggaggggcatccaggctggtcctctcgtgcagagggggcactcacgtggatgagcattgccctccgagggcctctgccttgtcaagggcaccctccaccttggccaaggccctgccaccaggtctggcctttacaaagccaagtcctcttgagaactcacgtgccacgggctatcaggatggatgcgaattgacctacatgttttgtgggactataacacccaacaaccta

SEQ ID NO: 84498 - DNA, 1048 bp, Homo sapiens
attgtcaagcttttccggatgtaactgtgagagcgatgttcttttgtgactttctacaccctaagtggatgtgggccccagaatagctctgacgggaggtgtaaatcatatcagaccagcaggcggcaccatggagcacctgccccaggttttcctgcagtagcagaattctgctggtgttggatgggtctggacacacctcctctaccttgtcctctcttccagctatgtcagctctatcctgaagagaacttggagaaactcattccttgcttagctggtccggacgcattttatgtggagcgaaaccacgtggatctggactcaggcctgaggtgaggcccttaccaggcacccggcgcgtccacagctggcaaggacaggctggtcctgtggtcaatgctgtggtcctccaaggagctctgggaggatgcgcggtcacctggacctgggtctctacttggcctctagggatttccattagttctggaggattcgggagccctcagtaagctgagagtggttctgagtgtgtgaggaagggaattccagggtgggtcccaccacgtcttgggctttggcagtcctgtgaaataatcctgggctgctgtttccatcctgtagtccaaggttgagactattcccagataaaattggcgtctcttaaacagtttctctggaccctcgatcgtgtcttggctcacgtggcacacgaagtaacatggccgaccagttccgtaaatgtgctgctgccggggccctggggaccagtgtccaagcacctttctggctggtgggtggcactgatctcatgtcacagggcatgactgctgtcgtcaaccttggtggccatgaatacagcattgagaggaagggcttgaagaagcagtggcagtcgggcaagaactcagttgaattaaagcaggaagaatatgaggctctggcacttctggcttttttcctctaatacacatttctcttgattaaaagttaaatttttttctttcaattcgtcagcaggaatgccattttaatgttgataagacca

SEQ ID NO: 84499 - DNA, 1028 bp, Homo sapiens
gccgtgtgcagagctgtgtaggtgtggcctcagccagcctggggagctgcagctggaggtggcagggaactctgtgctgtcagtacagagcctccgggctggtgcatttggtcagcgacaggtatgggggagcagggcctggtgggcaggggcggggccccgcctgagctgcagctgtgagggccctgccgtttgtgtttcagcatcctcagggtatggataatgaactgcttcatggggctgatttttttaagggggtactaaaaaaaataacgtttttaaagtttttggtgcaggagtgtggtggggtggtggtcttctttaggggtaggttctgtggaacagttctggaactctctgtggcttgcattgtgagtgcctgaggataagcactgtggaaacttcagatagacacaaataccgtgaataaacctgctgaaaatgtctgtccaaagatcagcaacagcttttgcttcgttgcttttcgtaagctgttgaaaatcattgcagttcagaggtgaaacatgggatagttcatcctctggttatcaggcaaagtataagtggtttcttttggtttctcctttagccctaaactctgggcctattgcagccaagagtcatctagcattccataagaacggactctctctggagcagctgttgtcactgatggttaaaggaatagctgtgacctaaaagcactgttttgtctccatctttaacacttgttctcctgggcagctgggaaccgcctggtctatgaacttgtctgtgaactaagtcttctggctgtctttgtatacattgctttttttgttgttgttgttacattacaggagatacaggagataatattctaacacatagtggatctttttttatttttatttttattttttggccagctgctacaggtctaaaacactgtcctgtttcatagtaaagtacagtacatgatacgggaattgaggcatacagtcatgtgctgcttaaggacacagatacgttctgagaaaagcgtcctc

SEQ ID NO: 84500 - DNA, 1053 bp, Homo sapiens
caaggcatgttttatagattgaattatttacatcttggctatgagcgtttatgtgttctaaattggtttttgagtagttacttggagctgacaatttttttgtttcatctttggaaaactggaagattctgtgacccttaatgagaggattattataaggagtaaccttgggctgtcatttccgtatttcaaaacaaccgtggtttctagttttccctacatccctagtgtcactgctaagctaatttcagccccattcatttaactttcgtttctgttgctgcttcaaagctaaggctgacgttgatgaaccctttattgcttggagcatgcaactcagatgaaatctagcatttaagtattttgctttcttagtttctaaatctaacgtttggtgtattcctgaaaaagcagccccgttaaagctgtctgcattcttttgtaagctgttgtattttattttgaactctttgagcttagagactttgtatttttcttttagagatacaaatgtcaatggctttttaaattctttatccaatttgaatttttatttcttggcctggcaaggtggcttacgcctgtagtcccggaagtttgggaggtcaaggtgggcagatcgcttgagcccaggagttcaacaccagcctgggcaacacagcaaaaccctgtctctacaaaaaatacaaaaattagccaggagtggtggcacacacttgtagtccctgctacttgggaggccgaggtgggatgattacctgatcccaggaggtagaggctgtaggtgaggtatgatcatgccactgcattccagcctgggtgacagagtgagactgtgtctcaaaaaattttttttaaatttattttaactgtattttccgaaatagtcattatttgcaattccttgtccaaatcctgtgtttttatttaaaaattcttattattctgaggacttctagaggtgtaaaagtggggggagtacaaagtagacatacctgtattttactttcagaaagaaaaatacttccagtagccacactgatggtaggctga

SEQ ID NO: 84501 - DNA, 1054 bp, Homo sapiens
attttgtttaccgtcattatttcgtatgcctgtttcattgcaagaccttagaattggacgtagttaaaggaaagtttttccgtgagaccctcatgtccacaggtcagtctccctttacaattagcattaaaacatgcctgttctaattccttgatcagttttgttttgtggttggctttgtcattgctccttaagagactgccagtgtttcatatgagaaagatgatggtgttgaatgcagtgaataatggagcgataccagcagtcatgactgggaggcatttttggaccacgatttaatgagtagcattcattgcaaagtgcaaagaaaggcccatggaaagatgagtaccctccagtctgcttaattcctcactatctttttactgctcccttttccttggcttgattcgttcagtcattggagaagcatttgccaagttcagaccgtgttcaaggcacaaagacagaaaagctcaggtccaacctcagtgaatcagccttaagtatttgctgagcattgagtatgtacgcagtacagagtttgtggtaacgtggaagattggaaaaaaagaaacaaacacataaaaatgaaaatgcaagaaataggatgtcctatgttctaccaggaagaataaggagtctgaacagggatgcaaaaccgagatatatggaataattcagggtttctcatgccacagtgggggtcctgaatgggagcaccacagggcagggacctgaggaggggcagggcaggtgtgtgtgtccctgaaggagcggcagaggcttctgggggtaggcagtgcctgagttgagtctggaagggcagtagggtgagagttgttatcccaagcctgaggctgcagatttgttcgaggccatgtctccctcagcctcagcttccccatctctatgatttagtcatgacatttttttccttctcaacatgtgccatctccctcctacctatgaatgtcacgggtattgttctggacccagggaaggctcgctggtgcaaatgctttccaaaaacaccgagagtcgctctctctgc

SEQ ID NO: 84502 - DNA, 1240 bp, Homo sapiens
tgcgacgcagccagggaagtgggacagagagggatggacagctgtcctgcaggaggcagcctgacctgagagctcccctttaaaaacgtttggtgaggaagggcccctctctggctcgccgtttgtagtaaatgagctgggcttgtgggcctgaccgtctgtcttgcttgggaaaggggaggaagcccctcagcctggcttccccagcccttctgggagccagcactgtgggtgattgggttttcccagggtgagcgtcggagcctgtggggctggtgccctgtgtgtggggtctggtgggcctgtccacctctcagtggaggtgtggagcggcccctcagtgaggacacgcagtggggggttttctgccccagcccaggagtgaacggcgaggctagtgggagacaggagcgtgctcctgcagcccagtgcctgcacccagggcagtcagggatggcgccttcctgggtcacacactccccacgcttgtgggtggtccccgcaaacccttgcctggccttgtgggcatagcaggaatgacccctgcctcgctgaagctgctgctctctgcttcctcggtctattaatagggacccaagtctgaaaagaagaaacgcaggcggggcagaaaagaggagcccgaaggtggtagcaggccggcgtgtgggggagctggcacccaggggcctgtgcagctggtcaaggaggtggtggccgaggatggcaccgtggtcaccattaagcaggtgctcaccgcgccaggctcggcggggcagccccggtctgaggacgaagacagccttgaggaggccggcagccccgcacctgggccgtgtccacgctccaacgccatgctggctgtgaagcatggggtgctctacgtctatgggggcatgtttgaggccggcgaccgccaggtcaccctcagcgacctgcactgcctggacctgcacaggatggaggcgtggaaggccttggtggagatggacccaggtgagccaggcagcttggtgcctccgtgcccgggagcgagagcccacggtcgtgtgtcgcgtccctcgaaagcaagccctgcaagctgcccagaggcggcctgtgccgacacttctcgcctgtgctcctgcctccacggtcagattgacggagaacaggaccctgttgtggaaaggggggcccaccctgggcacgtctgtcctttgtcccgggtgctgacgggagctgcggctctggcggcacagga

SEQ ID NO: 84503 - DNA, 1047 bp, Homo sapiens
tgtgctgtccaggtttgtagcctataagcattgggctctcccgtcagtgcaggcgtgtggcaggctgtgccttccagaagtgtgtgcgtgcactcggacagcacaatgacaaggtcgcctaatgatgtgttgtttcccagaacccgtctctgtcattaagcagtgcgtgactgtatgttgtataattttgtaaggtgtagactgtaaagtcactcagagaagcgtttgcatgcagagtgcttaactcagagaagcgtttgcatgcagagtgtttaattctgactgtaccctaagcatgtagagttttctgtaaatgtcaccacagcggcccagtcgaggggcctggtggtgacactgcctggcagcttgccctgcttggagctccatcctgcacgcagctgctgagcctcgaggcagccgccaccacgacattcccctgtattttgtgctgtccataggcctctggctgaggaggacatgtggattttttaagacttcgtatttaggaatgacagcagttttgagaagcctgttggggtttcaaatataaatgggctttttaaagtagctttatttttctaaagagggacgtggaatctttttatagaaaattttccccttttaggtagaaaacggtgatatttggctactgccacaaaaagttaattgagtccgttgtgtcagccagaggatgagactctggtggggttcccatgcaggcagtgaaaggaggccccgccccagcgcagttagggcagcggggggcgccccatctatggggctgcagcaggccccaggcctgtgttccctcgctggttggggacggcagtggcagcgctcggttctcctctgtcattttttgaagcggacttggatgcagacacactggtttagttttttttttttcttttttttttttttgagacggagtctcgctgtgttgcccaggctggagtgcagtggtgcgatctctgctcactgcaagctccgcctcccgggttcacgccattctcctgcctcagcctcctgagtagctgggactacagg

SEQ ID NO: 84504 - DNA, 1167 bp, Homo sapiens
tggagaatccgggttctccaacctgggcacctggcgggcctggacacctggcccaccatccacatgacggcccctcccttccatcccaccctccttctgggcctggcctcaattcctcacagcctaacctgagtgcaagacacctggcctcgtctccagcggaaatgcaaaccctcaccccgaaggtgctgttacactcatccaaccttctccctccagccagaaacgcctgcattcctgtttctcgcgcttgtgcagccacaccaaacaggccctgcactgacctgttcactgcttggggtccagtgcctacaagccccagcgctttgccttatagccacagggtgagtatgttctgcaagtgggaactcaactgcgccatgaaagccagccttgtaaaacacaccggcaccccaggtggacagatcgctcacaaaactagtctcaaccagcttcattccagattaaatcctctctgggtcaaagagggtgaggaaaggttccagaatttgcctctttctcattgacctctgcaaaggctggctggggaatgggtgtgtggccctagcctcacccccagccaagggagggttcttacccgtaaaatgagaccccaaagtcaaggccttggtatctggctgtgacctacctctttggtcaccgcccctccaagctctctgagtgtcgtctgtgctaacccgagcccaccccctcctcggtaggaggccccagctaatcccgctgccgttcccatgaacggcaaagagaatccgcttaatccccttgacaactcctgacagctgggagagaggcgtgggcaggtctgggtgaggacacggtgggcttggacccagactcccccggagaggttgcacgctctggggctcttcgtctccagggaggtttcgccacgttctcctgcacaactcaccgcgccgatttcactccttaatgaccgtgtttcaaacgctgccagggcgacgcttcatctttaggcagccaggggccagaaggagcctggatcctccactggccccctccctctccttcagcggccgtgacactttccccagcgtccactgccctcttgggacggtgtgctctggtctcagaattcaccacgcagaaacgaggcccccactcctgacatcttctgttgacgctgct

SEQ ID NO: 84505 - DNA, 1298 bp, Homo sapiens
gcgacaggtcttccgaggacccgttagcagattggcccctccggccctgcctgctgtgaacagtccaggcatgtgtccaggtggtggcccgggtgtggacctgcaggaaggcctgtcatccccccgttgcactttgctgagacaccagggcctggttcgtgtgccccaggggccgcactctgcctccccagggttctgaagcaggcgaggggtgggccgagtgggatgtggcacttccgcatttcagttgaagacagcgcctcgggcacccggcacccacatgcgcaagtacacaagggaaggttccttaaaatcccagcgctgggcagcggcgctgggtttggtgacagcagggctgggggagccccagctcacgcccccgtgtcccacgggtgcctacccagcccccaggctaacacagctgtcttctctcctgacagtctccacgaccgtcctgtgtcagaagctcatgcaggtggtcccccaggagacatagccaggaggccgagtggctgccggaggagcatgcgcagaggccagttaaagtagatcacctcctcgaacccactccggttccccgcaacccacagctcagctgcccatcccagtccctcgccgtccctcccaggtcgggcagtggaggctgctgtgaaaactctggtacgaatctcatccctcaactgagggccagggacccaggtgtgcctgtgctcctgcccaggagcagcttttggtctccttgggccctttttcccttccctcctttgtttacttatatatatattttttttaaacttaaattttgggtcaacttgacaccactaagatgattttttaaggagctgggggaaggcaggagccttcctttctcctgccccaagggcccagaccctgggcaaacagagctactgagacttggaacctcattgctaccacagacttgcactgaagccggacagctgcccagacacatgggcttgtgacattcgtgaaaaccaaccctgtgggcttatgtctctgccttagggtttgcagagtggaaactcagccgtagggtggcactgggagggggtgggggatctgggcaaggtgggtgattcctcccaggaggtgcttgaggccccgatggactcctgaccataatcctagccccgagacaccatcctgagccagggaacagccccagggttggggggtgccggcatctcccctagctcaccaggcctggcctctgggcagtgtggcctcttggctatttctgtgtccagttttggaggctgagttctggttcatgcaga

SEQ ID NO: 84506 - DNA, 1048 bp, Homo sapiens
gcttttgctcagcgctgtccacagcggcgtctccaagagggtggtctcctggcttattagtgggtggccactgtctcctggaagcatcaggcccctgtgcgtcctggcggctcagggtttccaggcctgtgatgtgggaatggagccgtgaccttccctgcccgtgggaggcctcgggagacgaagctgtctccttccatccctcatcataagccgcctgagcccctggcaacatgcccagcactgtatgcagagtcgagggcgggacagcccggtgtgtgaggcagatggagtgcagatcgcatcttggtgacctggaagtcagcagccgtgggtgtggagggcccaggagggctgaggaacctcggggcatgggggagggaggctggacaggagagggctcacccaggccctgtcctctgccccaggtgaacctggccctgcctgtgttcttcatcctggcctgcctcttcctgatcgccgtctccttctggaagacacccgtggagtgtggcatcggcttcaccatcatcctcagcgggctgcccgtctacttcttcggggtctggtggaaaaacaagcccaagtggctcctccagggcatctgtgagtatctcgctggcccacagcccgtggtaccctctgccctgggcagcgaagggagttgagaggcgtcggccgtctccacccacatggggcgaagcgtgttgggtggcaggagggttcaggtcactgcagtgtccgccagtgacacgcagcccacatggttcagggataagacacacagcgcagcaccagctaatctctcaggacgagggattccggaaaaccaggctactgctgccaagtaacaaaatcctgctggctgccaccagcggacacagcagacttacccagaaaggcagaaagaggcagaggcaggcggatcacttgaggtcaggagttcaagaccagcctggccaacatggtgaaactctgtctctactaaaaatacacagatcagctgggtgtagtggcacacacctgtaatcccagctactcaggaggc

SEQ ID NO: 84507 - DNA, 1049 bp, Homo sapiens
cagctgcacggtcctcgggagcacggctgtgccgggggttacagaaactgttttcttggtgaccactgggttaggtcaggttgtggccctcgcacacagagccacagtccagcagagcccagctgtgtatgtacactgtgttcttcacctgtccttaacccaaatgtggtctccatttcctcctctcctccctccttccctcctctcctccctccttccctcctccccgcctcttccctcctcctctcctccctccttccctcctttcctccttcaagaccttgcatgttgctcagatgaggtttctcctttaaaacaaaattccctggtgctcagctgggcccagccaggctggacagtccccggtggccaccacggccgtccacagccctgctcgtgggccccagggctcagccagccgcctctctcttccagtgtgtgatgacgctgctctacgccttctccaaggacatcttctccgtcatcaacttcttcagcttcttcaactggctctgcgtggccctggccatcatcggcatgatctggctgcgccacagaaagcctgagcttgagcggcccatcaaggtgagcccggggcctcccgctcacccaggcacccttcacagaggcagggtccgtgggtcctaaggaccctgagttgggagccagcatcccagctcagcctctggacctgcccctgcctgcatgcacctgggtcgactaattccggtgatgacttgaccaccagctacgagggtgccaagtgtgactgcaggagccggggttcctcaaaggacagcagatggcacagagcttgtgctccgttgggtggagggaagcagataaggacactgcagtcataggtgggcggtggtgagccccggcaggggcggggcagagccgggcctggcgcagcattcaaagggccgtcggggctgtgctggcaggaggaatgcagggaacccggcccgaggagcgcctgggcccagctggactctcctggactctccccgtccccagcggctcattcagaggggtagctgttatcc

SEQ ID NO: 84508 - DNA, 2940 bp, Homo sapiens
ctctggggccagcaggatgtggggcgggtggcttctggccgtgtgtccttgagcacggtttctccagagaacgggtggcaagtgagggccccactcagggcgggacggtacagaggagctgcctgggctctcggctctggtccccggctgtgcagctcgtgggcagagccttagaattcagaccaggtggcctgacttaactctcctgagcccttgaggtcaccccgaagaatccccatttctcaggtggggaagctgaggccgcggccaaggcaccagccagggctgtgcagtgtcccgctccaggcacagcctcctgccgccagcctgtgttctcttgctgcttcccaccttccccgagaagcccagcacagaggctggagctactgcttgcgaggagcccacctggctcctgggcacagggtttggccttcagcccgggctgcgttgggtgacatgtcgtccctgttctttccagaaacctgcccctggccatcatcatctccctgcccatcgtgacgctggtgtacgtgctgaccaacctggcctacttcaccaccctgtccaccgagcagatgctgtcgtccgaggccgtggccgtggtgagccgctacccgccagcttccaccaggggcctgagaggctgtggccagcccgtcccttccagaccggagtggtgccccacatctctaagcctcccctacgcagagggggccccgcgtctctaagcctcccctacccggaggggtggagtggtggtctcccctcacagcgaccgcagaggaagtgtctggggatcatcctcaagctcagctgctgggggagtcaaaggggagaagggtttaaaatctgataccaagccacacccagaaccagctataagccagaatgcctggggagtccagggcagaggtcattttaaatctgagtacagaaagattggagtctgccacagagtggggttcgttagaaggcacggctgctgctggcttggcaggcgggaggccaggcccgggcggtgtcaccgggcagctcagccaggctggcctcgcagttcccgaggcttctcccactgccctcccagggctgggggaacagggagtgggtgctctggccagcttcctactgaacaagctctgactcccagcccgctgccggcagggcaccgtgctgagcctgtggaggaccccacgggggaaggcaagatccccacctgcaggccgtagcttgctccagggagtcccagaggagggggcaaatcaggaccagcaagggctccccaacaagcaggctgggcaggggtcactggaaagccctgtcctgggaagtccccccagaggccagaatccagcctgagaggtcctctgcagagggctcttgtgagcacagagggcgagggctggcccggtgcagagggctcccagtgagcacagggagggcgagggccggcccggtggggcccagctcactggttgtgcctgcctaggacttcgggaactatcacctgggcgtcatgtcctggatcatccccgtcttcgtgggcctgtcctgcttcggctccgtcaatgggtccctgttcacatcctccaggtgagcacagcccgacccaccacaggtgagggaggcccaggcctcatggccaggttcaacatgttccatgtctgtaaaaggtttgtctctgtgatactggggatgcataattgctcaaataggccaggcatggtggctcatacctgtaatcccagcactttaggaggccgaggtgagcagatcgcttgagctcaggagttcgagaccagcctgagcaatatggcaaaaccccgtttctacaaaaatatacaaaaattagccaggcgtggtggcacgtgcccgtagtcccagctacttggggggctgaggtcgaaggattgcttgagaccagaagattgagactgcagtgagccgagatggtgccactgcactccagcctgggtgacaaagtgagaccatctcaaaaaaaaaaaaaaaaaaaaggcagcagcaagcccaaataatacagaaataaaggaagcatgaactttggccctcgcctccccactcctgcctggaggtgacacagctgtggtgtcctagatgccctgtggccgccgcttgaccccccgggctggagtgagcagtggctcccaagttgctgtccttgccgagttggttgggggaactgagaggcccacagccagcggctggaggggcctggttcccactgtggccagagaggcccagacaagccaggcacaggccctgccactccccagcctgcgtgtcccctgtccacgtgctgagttgtggggcggtggctgactctgccactcttgtctgtccacaggctcttcttcgtggggtcccgggaaggccacctgccctccatcctctccatgatccacccacagctcctcacccccgtgccgtccctcgtgttcacggtaagcctgctgcacggccctgtgccctacatccctgggggttgtccgggggctcccagagggaggctgccacagcttgcagctctgtctggggtgtggactgggtgacagctcaaatgtggcctcctgccgagctccgctgaatgccagagagcgctggaggggctttagattttattccaaaaataatatatggtggctgccacaaacgattcagaccatcggaaatgcgggaggcagaagctgacccggggtgctgctctgccagccgcctggctcactgcacctccgtgggcgcccactctgttcgtttctcagcggggtgcatcacacacagtttccttccgcttctcctgcatctttccgtgccagcccgcgtgactgcctttgttccctctggctgtgtcacacatcactccaaaatgtagtgttctaaaaggaaaagcacttattatctcacagtttccgtaagtcaggaatt

SEQ ID NO: 84509 - DNA, 1028 bp, Homo sapiens
tcctcgcaccccaagaagcagggccctagtggctctgggccttccttgttgccgtagccaggatgcaaaccgaggtctcctggctttatactgccttgacactcatgtcgtgaggtctcagggaaccttcttgaaggcaactggggctggttgacccctccatcctgacctcctgtagacaagcgtctgaggagccctcctgggcagtggtcagaactgcctgtgccctctcaggtgggcacagggcctctggcagggccacatccccctggttgtggttggaaccctgcaccctccatgtggctcagcaggtacataccatttgtcacagtgaaaagccttcactccagcatttttgtttgctatgtattttgctccaggaacattctagaactggtagcatgacctctgttcagcgctctctaacccagcattcctttctttggccctgccaggtgatgtgtccaatctagatcccaacttctcatttgaaggcaccaaactggatgtggggaacattgtgctggcattatacagcggcctctttgcctatggaggatggtaggttctggaatgtctgggtcccttggtctggggacatacagtccctgacgtgtccaggaatcccaaatctcccagccatcaaggggcagttaaagggagtggactgcccctccctttaactgccccttggcagttaaagagtggcaggtgaccctccagagtcacccacatcccgacgaagcgtggggaggccgcccgctgcagccctactctggctctagctccacgtcgcagtcttggcgaaggtggcaggtggaggcggctgagccctgcggcccctttcctccaggtccccagcctgactcctgcgctcaggcgggcctcacagggacctgagaatcaccccagtagggcgaacaggcagggaatgtgcgggagggcctggaaggggtagcagggaccccccggaacacgcaggaggctgagctccctcccactccaggtccgctttccagcccagcgag

SEQ ID NO: 84510 - DNA, 1015 bp, Homo sapiens
agcagtgaccagagagcagagggggcctgtgtgtgttttgccccagggtcttcaggctgcctggctgcctctatctgccccctgggtgtccagcaccacccccccaaccgctggggtatccagcacctgtaacctgtagccccgcttctcagtccaggcctgttccagggcccccctggggtatcaagcacctgtagcctgtagccccacttctcagtccaggcctgtgtaaaacctggccccgggttgggttttgggatccctgcacccctccacccccaaccccccacagctgggatcctggctcagctggcaaaggttctgcgtgtttaaggagctgggtgggccccagagctcaagccgtgggctcattgcaggcggcagccagtgattagtgctgaaatctgactttcccagccgcacatgaaagtgccgccggcacctaggcaggtcacgctgcatcacgggattcggggcaaggccgtagggggagctcacagaagcacatgacctgagccacacaggagagcctaacgggcacttgtgacccttttttcttgggtcacagacctctttcataatccagcagaatgtgcagaatcttgcccagaaatgtgtatcagccgccttcacacagaagggtgggttgcgcagacccccgggggcccaggccaggttgagagccacccccaggagaggggtgtccaaggtagggcacactcttggaccacctcttggcacctcttggccacctcttggccaccactttgcactccagcctttgaagccagtgataatccccaatttacagctggggaaactgaggcaggagcgagccaggagccaggggccacagtgcccacctctacactgaggccaccatttgtcatcaggcataggggagcacaaagccacgcctggggagtctggtgggtgccaggggtctggggaggtgtcagtcagcaagactgggtggcccagtcggcccaggtaaggacacaggtgggtcagaggc

SEQ ID NO: 84511 - DNA, 1186 bp, Homo sapiens
aggaggactggggccttcgaggaccacgcgggcctgggaatagcccgccaggctgggccggacgacgcacgtgctccgagctgggccgagggggcggggctgagggacggggccgggccacggggcggggaggagccgcggacggtgggcggggccggcgggccggggcctaaaaggcggcgcgggcggggttcctgacgcagctgcgggcggcgggcggcgcgcacactgctcgctgggccgcggctcccgggtgtcccaggcccggccggtgcgcagagcatggcgggtgcgggcccgaagcggcgcgcgctagcggcgccggcggccgaggagaaggaagaggcgcgggagaagatgctggccgccaagagcgcggacggctcggcgccggcaggcgagggcgagggcgtgaccctgcagcggaacatcacgctgctcaacggcgtggccatcatcgtggggaccattatcggctcgggcatcttcgtgacgcccacgggcgtgctcaaggaggcaggctcgccggggctggcgctggtggtgtgggccgcgtgcggcgtcttctccatcgtgggcgcgctctgctacgcggagctcggcaccaccatctccaaatcgggcggcgactacgcctacatgctggaggtctacggctcgctgcccgccttcctcaagctctggatcgagctgctcatcatccggccttcatcgcagtacatcgtggccctggtcttcgccacctacctgctcaagccgctcttccccacctgcccggtgcccgaggaggcagccaagctcgtggcctgcctctgcgtgcgtgagtacggggcgcgggccgggggttgggaggtcgtagtctctgggtccctgcatccttgcatcactacgcccctggctcccacatctctacatctttacgttcctggaccatcccggcagttctaggctaaggtcattggtcccagaaaccacgtgcgtttctttcattcattcttttacacttctccccacaggctgggaatatcttcagtgacgggacagcagggtccctgccctgcccttcggtgggcattccattcccccacttaagcggtttaggcaagtgccaccctcccgttggccccgctgagcaatactcccagcctcttgcgtggcacccacgtggagtaactgagcaatcggt

SEQ ID NO: 84512 - DNA, 2207 bp, Homo sapiens
caataggaacgtcaatgaaagacttacaatgaaaagcaatggtcccctgccccacctctcagccccgttcttcaaagaggtttacatcttgagtggtttctttaggtcattctccacagctctgagtaagctgatcctttttatttttttcttgagataggatcccctgatgttgcccaggccgtactcgaactcctgagctcaagtgatcctcagcctccttagtagccgctaatacaggtgtgagtgactgcacctagctctaagctgatattttgtattacacagccttgtctttctattacgatggggtgatggagcccttctgtcatatcccaactcttctatcccctggactgtctgtgttaggcctatgcaaatactgttctcttcacggacaaattgagtgtttcccttcctgtacagcgtggatttttctgttagtcatggcttttctcttggcactttctgttcccatcgactccttacattgttttaaattctcaaggatagtgtcaggtcccctttctccttcagcccctgtccttctcatctggatgggttagcttgcacacgagccagcctgatattttcctttcttctgtagctgggtatgttcaggaatgttttcatcttggctctgttcgtttccacaggaacctctggcaagtgctcttcctccttgtggagacccctctccctccctgaacgctcttggatcttctctttggtgttaatgatgttttacccttgtgtgtgctgaggtgtgtggattcctacgccggggactctgactctggtgctttgtccttcagctctgggaagttcccttgttctgtctgagaagttcttcctctccagctctgctcttctgtcttaggagttcctgtttgtgatggacgttctaggtggagccctggagttgcgtctttatccttccttctgtgtctcgtttattctcattctgggagagggctttaatatgtgttcacaatcaaatttttaatgtccaagcatgtatttgtcttgtttctttttcatagtagcttattgttacacaagtgcctcatctccatgactctaaggaaactaataaggattcttcccagctctcctttgttctgatttcttgtttccactaatgtcacttaaaaaaagtgttggcttcttcctctttatggcaagtcctccatactgatgtttactgttgtctgaggcaggaggaagctggcggagagccccgggtctgtggggtgcttttgaaagagtccagtttcccctcgggtgattgggagcctgtcaccgtgggacctggagcaccaacttgcagatattttctctgggctgttccgcttctttaggaaggcccctttgctggccgtgggggagttagctctcctgtgcgggaccgacttggcaggtgcgggtttggcctgcccgcagggctctgcgaggcttggagccccacgcctgtgcccccggtgctttccctctgccctgatcgggtcctctgcatctgtcaggagtgtgttctttcttgtgggttgataacaccctattaaagatgatgttaatggagtgagaggaggtcacccgtacggccagtcactccccttgagcaggaatttgcaagcctgttctattcactccaccttcctgcttccttgtggccttggtaattgcccacagtcaacggggtgaggtgccaagccgccgttccacagccgcctctgaattgcagcgtgggctggtggctctggccctgtggccttggagggctgccagcgtacctgggcaaggcccggcagacccgtgtggtagcaaagaccctgactttggctcctcgctgggtcagtgtgccaagcgggccgtctgccctgctggggtccaggagggcctgcagtgaagcagtggtgagcgtactgggagcatgatctttctgcatggtggctgactgtcactgggaggttgtgtgtagtgcggtgggctctgtctgccagagccttgccagccgagcgtccaggggccagctgtgtccatcagcatcacttgggtatttgtgagaaacgcacactttcaggccctacccaggttctcgtgcagaatcagactgcagcttggtcagcttttaattttcagatagtttttgactttacagaaaagatgcaaaaaatatttcactgagcttccctgttgtcttcatctgc

SEQ ID NO: 84513 - DNA, 1706 bp, Homo sapiens
ggaagtagagaaacactctccgccaccctccatcctgacccccgtgcagaggatgaagtgctgtcccagaagccccctctcaggggtgccgtaagtctcagagagaggagcaccccggggcctccgtggcagaatcctgtgagtgtctttggttaaaatgtgcaggaagtgttaactcctaagctgccagcagatggtgtgccgagatactgtgaagtcacatgaacttgattcctgttggaaagaaccactctgcaatccttcgcgtctacacttcgtcaagaaccgtccaatttgattaaacattctggatcgtcagcgttcacggtggagcagactccacgactcgctgctcccatgggaggtgtctctctggggaaggggtcagtggtggtggaggatggcgcggtgctccattcggaacccacaggtcgccagcttacagcgtgggagctgtggaaggacacatggagcagaggcggctgaggaggtgaaaggctgagaggaggctgcagtgaaacacctgaggaaggctgggcagaatggatcgggggtgtgtattggctgcagtcacctcccctctgctcgtctgtgtccacattctgtcgtggttgagaccggatcctgtgtggaccgggtgggctggtgtggagtcctgtcaggagacctggggcggttttgaggcaagctcacggaggcctgccgcagggccctgcgctgacaaacctttcgctagtgaccagttaccttctgtgtctgagagaaggccgttgtggcctgtagtgattttccttttcccttgagatgaaaagtcatcaaatatctggaagcaaagcttaatctttctgaaagtagaaacgcgtttggatggagccgggagggagaactgggtgcgcgcttggcatttccttgccggtgtgaatgcgcttcccgtaaatatggcagaacgccttcacctttcaccagatgacgcggggggaattgggccacggtccctgctgtcatcatggcatgctgcaagctctgtgggcgctggtggccaggatgcggacaacccctgccgctacgtgtcctcaagtgagctcagctcttgtgtcggtgggagctggcggtgggtccctgagcagagtgctgccgctgccagtctgcgttttctgccgaaatgcgtccctgagattgagaaagttcacaccctaagtgtttttagaaggctgggtgccctgtttcccagccaacagttgtgactgtcagtgggcaaacacagtttgcaataattggcctgttgtcttacaatttctggctctcctctttgtggtgtaggtcatgttaggtggtggtccttggtcgtttgtgccacgttccctcatgttcttgaactctgagtccctagaaactgacattggtcttattttgagtgcattatttttcaaactttgggtctgaacccacatcaattgagtgggccatggccagtgttaagaatactggataaaatggagcatgccttggataaaaggagcatggttcggagtggctaacgggtaggtatcgactcaggaaacttgcagtgatgagtgtatgaacttaccatcgtaggccccagtcgagagcgtggaaaccactcttctgtgatgtgtgtctactagcgggtggttatgcacagcatttgactgaatttgggtaactctggatgtagtgtataaagt

SEQ ID NO: 84514 - DNA, 1025 bp, Homo sapiens
gaccaaatcccaagtcagggccacagggggtcccgtcaccttttcccattaggcagcgggctgtgaggcgaatgtgcgtggcctgtggcttttatgctgtgtcgatgttaggtgtaatctgtttttattgttgagaagatttgactagttttatgtgtaaatttactgattaataataacatattaaagtacatttttaaaattaaatgggcttaaccaagaattgcaactgcacgtagaagtgaaaccatgactaaatcatcacatttgaaacaggacgtgtgactcgtgtgtaaaatgtggacgtgttactcacatgtttctggctcatagctcacgggctatttccagtgtggggattgttctgtctgaatagatagagttgagatcaggaaatagctgtttggtgtttcttggggttgtcttcttacagttcaggagacccttcctaaagccggtcttttttcacttccagtcattcctgtattccatcaaccagacaatctgcttgcggttggatagcattgaagccaaattgcaagccctggaggctacttgtaaatccttagaagaaaagctggatctggtcacgaacaagcagcacagccccatccaggtccccatggtggccggctcccctctcggggcaacccagacgtgcaacaaagtgcgatggtaagaacagaccagggtgccggggccttcaggtcacttggggagaagcgcgtcacctcctcgcccaggcccgcagcttagtggctcagtttgctggagatgcgcggtgtctgcctcagcagtctcagcagtttctaactaaagctgacttttagttagaccgaaaccgaacacatggcatcctgccaggatgacctgaagtcatcctcacgtttcctttccacataaagccgacccatgcaccttttctttggaactaacccaccagatcttagaaaatgtacatgtgcttctttcctttttcctactctacctggctagtctttacatatgtttttcttcgtatgtgg

SEQ ID NO: 84515 - DNA, 1052 bp, Homo sapiens
tgttaacgttaggtgtcaccaataacaagtagaggaatttaaaaaataatatttttgaatgaaatggagttgattatgcctttattttaggagaaaacctggtggtcctgtgatttacttgagcatggcgtggtgctgtgctggcactcaatgtggggacagttacagtgatactaggctagaatttcctatgtgcagatcacagaaaggcaggcttcccaggttggtttttggagagtgaaatccaagaatggagttttattgtcaggtgataatcacgttgtgtttctagtgctagttctttctctccccagccttccacaacaaagcggaccttagatatcccttgtgaccagaaagtgctaaggcttaaaaacgcatgattgaaaactgtgggtgagtctgtactttgagatgaagctgtgttagctgccgcctgtctgaacacactcgtgcttcctccagggtggcgccaggcttgctggtttctgggccatggtctgttcttttgtagaatcttttccttcaaagcagaaccctgagccctttggttgtagctcacacatgttcctgcaggacctggaggcagcatgtgtgtccttccatcccaagtccaacgtgatgtttgcccctttctttccagggcgctaccgttttggaatgataccaacacttacgtggttacgaacgttagatctgtcccataggaatgagttgggatggagtgactgaaaatgtcaagccagttctcatgcaagtgtgccaccctagaagctttattaactgggtgcgataacagctggtgcggttgcagtctattctgtcacaagttcagcatcctcagcccagctgtcctgtgctatccagttgtgcagacagatcaccaacaattaggaaaagttacgttctgctaaaaaccccatctccagtttattcttccttagcatttggggctccttccccctcaggacgggtccctgggagtggactatgttgaatgactcttaggcctccccctcagtgcgggtccctgggagtggactgtgttgaat

SEQ ID NO: 84516 - DNA, 1048 bp, Homo sapiens
gctgggcgatgctgaatgctgagtccagccacaccaggggcagctgccgccggggacttctgtgtctcgtgctggccggggttgtggagggggctggctctgtctcctcacagcagtctgtgaaagcgttcatcctcccacctagctcagtggtcctcacgtctgtctgtgcagagcgtgtcaggcaaacagacgccctctcccacggttgctaagtggtgcaggcatgttgagtttatgacttttttcttatacctttttctcttgagacattttgaatggaactttggtcagaggtgggagtggacagaagacaccgtccccgctctgtgtgaggggaaggctgtgcagtggcctctggctggcatccaagccctgctgtccccaggagtgcccctggggctgcgtgaacccctgaggatgctgttgctttttctttcccatctgtgtcttcacaaagttctatttgctttttctctcagtctcctttgtggattcctcctcctccagcttcgtcccctttctgtattgtcttagctcagttctccagggccgcagctgtggtcgcaagggtctgatacgtggggtgaagggagaggagttggtgatgggcggtgaggaggtgccagggtcagctgtgcctcaggggctttgcactgaggtcagccaggcagatggccagtgttgagatcaggttcagcgtggacagcgctctagagaatccaggccagaaagtgcagagtgcagcgccctcctctgggtgcggccagtgttttcaacacccttttttttgactttgcatatagagaaattgtgctcctttctcctgctggtgcgtagcagtccacggtagaggatgttgaaagggtcactaaaaaagggaagtagtaagtctctaaatcatccttttttttgagcacttgtggaggtggcctcgccctgctttgctagcagtgttctgtccttccacatcagcagcccttgggatgatggcagctccgatgggatctcagtgggttttttaagccccgtcagggttttttgcccg

SEQ ID NO: 84517 - DNA, 1026 bp, Homo sapiens
aaagtccctgattttagagcgaggtcaccctatcaggagcccaccgggttttcaaagttgtcctccaggagtgtgcactttttgctgttcagggtaccccccctcttcctctcccctccccttttaatctttctgctccccttttcccatcccaaatattcattaagcatccactagtacctgatgggaatggaggttcttttgaagcatccgttatgtgatatcgtagacatctagccagtagatggccagagttggcgtgtttgggacaaatgtagccttacctttatggggtgtccctagtccccaggatcctggcataccccaacacattatattttcttgtggggcacataattatgaggagcccaacagataaaatgtctcatgcgttccacatagaattcttattctctaccttgaataggagagatgagttattgacagttatggttcatcacgtcctggcgctggaagcattttgagccgtgatgtgtgtaacgacacagcccggtgctgcctttaggtttgaattctgtgtgggtttgctctgtgttatccattgttggaaccatgtatttcattttatgcagagttgcttttgaaattcataaacagcttgagtaagcctttgcaaaagccagatgaaaattaatttttggcgtggatggcatatctaatgtgaatctgttctctgaagacttacctggagatggtgaggctgaccttgaactgaattgacatggagttggttgtgttgtggaacgtaacaccatgctctaaggctctgaacaaccgtgcagcccagtgactcgcaaaggatggccttctgatttgttcactatcctgctggagatggaaatctggcattcgtcacctctgtgactgcaggggactaacgtgtggaatcccagggacaggaacactctgagccatcgcctgaaaagtgaccgtggagctacatttcccaggacattcatggaagttagggcttcggtcttggacaacacacagataacatttgtc

SEQ ID NO: 84518 - DNA, 1090 bp, Homo sapiens
gcagctggcctggtggcaccctcaggggcagccagtgcgtggccagcggctccaccagtggccgggagccgaggccagaggcttgcgcggtgcgcacggagcagtggagccgcaggacctgtgcctggccccgtgcgcccttcacacggacagcctcgggcctgctccaggctcctccgtgagggacagagggcctgttgggcctcccggaagtcttctggatgggggcaaggaggccgaggcctttgcgtggggctgccggccgttgtattctcacgatttgccgggtgactccgggtgaagaagtggggtggattctgaattatgctttatttttgctttgagttcatggccttagttggatttatccacaagataatggaaacagttctctttgagttgcctctcaggcatcgctggggggattgttctccttggagaattttcactaggaatgacaatgtgacttgatactgcctttcacccaagacatctcaaaatattttagtaagtatttgaatgaaaactattctcttaaagctccccacagtagctgcattggcagcgactcttggaacttgagctgtgactggggctggggtcaggatgcgagggcagccgtgggcagggccagctctcctattcagtggagtctttgttggcgggaaccctttgttctggaagtcctgggagttgcagaccagatcacctggagttctcccggggcctggttctttctgaaccggacttcaggaagtggttttctcgggctgttttggtagttatcagatactcggcctcagctgctgcccaggggcttgaggatgggaggtggctgcctgtagtgggccacacaagttgtgtccctaaagcagcgctttattgagtgacctgtgttgaagaagctcttctattctaggcctttctactacaatgaggaattctgccttgggacttgagagaggtagcagtcctggggtgtgggttaagggcattcactgaaataccatgtagcagcgtaacctgtggctattgaaatgcggctgtaggaatattgcgcatgacttgaattctgctcttgaatattcat

SEQ ID NO: 84519 - DNA, 1058 bp, Homo sapiens
cccggcgggcgggcggcccgggcgggcctgcggtcgggatgaggacggcgcctccgctgcagagcgctggggcggcgcgggccgggagctcgttggcggcggccggcgtggcgggcggagcgggcctcggagcggaggtgagtgcggatgcgccgcctgggcgcgcgcggtgcctggggaccccgggctggaacgcggggcgggggtgtcaccgggctgcgcgggggtctccggcccggctcccgctcctgcgccctcgggggccgctccccggcggggccggaccctcccagcgctcgcggcgcccggcccggctcccccgacctcctcctcccgggcccggacgtgcggggcagcgagcgccggggcccggcgggggccgcagccttgcccggagcggagcgttggcagcgcggggtccggctccgtgggcagtttgggaagcgcccgggcaacgtactggcgagggccgcggagcgaggggctcggggagcgggacctccgggcggggctgcggggagcggggcccgggccgccccattcatcgcggatcggagccgggggtgccccagccgtgccgccgcctcctccgggccgcccgcccgggcgtgctggccccgcggcgctccgagcgcggcataggcttgcgagtcggcggtgtcagcgccccggacgggggtgggagctttggagcccaccctgggggagaccacgccgcacccccgcccagccccgcgcacccccagaggcttttgcagagccgggaagttggctggacgtctagacccgtggggacgcggcgccccgcgtggcggcggccggaagggaaggccaatggggctcgggggactcccgcggccacccagtccttgtccctgcaccctgggccgagggcagagggacaggtccccggcgggggcgggggggcagctcagctgccaagtccgctcctgcagcggaggcggttaactgcttcatccccagccgtgagccatgctgggcatagggagtgtgccacgtgttatcacgtttaatccttacgtcctgagatccgtgtt

SEQ ID NO: 84520 - DNA, 1143 bp, Homo sapiens
gcccgggcgagacccgcccggctcctcggggttcgcgggggctccgtccccgccggcttcctgcctcgccgccttccggggtttctgtggctcatcctctctgggaccctgggtcagctccacttccttcctcttctcgcctcggccccgccggcctctgaagccggggccccgcggcggaggctgctcgtcctcctcggactccgaggcgaagtcgtactcgcggagcctgcggtcctcagctccgggccggggcctccccgccgccagggagccgcacctgcccgcccgccgccccagccgccggtggcgcctgttcttctgctgcacgatcttcagaatgagctccttgccccaggcgccgccccgagccttcctcttcctggggtccttcctggggggcagccggcggcgccgggagctgcgggtctcctcggggagggcggcggctctcgggacccggggcgcggggtctgcgcggctcccgggggcctgcgttctagggcgccggggacggggtgggggccgctccccgagaccgtcgttcctccggggcctcaggccggaggctctgccgccgccgcccgaccccgacccctctgctgcgccgcccgagtccagatccttccggaacagcttcaactgcttccccctcctctgctgcctgccctggctgggcgcatccgcctcggtgggggccagacccagggaacgcgttttgggcctgcctcgggctgggcagcccctgtccccagggcggggggtttgggggtccggcgtggctgctgggagcgggggcggagctttgctctctggagtcacccccgccttgctcttaagggggtgtccggagctgggacctctggggccggaaggctcctcgtccgcgaagacgtcgatgaagctgctgtcgatctccgggttgtccgactggtactccatgccgttgagcgcctctgtgatgaggctgtccagcttggcgtcatcctccatgtccaggtccgaggcagggagcgggaagggggtggcggccaggctgggcaggaagcctgtcctcagggggtcgtctttgccctcggcctgggcgtccccagctaacaggaaggtcttcgcgtggctgagcaagcccgcgtgtgcgtcggc

SEQ ID NO: 84521 - DNA, 1050 bp, Homo sapiens
gactttctaattcggtgaccaatttctggatctccagttcatcctcggacaggtgactcataagagcaacgctacatccactccccttcccaggcaaagatggggcggcgccgggaaccactgtccgttcagggggacacgtcttactgagcacctttccccccgagagatcaggaaaatggctaggcagcatcggggatacttcctcaagcagcaaaaaagaggggtacggtggatctgacggcaccgtcttctggggagggtcggcacatgcgaacggcagaccggagtccctgttcgcagacaggctgccatagaggggtgggtcgaatctgtccaccggcaggtctgggaagagggatgaggactccaaggtcggtggcgatgcagccctgcctggctccgtctcagcggtgccaggtgggctccttggcagctgtggctcgagggaaccggcatcctcgccgtcctggcaaaggcaggagctgctggccggcggggcatccctggctgagggcttggggtgcagttcttccaggaaacagccagccaggtctttgggtccgaggaacaactcactgtgggggctgctgtagggctgaggcccctttttggcaactggaacccccaaggggtctctgttaaaaccagcagggtcacagccaaaactggagatctttgaagacagaacactgggtttggggcaggcggtacttgaggggttagccacgggtgccagaaattctccaggctggcgggcaggggggtccttgctgttgtgggagactggggcctgtgtgcccccaggaccacccagcaggctgcccacacctggcgttggcgagcttccgtggggcgccgtgttggcgaggcttcccgacggcttgggggtgccggtgtcatgtctgctgggcggcggctgctctggtatcaggagaccggggcttgctcccatttctcccgcacaggcggctggaggagaacgcaaagcctctgtgaattctgtgctgtccggggctgactcttcggcagtttcaggctccttggcct

SEQ ID NO: 84522 - DNA, 1061 bp, Homo sapiens
gccagaggaggagaggtggctcggccaggagactcccacagcttctcttttctggaatcctctggaattcttaaagtgctgtctttgggggtgtccccactgtgagtgcaggttacagcactgacggagccaggaggccaggaggaagggtcttccagggggctgccctccccctggagaaggcaaccagccagggcttccttgggatcgcaggggcttgttgtcaaagacgggggagccaccggggaatcctcagccccagtatctgtcgtggcttggacgccatctgcctcttccagaggtgcccaggcaggagaacaggccagcagctgctgggggccgggagggtccctgcaggacggagatgctggcagctgcccccccagcccaccttgggccctggaaggcgaggtaagtgggtcttcacggggcaggggcccaaggctgcagggcatgtgggcggctgaagtgggtgagggggcgcaggcggccaggtccccgacagagggtgctgggctatcccctgtggccagcagtggcttgttcaggccggggctggacgccctctctggagtccggccctcagatccacttcggctgtgggctgctgtcaaggccagcgccagggactccctattaggggacggggggcttggggtgggctcggcctcctcctgaaggctcatggctgccctgcttcccttgcatttctctagcaggactgcaccctcggtggggccggtcagcgctgttttgggactggcattgactgaggcgtggttgtccgtgccccctgggctcaccccgttctctggctgaagctggttggctgtgccttggccctgggttttctcggcttggccaagcaagccccaatgtccatctgcctccagccccagctgatgtccggccactgcagggagagttgtcacctgcacaccccctggggagccctgggcggggccacaggccaccttccctccttccacagtgcccccttccagacctgaggggttcactcgtggagggctctgggcagcaggtgtcagctcctgcaagcc

SEQ ID NO: 84523 - DNA, 1122 bp, Homo sapiens
tggagaagggaagtaagttgaggcagccgtgggatggtggtaggttccctcttagtcttgctgctgttgctggaattccaaagtgaccttagaaaccacgtgggggaaggcagtgctcactacttagaagggttgcttctgagccgcctggtcccccaagagcacaacaggcctcctccctctgaccacagggtcatgcctcctccctctgaccacagggtcatgccagcctccatttgctctgcgggagaaaagcccatctctagcacaccttgaccccaggaaccgggttcccgtatggaactgggaagaaaccgcccctgtgccagctcccgcgggccctcctcgttccctcccagcctccatggccgccctctagagcctccctgctgtacggagctctgggctccgcctatttgcaatgttactctgaagtttctggtgctatttttgtgttgtaatgtgaatacaggcttccttgatttttttttttaatgggggtattgggtgggacagacggggtcagggaggccccaccatggcttgtcgagggcacgggcacctgcatggcggcgctctccctgcctcccctgccgggctgcaagcctgaggtctgtgctgccagacggggatgctcagggctggggctgcagagccgctgccctggccagggcaccctcatgcaccgacccaacccaggcctgggacgcacgtgtcctctcacagcgtcgtgcctgtgaaggtgggtcaaagggtgagagggcttccttctcacccttctctccataagtatcttgaagatccatggtttgttttgctctattgtttagtttttacttgggtgcaatgtgtacgtcaaaagtttttattttgatatttgaaagagaccaaatcaggcccagaccgcctctctggaaggtgttgtaggccattcaaaacgcctccggagtgtcgcaaaccaagtgcggaggggccctgaggttgtactgtaaacatcatagtgacttgtcttttcaaatatattcccactattttcgcagaaaacctccagctgcgtgacgtctgtcctcccgccggcccccatccctggtctgcacctccctgagcctcagaacttggctc

SEQ ID NO: 84524 - DNA, 1086 bp, Homo sapiens
gccgccgcccgcccggggctagaggcggccgccgggagggcgcgcggcgccggagacatgtccaggcggaaacagagcaacccccggcagatcaagcgtgagtcaaactttgcccgcggtcccctccgcgcgcccgacccccgccggagcccagccgccagcgccgcccccgcccgtccccgctctgccctgggcgccggcgaccttcaccccgcgccgcgccccccgcgctgtgccaagcgcgccgtaatctaatctccgccggcggcctgggcccccgcgtctcggcttgggcaccggggggttcagcccaggagggggccgcccggaggccgggaggagggtgtttgggggcgcggcccgggcagctcggcccctcgcggcctgcccctcccccgcatctgcgagatggtgcggcgatagggcggccccgatctgggctcagataaagtttaaaatattacattctgcaagtcccgtcctgataagatcgttctgtcgggacgggctgaaattgtgatcttatctcgcgcggttgactctcccaggctttgtatctagaagcgaagagagagacctgggaggcagaggggacacccggggccgcggagatgcctggccaagtggcaggcaccggcccgcgcccacccccaccggtgccgtcgcagagccgcaggacaggggagggggtagcgcgcagctgccgcagcctaggcacttggctccagccccccagacacccccaccccgtgccctagcgctgaagtcctgaacccaggccccgccagcctggtgacacctcctggaccctgcaagtgtcccagccaaggcggcatgggcaacaaatggtgccctcggatgcccgcgggcaccccctggcatcccaatgggctgctctgagtcagagaagggcctcccaggacgcagccccgggccggggtcgcccctgcacgccactaagtttctcgctggtccggctccctgcccggtcagaggctgctgccccgccgccacattgccagtgcccccgcgatgagaactaagctgtcggggccactgtctggcctgggcctctgggctgtgcca

SEQ ID NO: 84525 - DNA, 1051 bp, Homo sapiens
agcagcccctcaaaatttaagggtgcactgagcacacctgggcccgaggggccgaggcatgtgagccgtgcctaaggttgagacccacaggggcagggcccccaggtgcccccaggctgcctgtttatgactgatagttcccgactccaggcctgggccctggatatgctcccagaggggacgggacaccctgcaagtcccaaggcaggaggacggggtgtttgcacctcagtcctgctgctgtccccaacaccacctaccgtctttccacttcgtgggcctggaacagctcaggaaggcttgggactaccccagccttcttgggaccttgaggcagtcagcctcagtttcccccattgctcataggcccacacccagctccaccaaaaccaaacattttcccagaaagcagagagaccccctacccccgccatggcaatggtcggtgggcacccaggccctctggggccctggctcaagccgatcattcccatacccttccagctctacaggctgcggcctggtccgccctgcactgtctcctggtccgggcctctggcgggcacaggtttcagctcctgcgataactgggaaagttgaactggccccattactgcgccaagatggtgagtgagatacagccttgataatggaggagataccagcttctcggtggccaatagcccagcctctccacccattaacattccccaccagcgatccgctgcctatctcgtccatttccactcctcccgaagataagaatggaaattctgacttcatagctcactgattaaagtgtctggatttcttgataatacatagataaattatgtttttgaaaaagaaggtagggaggagggtgaggaggatgggggcctggggtgggtgggagcccttggccgtttctcccagcctcttttggcccctgggccagaccatgaaccacagagcatccggcctacaccgcagcggcctctgcacagaccccgtgtccggaggtgcagagttagctcacagcagggcccgggctggggagacacaggcaggg

SEQ ID NO: 84526 - DNA, 1383 bp, Homo sapiens
ttcagagctgtgctgaggtgcccaggcaggcggtcaggcctgaagggcaggagagggccccaccccactccagagcggctgcagcctatggggacggagtcccatccacataccccgcggggcctgggccacagggtgtgtcctagagggtggtttggtgactctgctccgtgatttgcagctggagttctgaccccagaagtcccatgaacgtgttctccctgtggccccttcggggactgtgaattccattcatttatgaacgcaggaaatactggcagtcaggttgtttctgtcgttcctaataaatcccacagcccaaggaaccgcagtagcgtctggggtggaatcccagggctgcctggccaaggccgtcatgggagctggtgggtgagggagggagggggcccagcagaggcggggtgggggtcgcaaggtcccccgtggaggagggacagcgtggggaggggcaggtgctcgagccagatgcatgtacagatgcagcaagtatttattatttttttttttttttgagatggagtctcactctgtcgcccaggctggagtgcaatggcgcgatctcggctcactgcaagctccgcctcccaggttcacgccattctcctgcctcagcctcccgagtagctgggactacaggtgcctgccaccatgcccggctaatttttctattttgaggagagacggggtttcaccgtgttagccaggatggtctcgatctcctgacctcgtgatccgcccgcctcggcctcccaaagtgctgggattacaggcgtgagccaccacgcccggcagcaagcatttattgagtgcctgctgtgtgccaggcatatagccgggagcagatggccgatgcagagcgcgcaagcggccgtaatgacaccagcagggccccgtctgtggagagaagatgcatggtgaggcgctcgccgtgctggggagcgggaaaggcttcgctgaggcagagggaccacattccttcccaggggccaagatggaaaggggtcagcgaggtcccagcagcaaggggagagtgcacgatgggtccatgtgcccgccggtgcaagtaggcagccgcttgtttaacgctgccccttcccacaacagggcagccggggccacagagagaggggtgggcctgggcagccgcagccaggaggatgacccggccccatggggaagctgagttacacctgcatgggctgtggggctgcccaaggcaatgctggggcctcatggccaccggtcctcacgggctccccctgctgtcccccaggaagggggaccgggcatccagcacagcagatgatgtgacttgcccacctgggacccacagatggtgggggttccaggcgccatggtaga

SEQ ID NO: 84527 - DNA, 1033 bp, Homo sapiens
ccccagcagaagcccccatcggagccggcagagccccacagctggcgtgcagttcctgagccctgctctgcggccctgggaatcacgggggtgtcctttaaaaggggggcacccacccgatgccagcctgcacaaagcacctttctcggggcagccactcaccacagtggacactcagcatgtgctgccccggacatgccctgtggacggcaccccatgcccactttgtcctgccaggtcaacccaaaagcaacagccagggctggagctaatatgcatcctgtgctgggaacctgccaggcaggcaaaaagcttcacacagatcatggcctcccaacataccgggaggaaactgagtcaaaggagataggactgacccccctgagactgccccaaaggctaatggtgggcttcgggtgggtccagagtgagcaggggctcggccgcccctctgtccccccaacagccatgtggggagagggcagagccccgtctgcagaggagaacctgagccaggggttggggtggctgctggggacggcttcacactgggactgcagggttgcacccaccccagccagggcacccaccccactggccagcttagctctgctcacccgttctgtggctgagccgtgtggtagcaggcaggtgacgtggaagccacctgctctgctggccagcccgcctgaaccttgcctgagtagtcactgaacgtcccagcccaaaggctgtatcttgctagattcctgagtgccctgcggatgggccaagaggcaggggtggcccagaggggtccctgcatacgggtctggtcgtgccctgcccaaggtcgcagcagggaggccgagcctggctgggaccccactgcccacctctgcggcccacagggtcccacgcgtgctggcaaagtccaggaaagctcatgggctggcacctagtggggaggtaccccagacccacaggggacatccctgcactgtcaccagcccgaccccttgtaccatggcagggttgggctgactgccatcct

SEQ ID NO: 84528 - DNA, 1526 bp, Homo sapiens
ccagtgaacacgcaggcagggctctgagcctgcattgctaaagggcagccaagggattctcggaggccctcagaggctggccttcgagaagtgtgttcagtaacagaaaaggctccagacttggacactgccgaaggctggcccaggttcctgcttcaggatgactccagaaaaatggtgagatctgggcctgcagttttgcttcctcgttccatgatacagtttatctttaatttcaaaagtaaatactcctctaagaattcacacagctgtcctttgcgatccgtatcgttactcactttctgttaactcgtgtgggctgcccttgagcggggaagggctaggccaggctgcgtctccttctgccacatctcattttgccagattgccaaaaacgggaggcacttaacacccagcttagctgagcagtctagccttgtggagtggagttatggcctgtctttctctgcagagtggagtgtgggatttggggcagggccgtgtgggaccaagcaggatggaagtcctgctgcttcaggccaggaaagtagggacaaggtttgttttccattttgctaaaggctgtcaatctgtattctctcttttgcagaaccgtgggtaccgatggatgtggccgagagccctgaacgggatcctcactctccagaggatgaagagcagccacagggactctcggacgatgacattctgagggacagcgggtccgatcaggatttggacggggcgggggtgagggcttctgatctggaggatgaggaaagtgcagccagggggccgagccaggaggaggaagataatcactccgacgaggaggaccgggcaagtgagcctaaatcccaagaccaggactcagaggtgaatgagctgagccggggcccgaccagctccccctgcgaggaggagggggacgaaggggaggaagaccggacaagcgaccttagggatgaggcctcctcagtcaccagggagctggatgagcatgagctagactacgatgaggaggttcctgaggagccagctcccgccgtccaggaggacgaggctgagaaagcgggggctgaggatgatgaggagaaaggcgaaggcactcccagggaggaggggaaggctggtgttcagagtgtgggagaaaaggaatccctggaggctgccaaggagaaaaagaaagaggacgatgatggagaaatcgatgatggggaaatagacgtgagtatgatggagcagagcgtcgcggggcatcctgcccagcagcctgacatagactggtgctggaaaggagggactctgtgtgggactgacttagtgatttgttactagggatggtgcaggagaatgagaggcttgttttgggttcagtcccatagtgattggagagaaagagccagaaatcgagaatgagcagaggcagctccagaagctgccagcagggtttccgtggccctcggccggccagctggtgggattgtttgggttgtagtgaaaggtccagcgcccagtgtttttag

SEQ ID NO: 84529 - DNA, 1096 bp, Homo sapiens
gggaaggccaccccaaggaaggggactcaagcttccatctgaaagtaagttgaataatcaggaagaggagagggaagaacgcggtcaggcctggaactggaaaagggcgcttcacactgtgaagcgagactggaggagttgaggagggaatgagagaggtcagttagaaagtggttttaccaggctgggtgtgatgggcagtggtgcagattgcaggagatggggagggggatcaagaggggccacatgggaccggtgagattggttacgctagggctggctggaagaggccgggatcaggctgacgagtacttccatcttggatggtcctgtgtcagggatgtcaggtgggcagctggtgcccacgtgggctggggtggtgtaaggaggggtctcagctgcacgtccgtgggaacaggccctgggacagtgggtggcttggggagagcaccaagcaagggtcaggtttggctgtgcacccgagtccctgtgggtgaggcccagcttagagctcctgggttgttctaagacttgacagtcagggtgaggagctggttgaggatgagcctcaaggcgggccactcccaactgctggcatcactgccctgaggcacccaactcctcccctccccaagaattgtaaattagaggatgtttgtgtttaagggacataaaatattttgttctccatattttatttaaatgttaaaagttttaaaaccccgaagtgttactatttcctgcccagagttgatagttaagagaaatgtcacgaaagcccactctgtaaattgccctgtgtgctgcacagtgcttctccctggtgctgtggcgggatgcttagagctgccgggcacgctctgatcatccctgctatgtagatctgggacctaagatttggaaaattgacgtgaattcaattcctgtgacaatatccaggttccacacgcagcttcctgccccttctggtttggagaaagcagtgctgattgatagatgcctcccccacgctaagacggtgttctctgtttcaggatgatgacctggaagaaggtgaagtgaaggaccccagtgacaggaaggtgaggcctcgtcc

SEQ ID NO: 84530 - DNA, 1303 bp, Homo sapiens
atgagcctgggccagggctggaagcaaagctctggggcttttctggtttaaggggaaaattaatactcagacagttgatacgcgtgaactctccacaaagtgactttgtggtcactctgaccgaggtgcctggcagcctctggggaactgccgtgcctgggcaggtgcagctgtctggctcagcctctccaggctcatcccgcccacctccccgttcagttcccactactgtgtggctcgccatcaggcctgggtaaacatggcctctgccccctcccaccccccaccccagcagctgcccttgtgcaattaggctcttgtggaccctttctgatctcacttttgtttccatagggaactgtacctggggaatgaattgtaggtttatacaccctggagtgaacgacaaggggaactactccctaatcaccaaagccgaccccttcccgcctaatggtgccccgcctctcggacctcacccgctgatgcccgccaacccttgggtgcgtgatgcctcttctttcattgttagcacatcagccaactgagctgtgtctgaatctcaagcttaagacaagtcactgtgccttagcacaggctcagtgccccctttcggctgcttctgtcgtcccgagtggaagcaggcctcggctttccgaggacggagtgaggcttggtggaaggagagcggccacacacggccggcttgtgttgtagttgatgtttttactgtctggtttctctgtacacttgaaagttttactttctcaccttctcccttctcgtttttcaatagggtgggccggtagttgatgaaattttgcctccaccccctccagagcccccaacagagagtgcctgggaacgaggactccggcatgcaaaggaggtaaacacaattcagcagaaatcccgacaagaaagatgctattacaggagtggttcttgacaaaactgggatttcctcggtccagagagagccccagaaatctctgaagttaggcgtctgtttctgtggtgtctttctttattttttatttatttatttttttggagacagagtttcactcttgttgcccaggctggagtgcaatggcccaaactcgactcactgcagcctccgcctcccaggttcatgtgattctcctgctcggcctcccaagtagctgggattacaggcatgcgccaccaggcccggaaggatggagagttatatctaactgtctcaggcagcagcccagtaggccagggagttcagtccagggcatacccactgtcttcatggggctggatcagcactggg

SEQ ID NO: 84531 - DNA, 2092 bp, Homo sapiens
caccgcagccggcctaatttttgtattcttagtagacatggagtttcaccatgttggccaggctggtctcgaactcctgacctcatgatccgcccacctcagcctcccaaagtgctgggattacaggcatgagccatcgcgcccagcctaatttttgtatttttaatagagacaggtttcaccatattggccaggctgatctggaactcccgacctcaagtaatccacccgcctcgtcctcgcaaagtgctgggattgcaggcgtgtgccaccatacctgggcttatttcataaatatttattatgaacctactagtatatcagcactagagatagtattagacacggcagacaccatccctgtccctcctagagctgacagcgtagttggaaagatggaaattaagtaagtaatgacactcacagaaagtaactgccattctggttcaggagaaatctgggtgttcccctgagtaacagacactgagccaagggccatggacatcacccaagtccatggggtgatgggttttgtgagtggccttttttccccttaggaccctttgtttctcaggtgatccttaaataagccaggtatgagatccatagtctctcccgctgctgtcacacctggcattgctgtgaagcggaaggtggcctgagagttgctaatgcctctgtaatttcagccgccaagctgagccaccaaagaaggaggctgccaccacggggccgcaggtgaagagagcagatgagtggaaggacccttggcgccgatccaagtctcccaagaagaaactcggggtgtcggtctccccgagccgggctcgaaggcgtcggaaaacatcagcctcgtcagcctctgcctctaattcctccaggtaaggagggctcgtgggacggctggggtgtcagcaccttggagccgtcagctgacaccatgtacctcactgggtcaggtggggaacaccccagccccactgtttgctgtggcgtcgttacctgcagaccagtcagtgggactaacccggcgtttataccttcagcaaagagcatcaatgccaagtaggactgacgcagtgaccccaaatggggcacagaccccggcgactgagcctgactgctcccagggagtcacaggccacactggagggaggggcacctggatgcgggaggacgcacagacctggggcccagtgagtccatctgttcctccagactggacctgaaactgttgcccctccacctacggtcctggtctcagcacacaggagcccggctcccgagtgagggatgatggaaagcagggggccggggtagaccccatcatgctcggcaggaacaggaggtgtgggtgggaggccaggcttcactgaaagtggatgcagatgaacagatagacacacacacggacccacgtgagctgggtctgcccactcaggcagcgccacccggtaacagcaggcacaccccacgcccaggtcttgatttctaaatgccgttctgcaccaaggagggatggcactgaagagtgtctgggggaggctgtatgcgtctgtgcgcgcgtctgcagctgtgcgcgcgtgcgcagctgtgcgcttgtgtgtagctgtgcgtctgtgggtgtgtagctgtgcatgtgtgcgtcagggcgtgtggggcagggagggcccttctcacttctcgccacgctccgtcccgcccgccccaggtcgtcttcgcggtcatcgtcctactctggctccggctcctcccggtcgcgatcccggtcttcatcctacagctcctactccagccgctcttccagacacagctcgttctcaggaagccggtccaggtatgtccccagggcccatgaagggccctcagcaggtgcagtgagcaagggcacctgcggatgtggctttagttgtggcgccagtagccccttggggtattgaaggtccctgctggcagctgaactaggatggccagggggtcgtgtcctgtgtcccccaccaaacaccagccttgcgggccctcgtccttgtgtagatgcgtgctgtcactgagggccacagcctgagatcctcgagttgaggcactccagtcc

SEQ ID NO: 84532 - DNA, 1050 bp, Homo sapiens
cggggtgaggggcatggacagcgaattgcagccccaccccccacccccccccacacacacacacacgctcctgccctggttgaggctggagggtgccctctgctccgcatgcccttgggcaaaagatccctgggcacagaggtgggaagaataacaggaggttgtgcggggccagcccaggaccctcccagtctgctccacaaagcccgggagccagtggctaggaccaggcctgcttgtggcagtgggagcctggccatccagggagccccttgcctgtcctggtggccgctgaggacacagtggaagcgcccctacggggaggtcaccccttccacctgcagacgtggcttctgggggctcaaggtcttccccacccccttgtaggaagcgccagctgtcaccccagtccaagagctccagcaaggtcacgagcgtgcccggcaaagcctcggatcccggcgccgccagcaccaaatcagggaaggccagcacgctgtctcggcgggaggagctgctgaaacagctgaaggccgtggaggatgctattgcacgcaagcgggccaagatccccgggaaagcataggccgtgccccgaccggactggacgcatttttatacatagggtaagcgcagccattttggattttgcagttaatgtcttattttggctgtgattctttttaaaaagtaaaaaagaaaaaaaagtttctcagctggaaaagaagccacacaggaaatgacaacgacgctgaatcccagcctccctccccagagcagaagtcccgcaggacagacagacacagacagcgctagtgaccagcacggttctcatgtaaattacaagccccagccgccagccccgccttctcttcctcctcctccgtcttcttccctggccctggtcaggcctgtggagccccagctctgggtccctagcccgggtccaggcagccaggctccctcctgagctgagaaacggaacctcgcgaaccactggtggcacatccttctcctcccccgcccctgatcacccgcccccggatcaga

SEQ ID NO: 84533 - DNA, 1050 bp, Homo sapiens
gggggaatattggacaatacccccccaaaaatgtgcagaaatagccatatcagacgaaaccgaaattaaggcaaaaccgctgacgggttaagaggaactccgtatcggggggaaaaagacactcccccaagaagatgcagaaaccacactcggcctgttagctttcagtgcatcaaacaaagactcatggtgacaagggggtccatttgggggtcccagagcccactggggcctgcaggtcgggctgtccttggccactcctgggacccagagcccgggcatgtccagcaccccctccgccagcccgtgcgccacaggctctgctcttcaccagtgcagaggggtgcctcctgggggtgtccccgaccctgtcactgtgctgtggggatgggtagggggcagctctgggtggcctggtggcccacagtaggtagagaaggggggtggcccaggcccccgggacgggagccccacagtgcctgacccacttctccccgcagtcctcatcaccgggggcatcgtggccacagctgggcgcttcacccagtggtactttggtgcctactccatgtatccttccacctgaggctggggtgggcggggaacgcccagggcagagctggggagccacttcacagtgagctgtttgcctccgctccccaccaccgcagccaggctgggacacagggtgggctgtgcacgggttgggcagcccaggccccagcagccaggcccctcgccaggaccatgtggcgatcagcggcagacccgccagtctaagtcctggtgagtggtgggcagggggtgtcaccagagggccagggccagcactgaggcctccctgttggactgctgggatcccctctgcccgctcctgtcagtcatcccccttgaccggcccctctacctcctctgccccatctcagccctgccgcccagccggaccttgcgacaaggagcactgggcagggtggtgggagggagggcgtgggcagccccgagtgccagacctgttggaacctcccgtggctgcctcctggctctgtgacc

SEQ ID NO: 84534 - DNA, 1036 bp, Homo sapiens
caggggaacccacgtgggttgtggccagggtaaggaccagggggctgagctgaaaccttcccaatgcagccttcccctgccagccgataccggggacggcgctgggggctccaaggtcacaagggccgcgggcacagtcaaggacatctaagggccgagcaccctccagctgccaggagggccagagccgggctgatgggcactgccacacccacatcagagcagcgtaagggcctgcagcttgtcatgggcctcattggcccccatgtccatcctgtcctggtgcctggcccgtgccccgtggccctccctggcacatccgcttcagggtggagaggccccagccagcgccccgttctttcagtggcttccggaggactgagcagctagaggtgattttgcatttgcgtttcccgacgttgccacatctcaggtgaataagttctatgaagcgctcacactagtacgtggcccctcggtggtttgtcctcgaggtcgaaggtccagatgtccaggggctgccctggactccagagtggtgcggctgagcaggctgtggtcttgggtgcttgggcacctcccgtctctccctgctcagagttcttctctcctgggcagccagaaaggatcagaaccggtcacatgcagagcggcctcccgtatcccacagcagctccgttctctaatctgggtcttcagatgcggctgtgtctcccggcaccttgctggaatgtggtgcatccctcggagtccagcagcccttaggcagagctgggtgccgagcttgagtccaggagggcctcagacacctgcgatcttgcagcctgttgccctggacagtgggtgtgctgtgggtggaggatggcgccctgcctccacggaagcatccccagcttgcccctcagtcacacgaagcgtctgtccccagcctggggcatttctgagtggcctccacttggcctcttcctttttctggagcaagtatttgaactcctgcaggcgccagagatctccttacctgtttcccgctaccctt

SEQ ID NO: 84535 - DNA, 1032 bp, Homo sapiens
ggcgacagcggcctggaggcgcagtacacctgccccatctgcctggaggtctatcaccggcccgtggccatcggcagctgcggccacacgtgagcgcgcccgcccaggggccgcggggagggggccgtgccccgccgcgggaggggtcgcgaggccggcggccgccccggtgcagctccggactgggcgcgcggggactcggggcgccggggcctcggggcgcgtggggtccgggtttccctgtgccgcgccgcctctgccctctgggcgcgttcatcccccgcccagcctccttcgcgccagccgcaggcgcccggtccgactgctgcttcggttcaccgggcgacctgcggccctgcccaagctcggggtccccggcggctgcggcgggcgctccggtactcagagggcagcaggtgccaccgctccgccagtggtggtggatttgggcttgtgcggctggaatgggcagttgtaaataaataacttgtagtttttgctatcaactcttgttcggacccgctgtctgcctgttttgactacagaggaaaggagttccctaaagtttagaggggcttgtttggagtctgatgttcttagttttgtttgaaggagaacttgagtcacaccgatcactgagtagccaggcaggctggtccacagaggagcagacactgaccaccttgctggggtttccagctgcaccagggctcacagccggctcctccagggtgtttcaggaacagaaactggaggacgtggctctcctggcggggagctgtgctcaagtattctggagctgccagccccgttgggaggaagcctagatcagtgtctgctccctcctaagtgctgaataatacagctcttgagcaaaatcagcagtggcaggggagagagagagcaggagggcttccccgcagacatccaagctgctgaggtggtggagtggaggggggtgcacccagactggtaggaggctctagaacattttgcaagcaaagtcagctgacttcaggggctcctggtaca

SEQ ID NO: 84536 - DNA, 1911 bp, Homo sapiens
gggttgtcaaccagcccatcgatgtcaccgtcaccctgaagctgggcggctatgaggtgagcatgtgtgggtccgcctgtccattcccatcccctgggggttctggccaaggtggtgcaccacccccagccgctcctccacgctcatcttcgtggccccgtgtccccgtgcctgccccagccgctgttcaccatgagcgcccagcagccgtccatcatccccttcacggcccaggcctatgaggagctgtcccggcagtttgacccccagccggtaagtggcctctgccctgtgaaagctggtgtggggaggcggctgcagtcactgagggtgtcacttgtacccagctggccatgcagttcatcagccagtacagccctgaggacatcgtcacggcgcagattgagggcagctccggggcgctgtggcgcatcagtccccccagccgtgcccagatgaagcgggagctctacaacggcacggccgacatcaccctgcgcttcacctggaacttccagaggttcgtcctggacttggggcagtgcctgggtgggtggacccactacagtgggtcacgctgtgttcccacccccagggacctggcgaagggaggcactgtggagtatgccaacgagaagcacatgctggccctggcccccaacagcactgcacggcggcagctggccagcctgctcgagggcacctcggaccagtctgtgtgagtgaagggcccgggtggtgggcaggagggctgtgccaggttggctgggccaggcctgacctgccagcacctccctgcagggtcatccctaatctcttccccaagtacatccgtgcccccaacgggcccgaagccaaccctgtgaagcagctgcagcccagtgagtatgggcgtgggggttgggggaggctagagaggggtgacctgcggcctcaacgatcttctccctccatcccagatgaggaggccgactacctcggcgtgcgtatccagctgcggagggagcagggtgcgggggccaccggcttcctcgaatggtgggtcatcgagctgcaggagtgccggaccgactgcaacctgctgcccatggtcattttcagtgacaaggtcagcccaccgagcctcggcttcctggctggctacgggtgagtgagtggctgggggggcaccccgcagctcggggggctccgggcggccccaggactcaccagcttcccccgcagcatcatggggctgtacgtgtccatcgtgctggtcatcggcaagttcgtgcgcggattcttcagcgagatctcgcactccattatgttcgaggagctgccgtgcgtggaccgcatcctcaagctctgccaggacatcttcctggtgcgggagactcgggagctggagctggaggaggagttgtacgccaagctcatcttcctctaccgctcaccggagaccatgatcaagtggactcgtgagaaggagtaggagctgctgctggcgcccgagagggaaggagccggcctgctgggcagcgtggccacaaggggcggcactcctcaggccgggggagccactgccccgtccaaggccgccagctgtgatgcatcctcccggcctgcctgagccctgatgctgctgtcagagaaggacactgcgtccccacggcctgcgtggcgctgccgtcccccacgtgtactgtagagttttttttttaattaaaaaatgttttatttatacaaatggacaatcagaggccagtcccccgtccttgccttccggctccagtgtggtgtaccaggtggccactgcctgctgtcccggcaagcacgtcctcacgctcagctctggcccgcctcgtcgtcactgtcctcaatcagacagtcccggatctcctgcaagccccaggccctagagagaaagct

SEQ ID NO: 84537 - DNA, 1005 bp, Homo sapiens
gcccagcaggccggctccttccctctcgggcgccagcagcagctcctactccttctcacgagtccacttgatcatggtctccggtgagcggtagaggaagatgagcttggcgtacaactcctcctccagctccagctcccgagtctcccgcaccaggaagatgtcctggcagagcttgaggatgcggtccacgcacggcagctcctcgaacataatggagtgcgagatctcgctgaagaatccgcgcacgaacttgccgatgaccagcacgatggacacgtacagccccatgatgctgcgggggaagctggtgagtcctggggccgcccggagccccccgagctgcggggtgcccccccagccactcactcacccgtagccagccaggaagccgaggctcggtgggctgaccttgtcactgaaaatgaccatgggcagcaggttgcagtcggtccggcactcctgcagctcgatgacccaccattcgaggaagccggtggcccccgcaccctgctccctccgcagctggatacgcacgccgaggtagtcggcctcctcatctgggatggagggagaagatcgttgaggccgcaggtcacccctctctagcctcccccaacccccacgcccatactcactgggctgcagctgcttcacagggttggcttcgggcccgttgggggcacggatgtacttggggaagagattagggatgaccctgcagggaggtgctggcaggtcaggcctggcccagccaacctggcacagccctcctgcccaccacccgggcccttcactcacacagactggtccgaggtgccctcgagcaggctggccagctgccgccgtgcagtgctgttgggggccagggccagcatgtgcttctcgttggcatactccacagtgcctcccttcgccaggtccctgggggtgggaacacagcgtgacccactgtagtgggtccacccacccaggcactgccccaagtccaggacgaacctctgg

SEQ ID NO: 84538 - DNA, 2139 bp, Homo sapiens
cgtgcaccacgctcgtccctgctctgcctgactacgcccctgcctgcttaacagcctagtcccgcgcccactgcacgaaaccccgtgtggggacaagagctggacgcagccctgagccccctgctgtgccctgcagggcggcgaagtgcacaggggcgtgctggatcagctgtacacaagccaggccgaggccacgctgccaggccccaccgaggcccccaatgccccaagcaccgtgtccaggtaggtgcgggggtgacccgagccccagctgctgcccctggtgtgtgggcatcgcctagccatccccgaccctcgccattcccttgtaccccaaaggaccgtgggcactttccaccctgaccctccctgtagcctggggtcaggccatagagcaggattctctgtgactcggcttccctccccagtgggctgggcgcggaggagccactcagcagcatgacagacgacatgggcagccccctgagcaccggctaccacacgcgcagtggcagtgaggaggcagtcaccgaccccggggagcgtgaggctggtgcctctctgtaccagggactgatgcggacggccagcgagctgctcctggacaggtgggggcgggacgcgcacaacaccagcctcaccatggccctcggggagcagccgaacaggggcaggagactgactgtgaccggcaacagatcgggccgtcatgccttcgggcagtcccagactcccccaaacacgcgggtctccctgtaggcgcctgcgcatcccagagctggaggaggcagagctgtttgcggaggggcagggccgggcgctgcggctgctgcgggccgtgtaccagtgtgtggccgcccactcggagctgctctgctacttcatcatcatcctcaaccacatggtcacggcctccgccggctcgctggtgctgcccgtgctcgtcttcctgtgggccatgctgtcgatcccgaggcccagcaagcgcttctggatgacggccatcgtcttcaccgaggtgggccgaggccgcgggggagggggcgcccggcccaccgcgccgtgaccctccccgcgtgctgagccccctcccccacagatcgcggtggtcgtcaagtacctgttccagtttgggttcttcccctggaacagccacgtggtgctgcggcgctacgagaacaagccctacttcccgccccgcatcctgggcctggagaagactgacggctacatcaagtacgacctggtgcagctcatggcccttttcttccaccgctcccagctgctggtgagtgtgagccttggctggcaatgcggggctgggcaggccctctgggcacctgtgctctccaccagggaggcaaggccccctcaccacaccctcccgcccctcagtgctatggcctctgggaccatgaggaggactcaccatccaaggagcatgacaagagcggcgaggaggagcagggagccgaggaggggccaggggtgcctgcggccaccaccgaagaccacattcaggtggaagccagggtcggacccacggacgggaccccagaaccccaagtggagctcaggccccgtgatacgaggcgcatcagtctacgttttagaagaaggaagaaggagggcccagcacggaaaggagcggcagccatcggtataagcgccctgcctcacaacctcctgcctacccagttttctgagtggggctactgcagggagggtctttctcagatgagacggccaagcccagtgcgaggcccacctggatcccaggaaggtgccacttctgagccacagctcccggctctgcctacagagccgtccctgactgctgcccccggggatgctccccacgtgtagggtgactgttggcctgggctggcccctcacagttgccccagacagaggacacagccccagctgtctccttgccagtgacactgggagctttcctgtgctccgtctgcttgtctgtcaaacagggagaatgccagcctcttagggtggtcaggagccatgagccaggcccagtccccagggggcccaggcagaagtcagcttttccctacagaagctgaggacagggaggaagaagagggggaggaagagaaagaggcccccacggggagagag

SEQ ID NO: 84539 - DNA, 1040 bp, Homo sapiens
agtcgcccccaggacaccctgggccccaaggaccccggcctggagccaggtgagtgcagctggagtcgggcacccagggccccgtgtccagcatgtctgtgcctgctggcgtgtgctgcgtctgtgcccatgtgacgtcccacagggctcccagcccgcctgtcctgtccgcatgatcaccctctgtctggcaggccccatggccgccctgtgactgtccgtccacgcacatgggctctgagccccatggccccacacggcccccgtcactgtgggtgtccgtgtctgtctccacctatcctgtctccaagacgggagcactcacagccccgacccctcctggtggcttgactgctgcctcatgctcaccctgcccctccacagggcccgacagtccagggggctcctccccgccacggaggcagtggtggcggccctggctggaccacgccacaggtacccccaattaggccgcctgtggccaccctctcaggccctctgtgcccccatctgtcctctgcctggcctgctatcttcccctcccttcccccgactcccaggccctgagcgtcaggacgtgctcaggcctcctgggtcggggggtgcctcactggctgcagacccctgggctgactatgtcctctcctggctatgccccagcccttccaacagtgggagtctcggagcttgccccgatgacacatggtggtcgagcagcgatctcacctgggacccagcagcactgcgttattctgtttttgtttctttttgagatggagtctcgctctgtcactgcaggctggagtgcagtggcatgatctcagctcactgcaatctctacctcccgggttcaagtgatcctcctgcctcagcctcccaagtaactgagactacaagcatgtgccccactccaggccttttttttttttttttggagacggtgtcttgccctgtcgcccaggctacagtgcaatggcgtgattgcggctcactacaacccccacctcccaggttcaaaggattctcctgcctcagcctcc

SEQ ID NO: 84540 - DNA, 1102 bp, Homo sapiens
tgactctgcgtgtgagcgcaagtgaacccatgcactcatccatggatgtgagagtgtgtgctcgtgtgcctctgagtgggtgtgagcgagagggtgttcggtgcctgtggggaggctgcggtggatgggctggtgccagccgcctgagagctcttgccccctgctataggagggtgctgggtcccccggctgtgggaggggtgctgggccccccggctgactgtgacaccctgcgcttgtcacagttgctctacaccctgaccttctggctcctgctgcgccagtttgtgaaagagaagctgctgaagtgggcagagtctccagctgcgctgacggaggtcaccgtggcagacacaggtgagtggtgggccagaggcgggggttgccctcctgcctgcccgccctgatgccatcgcctgcccctggcttggcccacagagcccacgcggacgcagacgctgttgcagagcctgggggagctggtgaagggcgtgtacgccaagtactggatctatgtgtgtgctggcatgttcatcgtggtcagcttcgccggccgcctcgtggtctacaagattgtctacatgttcctcttcctgctctgcctcaccctcttccaggtggctggggggccgggatgggggctggggcacggaccctccccgcggtcctcaccacccccacctcacccggcaggtctactacagcctgtggcggaagctgctcaaggccttctggtggctcgtggtggcctacaccatgctggtcctcatcgccgtctacaccttccagttccaggacttccctgcctactggcgcaacctcactggcttcaccgacgagcagtgagtccaggctggggcggtggggcaggggcgccgaaaccccgtgcacttccccggggctgcagcggctctgccgggggccgggccggtgctgatgctgcccctccacaggctgggggacctgggcctggagcagttcagcgtgtccgagctcttctccagcatcctggtgcccggcttcttcctcctggcctgcatcctgcagctgcactacttccacaggcccttcatgcagctcaccgacatggagcacgtgtccc

SEQ ID NO: 84541 - DNA, 1025 bp, Homo sapiens
ggacggtgtcagcccaattgccggagccctcgtgttctgcccatagcccaccgggggcctgtctctcctgctgtgtgcttgcccagggcccagattttagggcatagtcagggtggggaggcctgcagatcaacctgccgaagctgaccgctgtccccacctgcagtgcggcccaagcgggctgagcccagggaggcgtctccgctccacagcctgggccacctcatcatggaccagagctatgtgtgcgcgctcattgccatgatggtaggcggctgtgggggttggggtgggcggccccctctgccgcgcaggtgtggggcatcgcctgggtggggtgcgctgggcagctgtgcagccccctctgccgcgcaggtgtggggcatcgcctgggtggggtgcgctgggcagctgtgcagccccctctgccgcgcaggtgtggggcatcgcctgggtggggtgcgctgggcagctgtgcagccctctctgccgcgcaggtatggagcatcacctaccacagctggctgaccttcgtactgctgctctgggcctgcctcatctggacggtgcgcagccgccaccaactggccatgctgtgctcgccctgcatcctgctgtatgggatgacgctgtgctgcctacgctacgtgtgggccatggacctgcgccctgagctgcccaccaccctgggccccgtcagcctgcgccagctggggctggagcacacccgctacccctgtctggaccttggtgccatggtgagtgtgcaccaccacatccgggggtgcctgggtgcgcagacccatcagggttgtcgtcctgttcaatgtccacttgcccgggggagtggcagcgccaagaaggcagatgtgtctgtctgtccccttctgcccacccagagccagcccagagtagcttctcagtgagcgtttgttgactgaataaacagacaaccttgtgttggcacgggcaccacccctgtgccctgacactgtgtgagcgtgggctctgttggcacgggcacc

SEQ ID NO: 84542 - DNA, 1233 bp, Homo sapiens
gtgcgatacacctgaccttgcccctgtccgtgaccttggcaggatgatgatgagagggatgtggatgccagcccgacggcagggctgcaggaagcagcaacgctggcccctacacggaggtcacggctggccgctcgtttccgagtcacggcccactggctgctggtggcggctgggcgggtcctggccgtaacactgcttgcactggcaggtacgcaccgaggcagggggcactggcagtcacactgggaggggtcttgggagttccctgatgactgtggagacagcgggacacatggcactggccaggtaccaccctgtgtgcccctgccccgcaggcatcgcccacccctcggccctctccagtgtctacctgctgctcttcctggccctctgcacctggtgggcctgccactttcccatcagcactcggggcttcagcagactctgcgtcgcggtggggtgcttcggcgccggccatctcatctgcctctactgctaccagatgcccttggcacaggctctgctcccgcctgccggcatctgggctaggtaacggcttgccacacagcccctttttcctgccaccctggtcccgcccacctggctcgtctagcccctgtggccccactgcctctggggtggtaggctgtgacgggtcttctctggacagggtgctgggtctcaaggacttcgtgggtcccaccaactgctccagcccccacgcgctggtcctcaacaccggcctggactggcctgtgtatgccagccccggcgtcctcctgctgctgtgctacgccacggcctctctgcgcaagctccgcgcgtaccgcccctccggccaggtgagcacctgccacccatggtgggtgggctgaggccaggccatggggctggtctcaggacctcctgcctctgggtggggtgtggagctggtttgggctcaagacgctggtctctgcagaggaaggaggcggcaaaggggtatgaggctcgggagctggagctagcagagctggaccagtggccccaggaacgggagtctgaccaggtgagcagccaggcaggtggagacgccagcgtggggggcgcccggccagcccgtgcatggctcagcgctgcttgcccacagcacgtggtgcccacagcacccgacaccgaggctgataactgcatcgtgcacgagctgaccggccagagctccgtcctgcggcggcctggtgagtaccgcac

SEQ ID NO: 84543 - DNA, 1044 bp, Homo sapiens
cctcccacccccaaccagcaagcctcccttggggatttcaggccccaggaagtggggggacccaggagggacagagggggacctggagactcatccacactcccacccacacctggagacccatccacgctcccacccacacctggagacccatccacactctcacccgcacctggagacccatccacactcccacccgcacctggagacccatccacactcccacccgcacctgcagacccatccacactctcacccgcacctggagacccatccacactcccacccgcacctggagacccatccacactcccacccgcacctggagacccatccacactcccacccgcacctggagacccatccacactcacacccacacctgtcctcttggtctgaccgcggctgctccctgctctccgcaggctggacctgaaggacatccccaacgccatccggctggtggcccctgacctgggcatcttggtggtctcctctgtctgcctcggcatctgcgggcgccttgcaaggaacacccggcagagcccacatccacgggagctggtgagggcagctgcgtcacccgtgtgtcagggaggtcattcgagagctgtggtctcagccattttgagggttattttaatctttttaaaacagatgtagacgttttggttgtaagttggtgttaaagagaggaggaagttccaaatcccaccccggggcccagcctgcagttccatccgttcagacctgtttctactcgggctctgcctctagtcagaaacctccacgccccgacatggcatctgtgcccttaggaactcttcacaggggaattatttggggccacgcggtggtggaaacctgcagtgctgggcagtgggtctggctggagagccactgcagaagggctgagaaggggcggccccagcaggccccatgcacttacaggcaaacaggctgtcggcccagagccccagcaggggcctggaccccaggagcgacgggcctgaagcagggcctctgtcctcggagtgggaggca

SEQ ID NO: 84544 - DNA, 1025 bp, Homo sapiens
tgcaatggcacgatctgggctcactgcaacctccgcctcgcgggttcaagcgattctcccgcctcggcctcccgagtagctgggattacaggcgcccaccatcatgcctggctaatttttgtgtttttgtagagacaggggttttaccatgttggccaggctggtcttgaactcctgacctcaggtgatctgcccacctcggccgagactacaggcatgagctaccgtgcttggctttttttttttttttcgagtgggggtcttgcttggttgcccaggctggagagcagtggcatgatcatggctcactgcagcctccacctcctgggctcaagcgatcctcctgccttagcctaccaaagtgctgagattacaggtgtgagtcactgtgcccagcgcaggcactgatcttggatcatgggtagaattcaggggtgcagagaggcattttgggaggggcccagtgcggccgagtgctgggagtcgctggggcccgaggcccaaacccctccaggatgcatggctggggtgggtgggcacccccactcccggtccctatcctgggcctcccctttgctctgtggagccggttctgtctgttcccaggcccctggcgtttcgccgtttgttccgtaaatatttcatgcccagggcgcaattggaaacactttcctttaatcagcagtgggggaaggcaggcgcccagccaggccaggggaggagctggggtgggaagatttggagaggacccgggaggacttccctgcctgagcctcgtcagaggcccttcagagacggagatgctgcccagttttccgggagggagagaggaaagtgtgaggcttgcccgagccgagtgcccggggctttatgatttgtgcagctgctgggcttggcgtggccctggtggaagctctgacgccatctgagccttggtccccttgtaggcgtcagcctgatccttggggggctggaggttgagctcagactgaacagggaggagaggggtaggggctggggctggg

SEQ ID NO: 84545 - DNA, 1021 bp, Homo sapiens
ccccagtctcctgcagaagtacacagacatgatgtacgaccatcctggacacctgccctgagattcccctccctctcctgccctgtcccagtggcctggggggaaggggaagcaaggttctgaagggagtgtgaccagacacctgcccgtgacaccccctctccaggctgcctccgagtggctggtgactcccctcctgcctgcgagggaggtggccaggttgcattcctctctgagtgccggggaagtccctagagagcaggccagcctgtgactgggccctggggcagtctagacaggccagactggacaggccagggggctgggtgccgctgggtaaatcacagggtgagggctctgagtcagcaccccatcttctgtcctgggtccagcaccgctgaggacacagtgggcagccgggtctgccagggccaggtagctgtgttgagaaggcagtgctcctgagaggcggctaccgggaggttttcaatggccaggcttcttaggaagcccttgttgcctctctggggtgagttgctggggccatggttggagtggtcgccagtgtctgcccctggtgccgagggcggagtcctcgttttgggaggtcacggcatgatgctgggagtcaaaggcaggccgtggcaggggcattccttttttctttcttttttttttttttttgagacggagtttcactcttgtcgcccaggctggagtgcagtggtgcgatcccagctcactgggatcccaggctcccaggttcaagcgattctcctgcctcagcctcccgagtagctgggattacaggtacgtgccaccatgcccggctaatttttgtatttttagtagcgacggggtttcgtcatgttggccaggctggtctcgaactcctgacctcatgatccacccgccttagcttcccaaagtgttggcattacaggtgtgagccaccgcgcccggcctggcaggggaatgtcgacgcgtgatctctgcctggagagcacgttcatgtttccca

SEQ ID NO: 84546 - DNA, 1027 bp, Homo sapiens
agacggggtttcaccactttggccaggctggccttgaactcctgaccttaagcgatctgcccgcctcagcctccaaaagtgctggggttacaggcatgagccaccgcgcccggctgacagttagacttttgcttctttgtttatataagctttttcttctggttccaaaagcaagtttgcccttccttgtggtagagaatcctagctcacagagcagtttagaagccagcacagtatcccacacacacatctggcatggacagacccttccttgctgggtgtgggtcctgtgttcttctgaaaggcaagctgttcccagccaacccctgcccctctctgccttagcctgcctggaggcctgagtctcctgggtgactgtgaggtgggacccccccttcccctacccccacccacatcctctgtatctgccttctgtcctgctcttgacctttgagctcctctgctggcttcagggtgcggctgttgagcctattttttggattaggactctggggtgagggaagttaattcacacacccaagatcacactggtgggaagggacaggcccggggtgaaggcttctcctctccttggcggttgagtcccacacctgctggccgaggcacctgaaggggacttggggtccagggtcactgggaggacgggggcaggcagaggggtggccgacctggtggcggctcgtgggcagcagccgaccctatcttgctctgaacgtgtggggccctcacccccttctctgggtctgggtttcctcccctgtaagtgacaccgtaaaagcttcacagccgcttccaagtctcaggtctctcgggctttggatctcacacccaggctgggtgggggtaggggcgggacagccgtcccccccggaaggctcagaattcctcgcacaatcgtggggccaggagacccgcaacacaggctttcccagctgcgctgagtgccgcggtggccgggggtccgtcgggcctccatggagctgaggggaaggggccactcaccgcc

SEQ ID NO: 84547 - DNA, 1074 bp, Homo sapiens
cgaagcacacccgggtggcttggtgctgcacggcctggcacccctacccttccccgaccctggcctagccgggacccagggtccgcgccctccgcccgggggctccccacgtgtgattgatctgggaagcagtcggatggaattaacccacggacaagtgggacggtttgcattgggagtccgccatggacacggcaggtggggccttttgattgtaaaagccctttcggagcccttgcctcgctccaggtgggagctcgcccagcgctagctttggggatctagagccgcctgcctgaggctcccagacagactgcgttttgatcggtcgcacagaaaggtggtgaaacttggggaagattttctagacaggaatcaatgaaaaccattgaggctggagaggagaggttttgagcaactctcttcagtgcggtcagccctgtgtggactgggcagcctgggacctgctcccagtgcagggtcagatgggccgtaaacagggcccggctgtgttccttcctgtgccttgaaaacaagcaggacagcctggcacagaggcagagtctagagctgacaggccttagagagggaaacaggaaagcttctgaaacgtcccgttcacactgatcgttccatttcctcttgtgtctgagtgggagcgggtgtcctccctgcagggaatgccccccctctcagatggcagctgctccttgggcagagttggcaatgtttttctttaaatgaccagatggtaaatattttcatgtcacaaaatcttcttcttctggtatttttccagccattaaatgtaaaagccctcctgagttcatgggctgtacctaaacaggtgttgagcccgattctgtggcacatgtggtttgctgccccctgggcattggtcagggggcctgggttctgccttctcgattgctatccgcgtgggggatctgggggagggatcactgttcttcttgcttttggcctccttggggaggatggggaggtagcccaggggtgctcacccaggccccgtgtcagtcttctatgaaacttttaaagaatagtgatgactga

SEQ ID NO: 84548 - DNA, 2507 bp, Homo sapiens
cgcgctaaagtcccacgcacgacggcgcccgccggcgagtccacgcccgcacgtcggcgcatgcgcgcggccaagccggtgcccgcgcccaccagcgcgcatgcgcgccccgtcccttccctccccccgtgctctgccccgatggttcggtccgcgccgggggcggggccagggcgcccgcgggaaatttggcgggaaccgcgcccgcctcttcctcccttccttctttccttgctttcgccgcgcactccgccgccatggagcagcgccgcgtcaccgacttcttcgcgcgccgccgccccgggcccccccgcatcgcgccgcccaagctggcctgccgcacccccagccccgccaggcccgcactccgcgccccggcctccgctaccagtggcagccgcaagcgcgcccgcccgcccgccgcccccggacgcgaccaggccaggccaccggcccgcaggagactgcggctgtcggtggacgaggtgaggggcgtggggagactgaggccggggagttgggggcggggagactgaggcccggggggcagggctcggggaaactgaggcggagggacgggggcggggaaacaggcgggggggacggggcgcagggaactctgggacaggccgggggatcctgggggcgccctgccaccactggggacttggctggctcctgagatgagcaggaggcactggggggcttgcaccgggatccgatgatggggctggaagtccagcttctctgcgaggccagggcaggggtccgacctggaaacggccccggaagacgagagcaaggctgtgtccccggccttagcacagaccaccatctacgggaagtcctaagccccccagccatgcccgtcccagttaactcagagcggcttctgatccttcggggtcctctgcagagccaggagcaccaggtcttgtcatgagttcacccttggggtccctcccaccaggtttccagccccagtacccccgaggccccagacatcccagcctgcccttctccgggccagaagataaagaaatccaccccggcagcaggtcagccgccccacctgacatccgcgcaggaccaggtgaggggcggggcctggggcagatgcgggagggctgagtggtgccggcctgcctgcctgcctgacggcaccgtgtcccctgatccccctgaaggacaccatctctgagcttgcgtcatgcctgcaacgggcccgggagctgggggcaagagtccgggcgctgaaggccagtgcccaggatgctggggagtcctgcaccccagaggccgagggccgccctgaggagccatggtgagtgctgggtgggcggccacgaggccccggcaaaggccgggttggtggcaggcgtggcccagcgagcctgtcagaggcccaggtctgctccttccagggagggtggtggtgaggtcaccagggcgcggacccagacccctgagaaaaaggtcccgggcactgctggcgctgtgccctcagtccctcctgcggggggcagctcctgcctcggggactctggcaggtttcaaatgctcctgatgcattggtgtgttgtctgcctctgcccctgagagctgacgaaactgcgctggggagagggcagagcttccctgggggagctgcgtggacacagcagagctggggtgtggagccgggctttcccgtcaccactgctacccctaacggtgccagtgctggtgggtgtgcaagggccgcgaaagccatcgtgtgtggcatggcaggccccatcggagggtctccctggccgaggggcctgctgtggcgttggaggggtaggggcctactgcttctcatgaggctcctccctccctgacagtggcgagaaggcgcccgcctaccagcgcttccatgccctggcccagcccggcctgccgggactcgtgctgccctacaagtaccaggtgctggcggagatgttccgcagcatggacaccatcgtgggcatgctccacaaccgctccgagacgcccacctttgccaaggtccagcggggcgtccaggacatgatgcgtaggtgagtggccgggggtgggctgtggctgtcctggagttgggggtgggcccgggcctgcctcctgagccgcccccatcctcccataggcgttttgaggagtgcaatgttggccagatcaaaaccgtgtacccggcctcctaccgcttccgccaggagcgcagtgtccccaccttcaaggatggcaccaggaggtcagattaccagctcaccatcgagccactgctggagcagggtgagtgctgggtgcgggacctcggtttccccatctgtgagccgcacagtttccagggtgggtgtgaggtgctgggcatctggcccaggactggtcacgggtgggtggctgggtggcctggtggggacttaggcctggactcgtcccacagaggctgacggagcagccccccagctcacggcctcgcgcctcctgcagcgacggcagatctt

SEQ ID NO: 84549 - DNA, 1019 bp, Homo sapiens
ctccacacctgcagcctctggaggcagcttccccctcacagctctggccctttccctgaccacctgcagtccttggtcagaaggggccccacatgcaccctccactgcctcccaggcctctggtgaccaggccctgagcacataggggtcctgacgctacagggcacctcctgcctcagggctttcatgggctggcggcctccatgctcggtgcctcctcacagggcctcaactgtaggcctggctctctccggtcactgttcacaccacccagacctgggcctctgatcagaaccacctctgccctaagtcctggtgatggggccctgagggcgaccaggcaggcacagaggttgggtggtcaggctggtttcaagtgctgcccgtgcagggctggggcccagcaccagcctcagtgtcctcctctcctcccccaggggaaatggagaagcacctgctgctcctctccgagctgctgccggactggctcagcctccaccgcatccgcaccgacacctacgtcaagctggacaaggccgcggacctcgcccacatcactgcacgcctggcccaccagacacgtgctgaggaggggctgtgagcctgggggccactgtggacagacgtgggcttcagaagctcgctggcctgggcccaccagcattttcttttatgaacatgatacactttggccttcctttccccagcgcccctgagggccagaggcagatgtgggctgcaggctgcacagcccgagggtctctggctgcgggcggtgggccccttcatggggctcacctggtggattcacattaaaccggtttctgtgggcacctctgtccttgctgctggtggggaagggaagccagatccagcaccccctggggggccatcgggagtgtggctgggggtgaagggggctctgtggcaatatggggttgggtagtgtgggtggcaggccatcccctctaatcttggaacctctgaatatgggacctcccacagcaaagggtgacttt

SEQ ID NO: 84550 - DNA, 1082 bp, Homo sapiens
gagaggttgagacataggctgggctcacacagccaggtaacagcaaggtggggttggagtcagggtctagggtggcagctgccaagctgtgcaacaaagctgttttctgcgggaggctgaggaccacacaccacttcccactccaggctgagctggagattcagaaagacgccctggagccaggacagagggtggtcgtcgtggatgatctgctggccactggtggtaagggtctccccgcagccaactgctgtggctccaagggcctggtgggagtgggacaggacctcgctgtgtgacatgggatgcagcttactgttgtccagagggtgcctggtggccaggccgacaccttcctctccccatgccttcccctccccaacccaggggctggcctggagcacctgctctctgcagcccaggccaactggggacctcaccctcccatccccaggaaccatgaacgctgcctgtgagctgctgggccgcctgcaggctgaggtcctggagtgcgtgagcctggtggagctgacctcgcttaagggcagggagaagctggcacctgtacccttcttctctctcctgcagtatgagtgaccacagggcctcccagcccaacatctccagctggatcccagggaaatatcagccttgggcaactgcagtgaccaggggcaccggctgcccacagggaacacattcctttgctggggttcagcgcctctcctggggctggaagtgccaaagcctggggcaaagctgtgtttcagccacactgaacccaattacacacagcgggagaacgcagtaaacagctttcccacaagagccgtctcctgtcctcctgttccccagggcagggagccccaggacaacaccagacttcagctgtactgtgggcatgtgctgcttggcgtgatgcccagcagaacctgtcctggttctcacctcaggagctagaaccctccaggcactgcaggaagaggccatgtgggcccatcttctaggggagcaagcgagggctcttctgcagatctagtggctgtaagcatgactttattagagtttaggaggtcagaaat

SEQ ID NO: 84551 - DNA, 1212 bp, Homo sapiens
ttggaccgcttcctcacgcccttctccaccccgcgcgccagcctcccgcgcgcagcgtggggatctcggccaataaaggagaaagggcgcggcccgtacgcgcgccaggtgcgtgggcgagaccagctcacgcccctcctccagccgccaaggccccggcccacagctgcctggctgcagtcagaagcgtagcccgagacaaggaagggcgccttgactcgcacttttgtccggttcgaacgttctgctcagtggtgcgtggaatgcgagcgcgtcttaaaatcgatggcgcctaggagtccatgaaatacggtacaggcttccggcgacggatgccccgcccctcacccacgctccgccctccggggatgccccacccctcgtggcggtcccgcccgtccccgcgcaggcgcgctcgggctgccgctggctcttcgcacgcggccatggccgactccgagctgcagctggttgagcagcggatccgcagcttccccgacttccccaccccaggcgtggtattcaggtgcacgcacaggccgccctcgtggcgccccgacctgcgggcctacggatgggagcgcgtggcccgcgacctccgggcgggcggggcgggaaccctcgtctttcgcccccggggccctgccctccttcggccccggcgtcaccaggcctgtccttgggtccagggacatctcgcccgtcctgaaggaccccgcctccttccgcgccgccatcggcctcctggcgcgacacctgaaggcgacccacgggggccgcatcgactacatcgcaggcgagtgcccagtggccgcatctagggcgcttccgcctctgcgcgcgccgagggcagcacgtgggctctgcgcgtctgcttgggggagggcctttggggtgcttcagggggcgccgggacgggcgccgtgcttgggtcgcccgggaagggttgtgagattgagcccccgaggccgccgcgctgtgcaggcgtccttcccgcaggttccgggtccccagcccaggacaggcgtgaccgagttgccgggtcagttggtctccctggagtgcccaagctgaatccacagggcccagctgccttgcttcttgttccttctgcgagctggtattgagcgcctgccacgagccaggccttccctggtgaagatcacggaatgcccacccagggaagggaggcctggaggcctccgggagagc

SEQ ID NO: 84552 - DNA, 1008 bp, Homo sapiens
catctctccatctatctgtcttctctgtctctcttgtcagactctccatctctgtcttctctctgtctctctccatcgctcttcatctgtctctccgtcttctctttctctatctctcctgtctctccatctgtctctatctctccatctgtctttgtctccgtctgtctgtctgctctctctcctgtccgtctctctctctctctgtcatggcgtctgaaggacaagggtgaggacagtgagctgacccgcttgctcctgcttcatctgcccacatgtcccacggcgcctgcctctcctatgcagtctctctgccttcgtgggcagccctgtgaggcctcctgcctggggcacgttctgctgcttttcctctcagccccgctcctcccctcccagctccctggataaacccctccctcccaggacaagctggtcttttgggccacccaggggcgtgtttgctctgcactctcccatgaacctgcaggcgtgggaacgtttcttttccctcgtggctgttgaggtgtggttcactaactggaaacgcacacgtgtggctcagtgagtcttcacacgcatcacaggcccgcacctccagcagagtcgtgggtggggtattttttctttttgtgagagggaggggtggcgtggagggtgcactgcaggaactgaaggctccactgccatccagtttccagtgggatgtgtgtgtctgtggctgccgcgcgctcctcccagtccccaggaagtgcacagggaagcggcacctttgttcctggagagaattccgggttgtccaaggcacatgtctgaaccgcttcgctctctttgccgttcccttgccccttttctgtgaggccaccggagcccatggttttgctgctgctactgctgggataccctggggctgggcaggccccaagctgagcagggtgagcacaacgttttaccaaatctaaggaaccaagggcaagaacgaggtcagtgaaggagaggatcaggtgattt

SEQ ID NO: 84553 - DNA, 1347 bp, Homo sapiens
cccgcagacttgcctcctcatgcggcagcagcacgaggccgcggccctgaacgccgtgcagaggatggagtggcagctgaaggtgcaggaactggaccccgccgggcacaagtccctgtgcgtgaacgaggtgccctccttctacgtgcccatggtcgacgtcaacgacgactttgtattgttgccggcatgacaccgcgggacggccgcaggacgcaggcgagggccgcacggctgcccaggactgctgctgagccccaggggcggaggagggagcgccctgtccacccgggcggggagagaccccgagagagactgcacttggccacagcgcctccatcccttccagactggtccagacgtcggggaggtgaaacacgtctcttctctaccagctgccgcggcgggggcaaagcccccagagcctcactggccccggcgggatgaggagaccatgccgggcgcgcacacacggcagcttctgtttgaaaacggcgaccttcgggcccttttctccagcaactgcagaggcatttcaggagttggagaacggagtacatttttaaaattttttgttccattctgatcaactaaagaaaattaaggtgtccacctctcacaaacagtgacctgcaggtcggaggggcaggagccccatcccagccgtggttctgttgccgccgagctgcgacggcctcagactgggcttcagacctggtgcggagccaggcggagggacacagagccaggactcccagccgtattgaaatggagtcaaatccgcgtggtttgtatcttctttcctttaatcttgggcattttgtttctctttctgagaacgtaacttgaaacactacagagccaataatcatataaaaagtgtatccgtaaacgctgtacagttttatataccttcacaatgtacttttgctgccttctagataatttattttgcaacacattactgcacagttgtaaataacttatgtactgtaacatcactttcagttatgtgtaaagaaataaataaattaattaaaatgctctttgtacagtgcgtccctccaggagaggggctgtgtgtgggactgacacagtgtcgcccctctcgacgaccttcttactcccaggacagacgtggtggctcacgcctgtaatcccagcactgtgggaggccgaggcgggagtctgagaccagcctgcccaacatggcaaaatcccctctctactaaaaataccaaaaattagctgggtgtggtggcgcgcgcctgtagtcccagctactccggaggctgaggcaggagaatcgtttgaacccaggaggtggaggctgctgtgagctgagat

SEQ ID NO: 84554 - DNA, 1027 bp, Homo sapiens
tacaaaattagctgggcgtggtggctgcctgtaatcccagctactcaggaaggctgaagcaggagaatcgcttgaaccctggaggtggaggctgcggtgagccaggatcgcgccattgcactccagcctgggcaacaagcgaaactctgtctcttaaaaaaaaaaaaaaaagtctctcccaggagttggcagtgggctgagctctgactgtcccctgggggcagggctggggaccggctcacaggtggggcctgcgggcacccggtgcccaggagacaaaggcccagctgcctccacgcgcattttagggaggctgtttagggagatgggcagggtgcgcctgccatgccttgaacatgattcagtgtgtgcgcggtggaatgaggctccccctgtggttgtcccttgagaacggtcactgcagcatcgcccaggctggcatgccttcccgtagcggtctctggggctcctgatgaaactcccgtgtttggtttccacagggtgacgagaacaagtcagtgcgcgaccgtttcaacgcccgccagttcatctcctggctccaggacgtggatgacaagtatgaccgcatgaaggtcggtgttgcgcgtcccctcagttctgcctgggggaggctgctgcccagttctgtgatgggtggtgacaaccccctttgcgctgcctggggggaggccgctgcccagttctgtgatgggcggtgacaatttcagattctcttaatctggccgatgctttcggggaggtgaggtcctgtccctgcgtgtggcctcctcagtcttcccttctgtcccggtgtgcagggagcggctcctgtcgccagctcaacaggaccctaggcttgatggtcagaactcctgggactgccctgtgagccccctctaaggtcccagcattcaccctccactgctctggaagtgctggccagggcggtgggcaggggcgggggaggtgccgggaagggcagcacacccttatcccggtcgcgagggctgctcaccgggacaccctg

SEQ ID NO: 84555 - DNA, 1023 bp, Homo sapiens
tgtctgttgctgggactggaggaggcctccagggcaggctcctaggagtggggaggctgagtcgggacccccgtgaactccagactatatccttcgtgcagttccacagccccagctgaccccccacactcaccttttgcctgtagatcgcaccccctccctccctggcggagcccctgaaggagctgttcaggcagcaggaggccgtccggggaaagctgcgtctacagcacagcatcgagcgggtaagtgggctggcacaggcaggggggcgccacggccagggcttttcacggcgcaggccccaggggctgtcgtgttgacagtggggcctggagcgtggctgtgtcccagctcactctactcctctcctccttcaggagaagctgatcgtatcctgtgagcaggagattctgcgggttcactgccgggcggccaggaccatcgccaaccaggcagtgccattcagcgcctgcacgatgctgctggactccgaggtctacaacatgcccctggagagccaggtagggcccgtctgcatgccaggcccatgagtccaagtgcctgcaccctgcccgcctcccctccccttgatagattctgcactttgaccaggagcttcccgggtgctcagcaccttgcaggggctacagagtcctttgcatgcctctagccttgggcgagcctcagaaaggagccaagaaggctgcagcagacagcagacagctccccgcacgggcaaggccctcaggccactgggctgggcctcagcagctcagtccctccgtaacacttgtccatgcagttggagcacctgcccctacctacctctcacgggtgtcagcgctggcattattttctgtttaaactgctgggctccacctgctgctctcaggcaccccagggctgccacatcgagggctttcacagcacaggccccaggggctgtcatacggggacagcagggacactgggtggctaagggaacacgggcacccaggtgtgccgctcatctgggccagg

SEQ ID NO: 84556 - DNA, 1087 bp, Homo sapiens
ggacgacactgaggcctcccgtgccgccgccccagccgaaggccctcctggcggcatccagccggaagccgcagaaccaaaacccacggccgaagccccgaaggccccccgagtggaggagatccctcagcgcatgaccaggaaccgggcgcagatgctcgcgaaccagagcaagcagggcccgcccccctccgagaaggagtgcgcccccacccctgccccggtcaccagggccaaggcccgcggctccgaggacgacgacgcccaggcccagcatccgcgcaaacgccgctttcagcgctccacccagcagctgcagcagcagctgaacacgtccacgcagcagacgcgggaggtgatccagcagacgctggccgccatcgtggacgccatcaagctggatgccatcgagccctaccacagcgacagggccaacccctacttcgaatacctgcagatcaggaagaagatcgaggagaagcgcaagatcctgtgctgtatcacgccgcaggcgccccagtgctacgccgagtacgtcacctacacgggctcctacctcctggacggcaagccgctcagcaagctccacatccccgtggtgagtgcggggcccgggagagccactgccttctctctctgggatgcgtctggggcccctagtcacggcttcctccagcccgtcttgtcccactcatggcccttgacctctctcgaccttctgccacctgaggagacacagccccacttctgctgtggaggcaaaagccggaagctgcccagctgttctgcagacccgaggtccttcctccagctggtccgtgccaggcctcggtctcctgacctccccctcaccctgggtgcaccccggtcccactcgtgtggggctcccccttcacgccgctcactctcccctctccactccccgtccaccaggacggcctcacgagagccaccccctgtgtctcctgcccctgccccgcccccttctcccttggacccgcgtgggttccctgagcctccatacctgcacgatgagtcccttcccccacctcctcccttgggcttctgggacagcagagctgcagct

SEQ ID NO: 84557 - DNA, 8622 bp, Homo sapiens
tgattgccgcagattagccctgcaggttgtcagtccgtagggttaataagctagatatggatcgtgctaacgaggtgccacagtaaagagaatttaggggttctctgggccagcacctgcttccctaaactgcagccctcactacagggcagctccccacctggcttgtccccgcactgtagcacatcctcagggcgctgcctccagagacaggagggaagttctgaggattaaataacgtacgtcctgagtgtctgtttccaggctggacggcgctgcacgaggcctgtaaccggggctactacgacgtcgcgaagcagctgctggctgcaggtgcggaggtgaacaccaagggcctagatgacgacacgcctttgcacgacgctgccaacaacgggcactacaaggttggcatccccccgttcttcacacatccggcctgtcctggcatctgggtggttctgtagctttgtttccccgtagctagccggttccatgatgtggggcacaggaaagcgagttttcgccttgcccaccctcaaggccgagctgtgccctctgtctgcccccagctttccccttctgggtcagcctggacggcctctcacaggtttcccagcaagtgccatctatgaaaggctcgtatccgctagccgtgtaggtctggttggatttgagcaggtgaaggattacaccaagtggaaggaggcctgcaggagttgctgccggtccccgtcaccactgtgggactgttagacctgcaaggcagacccaccctcgtctggaatgaggtaacaccaagaggtgtggccagtgcacagaaccatagactcaagctttagaaagtggccattgtggccggcccaggagcagtgggcactgagaggtctcagcctctgtgggggtcgagagaggtcgtggtgtgcctgacagccccgtcctgccggaaagcaggggtgctgcctggagatgcggcgggtctcactgatgtcttcatcagagctccgtggagagcccctggttgcaggcaggacagcaaggctgaggggtcacacggggccacatctgctggtgcccgtcgtgctcctctgcagcaagcccagcctggccattgctggaggtcctggagcccacagtgccttggccttaaagagctcacttgagaaacggcttgttccggtggggtggggggtggattgaagactctgagacgagcagggaactcagaacactgagtccctatttgatgttaaaatatgaccgttaaacttctgggtaagataatgaatggcactatggtttatactgtttctgttttatgggctcttccagagacgtgaactggaaaaggctctgcagtgtctgggattcgctcagtgctgcaggggagggcaggtgtgaggggaatggccctggagggtgatggggctggggcatccgatgcagctttatagttctgtaattaccacttttaaactttttattacgaaaaatgtcaaggaccctggaattacggtgaggtaggcaggataatggcccccaagatgcccgtgttgtgacccccagaccttgtgagtgcctcacatggggagattgtcctaggtcatcttgcaggcccagggcagccccatgggcccttaaagcttgagagcctttcctgctgagtctgagagatgccagaagcaggagaggttagaacccgaggagggccgcacctgcgctgctggccttagaggagggccgaggagtgtggtggcccctaagcagctgggactggggacctccgtcccagccctgcaagaaactgaattctgccagcagcccccatgatggaggaaaggaaggatcctgccctgccagcaccttgacctctgacctccacaattgtaagcctgaggttttgtgtagtcaccatagaaaactcacacacataagaactctgtactgattcaacaatagaacatgtcacacacgaactggaaactgattctgtgggcgacaagagtctatagtaaacgttatgacagattctttgaatgcgctaatctcagactggactaaagttgggattaaatttaatttgtacttgagttcagtgcattgctgttctgggcataggaaatccaggttgctggtgatgaacagctgaaaagagctgtgtcaccatggttgtctctgtcagtcatgtgaccacccttacccttgtaaaatcaagcaagggagagattattttctaatgtaaatgaaaataaaaaataaagcagcttgcagaaacttggtctttgtttcctctattctgtccccccaaccctttccataacactcttctccctaacctcttgcctgagccctccacgaccactccggcaccactctgctgaggagctcactgttggcgggaggggagagccttcgtgagaagattcctgggaagtcgtctacttgcggcaacggagaaatggtggaaaaaaatccaaaggaggcagagcccttctgaaggagagcacaggaggggtgcgggagcccccgcggctgcagcccttcccacagaggagccacagcctcgcccaccacacccagagcctcgccaggcagtccctgggcgctcggctcccacaccctcagaccgtgaggggctgctctcgggtcgaaccccagggttctcggaaggggctgccgtgttatgcggaacggtagaggagttgtgcttctccagcagtccctgacgcgggtgttactgtcttgtaggtggtgaagctgctgctgcggtacggagggaacccgcagcagagcaacaggaaaggcgagacgccgctgaaagtggccaactcccccacgatggtgaacctcctgttaggcaaaggcacttacacttccagcgaggagagctcgacgggtaagtcacggccacctgagctgcctgttcttttatgcagggatggtaggagctgccctgtggtgtttgcacagtgttgcccctctgatcagctcctcctcggatgctgggggcttacaggagcttctggactgcgggagaccccgcccaggtgtgtcactgccgagaagcctgcagtcttcattctaagatgccagccctgtctgtcagctgagctctgtctggtttcctcctgcctgtggctggtttccatgagtcgagcaaagtgtctctgcagaggcagggtgggaaccttcccgcagacacatctgcagagcctccctcctctgccattctggggagagctgttttgagcctgcctgtgacctctcgcttcctacctccaacagagagctcagaagaggaagacgcaccatccttcgcaccttccagttcagtcgacggcaacaacacggactccgagttcgaaaaaggcctcaagcacaaggccaagaacccagagccacagaaggccacggcccccgtcaaggacgagtatgagtttgatgaggacgacgagcaggacagggttcctccggtggacgacaagcacctattgaaaaaggactacagaaaagaaacgaaatccaatagttttatctctatacccaaaatggaggttaaaagttacactaaaaataacacgattgcaccaaagaaagcgtcccatcgtatcctgtcagacacgtcggacgaggaggacgcgagtgtcaccgtggggacaggagagaagctgagactctcggcacatacgatattgcctggtagtaagacacgagagccttctaatgccaagcagcagaaggaaaaaaataaagtgaaaaagaagcgaaagaaagaaacaaaaggcagagaggttcgcttcggaaagcggagcgacaagttctgctcctcggagtcggagagcgagtcctcagagagtggggaggatgacagggactctctggggagctctggctgcctcaaggggtccccgctggtgctgaaggacccctccctgttcagctccctctctgcctcctccacctcgtctcacgggagctctgccgcccagaagcagaaccccagccacacagaccagcacaccaagcactggcggacagacaattggaaaaccatttcttccccggcttggtcagaggtcagttctttatcagactccacaaggacgagactgacaagcgagtctgactactcctctgagggctccagtgtggaatcgctgaagccagtgaggaagaggcaggagcacaggaagcgagcctccctgtcggagaagaagagccccttcctgtccagcgcggagggcgctgtccccaaactggacaaggaggggaaagttgtcaaaaaacataaaacaaaacacaaacacaaaaacaaggagaagggacagtgttccatcagccaagagctgaagttgaaaagttttacttacgaatatgaggactccaagcagaagtcagataaggctatactgttagagaatgatctttccactgaaaacaagctaaaagtgttaaagcacgatcgcgaccactttaaaaaagaagagaaacttagcaaaatgaaattagaagaaaaagaatggctctttaaagatgaaaaatcactgaagagaatcaaagacacaaacaaagacatcagcaggtctttccgagaagagaaagaccgttcgaataaagcagaaaaggagagatcgctgaaggaaaagtctccgaaagaagaaaaactgagactgtacaaagaggagagaaagaagaaatcaaaagaccggccctcaaaattagagaagaagaatgatttaaaagaggacaaaatttcaaaagagaaggagaagatttttaaagaagataaagaaaaactcaaaaaagaaaaggtttatagggaagattctgcttttgacgaatattgtaacaaaaatcagtttctggagaatgaagacaccaaatttagcctttctgacgatcagcgagatcggtggttttctgacttgtccgattcatcctttgatttcaaaggggaggacagctgggactcgccagtgacagactacagggacatgaagagcgactctgtggccaagctcatcttggagacggtgaaggaggacagcaaggagaggaggcgggacagccgggcccgggagaagcgagactacagagagcccttcttccgaaagaaggacagggactatttggataaaaactctgagaagaggaaagagcagaccgaaaagcataaaagtgtccctggctacctttcggaaaaggacaagaagaggagagagtccgcagaggccgggcgggacagaaaggacgccctggagagctgcaaggagcgcagggacggcagggccaagcccgaggaggcgcaccgggaggagctgaaggagtgtggctgcgagagtggcttcaaggacaagtccgacggcgactttgggaagggcctggagccgtgggaacggcaccacccagcacgagagaaggagaagaaggatggccccgataaggaaaggaaggagaagacaaaaccagaaagatacaaagagaaatccagtgacaaggacaaaagtgagaaatcaatcctggaaaaatgtcagaaggacaaagaatttgataaatgttttaaagagaaaaaagataccaaggaaaaacataaagacacacatggcaaagacaaagaaaggaaagcgtctctcgaccaagggaaagagaagaaggagaaggctttccctgggatcatctcagaagacttctctgaaaaaaaagatgacaagaaaggcaaagagaaaagctggtacatcgcagacatcttcacagatgagagtgaggacgacagagacagctgcatggggagcgggttcaagatgggagaggccagcgacttgccgaggacggacggcctccaggagaaggaggaaggacgggaggcctatgcctccgacagacacaggaagtcttctgacaagcagcaccctgagaggcagaaggacaaggagcccagagacaggagaaaggaccgaggggctgccgacgcggggagagacaaaaaagagaaagtctttgaaaagcacaaggagaagaaggataaagagtccacagaaaagtacaaggacaggaaggacagagcctcagtggactccacgcaagataagaaaaataaacagaagctccccgagaaggctgaaaagaagcacgctgccgaagacaaggctaaaagcaaacacaaagagaagtcggacaaagaacattccaaggagaggaagtcctcgagaagtgccgacgcggaaaaaagcctgcttgaaaagttggaagaagaggctctccatgagtacagagaagactccaacgataaaatcagcgaggtctcctctgacagcttcacggaccgagggcaggagccggggctgactgccttcctggaggtctctttcacggagccacctggagacgacaagccgagggagagcgcctgcctccctgagaagctgaaagagaaggagaggcacagacactcctcatcttcatccaagaagagccacgaccgagagcgagccaagaaagagaaggccgagaagaaagagaagggcgaagattacaaggagggcggtagcaggaaggactccggccagtacgaaaaggacttcctggaggcggatgcttacggagtttcttacaacatgaaagctgacatagaagatgagctagataaaaccattgaattgttttctaccgaaaagaaagataaaaatgattccgagagagaaccttccaagaaaatagaaaaggaactaaagccttatggatctagtgccatcaacatcctaaaagagaagaagaagagagagaaacacagggagaaatggagagacgagaaggagaggcaccgggacaggcatgcggatgggctgctgcggcatcacagggacgagctcctgcggcatcacagggacgagcagaagcccgccaccagggacaaggacagcccgccccgcgtgctcaaagacaagtccagggacgagggcccgaggctcggcgatgccaaactgaaggagaaattcaaggacggtgcagagaaagaaaagggcgacccagtgaagatgagcaacgggaatgataaggtagcgccatccaaagacccaggcaagaaagacgccaggcccagggagaagctcctgggggacggcgacctgatgatgaccagcttcgagaggatgctgtcccagaaggacctggagatcgaggagcgccacaagcggcacaaggagaggatgaagcaaatggagaagctgaggcaccggtccggagaccccaagctcaaggagaaggcgaagccggcagacgacgggcggaagaagggtctggacattcctgctaagaaaccgccggggctggaccctccatttaaagacaaaaagctcaaagagtcgactcctattccacctgccgcggaaaataagctacacccagcatcaggtgcagactccaaagactggctggcaggccctcacatgaaagaggtcctgcctgcgtcccccaggcctgaccagagccggcccactggcgtgcccacccctacgtcggtgctatcctgccccagctacgaggaggtgatgcacacgcccaggaccccgtcctgcagcgccgatgactacgcggacctcgtgttcgactgcgccgactcgcagcactccacgcccgtgcccaccgctcccaccagcgcctgctccccctcctttttcgacaggttctccgtggcttcaagtgggctttcggaaaacgccagccaggctcctgccaggcctctctccacaaacctttaccgctcggtctctgtcgacattaggaggacccccgaggaagaattcagcgtcggagacaagctcttcaggcagcagagcgttcctgctgcctccagctacgactctcccatgccaccctcgatggaagacagggcgcccctgcccccggttcccgcggagaagtttgcctgcttgtcgccagggtactactccccagactatggcctcccgtcgcccaaagtcgacgctttgcactgcccaccggctgccgttgtcactgtcaccccgtctccagagggcgtcttctcaagtttacaagcaaaaccttccccttcccccagagccgagctgctggttccttccctcgaaggggcccttcccccggacctggacacctccgaggaccagcaggcgacggccgccatcatccccccggagcccagctacctggagccgctggacgagggtcccttcagcgccgtcatcaccgaggagcccgttgagtgggcccacccctccgagcaggcgcttgcctctagcctgatcgggggcacctctgaaaaccctgtgagctggcctgtgggctcggacctcctgctgaagtctccacagagattccccgagtccccaaagcgtttctgccccgcggaccccctccactctgccgccccagggcccttcagcgcctcggaggcgccgtaccccgcccctcccgcctctcctgccccgtacgctctgcccgtcgctgagccggggctggaggacgtcaaggacggagtggacgccgtccccgccgccatctccacctcagaggcggctccctacgcccctccctccgggctggagtccttcttcagcaactgcaagtcacttccggaagccccgc

SEQ ID NO: 84558 - DNA, 2142 bp, Homo sapiens
gaggcttcttgggagtgctgaatggaagggaagggaggtgcctcagaggagagcttcagaggcccacgtcttcctggtggcccttcttccccgagtcaggccttggcagagccttgcctctgcgctgcacctctgcagtttcaccccatgacctagaaaaccccagaacccgcagggcagctggaggaggattcagaggtgtctggcccctgatttccatccacaggagggcactggtcaggcagaggaggaggcatcttctgtgcccccgactcttggtgcttggggtcttctcttccccgcccctgcctcctgcctcttttaaaagacacagcacgtgagttgcgttagacgccagccgagtgttctgtaacgggtcagatgagtgcagggtgtgcttgttacgaggaggctgaggtggaaacagccgagctctcacaccgtgtcttgttagtgctctgtgttgatgccttcagatgcctccagcccagtccctgttgtggtgctgcaaggctggtacgctcctcgaagcaccatggcatgagatggaggttcctagaagcaagaagaaaggtacagtactgaccagttggccttgatttactgatgtgttttaaactgtgtctgccattttatatctgcactgtttggaggagggacggggaaggtggaattgaattacagacacgtgtattgaacagagacctgtcctgtgtgagccaggtcaccggtgctaagctgtcccaccgcattcatgtgtggtacgaggtctggggaggcccaggagaggtgcctggagtgagtggatgctcggtggaggcccaggcttagcagacttgaggggctggtaacgaggtgtttaaatggtctcacagtcactgctgagaggtgaggtgggcggcaccaatgctcccagcaccgctgtgctttccccatacacagaccttcctttctgctctgtcagctgtcaggtggacgcagggggctccgtaacattaggtaaggacctagctttggaggacaccatggcatgaaatctctcctccctctctccctcgcccgcctcacagagaagcagggccctgagcggaagaggattaagaaggagcctgtcacccggaaggccgggctgctgtttggcatggggctgtctggaatccgagccggctaccccctctccgagcgccagcaggtggcccttctcatgcagatgacggccgaggagtctgccaacagcccaggtgagcccggcctgtgggtggtccctggcgcagggaaggggctctgcctggtcgcagcctcatggctgtgctgaggacaagccctgtgcaaagggacctcgtgatggtggcctgggctcttgaagattggacaaagcaggaccaccccacagtaatgcccatctgtcccctccttggcctgcagtggacacaacaccaaagcacccctcccagtctacagtgtgtcagaagggaacgcccaactctgcctcaaaaaccaaagataaagtgaacaagagaaacgagcgtggagagacccgcctgcaccgagccgccatccgcggggacgcccggcgcatcaaagagctcatcagcgagggggcagacgtcaacgtcaaggacttcgcaggtgggcaccctgtgcctggcaagggccagagagccccactggagccctgagcctcccccagtggagtcctgagcctccccccattggagccctgagcctccccccattggagccctgagcctccccccattggagccctgagcctcccccgctggagccctgagcctcaccccattggagccctgagcctccccccattggagccctgagcctcccccaattggagccctgagcctcccccgctggagccctgagcctccccccattggagccctgagcctcccccgctggagccctgagcctccccccattggagccctgagcctcccccggctggagccctgagcctacccccattggagccctgagcctaccccccgctggagccctgagcctcccccattggagccgtgagcctcccatcgggttggatgggctgtggcctcgtggggtgcgcgtctgctctgcagggctcggggtgttcacagccacactcactccagtggggttccc

SEQ ID NO: 84559 - DNA, 1050 bp, Homo sapiens
tgcgtgtctgcggagtgggaggtaagtggcgcatgtctgcggagtgggaggtggcgcgtgtctgcggagtgggaggtggcgcgtgtctgcggagtgggaggtaggtggcgcgtgtctgcggagtgggaggtggcgcgtgtctgcggagtgggaggtggcgcgtgtctgcggagtgggaggtagcgcgtgtctgcggagtgagaggtagcgcgtgtgtgtctcctctgctttctccacacacaccagcgatttcctgagcgtccctccggtgcgcaggatgagaaatgggccagagtcagggctgagccacagcccgaccccgggcttctgggtgaaggttctgcggtcggtgaccagcctcacacagccacgccctggggtgcagggagggtgttcattgcccaaataagagatgcgcttctcctggcatatgaaacaaaatcttgagagcttgagaatgtaatttggacatcacgactgaaagcatccctttcttttctaggataaagataaagtttctctaaccaagaccccaaaactggagcgtggcgatggcgggaaggaggtgagggagcgagccagcaagcggaagctgcccttcaccgcgggcgccaatggggagcagaaggactcggacacaggtaccagcccgcggcccctcctgcagtcagccctccacaggcagcccggagcagcccaggcagggcgtccctggcccccgcacctccggctttgcactgggacgcactctagcaccctgcacgccgtccaggcaagaggcagcaggggcggagcacaggcccccacatgccacctcctttgcacccgaggctcaggcccatggggccgattggagagcttcactcttgggtcccacacacgtggagatgcacccggtgcatgtccagccctgggcgaggtatggggctgctcacctgtgggtcttctgacagctggacacgggagggagacagtggttcccctcagggccacaaaggcacaggaagaaactccattgcttgtagtaaaaaccaaagggagccctaaaag

SEQ ID NO: 84560 - DNA, 1097 bp, Homo sapiens
gtggtgagtggggcgtgaggctggggctgtggacatgacctgccagacctgagggctggggtactgcgctgcgtgttgtgaccttgcctgtaatgcggggaagggactgccttgtggtgcctgaccgttttgggtgtagcctgtaccaggtgggacccaggatccaggtgctgctgactgccacccagaacacagccacaccctaggccatgcgtccctttctgccactacaaagtgcttgacccttctctgttctccttcctgctcaaagctgccattcctgttgctggtgacccctttatgggaggcgtatcctgagaagtcccttcctgggcctggcccgggccccagccctgatcagagcagctgcctgccttgactagttactgagtctgttgagtgcggtgtgagagtggatgagttttgagctgcctctgaattcagtgaattgtgtgtcttctcttttgaagcagacggttgatgatgaagcgccggccgtgtaaatgaagatcgggtgaggagcaggacgatgcccaagggtgggtgccctaaagcaccacagcaggaagagcttcccctcagcagcgacatggtggagaagcagactgggaaaaaggtaatgctgccccctcccagccctgcatgctcaccgcacccagatggggatgaggtgggaatggggtgctgcccgcctgtggcctgttctccgccctccggccctttcctcgtgcctctgtctgcagccaggagtggagagggtggtgaggagtgatctttcccaaagtggccttgctttttttgtatttgttatttggggaccgaagtcaagcgttaaataatagctttatgtacagaagttggcctgagcctcaatgtggctgcacgtttctacccccagaagtccaggatttctgtcctggctcctgttaggcctgtcaggcattcagatatcctgactgcaagcaatgctgggccacgttacttccaactgtggtttattctaaatgtgaataggaaaatgggatgccaatcaaaaccactgcattttattaatgtgcggttaacgctgattcctggtgtgcagacttcctgccttg

SEQ ID NO: 84561 - DNA, 1053 bp, Homo sapiens
gtacctgtgttgtgctttgaggcccagacgccaagatctagaagggccctgagagaagggaccaagtgcccatggtggtgtgaggtggagggtgggaagcagagctgtgggcggtggaggtgcagcactcccgccgtgggccgtggccgctgtgggcagtggaggtgcagcactcccgccgtgggctgtggccgctgtgggtggaggtgcagcactcctgccatgggccgtggctgctgttcgtggaggaggtgcagcactcccgccgtgggccgtggccgctgtgggtggaggtgcagcactcctgccgtgggccgtggccgctgtgggtggaggtgcagcactcccgccgtgggccgtggctgctgtgggctggtccatccgtgccagactctgccatctcttggccactttttgtttgtgcacgtttgtgcagagagagttaacccaaggaccttattttgcttttgtaggtatatcattatgcagatgaataggtgtgtgaggggattaaagccacgtttgcatacgtggcattgctcccagtgttaacggtgggatttatgggctggatggggtgggagaggaggcagtgggtggtcctttaatctggaattttttttatgccattatcctctatttacagctttcagaaatcagctggtgtcactgcacatatgtttagagccgttgctaaggtgacgagcccagcagcccacacaggccttctggaaccttctggaaggctgggaagctgcttggtggggtctgttcacgttggggccttatccctccaacctgtgagaatctgcagattgccctgttacaacttaaattgtctgcttccttttggtttgattgcctgattaataatttaaaacgaaaaatcctgtggtgtatttaatgcagagagaaatggacccacagcattgtttccaaaccgggtctgcttgccatgatggcagcagaagtccagtcttctccgcggatctcacccatctcattcaccttagaaacagagctgtgggtttcaggcttttcgcagtggaaacc

SEQ ID NO: 84562 - DNA, 1556 bp, Homo sapiens
tgcatgagggtgccctcatttctggccctctttcttcctgggcccctcagcctggagtgtcctcccggacgcttgcattgtgggcttatccctcagacgctgaggcagcgttcagacaaggaggagcctttatttgtgggtcattttggcagatgggattattttatcctcaagagggtaaaatctgtgtcactcgcttcagacagatggatattttctaggagtgtgtggacagcagtggcccgtgttggccctgacggggtctggagttgctggtcctgcctggaggcctggccaggcattcatagcaaggaggtgtctttggatggttgcagctcctgtctctttgtttgccatgtggaaataataccatctgttagctgaggctcgttagaggctccaaataaaataacgtatgaaagtaaagcaccgtgcagatgtaatttgaaatggatcgttaagccctagtgatgacttaggggctgggaatctgtcctgagccagggttgcccgtgtgtgctcctcccagagcacagactccagggtttgttcccagcctatagatgaggagattgaggcccgggaagtcctgcaccaaaagcttccgctgggagcaggaggggcggggccgggcttgaggagtggctggccgcctgcaccgatatttatgtctgtgatgtgcccctgggttcagtcggtcagagctggccgtgagtgtgggtgggtggatttcccacacccaaaacagcccgtgatccgtagtttccaacgtgccttcgttttccctactctgttggtccatgggagtgaggagcggagccttaccgcctgcgaagcataaactgtgtcagacatgggcgacgcggggaccgctggagggaggcgcgccctgacgcaggctgcactggtgactgctcagttggagacccttccttgaaaacatgagctgtgactcatctgtaataaacctgttagtcgtggtctgtgaaggtaattggtggtttatggatgtgactgaccaagttccggccagttgctgccttgtgttttctgactggggtgaggttctgaacgaggtgaattctggcaactccaagaggaggcactgtgtttcgcgtgcaccctcacatgcctccagcccacctcgagctctgtctcatttgctcgctcactcactcacacatacattatgtgttaggaatacctgtgtaccctggcttttaagagattacacataaaaacacaaatctgagctgatttttactttgaaataatttgccacaaattcagtttaagcaattaaagtgttggagcttataactaaatgtcaatttttctgtttttgggaacacaggtattgctttttaaaaaatgcgctcaggcccagtgcggtggctcacacctgtaatcccagcacttcgggaggccgagctgggtggatcactcttgaggtcaggagttcgagaccagcctggccaacatggtgaaaccccgtctccactaaaaatacaaaaacatgagccaggcgtggtggcacacacctgtaatcccagcta

SEQ ID NO: 84563 - DNA, 1831 bp, Homo sapiens
caggggacactcgggtttgctgttgggaaccatgctgtgtgaactgtgaacgtcgaagtacaactgtcttttgggggccctgctttcagttcttttgtatatctacccagaaggggaactgctggatcatatgcttagtccttttgtaatttgttgaggaatcgtcacactgtttttttttggcagttgcaccattatatgttcccaccagcaatgcacgaggattcctgtttctccacaagctcacctgccccctggttccctgtgaggtgctggagactggcagcaagtgtcctgtccccgggacacgtggtgagcacagtccctgactgcccttccttcatggtgtgacttttatcagcagatttgacagatgagaggtgaatcctgggtgtgttgaagctgactcaccccgcccccaaccccactcatcttcgaaggtgtgttgtagctctggccgagcctacctctgagcagtgcccctagatggctccaccttccttacactgtccctcctacagactcatcctcatccccaccactgccctttggctattctgtggtagatttttagaataaaagatgtcaagcctggctgttgaaccattagcattgggacatgccctgctgacaaggcagccaccaacccctccaagatggtcacaggtcacttgggagctggcccttcccagcagcaggatgcctgggactccgggagattacagccacagggcctgggagaagcctcaggcttttgttgtttattatgtgcattatccttttggggtccccaaaattgtaccattacgttctttttttttcttttttctttttttttttttttgagacggagtcttgctgtgtcgcccaggctagagtgcagtggtgcgatcttggctcactgcaagctcggcctcccgggttcataccattctcctgcctcagcctcccaagtagctgggactacaggcacccaccaccacgcctggctaattttttttttttttttgtatttttagtagagatggggttttactgtgttagccaggatggtctcgatctcctgacctcgtgatccgcccgcctcggcctcccaaagagctgggattataggcgtgagccaccgcgcctggccctgttacattctttatagagctgacattggaacaagcagtgtctgcttgaaagcactgttctgaatgtgtccagctgctccatctggcttccggagctggtgtcatcatctaggcagggttggctgatggatcacatccttctcacctcagcggatggcttgccaccgagaactgtgcgtgtctctggaattctccactttactcccttgacaaagatgtctcctttggacgtcctgaaagtctgtaatcagtttttaaaaacccacaatagttcattgtttgtaacctataaatgttataaacaaagatgatcagaaacgtgagaattaaaaaatacttgtgttttgttagtgaaaagcactagttcatagtaactaaggttttccagattctttcttgtatttgttttgagacaagtctcactccagtgcccaggctggagtgcaggggcgctatctgggctcactgtcgcctcagcccccagggcggggctcatgtgatcctcccacctcagcctcccaactcatttctggtggtcttgggcgagtcacttagcgttcctgagccctggtctcccgagctgtgctggggggagcaccctgttcctgtggtgtttatctcatcggtcactctgcctttccattgggctgcgcacaggagagccacagacccttgccgtgaaccgccgtggcagg

SEQ ID NO: 84564 - DNA, 1050 bp, Homo sapiens
ccttccattgagtgtgtgtgtgtgtgtgttttaaatcagcgtgtcacttggtcggctgggcaggaatgcagtggcatggcacaatgatagctcaccacaccctccaactcccgggctcaagctgtcctcctgctcaggctcctgagttgctgggactgcaggcatgtatgccatcatacctgggtaattttttttttcttttttgtagagacagggttttgccacgatggccaggctggtctcgaactttttgcctcagtcagtcctccttgccgcagcctcctgaagtgctgtgctccaggcatgagtcaccgcatagggctagcactccacttcctgactggaacctgcaggcccgtgttcttccagtctaccacagagagtgtgtttgtttcacaggggcctgggccacatacacgggaagcagcgtgtggtgcttggtggacataaagtgagtgaggcttggcacacagagtgcgtttgaatttgacagaatgcaaagaaagttttggtggtttctcctagattctggactcagaattgtgaactatgtaaggttttttttcccccttgagagatttcaaaactttgcaagactgaatcttttttttttttaattttattattattatacttttagggtacatgtgcacaacgtgcaggtttgttacatatgtatacatgtgccatgttggtgtgctgcacccattaactcgtcatttagcattaggtatatctcctaatgcagactgaatcttactccttggctggcatttaagcataaataacaaattcgcatgcaccgtcaaatacagggtgaatttagagactgcttcagaaggcagagtataggaaaaaattttaaatgaaaacttacctatttctgatcagaattcttttatctggaaacatcgtatattttttttaacagggataggcgtgttcccagctgtttgaaatgcttgtgccctggtgccgtaaagaaatagcacttgaacgtaaatttaatttcctcagcaaggccattttttataccttctgcagaaaggg

SEQ ID NO: 84565 - DNA, 1088 bp, Homo sapiens
tcaacacagtgcatgccacgggctctgggaggcggctgccacggcgatgggtcctgaggtcacaaacagcggctgccagcctggggaaacactggagtgtgtcccatgtaggagtggaagctttcgtcctgtgaagcttttattttccaggggtgtgtgtgtgtgtgtgtgtgtgtgtgtgtgtgtgtgtgtgtactgcatcacgatgtacaacatgaatatattccttgttagcccagtgacttctgcacaccagactgaggtgtaaataagtgaccagatgtggcaaattctccccttagcactgtggggaataagttgatggtgtgtgtggctggaggtggagataattaagttgttatgatgatgtaggtaaagaaatactgagacactcttgaactagaagtcagagcggttgcagtagggaggagtgacagtgatgggggggagctggaaatggacaggatttataagtgggcttttgatagggaggaggaggcagctggtttctgccttggagggttagacagtggtgccctgcagcaaggcaggggatacaggaaggagtggggtgagggctctgtatgtgcacagcctgtgtgaggagagccgagtaaggtgggaacattgtctctgattgacagtgtctctagttggacattgttgcagtgggttcagtgggttcaactctgattggcagagctgggattcagcagcacgtcgttaaagccagaggcaggtgagagtgcccctgcagtggctgaagacaacattgagggaggaggtggaggaaggagatgtagcaagtgaaacaaaatggaaacaaagttcacaagagaaaccgggaatggtggggtggaagcctgggaagagagtggtttgtaggttcagtgctactgcgagaccatgctagatgagtgccagttatgttccatgtttctcacaagaaacacagaggtggcatctgttaagggctgtcgtgggggttgaatgaggcgatgcgtggagagcacagagtgggtgtgcctgggtgtgtgatcatcatggtgtggccagtggtggtgatgggaggggcagccactcaccag

SEQ ID NO: 84566 - DNA, 1040 bp, Homo sapiens
tttagctagacagcgctgattgatgcatttgtacagagtgctgattggtgcatttacagacctttagctagacagaagagttttccaagtccccacccgacccagaagcccagctggcttcacctctcatgaagagctggtggctgtgggtgtatcagttggtcttgggctcccagcagttgagtgttcacacctgggcctgcgccctgcttcacctagccatccgcatggacacttcagtttgtcgtgggttttcttgtgccttggtgcagtctcaccagttagagcataacttcctcagggcaaggctgccccagacagccagtgtcctcgccgcgtctccatccagtgctttcctgtctttgttattagatgctcatcaaacatgaggccactacaaactagaagaccttggctagagtcctgagaccttgtgtgtgtggtgtggctgtgtgagtctctgcccatcccacacgccactctttaataagagcagattttggacctcaggagacatctgttgtggaatttataggcatggattgtcgggccagctttccttctgctgattagctgctgaccagccgcatgcttctgcagccttactgtgacaggtggggctcaggtggcctgggcaggggtgaggcacaggactgcgcggtgctgctcctcctggctgcagcgacttcgctggattctctcatttttatggctttctttctcagactaggtctttccgacttgcgtggagaagaagagtatgagaattctcaagttagagaagaattgctttatggtcattatttcgacaactgtatgactgggagtttgggtgaggaagggctagatcagtgatttttttttaaattagatttacttggaaaacattaaaaaaattgcagttcacccccagacacacagaatccatagtgtcttgaggaggtgagtgtgtgtagggtgcaccatgggtgagtggcatcttggaggcactggggtgctgctgccgtatggcccttctcttggtcctgtttgcatttggg

SEQ ID NO: 84567 - DNA, 2500 bp, Homo sapiens
caggggctatggtaatcgtctctgttgttcgaatttttagtacatgtgctggccaaagcaagcatgccatgcttgccttgactgtgaacaagttcgatttgaaatacttcacatttgaggccgggtgaggtggctcacacctgtaatcccagcactttggaggccagggcgggcagatcacttgaggtcagggtgaaaccctgtctctactgaaaatataaaaattagctgggcgtggtgatgcatgcctgtaatccgagctacacgggggctgaggcaggagaattgcttgggcctgggaggcagaggtcgcagtgagccaagattgcaccattgcactccagtctggatgacagagcgagattctgtttcaaaaaaataagaagaaaaaaatgaaatacttcacatttgaaaaacttcctggctagaggaaaaatccttgcttatgtctaatgaaagaggcagaggctgggtgctgtggtgaggtgttgagtgacagtgtcagggcccgtgggaggtggtggccggcttgtgctgtaaggggcaggagcgccggaggctcaccaggccgtgatggggttggagtgagaatagggcacacaccttcctgccaccggggagcagggtaaacagcagaaccttgctgtgcgtgtctgggttccagcaacattcctggtgggtggtggggaggaaaggactaaccgtgtcagcacctggcctttgtgggacacaggcctcctccctggagcttcagctttatctggaaatgagtctttgatgcgtaaaaccgttcctgaatgatactgtccagctggtggaaacaggtttgttttgacctaaaatctaggggtattgagagagagagaaacagagacaaacagcgtgtgggggaagctgtgcataaaggggcgtttgtgggattgtcttttactcaggatccagcttgagccaaaatggaggaagagtcttggtctctacaaaacaggtggttttctgagacagattcaaaagcattttctagagaagctctactgcatccctccatcacattcaaaacattgtttctaattatgttttgagagtgtagagttagattgtagaatactgaaattaaatccttagtgaggaaagcgtagacatgacctggcatgttctccaaagcactggcaccagtgggcgtgcgttgtcagctggggtgtcctccctctgctgagcctcctccccctgcggccttcgccttggccctcggtgcactgcatcggtgtgccaactgctcactgtgcacagacctttttcatactgatgaattcatgtttattactttttaaaaagtttatttcttggatcttagtcacagctaaccctgattttgctttcagtacaaggatttttaatttctagaccggatttgagttgtttgaacggaggtctggtggctttgggaaaggtctttgcatggatgatgggggaaggtgcctttttggtgagtgccatagtcggctgccaccttgccatccagagagattcctgcttgtggacactgttcagttatgcagggtatgtttaattttttaagagtcaggtttgcgttttttttttttttttttttttttttgtaggcggagtctcgctctgttgcccaggctggagtgcagtggcacgatcttggctcactgcatagtccgcctcctgggttcatgccattctcctgcctcagcctcccgagtagctgggactgcaggtgcccaccaccacacccagctaattttttgtatttttagtagaggtggggttttaccatgttagccaggatggtctccatctgctgacctcgtgatccgcccgccttggcctcccaaagtgctgggattacaggcgtgagccaccgcgcccggccaggtttgcgtattttttaataattctttttctgaagtttttttcctgactgcttttgttgctgggtgatggaatatattctgacattggatgtgcaagatcttaaaaaagtctgtgtaatagagtctgtgtaagagagcctgtgttgagaagttctgtagtctcttcagaatgaaaattcatttaaatattttaggacttcactccagagggttttagcgcatgcatagcgaggaaacttttttttttttgagacggagtctcactttgtggcccaggctggagtgcagtggctcgatcctggctcactgcgatctctgcctctcaggttcacgccattttcctgcctcagcctcccgagtagctgggactacaggcgcccaccaccacgcccggctaatttttgtatttttagtagagacagggtttcacggtgttagccaggatggtctcgatctcctgacctcatgatctgcccgcctcggcctcccaaagtgctgggattacaggcgtgagccactgtgtctggccgcaaggaaacttattttttataaaccacgatgcgctctctctttccgttttgactgtgacacacaccagccac

SEQ ID NO: 84568 - DNA, 1018 bp, Homo sapiens
cgggcagaggttgcagtctcggcactttgggaggccaaggcaggcggctgggaggtggaggttgtagcgagccgagatcatgccactgcactccagcctgggcaccattgagcactgagtgaacgagactccgtctgcaatcccggcacctcgggaggccgaggctggcggatcacttgcggttaggggctggagaccggcctggccaacacagcgaaaccccgtctccaccaaaaccagtcaggcgtggcggcgtgagcctgcaatcgcaggcactcggcaggctgagtcaggagaatcaggcaggggggttgcagtgagccgagatggcagcagtacagtccagcttcgactcagcatgagagggagaccgtggaaagagagggagagggagaccatggggagagggagagggagagagggagagggagagggggagagggagagggggagggagagggagcgtgacgctttttttaaatgaagctcgtgacagacggaagtataccagtgattaagaagatgctgggatgggctttttcaatagatgctctgcaggtttccaaaatgagtgccagaggaggggagagggcagtgtcagagtcttctgaacattctgagagctgagctgctgtgagacaggcttaaatgagaaccctagttttcaaaacttaatgttttaatgggaatgaccatagttattagtgttaaaagatacatttcttcttatttatttagaagatgaagttcagagaatttaggtagcctaaataagatggcatagttagtaattctatgagcttttccttgtttagtaaatcggtattaaaatggaattattaagtggggtgtggtggctcacgcctgtagtctcagcactttcggaggccgagggaagcagataacgtgagcacaggcgtttgagaccagcctgggcaaatgaagataccctgtttctacaaaaaatacaaaagttagccaggcgtggtggcaggtgcctgtggtcccagctcctcag

SEQ ID NO: 84569 - DNA, 1007 bp, Homo sapiens
acacacagaagcgactttttcctttgtctcatggtggaatgctggaggagcaagtgttcccacctgctgagcagctgaaagcaggctttccgcggatgtgtgcgggcgggcggtgtggcacagaaaggcctcgatggactgtctgctcttcacggcaagagtgtgctgcccctgttctctgtcgtggcctctgctgtaaagatgagagaagtccaacgccagtctaattcatgattcttttttagttaagctttttaggattttgtggaaacttgtaggattttctgttgatatgtgggagtctgacattttgctatttttagggtttagattgtgacttttttatattggttagcatcttgaagctcttttaatatgcagacttgtctttttaactccatctcagtttttctgtcaagggccagttagaccttgtggccgcatgttctctgacagctcttcagctctgctgttgtatcatggaaggaaccggggccacacttaaaacgagcctggctgttttccagttacaactattactaacactgaaattagaatttcatataattttcacttaccacaaaatgttattttctttttcaaccaggtataaatataaacctcattcttagcctgtggactgtctaaaaaagacattgggccagattcggcccctgacccccaggtggtttccccatcatagtaatcatagtagatgaacttggaactgtgtagctttattggtttttcatccttgaagcttgcttttcctctgcagtggtcctgactttctgtagagtttgatctctgcggcttcttccttctgtagagtttggtctctgttttctctaaacttaagttatttgtctgatttcatttactttctgttaatttaggtgcttaattctggtcaactattgacatgtcattcttctgttttccagtgctgttacagatttattcttttctttttttctttttcttttcttttcttttttttttttttt

SEQ ID NO: 84570 - DNA, 1992 bp, Homo sapiens
ctgtcgcccaggctggagtgcagtggcatcatctcagctcactgcaacctctgcctcctgagttcaagcaactctccttcctcatcctcccaagtagctgggattacaggtgtccgccaccacgcccggataatttttgtatttttagtagagaggaggtttcatcatgtgggccaagctggtcctgacctcaggtgatctgcccacctctacctcccagagtgctgggattataggcgtgaggcaccacacctggtcatgaaatcatatcttaagtgtctccatggtggcctaatttgttacctgaagctttttctcagagcagcctctagcaaagagaatcacttcctgtggactccttcagggctgcagggtaacttgatgagttcttgccgtctcgtgaattcctgagtggtgagagcaccactccacacaggacttcggggcagcaggcttttaggttttgcacacagttcctcgaaagctgtgatttggaaatcgctagaatttccagatagtaactagtttggagggtcaatagtgctttagttttatttatttatttttttttacttttaaaacagaggtggggtctcactctgctgtcaggctgatctccagcttctgagctcaaatgatcctcctgccttggcctcccagagtgctgggattacaggagtgagccactgcgcccagcctcagtcatgcttttaaattgaggatgtaggaaggaaggctttggctcccatgctttcatgagatttccttttttttctgagacagagtctcgctctgtcgcccaggctggagtgcagtggcatgatctcagctcactgcaagctccgcctcccaggttcacaccactctcctgcctcagcctcccgagtaactgggactacaaatgtccgccaccgtgcccagctaatttttttttgtattttttagtagagacggggtttcaccgtgttagccaggatagtcttgatctcctgaccttgtgatccacccgcctggtactaccaaagtgctgggattacaggcatgagccaccgcgcccggccacgcccggctaattttttgtatttttagtagagactgggtttcgccatgttagccaggatggtctcgatctcctgaccttgtgatctacctgcctttgcctcccaaagtgctgggattagaggcgtgagccatcgcacctggctgctttcatgagatttcttagagactaatactttagtatttaccctcctttctcagtctatggtgttaaccagtattccctacctacgtttagtctgtacacaaaacacccatggctgcctctcctcagactgacctgcgttgacctggacctggataagctcctcactgtcatctgaggggtgtgtttccccttgtgtgcctgtcctaatagtgcatcccatttcagcgctttttctacagggcaggatttgtagaaagggtttgaatcttagtgataagctatgaccatgagtaagttacttcatttttcctcgcttttggttttcttgtaagaattgggattataggccggtgacattataggcatggtgactcacgcctgtaatcccagcgctttgggaggccggggcaggcagatcacaagttcaggacacggagaccatcctggctaacacggtgaaaccccgtctctactaaaaatacaaaaaaattagccgggcgtggtggcgggcgcctgtagtcccagctactcgagaggctgaggtaggagagtggcgtgaacccgggaagtggaggttgcaatgagccgagatcgcaccactgcgctccagcctgagcgacagagtgagctccgtcaaaaacaaaagaaaaggaaaaagtacaactgactttgtttttctgaaacggagcctcactctgtctccgggcgcgatcttggctccctgcaactgccgctcccgggttcacgccattctcctgcctcagcctcccgagtagctgggacta

SEQ ID NO: 84571 - DNA, 2981 bp, Homo sapiens
taaatgctgtgggctttgttctccagtggagtggtcattgccttttttcctacctgtgagttagtccatctctccaacccactgacgacccaagagctccccagcctttctctgcccgtcacagtcaagagggtctgttggaaaattactgactgaacaacagatgccagagattgccctgaattgtggaagtcccggctgccacccccttacttgaggtcctcatctcactgcaccagcaggggtgaggagagggcaggggtggccctgcacaaagctggggaagaaaggaggcagctcccggccaggcagggcccagctttccttctagatcatcagcacaaatttgcgtttgaagatttaacttacattttatttttttatttggatgatacatgtgtaagttttgggatgttatgcagtgttctgaggattgacgttggtggcatatgtaaccttgaaggcagcattttgttaattataaaaaacttggaatatagtgattgagtatgaaataattgaagctgtgagttcagttatgaagaacttggtctcggagtctctctgagcttgggaggctgccttggtctcagtggggttggcatcatgtgtgttggtggtaggttggaaagagcatttggagttctgaagagtgacctgtgctgcctttctggcaaccagtcattatttgtgcatggaaggaagtagcatggatgaaagcttttctttcaaatgggatgatgtgtgggggtatatttctggtcttaaatttttttttttttttttacataaggtagagacagggtctcaccatgttgcccaggctggtctcaaggtcctgggctcagtcattccttccaccttggcctcccatagtgctgggattacaggcatgagtcaccatgccaggccagtgtatttattttctactgctgtgtaacaaattgacacacaacacatttattatctcacagtttctgtgggttggaagtctgggcacagcttagtgggatcctctgctcagggtttcatccggttgcaatctaggtgttgggtgggactgtgatcttatcagaggctcgagtgggggatggtgtgcttttgagctctttcaggttgtggcagaagttatctcttgctgattgtgggacgcaagtctttgttttcttgttgactgtcccttgaggtctcctcttgactcttagaggccccctgtacttgcttggcgcatggccccttgcagcttggcagctcacttcaaaacagcaaagagtcttctgcttcagtagactaagtcttacgtaacataatgtagtcatgggagtgacagcgcagcaactttgccacctaatgcaacccagtcaagggaaagccattccattgttttcaccacattctgtgggttagaagcacgtcacaggtcccacccgccttgcactccgggcaaggtggctacaaggaggcatggacactgggtggggagattgccaggctcacctagggtctgtctgctggcctggggtgttcttcagaaccctcattccctggatactgacatgtcagtctctgggaattggttgcatctctctctcctccatgacgtatcagtctgtgggagagcggtgcgtctcttctctctcctccatttgcatgcattcccggacccacttgtagaacggaagtagaatcaagactcgtggccacagtttgggtggatgggacacttgggcttgccctggtactatcaggctgtttgccctatgccttgcatttcccactgtcctgcctgcctctcaggcttatggtgaggatgaggtgagatgagatgatggatgtggtcagtgaagcagctggtcagggcctggtggaattctactctagtccagtctgcctctttctccacctctattctctaggcagagattggttattttcagtagtaagtatggactcatcagagttcttgaggtctttgcttcctgcctcaaattcccttctctcctttccctgactgatgcctactcatccttcaggcctccatgttcccaatgatccttttttttttttgaggcagggtcttgctttcttgcctcggctggagggcagtggtgtgatcctgacttattgcagccttgacctcctgggctcaagccaagctgtcctgggtagctgggaccacaggtgtgtaccaccacacctggctaatgtttgtactttttgtagagtcggggtctcactgtgttgcccaggctggtctcccaacttctgggctcaagtgatcctcctgcctcagcctcccacagtgctgggatcacagacatgagccactatgtctggcccccagtgagcctcttgatctcatggttgagctcttttttcacttgtgacttctgccattggttagattctcacctttggtcttgcggtgctctctgctcccctctgtggtaataatttattgttgtgttgtaattatcttttacttcctttccactaagtgatattcattggatcctcaaataaaaggcttggcacacttagggcagatacctaataaaacagtaacacctctgtggtcagtatttaaacggtgtgcacagccattagaatggaataagctgggcgcagtggaatgggaggttgatgttgcagtgacacatgaatgtgccactgccctccagcctgggggacagagcaagagctcatctcaaataaatcaataaatgggtcagaggagtgtgatgtgctggtgactcgggtcctgctctgccgccggagcttttccagccttgctgctcctttgctttggatcttttcattcctaggtttattgttgagtctgagacggttttttttctcccttccccttccccttagtaaatgtgcagatctcctgatattgcacctgacttagagatcttggtaccgtccctacagatccacacaaacacaaaagcacaggtgatactcaggttggaaca

SEQ ID NO: 84572 - DNA, 1351 bp, Homo sapiens
gctaattctctcgtgttttaaatagtagacaaagaaagacaagaccaaaggagaacctttttctctgtttcttactccgtctgcttttattaatagatgctcacggtgtggtcttccactcacttcccctttcatctctgagcttaacgagctcctcgtattatagattgttaccatatcatgtgttccagtctgtgcccgtgtataaacgtgtgttgtgtgttacgcgatactgtgagatgagtctgcccagagggactctgaagtcaggactgtgtcttttccacacctctccaccccagctctcatcatgcctctgagagaaccagattcagagtgtggtgaggggaggatgaagtggtttggggtgggccttgggcccccatctctttgctggaagtgtagtatacctctaggatatgtgtccaaactgttggctgtgagaccaaggaggagaagtcttttttggcaggctagtgcctgcggcttgaggtctcagtgtctgtaactgccaggctgcagagccccacctggctgagtcaggagtgtgttgtaacctgcccacctgcccaggctggttagaagcaagcgtaggcgttgggtctgcctgtcctggtccaggcacctctcctggtttggccaggttttggtttgtatttattcctgatgttgatgtgtaaatgatatcgttacaaagcaggtagtttgctttgctattctacgaataacccaagaacctgaggataataggacacgttaacagtctgctagttgagagttctgtttctgtgacttcaggggacatatgaccatcccgattgtggtgggttattaaggctgtgacaagtcacaggtggctttagggatgtcaaagataggcaaagataggttcatttgaatttgatttcatcttttgagaatgggttggtatacctgaaattggctttgtagttttggtattttgatgtgagaaggcattggctgaattttttttgttctcataatttgcatattttctgtgttttctccattgtttggctcagttgttttctttttctttttttttttttttgagacacagtctcgctctatcactcaggctggagtgcagtggcgtgatcttggctccctgcaacctccacctcccggtttcaagcacttcatctgcctcagcctcccaagtagctgggactacaggtgcccaccaccacgcctggttaatttttaaatttttttagtagagacagggtttcaccatgttggccaggctggtcttgaactcctcacctcaattgatccacccaccttggcttcccaaaatgctgggattccaggtgtgagcccccgcacc

SEQ ID NO: 84573 - DNA, 1238 bp, Homo sapiens
cgtgaccatatctcactgcatccttgagcttctgggctcaagtgagcctcctgcgtcaacgtcatgagtggctagaactacagacgtgcgctaatttttaaaaattctttgtagaaatggggtttcgctatgtttcttaggctgatgttgaactcctggcctcaagtagtcctcctgcctcagcctcccaaagtgctgggatgacaggcacaagacatcacatgcagccttaagaagatccctacaagagaacctggagaaacttgaaatagggaaggggactcgaaagcacactgtgtaggtgaattgtgaagacttcatggtgttaactggtattcattaaaaagacttggaaaaagagaagatgaattgattcccagtggagggaatggggcaaacattagttaggagagtggctttgtgaaacgatagagcaaaggagacagaaaagaaagcaggaatggggaacggggtggtggggcagaagctgggtgctgtttattttgtgcctactgtgtgtcactctccattctctgccctggggacatttgacagatgtggacgtcactggtgtgatttgcccacattctggagggagaagtgggcatctcagttgaggaaaggaaatggctatctggggaattcttgaggggcacagcccaggacggagccttgtgttagatgggtacctgctggctctgctcagctcggcagatgtgttgcctaaatgactttaatggccaaggcagactggtatttgccctcagatattttgtcaggacagtgtaaaatgtgggccaagatagtggttttgggtccaaacagaagggggttagagattttggaggttgaagcctgctgctagaaggagtatagaaagaagaacggggattctgtttgcccaaatacatggttaggctcatcttggacttgtttttgttttatatcttctgttacttctatgcacatattaatagatacctaattaatatttggttggaaatcttaaaagttaggattttttttttctttttttttgagatggagtctcactctgtcgcccaggctggagtgcagtggtgtgatctcggctcactgcaacctccgcctcctgggttcacgcgattctcctgcctcagcctcccgagtagctgggactacaggcacccaccaccaggctcggctaatttttttgtatttttaatagagtcagggtttcgccatgttagccagaatgg

SEQ ID NO: 84574 - DNA, 1006 bp, Homo sapiens
ggctcttttcagacttaggatgctaatggcttagaataaattttggaatgcagtatttccaagtaaagggaagattgcgtaggctgcttggttcctgaggttttactagagttaggattagcttactgctgcattcatatctgacacaatcaaagaagactttggtttaattctggatgatgatgtaaacttgaaatcattatggctgtactgtttaaacttatctaaaatagagaaggtaagacgcagtgaaggaccttatttttctcttaagaaatcaagctttgttagtatccaccatgtttctagatgtggttttacatcttgcaaaacaggaaataaaagtaaaaaaccaaaaaaaccccagagcaccactcttgaaaggattaagtttttaaaaatgattttgactaagatgtctggctgattaaaggatgtgcagagcactgaataacctttgccttttctgatggtgacaaagaagaaatccagctttcaggcagccgaagagcgtctcgagagcttgtagtgttagtattccacagccccacagttgattcggatttcaaggaatttttagactttgtggattttttcttcactataattgtatgtttggctcctaatttatttaaattacatacatagatatttttgttactttgagaatagtctatctgaaatttgaagttctttagagcttaatatattaaatatgctaacactcaaaacattttctttctttttttttttttttgagatggagtttccctcttgttgcccaggcatgatcttggctcaccgcaacctccgcctcccgggttcaggcgattctcctacctcatcttcccgagtagctgggattacaggcacgcgccaccactcctggctaattttgtatttttcgtagagacggggtttctccgtgttggtcaggctggtctcaaactcccgacctcaggtgatctgcctgccttggcctcccaaagggctgggattacaggcg

SEQ ID NO: 84575 - DNA, 1010 bp, Homo sapiens
agaaagtgctttctgtgaaagcacttttagcaggactgctgttttcaggccagagtagaagggccagaagcagtttttattcagatttcctcatcgtttccatcaaggtctcagtgactgtaaaggatgggttgaaatcagtctggactaagtgtggtttgctgctgctgcttatgaggattaagtgtctcgtttgtccggaggcccctctggtcacatgtagctgagcaggtggagtgatatgaaagttttagcattttaatgaagaaaaaatgatctctttggagggaaagacaacgaaatggaggtgtgccctattgatttttttctgtatgtttaggttttcaaagtttctttgtaaatgaaactgttatgtaattggcaaaagtttgctttttaaagactaattgtgggtatatttgggagattgcgacttgttttagatttttgggtttacagtaaggggctagggtatttggtggaggggaactggttgattgtggttgaaaacattcagatactattctagctctaagaaacctcacagttttgttttgttttgagacagagtctctgtcacctaggctggagtgcagtggcacgatcttgggtcatagcaacctctgcctcccggattcaagtgattcttctgcctcagcctcccgagtagctgggactacaggcccataccaccactcccagttagtgtttttttttttttttttttaaagtagagatggggtttccccatgttggtcaggctggtctggaacccctgacctcaggtgatccagccgtcttggcctcccaaagtgctgggattacaggtgtgaactaccgcgcctagccagaaaccccacagtgctaaagctggctctgtgaataaagggttaagagggttttcagtgtgaaaataaaagtaagccgtcctgtctgtatggctgagatttttcaggggcctagaggaccgaatcctgttgagtgaaaatccagtcttctgggcttcccca

SEQ ID NO: 84576 - DNA, 3285 bp, Homo sapiens
ggtggccgggggcccgcggcggctctgaggggccgattgggggctccggggcgggcctgggggccgtgggggcccggggcggccgtgagaggcggacagggggctccggggcgggcctcgggggctcggagcggccgtgaggggcggacggggggcttcggggcgggcctgcaggtcttggggacctgaggctgccgggaggggctgccagggggcgctggccgggcgccgggttctgcggagctggggcgccgacctctgacccgcgagaggggcgccttcgccgtgctggtcgtagttgttattctcagcgtccctattattatcgctgttttgaaatgagagcaggcggctctcgggctccgagccggagggggagggcgaactggggacctgggggcgtcggggttgcaggaggcgcgcgtaggccgaggaggggcaggaatgcgggcagccgtgtggggggtgttagggggagggtaggcgggcgggtgtggggggtggctgggaggaaagcggtggcggtggcggctgcaacagcagcccttggcctcaaggaacaatgtgagacgttgcctgaaatgttaatttccgttcctcatttcatcatcccctggcagggcggtagctgtgtgtgtggtgtatgtgtgtgcgcgcgcgcgcgcgcgcgcgtgtgtgtgtgtgtgtagggttggccctgccacattgattcagtcccctctcaaagagggattgtactgttaactcttgtgtttgtgttatttgggaaggttggtcggggggagtcttgatttttctcgaggcttgctcttttcctggtgccccattaagattttctgcttctgttgtgtttttggaaggttagtgttatatatcagcttccaagaagttttggaagaggcttgggaagatgaagctggtctaacagctccctatgctttgaaactgttttccttctatgtaacatgcttaggattcatcgtttttgtagattatgagtagttttgtatccttttgcaagaacagggttttatggtagagaaattagatttcaggctttcttacatgaggagagagttttatgcagtcattagagcaatatccttaacacttgaaatgagaaataaaagtgtgcacagttgttgaactgcaaaacttagagaatcttttgatcctttttgggatgttgagacttagccaaacatataagatgatattacctgtggaaaaagtgccatcgaaacagttactgtttttgttgtgtgcagacctagtctatggcataacgttcaaaatcggagaccctgaggctgtttctttggtttctctgagaccttgatttctcttagtaagtattggctgccctggaagacttcgagttctgttagagaatgattacagaagtcctctgattttactctgcaactgtagttaaactagaaaaaaaggggggggggcggatgtcttgctcagccttcattgtgacccttgcattggatctcgtatagttggtgtggcctcccctaccctccattcagctgttgttctcctctttctgtagtttctccccgaagagcaggatctccttcgataggctggccatctgaatggaactggatgggagggaacaaagaccaagttgctgtgacgttttctctgttcttcgtgatgcctcttaagtttgttgaaaagttccccacaagatagtgctaaatttgacctaaacttgaaactttcagcagtttttttcttctgttctatttttgctgtagtaaaatatacataacacaatttaccagaattttgtttttaaaggtgtcacctttaaaacctgagttcctcttttgcagctctcatttgcgtcagccttctgacttgcattgccaccgccagatgcttttctccggactggccatgctgggcaccccataccagcagtgccatcacaccctcccagatgggctgttgatgacgagcggctgccatgttagcggtaattacagtgttgatacggtggcaagtagaactccctacaaatagagtgaaggaaactatgctgtttgtgttggacagtatttttccaagaagtttttgtgcccctttttattttattttatttttatttttttggagtctcgctctgtcgcccaggctggagtgcagtggcgcaatcttggctcattgcaacctccgtctcctggggttcaagcagttctctgcctcagcctcccgagtagctgggattacaggcgcccaccgccacgcctggctaatttttgtatttttagtagagatggggtttcaccatgttggccacgctggtcttgaactcctaaccttgtgatccacctgccttggcctcccaaagtgctgggattacaggcgtgagccaccgcgcccggcctctttttgtgcctttttaagtagatttgacatagaaaggttatgcttcatcaaatataagaggagtcttattttgcatatgggcagagagcccatcatcaattaaataacataattagagagtatcagtaaatgctggctcagaaaataatctgcattttgttgccaaaataagtgttttgatctgtccattactctgtgtaactcccttcatcctcaaatcgtaagtgtaatgggtgagtgtctcttaatagcaaggtatttgtagttaatcggtgaaaatgatggtgcatcccttgtctggtggctgcgtcagtttgtgactcttgtgtagtcagtgctctgtgggaattcagtgtggcccgtttgataaactttatagaaaaatggaatgaattcaaataaaagttattgtcttgaaattttgaaatgttttcagtgtgtgttctcttaatttgaaattgtttttttcttttttttttttttgagacggagtctcgctttgttgcccaggctggagtgcagtggcatgatctcgactcactgcaacctccacctcctgggtttaagcaattctcctgcctcagcctcccaagtagctgggattacagacacctcctaccaaacacggctaatttttttttattgttagtagagactggagtttcaccatgttggccaggctggtttcaaactcctgacctcaagtgatccacctgcctcggcctcccaaagtgctgggattatagacgtgagccaccatgcctggcctcaaatgttatttttatgataacgtcccaaatggtgactgtggcctaactctgataccatgccccattcttgaccctgccccaagcttccagtcattctggctgcgttggc

SEQ ID NO: 84577 - DNA, 1030 bp, Homo sapiens
ccagcctggagtgcagtggtgctatctcggcttactgcaacctctgcctcccgggttcaagcgattctcctgcctcagcttcctgagtagctgagattacaggtgtgcaccaccacgcccggctaatttttgtatttttagtagagatgaggtttcaccatgttggccaggctggtctcaaactcctgacttcatgtgatccacccgcctcagcctcccaaagtgttgggattacagccgtgagccaccacgcctggccaattactgtgttttaacctgtttacttgcttttgacattttgatgttacctaaagctttgacctattgctcagactattactttatatttcagggcaatgtagatattacaaataattatatatttgaacttttaaaaacgatttttagtctgcattgctttggtactctctaatgttggtgtgacctccagtattgtttttttttttttttcagagcttacaattgagactgctaacccctacctttgaagggatcaacggattgttgttgaaacaacatttagttcagaatccagtcagactctggcaacttttaggtatgtatctgtttaaagaagcagctgagcatgactgcacacttaccgcctcagctacttgggaggctgatctttttttattttagagacgggatctcgccctgttgcacgggctggagtgcagtacaatggtgtgatcagagctcactacagcctagaactcctgggctcaagggatcctccccactttgcttccggagtagctaggactacaggcgtgtaccgtcacactcggctaattgttttttgtagagacaaggtctcactttgttgtccaggcccaaaggggcctctttactcccttatcccccagttgcagagccttgacctcttaggctggagtgatcctcccacctcagccttccatagagccaggactccaggcacacaccaaagcgcctagctaatttttggggggtattttttgtggagatggggttttgccacgtttcc

SEQ ID NO: 84578 - DNA, 1003 bp, Homo sapiens
gtccggctaatttttgtatttttagtggagacagtgtttcaccatctcagccagtctggtcttgaactcctgacctcgtgaaccacctgcctcggtctcccaaagtgctgggattacaggcatgagccaccacgcctggcgtgtttaagttcttttaaagcaacttcatatattaaagggattcgtgatattttcccaaatttgtgttcataactattttttattccctcacattagcaatttaagtagcaaagatatttaacgtaagttaaaatagtttattattttgtaattaggaaatactggactaagtgatataggatatgctttatttcatatttataaatcttatggatataagtaggtttttcagatggtttttgttttgctttggttatttaggagtacactgttgtcctgtatgcctcccctgtggttgcaaaacttaattgttaaatcctttctctatttctcataggtggtactttctattttaacacctcaaggttgaagcagaagaataaggagaaggataagtcgaaggggaaggcgcctgaagaggacgaaggtatattcatctgatgttcttcagtcagtagctgcctctggatgtctttacatttctgttttccttttagcaaggtgaaaccagtctggaaaatggggagatgggccgggtgcagtggctcacacttgtaatcgaaacgctttgggaggcccaggtggaaggatcacttgaggcctataccacatagcgagaccctgtctcactgcaaattaaaaggctgggcgtggtggctcacacctgtaatcccagcactttgggaggctgaggcaggcggatcacctgcaccctggccaacatggtgaaaccccgtctttactaaaaatagaaaattagccgggcgtgatggcacacgcctgtaatcccagctactcgggaggctgaggcaggagaattgcttgaacctgggaggtggaggttgctgtgagtggagatcat

SEQ ID NO: 84579 - DNA, 1148 bp, Homo sapiens
ctgtgtctgcaggtgtagctgagtctgaggcacacatcagacgtggggctgtgagctaacttgcagacatccctccatttcttagttttcctatgagtggaaaatagaaagtctatctgttgaaattttatttctcaaattgtggttgaggaaacaaattttttagacttggaagtacagatgttccttgaattaggatattttcagcttcccaggggctcactgggaggtagccccatcgtaggtcaaggagcttagtgtgcatattgcttttacaccattgtaaaatggaaagaccgtaagtggaaccgtcgtacgttaggaatcacctctagtttctgaatggtgtcctcttcacaatgctgaggttgtcattaccatgagttccaggcgggctctctgttgactgtagggttgctcgtctgtccctgcgtttctcatggtcccctctcctttctgccccccagcggctagccttgatgtaccgaatgcaggttgcaaatattgacaagtttgaagagaagcttcgagcagctgaagatgagctgaatatcgaggccaaggacaggatcccagtttcctacaagcgaacaggattctttggaaagtatgttggatgtatttgttgatgcttgaactaaacctaacttggctttgtaatctgagaaacagattgcaatcaaaaatctcaaactgtctttgcctatagttaactagactttttagtgggagggttaaataaatatagaagtgaatgatacaatgccaggagatttggaaatatagttatccctgggtatccatgggggctggttctcggacttcccaaggataccagcacctgaggatgcctaagcccctggtgtaggatgctgaagtctaagcccctgatgtagatgccgaagtctcagcccccgacgtaagatgccgaagtctcagcccccgacgtaggatggcgaagtctcagcccccgacgtaggatgccgaagtctcagcccccgacgtaggatgccgaagtctcagcccccgacgtaggatgccgaagtctcagcccccgacgtaggatggcgaagtctcagcccccgacgtaggatggcgaagtctcagcccccgacgtaggatggcgaagtctcagcccctggtgtaaa

SEQ ID NO: 84580 - DNA, 1036 bp, Homo sapiens
tcagccttccaagtagctgtgactacaggtgcctgccaccacacccagctaatttttttgtatttttggtagagacaggtttcaccgtgttagccagggtggtctcgatctcttgacctcgtgatccgcccatctcggcctcccaaagtgctaggattacaggcgtgagccaccatgcctggctgagtaattttttttaaagcaaattgctagataagtttcttactaattaatgacgaaacatttcccttctgtgcttgaagactgactgtgagcctcgtcagcctgacatgagtgaagccttgggatcctaggatggagacgtggggttggggcggctcaggtgcgtgggctgagcgctggcatcgtgctgctgatttcctgacttcgcccagctccttgcactttgttctttctgcacagaatcagcttaaaatggctcgtttcaccattgtggatgggaagatggggaaaggagtcagcttcaaagacgtggcaggaatgcacgaagccaaactggaagtccgcgagtttgtggattatctgaaggtgaaagcagcgtgggccgggagggaggtgtgagcagaggccggccgtcctcctctcccagaagggctcctgcgggacctggaattccatcgatgacgtgtcgtgggttggcggtgacctctaccatgtcccatggggacaccaagcaggtgctggtgcctgttcaaccagcagcacaagcctcgtgcacatggttcagccaagcagaggctgccaagacccatgcctactgtgccgttagccgtcctgggcccttcatcccttgcaaagctctgtgctttttccagaaccacataaacaccttagccagttggtggcagtgcatgagctgcctatcacgtgcgtcacttacacgtttcctccgcgggcctggtacggtgggtcgcacctgtagtcctggcacctcgaggggctgacatgtgttccctctgcaggcctggtacagtgggtcacgcctgtagtcctggcacctcggggcgctgaggca

SEQ ID NO: 84581 - DNA, 1089 bp, Homo sapiens
cacaggcgcccaccaccatgcacggctaatttttgtatttttagtagagacggggtttttccatgttggccaggctggtctcaaactcctgatctcaagctacgcgcctgcctcagcctcccaaaatgttggaattccaggtgtgagccaccgcacctggcctgcaagaagtttttaaaagtagctgggcgtggtgccacatgcctgtatattcccagctactcgagaggctgaggtgagagggtggcttgaacccaggagtttgaggctgcagtgagctatcatggcacccactgcactccagcctgcgtgacccagagagaccttacctctaaaaaacaaaaaaacggaatccccaagtagttagtgttgcattgtctgctgccgtccagagcccagaacgcttcctccagcttggcgccaaggtcccaaagggcgcactgctgctcggcccccccggctgtgggaagacgctgctggccaaggcggtggccacggaggctcaggtgcccttcctggcgatggccggcccagagttcgtggaggtcattggaggtaggtgctgtggttgggggctgtgggtgggcttggctgactacctggctcctttcacacatccttcctctggtgtctggactgaaagggacacgggtgggtgggggagtagagaaggaaagcgaggtctgggttggcggaggggttttgtctgcgaagcacatgatgtttgcttcaaagccaccgtcacttgtggcctggggggccagcacggtgcgtgtgaaccctgaggggtggccaggggcccccgcgagcagctgccgtgtgtctgtttgtagggaatggagctggtagctttagttgtccttggtgtagaactttgtctggcccgggtacaggaagaggctttgttttttattaactgcccatttcctgattctctctgtgtcccctcaggcctcggcgctgcccgtgtgcggagcctctttaaggaagcccgagcccgggccccctgcatcgtctacatcgatgagatcgacgcggtgggcaagaagcgctccaccaccatgtccggcttctccaacacggaggagg

SEQ ID NO: 84582 - DNA, 1037 bp, Homo sapiens
ggacgcaacgacgtttgcggagaatgcttcacacctctcctgctgcttgtcccccgtgtctccagtcgtctctcaacacgcttattcaggaactaacgcgtgagcaaccgagacctgaatggctgccttctgcacacacagcaagtggtcatgggagtcgagttttcagagaacacaatgtcttcagagatgtggggtgagcagttcagattctgtgatgtctgaggtgtcactgaggagagacccgtcctcagaggtgggtccttggggttcagggaccccaccgcctctgctgggagagctgccctgtacctcaagcggagatcaccatgcgttttagaggcctctggagcctacaggctcgctgtactgcttctctgcagagcatctttatgtggcctctctggtgctgtgtggccttcagtgtggcctctctggtgctgtgtggccttcactgtggcctctctggtgctgtgtggccttcactgtggcctctctggtgctgtatggccttcagtgtggcctctctggtgctgtgtggccttcactgtggcctctctggtgctgtgtggccttcactgtggcctctctggtgctgtgtggccttcactgtggcctctctggtgctgtgtggccttcagtgtggccgctctggtgctgtgtggccttcagtgtggccgctctggtgctgtgtggccttcagtgtggcctctctggtgctgtgtggccttcagtgtggccgctctggtgctgtgtggccttcagtgtggcctctctggtgctgtgtggccttcagtgtggcctctctggtgctgtgtggccttcagtgtggcctctggtgctgtgtggccttcagtgtggcctctctggtgctgtgtggccttcagtgtggccgctctggtgctgtgtggccttcagtgtggctctgaccattgcttctggaggctgctcaaggatgggtgggtggtttgggttttgaggaaatctgcagagcaccttgggttctggccgcagagtctgaggactctcggtgaggc

SEQ ID NO: 84583 - DNA, 1041 bp, Homo sapiens
tccagcttcacggtgggtcctcgggaggaaggggatggaggtggtgctgcctcagtgctctgaccgggacacctggggcccagcactgctctgcgcctgcagtgctgaggatgcctctgtctcgaccccgccctccaggggcacaggacgacctgaggaaggtcacccgcatcgcctactccatggtgaagcagtttgggatggcacctggcatcgggcccatctccttccctgaggcgcaggagggcctcatgggcatcgggcggcgccccttcagccaaggcctgcagcagatgatggaccatgtgagtcggctctggccacaccgctgccctctgtgctccccggggagggagtccctgggtctaccacacaagggtcgcccacggccgccccagcggagctcagctgcaggccccacctgggtttcttccttctgggctctgctgtagttcccacctgtggagtattttcttctcaaatgaggacatagatgctcctaatgaaattatagatgtgaatctgggaagaatatcaaataaatacaccgagcaatagacccagggcccacatgtccttcagactgggccaggaagggccgatgtgtgcctgtgaggcagctgtgggtgggtgtgggtgggtgggctggcatgcggagccctgctttcctggcactggtcacaggggcaggagaccacctgtcggctgaggagtcctgttcctcctgggaggggaaaggccgtgttcccagtctgccatttcttttctgtgctttggtgctggagccaggcggccagccttgcccctgacacagttccctccactcacaggaagcaagactgctggtggccaaggcctacagacacaccgagaaggtgctgcaggacaacctggacaagttgcaggcggtgaggccctggccaggcgtgggggctacggcgtcacacagtgtccacacagcacccacggtccccacccctctcgtgaagtatttccaaggcacacagagtacagagaacactctgaccgatgtgaattcta

SEQ ID NO: 84584 - DNA, 3402 bp, Homo sapiens
gagcgagactccgtctccaaaaaaaaaaaacaaaaaaaaaaaccacaaatgttctaaatggatgggaggagaataaacgctggaacgacaaggacgaaggccttaggttgcgcaaactcggatgtcactgaagtttttctgcctttgcgctgcaaacgtgtctcacaaatgtgaacaaacagaattcctcgggcgtcgcccgttcgccgtcggcccagataccggactcgcgcgcgttagcccgcaagacaggactcggccgcggcccgcgcagcggctgaagcgccggggcagtaacggcggacgtcaagcaagtccggccgtcggttactcagggcccaggaatcacggccgccccgccgcattctcagcggcaacatgtctgcgacggcggccctagggctgccgggagagccgcggcgacgtcagttcctcctttcggggctctgattggtcagagcgcccggcgcttctggttggccggccctgctatcatcccagagtgcattgcggggccgcttcctttccgctcggctgttttcctgcgcaggaggtgagggagactgggtcctggcctttgggcatcatccagcgccatcggcctggcgcttcagccaacgcgggagtggatgggccccttcttcttcgcagacagcgttcggccgctgcccgggctctaggcgcggccggacggcccagtctggagggttcggggcggaggcccgggggggtgcgcgcgcccggggtccggcctctcactcgctcccctctcgtccgcagccgcagggccgtaggcagccatggcgcccagccggaatggcatggtcttgaagccccacttccacaaggactggcagcggcgcgtggccacgtggttcaaccagccggcccgtaagatccgcaggtgagccctgcgctcggggctgcccctggggctcgtgcccgcggctgcgccttggcttgcgggtggccgatgccagggcggggggcgctgtctgcaaccgtcgcggagcgctggcctggcggccttaggcaagggtgaccgccgctgcgcttctctccaccagacgtaaggcccggcaagccaaggcgcgccgcatcgccccgcgccccgcgtcgggtcccatccggcccatcgtgcgctgccccacggttcggtaccacacgaaggtgcgcgccggccgcggcttcagcctggaggagctcagggtgagtactggcagcgctgcggtgtcaggaaggccccgaagtcccctctgttggcctcagtcgcgtgatgacattctccggaatcgctgtacggccttgatgaaagcacatttgaacccttttccatctgattgctgaggcttttcatccaggcctcggggctggagaaagcccgggcctgtctccatctctctctggttctggggcaggtggccggcattcacaagaaggtggcccggaccatcggcatttctgtggatccgaggaggcggaacaagtccacggagtccctgcaggccaacgtgcagcggctgaaggagtaccgctccaaactcatcctcttccccaggaagccctcggcccccaagaagggagacagttctgtgagtacacggctctctggccgtcctggtgcgcggggacagtgaggcttggctcctttatcagtgacaccggtccctgggtcttgctggggtgagaagaaccaaaacattgtgggtgatgagctaagcgggactgctaaggttcacctgtgcgtttccgcagagataaccttaatggacatggcaaggctgtgtgacttggaggcagctttttccattgacgttgctctccctaaaatgcttcgtattccaaaatatttctagaaagaccttgtaggataaggttgataaagagtccattgtatacgtttccgggtagttaaattagggaacagttttctctgccccgcccgtggttcacaggtagataactgtctcgtgcgtgttgcgtcaactcagtaagatatagtcacctaactaataaggactgttcttaacattggggccacaaagtgtgttgtagaaaaggctcagacactggtcctgaacacggaatccccaggggaaagtttggggccaggtgagggtggagtccttgcagcagtgcggccaaccccacttaactcttctcattcaccaacaggctgaagaactgaaactggccacccagctgaccggaccggtcatgcccgtccggaacgtaagtgaacacttactcaaatccaggcttcagacgagatcagtgggtgaacacgtgggtatctgagatgcgggtgatgggggtcaggcttaagaacgttaatagtggcagttgtgggtgtggaggtttgcggaaaggaacatttcttcttagtttttacttcttgcaaccatgaagccatacattgggaagtatttttgtttgttttgtgtttttttgttgttgttggaaagagagtttctctatgctgcttacattggttttgaattgctgggtttacaggcttgagccgccatgtccagctcagggagggtttttctttttttttttaaatcccagggaaggtgattgactcagggttgcttttcagcagtacttatggcagcgaacctgacccccaatccccgggaggtcctccaggttctcctgacgcttggttgttcccttgccctttggtgcatgtgggtttaacaacctgtctttctcttctaggtctataagaaggagaaagctcgagtcatcactgaggaagagaagaatttcaaagccttcgctagtctccgtatggcccgtgccaacgcccggctcttcggcatacgggcaaaaagagccaaggaagccgcagaacaggatgttgaaaagaaaaaataaagccctcctggggacttggaatcagtcggcagtcatgctgggtctccacgtggtgtgtttcgtgggaacaactgggcctgggatggggcttcactgctgtgacttcctcctgccaggggatttggggctttcttgaaagacagtccaagccctggataatgctttactttctgtgttgaagcactgttggttgtttggttagtgactgatgtaaaacggttttcttgtggggaggttacagaggctgacttcagagtggacttgtgttttttctttttaaagaggcaaggttgggctggtgctcacagctgtaatcccagcactttgaggttggctgggagttcaagaccagcctggccaacatgtcagaactactaaaaataaagaaatcagccatgcttggtgctgcacacttgtagttgcagctcctgggaggcagaggtgagggatcacttaacccaggaggcagaggctgcactgagccaggatcacgccactgcactctagcctgggcaacag

SEQ ID NO: 84585 - DNA, 1046 bp, Homo sapiens
tgggggctggaggggagcactggaggctggaggggaagccctgggctgcagaggagcattgggggctggagggaagcagtgggggttggaggggagcactgagggttggaggggagcactgggggctggcaggaagcactgggggctggaggggagcactgggggctggaggggagcactgggggttggaggggagcattgggggctggaggggagcactgggggttggaggggagcactggaggggctggagggaagcactgggggctggaggggagcactggaggctggaggggaagccctgggggctggaggggagccctgggggctggagggaagcactgggggctggaggggagcactggaggggctggagggaagcactgggggctggagggggagccctgggggctggaggggagcactgggggtgggaggggaagccctgggggctggagggggtcactgggggctggaggggagcactgggggctggaggggagcactgggagttggaggggagcactgggagttggaggggagcactgggcgctggaggggagcactgggggttggaggggagcactgaggcctggagggggagcattgggggttggaggggagcactaggggctggagggggagcattgagagctggaggggagcactgagggctggaggcgaagcactggggactggaggggagcactgggggctggagggaagcactggggtttggaggggagcactgagggctggaggggagcactgggggctgcaggggagcagtgggggctggaggggagcactgggggctggaggggagcattgagggctggaggccagggctggaagggactgttctcctcatcccgtgggtgaaagccagggcctcaggttgggcacacagggccttcctcaggcagccacagctgaaaaagtttccatttcacagccataggtggaaccccacgtccccaccgggaccccccattctgtgcacatacaccctacatgatccccacacccagttaacgtccttcctg

SEQ ID NO: 84586 - DNA, 1504 bp, Homo sapiens
cccaaagctgcccagtccatggggacagaaccgtcactcagatccacattcaagtgtgcccaccctgcagtcttcatcctcactcagctgctgcctctggaggtgcctttggccacatgtgctgtgctgtttgtctcctcgacagggagcctgtccaccagcaggctgcggtcccagcgggtgcgtctgcagctcctccccttgggcagcctggttctcccggaggacctttccttggggccctgcttcatgacgatgctgcctgtgtcaccctctaccatctgtaaacaactgggtgccttccccgaccacaccccaatgccttcccagcttggaagccaaggcagctgatgaagggagctcaggagagccgtcttcagctgggctggggttggggctgctgtgaggaaaacctgccattgtggccctggagagtcaccagcagctcttgggaaggacttgctgggaggctgagagaggctttgggcacagcctgctgtcttttccatttcctaaagtttacttcattgtcttgaggcttccaggttttgtttttgtttttgccaaagtagaaaaggcaggtggtgggcggctggcagggagtgcgggtccccgcccctcttcagtcctgccctcccctcctcagtcctgcccaccccgtgcagcccatgctgaggctgcagtggtgtcgtgggtgttacgtgcaggaacgtggagaccctgacgtgggctcactgcgtttggttttcttttcagaacttgggagcccccagggaggggctagtgttggtaggtcctagacgtggttccctccagcctccccaaaatcaaccctggtgttgagagaacgtccttctgtccatcgtgggtaacagccttggggagggtgcagagctctgcagagccatgggccaggtggggctgcctcagtcctgtccccttgggcactgaggagaggggcccattcacctttctcctagaatgctgttgtaaataaacaaatggatccctggaaactttctcaagctttgctttggagccttgggtgagcccctggatgtggccatctcccccaagctgaggaggggttcctggagtgttcactgctaggggctgggcagatggctatgctcattctcgggccccatccaaaccgacaatctcccatgttcagttctctgcttactttgaaataatttaaaacttgcctaacagttgcacagtacatggtctctgtgcacctcggccaaaccaggatgcttgctgggcaccgtggtccccctgagcctctggtctgatgggcactgtggtgctcctgacggtctctggtctgacgtccctgctgcacgtccttgtgctgccgcctccaatctgggagggttccccggttttcttcatgacctgaatggtttgaaacctgctggctgctattttgcagaatgctcctcagcttgggggggtgcggttttcccacgatgcactggggtcttcatgactgctcggt

SEQ ID NO: 84587 - DNA, 1411 bp, Homo sapiens
ccaggctggagtgcagtggcgcaatctcggctcactgcaagctctgcctcccgggttcacgccattctcctgcctcagcctcctgagtagctgggactacaggcgcccgccaccacgcctggctaattttttgtattttttggtagagacgggcttttaccgtgttagccaggatggtctcgatctcctgacctcatgttccgccggcctcggcctcccaaagtgctgggattacaggcgtgagccaccgcacccggcaaaaaaatatatatttttctaatagagatgaggtctgactatattccctaggctggtctggaactcctgacctcaagtgatctgcccgcctcagcctcccagagtgctgtgattacaggcgtgagcgactgtaccgctggaaatcagctctttgatgtctaagagttaccaccttgctatttttatccatttacctttgaggagaaagagtctgtaaaaagtaaactgtcaagtactgaacttttaaattggcccaggctggcctcaaaccctggctttaagtgatccactggcctcggcacccccagagtgctgggattacaggtgaacttttaaattgggaaagaatcccaagggacatttgcaaagttgcattaattataaaccaccatcttttggattctaaccatggccaaaagatgctgcgtccatgacctcttctgtcctcacactaaccctttgagattggctggtaccaccctcatgttcccaacaaggaaacagggagggagggtctgcatttgctgggccctgtggctagcaaggagccagggctggcacacgaatctgtctcgtgcctcccctgttggggggggctccccgaaggccccaggcaggtgtggtctgtgtgtgtgttctagctcctggtgtctagaaggaacctagtgagtcctgcctgccagaagtgtaacgtcccattcccaatcctcaaaccattaattccctctttctttgcagataccctgttccagttgaaggtatgtaccgaatggccgttcaccccagccctgttctggtgaggacagatagtataagccacgctcactcagagccacagaaacagtcgggcagattatataacagttgagtgaccgccacacagggctcagactgctgaccaaggaggggattattgagccaccttggtgacatattagctcttttcttatctgaggctaagtggaggcagatccttagggtcatccatgaaagccatgaaagaaatagtgttatcttttttttttttttttttttttttgagacggcgtctcactccgtcgcccaggctggagtgcattggcgtgatctcggctcactgcaacctctgcctcccgggttcaagcgattctcctgccttagcctcctgagtagc

SEQ ID NO: 84588 - DNA, 1030 bp, Homo sapiens
tgccacccgggcagctctgcccgcctcgctagcggcactgcccggctgggtctggggagcctcgtgtcgcgctgccgcgccgaggcttccggcacgggcgggaacgacagtcccagagttccccgcggcgggggcggaagccggggcggggcgggctcaggacccccgacagccggtccctggagatctgaggggccggggcgggctcagggatgcctcgcgcccgcggagagacgggcccgggacttgggaagagcaagctccgggatccagctcgggcgctgctgggttcagcgcccgagctgggctttgcaggctgagccgcgagccacttgtttgtggggagaatttacacccgcgacgagttcgagcttgaaggctcccgctgggcttgggctgcatggagcggggtccagcgctgcctggcggcttcacgcgaaccctgggcgcgtcccttgcggaggtgccggtgcctccctctgcagagaccaggagagagcctctgggcgttgggcggtgttgcccaggtgcacggctggtgggggtggagagccctgaactttggccgctggtttgtgtttttaactgctggctggtgctctgagaggccaagccacgtgttcagtaagaatcattaacagatcgtggctggatgacaacaggagccacactttactcatccagacgtgcagcaggcgctcaccgcgttgagagccgtgtgctggactctggggtgaagtagtgagttggccttttcttttttgttgtttttttgagacagggtctagcgctctcgcccaggctggaatgcagtggcgtgatcacggctcagtgcatcgtcagcctcctgggctcaagtgatcttcctgcctcggcctcccaagtgctggaattacaggcgtgagccaccgcccccagcctggcctggcatttctttgagttcaggaagtgtgacaaggatttggacacccagaaataagcgtgtcgagaagagcacaagcagaggatgtgagaaggggaattaaggcgg

SEQ ID NO: 84589 - DNA, 1042 bp, Homo sapiens
ctgatatttctttcaaagcattggcccagtatcgtcaccaccttttctcatcagaaaagcccaagaggccgggtacggtggctcacgcttgtaatcccagcactttgggaggccaaggcgggcagatcacttgaggtcaggagctcaagaccagcctggccaacatggtgaaacccagtctctactaaaaatagaaaattaggcggttgtggtggcacctgcctgtaatcccagctactcaggaggctgaggccggagaatcacttgaacccaggaggcggaggttgcagtgaaccatgttcttgccactgcactccagcctgggcaacagagcgagactcagtctcaaaaaaagaaaaaaaaagcccaaacgtgtggttgcctttctgtttggtgagcaagacgtgagtgggctccctggtacaaattccatttgaaatttcctcagttgttccatcagctgccaaatttccacactggcaacacccttctgtttcagctgggacgatgccggagtgtgaaggagtttgagaagctgaaccgcattggagagggtacctacggcattgtgtgtgagtggccaaggctaggacatgtggccgcagctcgtggctgtgacagtgtgggacgagactgtcgaagcagcagccgcgttggggctggaagggactcagaccctgtgctctgaaacagggcagaaacctgttcaggaacttcaattcctgatgtagttatcacaaacattgtaccatttctgggtaaacgtaagcatccggttgctaatgcccataatccaaacgtgtcactgcagagtacacagaactgttagagaaataaaatacagaactttccagaagcagcaggagctggacatggtgctcatgtctatcacctcagcaactctggaggagtcacctgagcccaggtgttttttctttttgtttgtttttgagatgggtcttgctctattgcccagactggagtgcagtggcatgatcatagctcactgcggcctcgacctcctaggctcaagtgatcctcc

SEQ ID NO: 84590 - DNA, 1018 bp, Homo sapiens
tcttgggcggagaaaggccccgtggcttagagccacttgacccagcaggggaggagcctctgtggacgtccccggctctgttcctagcagacaggctgctctcgctgacccttctggccttcgaaggcctaaacacagctgcctccaaggaccgctgcctggcctgcattgaggaaccctttttctccccgctgtggcctctgctgctggccctgtacaggtatggacccagctgtacaaccacctgcgtggcctagtgtcttccagcccagtcccccaggaggcctgccctgctccctggcactgtctgctcccctccatccccaagactcgtgtttgctccccctagcctgtgctttaccctgaggccatcctcaggggcttccagtttgcaggtaggattattgccactctcccgtgcctggggtcttggcaacgctggggctttttgcttgagatacatagccagttttctccaggactgagctccagccacagccctgcttctgtccccagggcaaggtccctggggcagcttagcctggcctctctctgccccaggagcgtgcaccgagcccgggaggctgccctgagcaggagcatggagctctacaggaatgcaccccccaccgccattggcatccccaccaagctcctcccccagaaccctgaggccaagggggccactggctacccctactgcgcggcggcccaggagctcggactgctggtcctggagagctgcccccagaagaagctggagtgcataggtcagcaggttcgagagtcagggggagggacaggctcccatcccagtaggtgacctggagcctgtgtcttcaccactgagcttctcttgtcacgtgccggtggggaggttgggggaccagaacaaaagtggtgtctgagcaacatcgccagggtcaccgtggctcttcccagccgtgcacatcaggaggtgggtgggtgggcggggtataaggggtggctcaggctgctggacggggttaactgcccc

SEQ ID NO: 84591 - DNA, 1082 bp, Homo sapiens
ccacgatcagccagcagctgtgagagaggagcaggtcctcagcccatgccgcccactaggcctcagaccacaggggaggggctctggcagaaatagtcgagttgtattgccagccaggcaggcacatggcccaggcagctgtcaattctcatgtcccccacatggcccaaggtgggcatcttgacgttacctctgccacgtgtgagaagctctttttcgggcaccgaggtattaactgcagcagaaaaagacgagcttttgttatcagttccacggggttgccctagagagaaaacaggcaaactcacaggttagaagacatacagaaacagggctggtgtgtcccccatagtctgcatgctgtgccggaacattctttggcagaaggagcctccggctggggggagctcccctggaggtgggactggcccttgcacctgcctgacccttgagctccaggctcctgccagctggaggtgaaactgtgcttgtatccccagccacgaagagctggaccagcttcaagtacatgtccacagcaacatgcaggaaggcctcttccctgatggccgcgtcttcatggaagtaggagagaagactagaggtaaagacatagtgacaaatggctacagactgctggaaaggtagcaggtgatgccaagggatactgctcatctgtggagcagaggcacagacaacccttcccatctggcgggacccagaggtgctgagatgggggtctgggaaacactgcccagccctgaccagccctgtgggtggaggtacctgtaaaaagcgaaaggcagcagcctggtgtgctgatccggggccacacggaggaggagccgccccagcctgaggtctgcaacaccaagaagtggctcaggcaactctggacatctctgcctattatcagtgctggggacacccctgggggtcgggacgtgtaccctgggaggcctggctgtggggatagtgtggggcgaacagcctgagctgaggatacccaggtacctgtcagcagctgggagaggatgggggggtcgacctcttgcaggagggtgggtgtggtgcagagagag

SEQ ID NO: 84592 - DNA, 1035 bp, Homo sapiens
aagacattaaaagaaaggcccacaggccggatgcagtggctcatgcctgtaatcccaacactttgggaggccgaggtcggcggatcactgaggccagttcaagaccagcctggcaatatggtgaaaccccgtctctactaaaaatacaaaaattagccgggtgtgacagactcacgcctgtaatcccagctactcgggaggctgatgcaggagaattgcttgaacccaggaggctgaggttgcagtgagctgagatcacaccactgcactccagcctgggtgacagagtgagacccccatctcaaaaaaaaaaaaaaaaaacccacggcctgggagttctcactcacacttccgcaaacacaaggagctcctgagctagtctggaaaccctgacttggaagctggctgcctggtgcccctgcctggcccacagtgggagaggacaccttggctggtaaggtctgacttacatttgaggtcagatgtgacgacagcaggcccatcaaggagaagaagaaaaggaaaaccaatagctgtaaataaaaacgtgcacttattattacattaaaattacctgtgctgtcattctaaataaggctgacacattcctctttaattgaaattttttacatctaggccataaatcctttaagtggatcttagaaaactttccaatcacttctagagagacagcttaattgagaattaattactactggctgggtcatttcacacttgcctttaaacaaagctagaaacagtttgaaaaagtgacaagagccagaaagagaagactgctgcggtctccttggctgtgcgcagtcccaactcagcatcatctccctgcaaggcctcctgtcagaagtgtttgtaaaatccttgaagataagcccacaggctccagcctaaagtagggcctgactgggcagggtctctgtggacactcctcgctgcacactagggtcctaaggccctggagccactaaaatcccttctaacaaaactacacaagaaacctgaagacgtactcagaag

SEQ ID NO: 84593 - DNA, 1007 bp, Homo sapiens
gacctccgcctcccaggttcaagcgatcctcctgcctcagtctcctgagtagctgggattacaggcgtgagccaccatgcctggctaattttgtatttttagtagagacagggtttctccacgttggtcaggctggtctcgaactcccgacctcaggtgatctgcctgcctcagcctcccaaagtgctgggattacaggcgtgaaccaccacgccctgcctcgtttttgtttatttgagattgagtctcactgtgttgcccaggcagatctcaaactgctgggcttaagcgatcctcctgaagtgctatgattgcagatgtgaaccgtcatgcccagcttatttaaagtctcttaaaccacagcattgtttcattaatttcctaccaattttttaaccagccagaaaactcagacaccacactggggccagagccaggcagtcctttgttctctgttgtaggagggaatgcctgatccacagggccaggcatgggcaactgaggaaaatgaggcctcttcttccaaaatgtaggcagctggggcccaagagcacagggcaaggtagacaggaccaggccagctgcctgctcagtcagcagctctcagaacgccaggatgctgtgggggcagcaccagcacctgcccacactctcacgtggacctgggggatgcagacctagtttctgatggtcctgaaacccttctctgtcctctgatggaaaggcaggccccaaaggtgacaggtgggaataaggacttggtttctatggcgtggttgtatggttgtaaggccctgcaatgaccccgttctctctgtcccagtttcctctcccctgaggctgcctccccagcacccaacccggactggctctcagctgctgcactgcactttgcgattcaacaagtcagggaagaaaacatcaggaagcagctaaagaagctggactgcgagagagaggaggcaagataggaaattcttttactgatttattttctcgcaagcttg

SEQ ID NO: 84594 - DNA, 1072 bp, Homo sapiens
cccagctcagaggagtgtggtcccttcactgtttcgttcccagctcagggcagtgtggtcccttcactgtttcgttcccagctcagaggagtgtggtcccttcactgttttgttcccagctcagaggagtgtggtcccttcactgttttgttcccagctcagaggagtgtggtcccttcactgtttcattcccagctcaggggactgtggtcccttcactgtttcgttcccagctcaggggagtgtggtcccttcactgttgcgttaggccaggctcttccttctccaaattccacgtcttccatgagtgtgggtaataaatgcctcatggaactgctttgagccttaattgacgtaaaaaatactggctttggagttccagagcgcagggcgagtgtgggcctgtagtggcctgtaggagcactgggggcttgtcatggctggggcagcggaggtgtgtccatctcagccaccctcatctgtgtgctggtgctctctccataggtgtggtggccgagcctggagcctgtgctgctctgccggtggaggagacactgccagagcccgctgccccgggaactgcagaagctacaagaaggccggcagtttgccagcgagtacgtgtgggtggtgagatggggtgtgcccgcccagatgcacttcgggacctgctcaaggtcatctcctaaacaccctggcttgcttgagagaagcggtgtgggcagcctctcgtgtgagcagggagaaaagaaccgagttctcgtggtggtgggcgcctgtaatcccaactactggggaggccgaggcaggagaatcagttgaacccaggaggtggagtttccagtgagccgagatcactccaacggccaatagagcaagactctgtccagaaaaaaaacaaaaaaaaaaacagcctctgccagtgtctcgtctgagtgaggaacggcctctcccaggctcccgtctgagtgaggagctcgagtgattcctttgcacctgctccccttcctcttaaatctaatgtgggctcctagagtgcaccgcgtgctggtagggtcagtgtcatggggac

SEQ ID NO: 84595 - DNA, 1053 bp, Homo sapiens
gcagaggacgtgagactagcaaaagctttcagaaaatcactatggtctcctttgaattcttatgaatggctgtttttcagaaagctctcagttggcacgtgacagccgacagacaggaaaacaccatagacagcacttggttagtgaagggaccagaggatggttggcccttggtattagtgtcgtcctcaccacagttctacgctccgggtgcgtccccttccctgcggctgcttgtgcctccctggcttcttcctggagcctacaagactgtttgggccagagctggtgggctgcaggatctggccgcccagggaagccgttaagtttcaggacagcacagccagggcgccaggcccggtcagcccaggagcaccatccatggtggccacgccaagccttagcgagtgtttttctcaaaactgaatccacagcagccactctgcatgttggtctcgcctctcttcctgtgggcttttcttacctgccttgaactcttttgcagagaaacttctgctcccacggaggtgccctgacacaggacatcactgcccacttcttcagggtgagatgctccctcagcccctctcgtggccttctcagaacgccgtgggtggatcctcctgtcagcttcctgtgagttccttcactctactagttgtgggtcctcacaaaccgctgacctcctgctgcgttctctcctgcagggcctcctgaacgcctgtctgcggagcagagacccctccctgatggtcgacttcatactggccaagtgccagacgaaatgccccttaattttgacctctgctctggtgggtcagctgtcttgtttggtgttttgttttggggatgagtgggagactccacagctgcctctggcatctctgcagcacgtctccatcacgggtgttaccatctcagggaaaatgcatcaggagacatggaagccacagttaaagatgccagctcatagcagatgagggccgcacatcctgagttcccagaaccgtccctgcccccaccgccgtcaccatggcacccgcaggacttctc

SEQ ID NO: 84596 - DNA, 1050 bp, Homo sapiens
cactcttgtcttctggtcacacctcagtatatcccctcagctcctatctctgtatggcctggtttttcctaggctatgattattgagtgaggattatcataatattggaataaaaagtaattgctaccaactaatgattaatgatattcatatgtaatcatatctaagatctatatctggtataactattcttgttttatattttattatactggaacagctcgtgtcctctgtctcttgccttggtgcctgggtggcttgccacccacatccttgcattcttgggataagcctccttggtcatggtacataatttttgtatttcctaggttggggttggtagtattttgtggcagtttttgttgtttattgttgactaatgtgagggtcacactgtcagagaagcacagccatcactcagctccggaggcaggaggagaactgggaacttcagcactattaggcgatactgaggaggattttattgtattttcatttcagctcaaggagttatgaccactcagaaaattctgatttggtctttggtggccgcacaggaaatgaggatattatttccagattgcaggtgagtttgagggtgccacaactcagtgcattcacttcatttaagccgcgtgctattaagatatttattgccaggcgcggtggctcacgcctgtaatcccagaactttgggaggccgaggcaggcggatcacacagtcaggagatcgagaccatgctggctaacacgatgagaccccgtctctactaaaaatacaaaaatttagccgggcgtggtggcgggcacctgtagccccacctactcgggaggctgaggcaggagaatggcatgaacccaggaggcggagcttgcagtgagccgagattgtgccactgcactccagcctgggcgggcgacagagtgagactccgtctcaaaaaaaaaaaaaagatatttattgttggctcaggcttgtaatcccagtactttgggagtccgaggctggtggatcacctgaagtctatacaggtaggcagcatgtacctg

SEQ ID NO: 84597 - DNA, 1241 bp, Homo sapiens
gacggagtctcgctctgttgcccaagcaggagtgcagtggcatgatctcagctcactgcaagctccacctcccaggttcataccattctcctgcctcagcctcctgagtagctgggactacaggcgcccaccaccacgcccggctaattttttgtattttgagtagagacgaggtttcaccgtgttacccaggatggtctcgatctcctaacctcgtgatccgcccgcctgagcctcccaaagtgctgggattacaggcatgagccactgcacctgccccagcctacatttttgtgcttgcctattctgttcaccaagctcatgtgctgtgtggccagcagttaccccgtgggatgtcatcctgagtggcctttgatccgtggaaggtggggtcacaaaggtcactcctgagaccaggcctttcccacatccccaggcatcccaccctgcagacagtgaggtctcatccctactccaaggtcccgagccgccagtctcaacccagctctcactagtgctgtgtgtcccttactatgggcctattccctggttatggggaaccgctggccacgaagcatttctcagaattgatagcagtgtttgctgttctaggcaggacttccaccagtgggcgatccatgagcactttctccctgagtcctcggcttcagggggctgtgacggagacctgcaggctgcgtgtaccattcttgtcaacgcactgatggatttccaccaaaggttagcagcacacactgtattagggttctctggagggacaggactaataggatatatataaaggggagtttctggccatgctggtgcccatctaattagcttagggtgggtctgcctttcccagcctatacccaaatgtcagtctcctttggcaacaccctcacagacacactcaggatcaatgctttgcatccttcagtccagtcacgttgacactcagtattaaccatcacacaccgatgaggccttacttttaatcatggtagttctaagaatgcatttttctctcagtccaattttggtatgcaaagtacacttgagcctatcacatagcaaatctatgtcaatacaaaataaagccaagcttcctgcatcggttgtttctttatgtgtatagacttgtcagaagcgacaacttcgggctgggcgtggtggctcacacctgtaatcccagcacttcgggaggctgaggtgggtggattacctcaggtcaggagtta

SEQ ID NO: 84598 - DNA, 1086 bp, Homo sapiens
ttgttagtttcttttttcttttttttttttttcctttttatagatagttctcactctgttactcactgcagccttgacctcctgggctcaagagatcctcctgcctcagcctcccaagaggctgggaccacacacatgtgccaccacacctggctgatttttaaatcttttgtagagacggggtgtcaccatgttgcctaggctggtgtcaaactcctaggctcaagcaatctgctggcctcagcctcccaaagtgctgggattacaggcatgagccaccgtgcccaggtaatttttaaatgagatgaggtcttactatgttgcccagactaaaatagccgttttatacttagaaagaaggattacagtactaacatctttgtgctagggaaatcctgtaagaaatcattcttgataaaactaaggtttctttcctgtggaactctcagctgcaatttcattataacacagggacatggaggactgcgtatgagatgaaatgacaaactggtttataaacctgtcggtggattgtgtgttctgtcctcattgtattgaattgcttgctctctttctcagttaacttaccaagactggttacacctggagctggaaattcaacctgaagctgatgctctttcagatactgaacggtaagtgttgaaaagagctaccctggccaggcatgatggctcacacctataatcccagcactttgggaggctgaggcaggagatctcttgaatccaggagtttgaggtcagcctgggcaacatggggaaactccatttctacaaaaaatagaaaagaaattagccggacatgcggcacgttccagtcatcacagccacttgggaagctgagcaggagcattgcttgagcctgggaggtagaggctgcagcgagctgagatcacaccactgcactttagcctgtgcaacggagtgagaccctatctcaaaagaaaaaggagcttccctttaaaatgttacacggttttccacattgccttaaagcctatgtttcgtcattttatcctcaatttaatgtttggtttacctgttaatctttgagcacaatttcaat

SEQ ID NO: 84599 - DNA, 1055 bp, Homo sapiens
gagggagctggtccaaccaagggccagacaagggaccaagacaaaacaaagcagctctcaccaggacatcaaagaatgcttaacgatatagacagttactatctactattaatttcagcagtttagtataatatgatctcatttttatgaacaaagaaacaaacgcacgcatattataaacaaatgacagataaaattctggaaggatatataccaaaatgctaaaaagtggttatctttgggtggtatgtctgcatgtctgtctcttctaattttatcaaacgagcatgtgtcacttttcgagagagaggagagaagacgcgactgtggaagaagagctcacttcaggcagaagaacaaggaatccctcgtcctacaggtcaggaggctgtcaaagagcgcagggacaggaaggccagcaccaggtgcaggaggacccacatccacctctgggagcgcagacctggactcacccaggtgcacggccagggcagccaaccccagcacatgtggggcactcaggctcgggccctgcaacgagaatgagggtggcagagcagactgccctcttccaagctggaattttccagggcactgaagacgaattgagaagtagcagcctggccctcagagtgggcccccaagggtggcccccatgaaggagagcctcacctggtgacggagcagctggcagagccgggtgagcactgcagggagcacacgtccacacatggtcctcacgaagagggcagcccagggaccctgcctgcagagacagccgtgaaaccatcagtactagccattcagtcctgcacatccctccaacagctaatccaaccaccagcggccgaagaaagagccaagctgttccccaaaacagtggtctttctggaagacaacccatcttctgcagtgcttcccaacttctgctgcgtcctatttgatgaaactcagcatcgccgcatgctcctgcggagacgagctcatgagtccctggtctgcagacttggcccagcaagaggtggcacccagaggagccccaccactcagggagc

SEQ ID NO: 84600 - DNA, 1061 bp, Homo sapiens
ttgactgagtcttctctgttgcccaggctggagtggacgatcttggctcactgcagcctccacctcctgggttcaagcagttctcttgcctcagcttcctgggtagctgggattacaggtgcacaccactacgcccagctaatttttgtatttttagtaaagacagggtttcatcatgttgaccaggttgggctcgactgcctctttagaatatgcgacagaggctgtttctggccccaaaacctaaaatatttttctggccccttacacacaaggtttgccagtcccgcctgctgctgtagaattttgtgattggcgattacttgagggctgctattcccaagattggggaatgggggccctgggcaccagtttgcattgtaacatgccctccaaacaagcctgttttggaggtctttttgcaaagcagaattgcgatgtctgtggcgggagcgctggccggcttccttcctgctgctcccgtccccaggacaccacgctcatgagaactgtgtctctgcaggctgtggacctcctgctgacgtctttctgtcagaacctgatggctgcctccagtgtcgctcccccggagaggtgaaggcgcgggcagctccctgagtggtggggctcctctgggtgccacctcttgctgggccaagtctgcagaccagggactcatgagctcgtctccgcaggagcatgcggcgatgctgagtttcatcaaataggacgcagcagaagttgggaagcactgcagaagatgggttgtcttccagaaagaccactgttttggggaacagcttggctctttcttcggccgctggtggttggattagctgttggagggatgtgcaggactgaatggctagtactgatggtttcacggctgtctctgcaggcagggtccctgggctgccctcttcgtgaggaccatgtgtggacgtgtgctccctgcagtgctcacccggctctgccagctgctccgtcaccaggtgaggctctccttcatgggggccacccttgggggcccactctgagggccaggctgctacttctcaatt

SEQ ID NO: 84601 - DNA, 1047 bp, Homo sapiens
atttttttgtatttttagtagagacagggtttcaccatgttagccaggatggtctccatctcctgacctcgtgatctgcccgcctcagcctcccaaagtgctgggattacaggtgtaagccgctgcgcccggcttgtgttttaattttactaatggtttgctttgcatactcataagtctgactgtaaagggctgtgtttctctactcagcactgtggatgttggaagtgaattgtggcctccctggagtcccaggcagttcccagactaacggtgctgcgctctgctatctatcctcaggtgcacattctccacccacccctggttcccggcaagtaccgctccctcctcacagactacatctcattggccaagacacggctggccgacctcaaggcaagctgtccctccatgcccactcctcacacctgtcccagcagaaactgctttgttttcttgttctcattctgtgtcttccctgaaggtttctatagaaaacatgggactctacgaggatttgtcatcagctggggacattactgaggtaatgttgcttgagccctgcagggtctcagccagtcacgcccaccatgcaaaggtccagtttcttttgactcttgagttgagtttttcagccttcccagtctcatgtctggtcttgcctcgggcgcagctgggggcgaggctctgcgggcctctgtgttgctgtgtcccaccttgtgtgtccccagcattggcagggaaagggttactgtgtggcagagtgaagtgcctcaggctgcaggacatttgtccttttgggagatcttggttcctgtggggttgaatggagaggtggttcgtcatgtttttctctgaatcacagaaaagtgttaactttttttttttttttggagatgcagtcttggtctgtcaccaggcttgagtgcagtggcgcaatctcggctcactgcaacctctgcctcctgggttcacgccattctcctgcctcagcctccagagtagctgggactacaggagccgccaccacgcctggctaattttttt

SEQ ID NO: 84602 - DNA, 1007 bp, Homo sapiens
gagctgtgaagggatacctcatgaatctgtgggtcacagggaagcattttcttgtctgtgtgttttgattaaggcctacagattgtagaagtcttgatggatgtgggccctctggggggttgaagtggatctgttgtctgaaagcgcctggggattgtttctggtgggctgccgccgtgtgctgacatctgttttctgttcctggctctgtcttcagttgcacttgacgctttggctgctggagtacaggaggagtcctccactcacaagatcgtgaggtgctggtatgttcctgagggtggcctgcctgagtgtgcagcagggaggtgtctgccaaattaaagagccaagatattttaaacacttccagagcttcagcagcccgctcctgagcacacttcctctgccagttacgataacgtgcgtgaggaggaggcgaccatgggaaagcccggggaacgctctggtcagccttttcctgtgaggatgaggtcggaaggtgcgcccactgcagtatcctgttccgcctctggaagtcctgcaccaatgtttgtcccactcactgtgacctcctcctgtgtggagtctccccttgctcctccttccctgggtgtgattcaggctctagagctggccctgcctctcagccccccacatttctagaacacactgtagctgtgcctctacagactcccgctgcctggcctccacagatcctgctcagattcaccagtaggcaaagcttggccctattagctttttctctccatggctctgtggagatgtgcggagacccttacaggtcgggaggcggaagctgaggagtgggggctgggtggaaggtggacatcggggtttggtggaaatggggctctggggtttgcttccctctagtgtgggcaggggaccttgaagtgaagtcttgagaaaccagtagaatttgccactgtttccaggccttgtcaaccttttcattctttattttgctcctcatttcccatccctca

SEQ ID NO: 84603 - DNA, 1002 bp, Homo sapiens
tccataagacctcccttggaaaccacttttatttaagagaaaaaaattgggctgggtggggtgactcatgccagtaatcccagcactttgggaggccaaggcaggtggatcatgaggtcaggagttcaagaccaacctggccaagatggtgaaaccccatctctactaaaaatacaaaaattagctgggtgtggtggcggcgcctatattcccagctactggtgaggctgaggcagagaattgcttgaacctgggaggcggaggttgcagtgagcgagatcataccattgcactcaagcccaggcgacagagcaagcctccgtctcacaaaaaaaaaaaaaaagaaaaaaatctgactataaacttgttccctttcaaatagaagtgcaagaggaaaaaatctggttcatctaagggtcctgattgggtttggtgaacgctagtgtagctgtggtcaggtgagcagtaacttctgcagcgttcctcaggttaggagcagctcacaggggtcctggtgggcccaagccatatgctcacccgcccctctgaagtggatggtctgtgccattcacagttgcttggagaccatgatgtccataaataactttggttttatggtttttcagattttgttcaaatgtttgttttgaggggatttcagaaaaactcagatctgagaagaactgtggagcctgaaaaaatgccgcaggtaggaggaaaagtcaagtgaagagtttagcggaaggagccgtccttattccaagtgttgaaatgtatttacgtgtctctctattgaaacgtgctgtttgtacctatttacggggtacatgtgatacttgttttgtgcatagagtgtaatgatcaagtcagggtgtttagagtctccgtcacctccagtatgtatcatttctgtgtgttggcaacatttcacatgttgcagttactttgaaatatacaatctgttgttaactatagccgcctcactctgctgtggaacattag

SEQ ID NO: 84604 - DNA, 1004 bp, Homo sapiens
acagtgttcacagtgagtggctaaagcagatcctgttttatcaaatgggagagggttgagtgagaaagacaagggacatgcacagggcacactgaagcctgacctttgtcctggcagcttcgaggagccagtgaaggcttctgaaggagagactgtcatgtcagtgtgtgtaatactgtgttggctgtagtgtggagaaagggttagaagtaggctacagtgcgtaggaagagagaaggaagagaagcaagtgttgggcaacggtgtgtgggtgcccaaaggccagggagtttgaaaaccagtacagctttgtaaaaaaagatgtgtttcaggctctaagtttttgcttgaggttaattttcaatacggcatggttaagaacctaagttgaacattttgtaggaaaatgcattcataaaggactcagaatgctgggggtttttttgtttttgtttttgtttgttttgttttgtttttcagagttctttgttgcttgaagcggtgtggcatcttcacgtacaaggcattgtgagcctgcaagagctgctggaaaggtagcgtgctaatgatgattcagtgttactgtttttgcagtctagtctagtataaattatatttcaaagcccagaatcagacgggtttgatttctggctttgacatataatttgtactagactagattgcattgcatatttatactagactagacctggaggaactattgctttattatttcaagagaacgtttatggtgttttggttttgtttgctttttgtctgttttttttttgagacggagtctcgctctgtggcccaggtgggagtgcagtggcacgatttcagctcactacaacctccacctccagggttcaagcaattctcctgcctcagcctcccaagtcgctgggattacaggcgcccgccaccacacgcagctaatttttgttatgtatttattttttttagggacagagtctcgttctgtcacccaggctggagtgcag

SEQ ID NO: 84605 - DNA, 1160 bp, Homo sapiens
gagttttctgcgcttccttctccctctctccagacgtcgtggtcgttcggtcctatgtcgcgccgggccctccggaggctgaggggggaacagcgcggccaggagcccctcgggcccggcgccttgcatttcgatctccgtgatgacgatgacgcggaagaagaagggcccaagcgggagcttggtgtccggcgtcccgggggcgcagggaaggagggcgtccgagtcaacaaccgcttcgagctggtgaggagcgcggcggcccgggtgggggtggggtggcccttgacgttgtggggcggggcgagcgtccagccgggtcggggagcggggttgtgatgccaggggtgggaagggtgacgtgggtcccagccgcagtggggagggcggggccgtgcgtcggggccagggcgacgcgggtgggcggtggcgtggggtgaagacggcgggccgcggagttagactgggttctaaccccggtgaggtgggcggggctaagggatggggcggggccgtgctgtcggggcggggcgaccgaatgggcggggttaagcggggtccgggttgtggagggtgcggggccttgatgccaagggcgtggccaacgtccgcggggccgggccacgacgtgggcgggattaaatgggcctgcggccacgtggctgtcgtggggccgtgacgctaaagggcgtggctaaagacgggggggtggcgaggcgatggcgtgggcggggttaaatgaggcctggggccaccgtgggggtggggccacggcgtaggggcaggagtcgggtggggcttccctttctcgagtctagaggggccttctctcggttccagggttgaggacttgccaggcctctgcgagcattctgctttaatcctcacaacaactctgcctaacccagggccttgctcttcgcgcatccccatcagcctaacccagcggattagtcttactctttgctgcatctccggcagctcgtttctggcacagggaagtaacagtttgactgtatggtttgctcatgcggtcctgtgacgttttctcctaagccctggcctccgtctgtaactctgcctctgcgggctctgcgatcctcccacctcagcctcctgagtatctaggactacaggtggatgtcaccacgcccggctaa

SEQ ID NO: 84606 - DNA, 1010 bp, Homo sapiens
aagcagacgggatgccgtctcctggtgtagaccagacggcgggtgttttgggaaggtgtccggagctggtgacacccatgagtacacactcaggtcaagtttgtcgatatcgcagaggcctcatccagaacaccacgaaggtgagggctgtgctcggagctgcccacgtccctgctcccggcacaccctccctgagcactctcccctcccaggtctgtccatgcggctgctggaatcaaaaaaaggcctctccttctttgcgtttgagcacagtgaggagtaccagcaggctcagcacaagttcctggtggccgtggagtctatggagccgaacaacatcgtggtgcgtggtccctgcagcccctgacaggagcaggggccatgtagccaccactgccctgggccgcctgcttccctggtggctgggggaggcatgctgcctcctgcccttcccaacaggaagggtgccagtctctgcagggcggtctggccctgtgaccagaaggagatgtgttcggaggctctaggccaagcgagctccatccatactcagaggagaggctggagcgctgctctctcagccgttcctggggaccgtcgcagtagtgccgtgtgatgcaggcccaggactctggggcttctcactgctgcccttgcctcctgcggctcagtgcaggcgagcagctcagattcccggcccccgtgcagcccccggacggcccccacacggccccggacggcccccgcgcagccccagacagccccggacctggacagtccccgtacagccccggtgcaaccctggacagccctcatgcagcccctggacagctccccttgcagccccggacggcccccgcgcagccccagacagcccccgggcggccctcacgcagccgccggacagctccccttgcaaccccggacagcctccgcagagctccccgtcatctccctgtgggaaaagcaggctgctgctttccattcctctttcttggggcttagtgggg

SEQ ID NO: 84607 - DNA, 1012 bp, Homo sapiens
accacgttgactcactcctgcagctcagcgatgcctgccgctttcaagaggatcaggagatggctcgagacctcgtaggtaaggcagagcccccaccccattcccctcagctgtgggagcacctcaagctatcaagacagatgcgatggtgtaagatgacaggggttgccaggatatccatgacagctttattgagatacaacctacgtagcacaaaacttacccatttaaagtttttgtttgttggtgtttaatatatgccacagcctcccgagtagctgggactacaggcgcccgccaccagacctggctaattttttgtatttttagtagagatggggtttcaccgtgttggccaggatggtctcgatctcctgaccttgtgatccacccacctcagcctcccaaagtgctgggattacaggcatgagccaccacgccccgccctctggcttttatttacaatgaagttttcaaggttcatcctcactgtagcgtcgatcagaacgtcgttcgtttttatggcttagtaatactccactgtgtggacggaccacatgttgtgtatccatcattagttgacggccgtgtgggctgttgtaaataatagtgcttacgtcagcatgcacacgcagtcttaggtggacacatctgtgctgcacacatggacgcctggttctgtcaggacgtggcagcagttgtgcctcatggtgttgaaagtgttaccatgtcaagctcacaagttctgtggttgaaataaatgcagcgtggcatccagggtgcccaggggcatgtctgccctctcagtgtccaggactctagtttcgtgaccttccgtccagacctttccttgttgtccattatcagaggaggggccgtggttgctgtgtgtggccatgacaccctcccctggcgtccctgtgcccacagagagagcgctgtacagcatggaatgtgcgttccaccccctgttcagtctcaccagtggggcctgccggctggattaccgcag

SEQ ID NO: 84608 - DNA, 1042 bp, Homo sapiens
ctgctgtccccactggactggacattctcatggacaggagcattttgttccctgtactgctctccaagagcgatttccagcagggaccagtgcctgtgcctgtagccgtagcagtgacgatggtgacacacccaggtgtcccttcatggagatgaactcagtgacttcccacaagaagccactggctacggctctcatcgttcttgttctttggatgaagaggctgagtcactggccatgtggctgggattggtccccagaggctccccagccgcaggccagggaccagccatggtgcctctgctcgagagtaaagtgtacagtttttgcagccaccagagatgcagcgagatgcctcgtgctgggtgggggtgggggccgaggctccatggcggttaccatttcatttgctgtgctttatctgctgtgccttgtttctccccggccctaggcggaaggtgctctaccagcgtgcacccaggaatatccaccgccatgtgatcctctctgagatcaaggaagccgtcgctgccctgcccccggtaagggagaaaggctgaaatgggagctctgtgtaagccggtcacatgcacgtcccttctgctccgggcggtccacatgcaggcgtgcgtggtgcgggctccctcagcagcccagccccgccacggcaggggcagggtctagtgcagagggctcctcctttcctggcagcccgggttcggatgcttgttgttttgagagagaaatcctttggggctcagagcacaagctgagtcgtcaccgtggtgagctgctccatccgtggtcttgtgagcgcgtggtgcggctgctgggggattctctgtagtcgtggggtgtagtcctgctctgacgcctcctgtgctggaggtgccgtttctgtctcaaaacctaaggagtttgtactgttgttaagggataagatagaacgagtgagaaaaccagcaagtcagagggtcgcaggaccgtggaccgtccactggggacagcttagtgcctcctggtttaacttcagctgctctgc

SEQ ID NO: 84609 - DNA, 1050 bp, Homo sapiens
agtcttgttcctccaagcaagtggggtggagatgttggggtcctttggctggatgccactatctgttgaatctgacaaaataattttcttttttttttttgagacaagagtctcactgtgtcgcgcaggctggagtgcagtggcgcagtctcggctcactgcaagctccgcctcccgggttcacgccattctcctgcctcagcctcccgagtagctggggctacaggcacccgccaccacgcctggctaatgtttgtatttttagtagagacggggttccaccatgttggccaggatgctctcaatctcttgacctcatgatccgcccgccttggccccccacagtgctggggttacagctgtgagccaccgcgcctggctctgccaaaataattttattagagaacttgagggcagtgcccagaattgaaggcgaagccccagaagcatgttttgcagagaagtgcccagggaagctctgagggcccatgtagcaaagatcaggggatagtcggtctgagggtgaatgggccactcggaccaagaccccagtcttgggggagggcttagctggagcaggtcctggcacagttgactgatggtgcacagaacccgtgcatcccacggccccacggtgctgcagctgcaggaggggcggaggctgcagccagacagcatcagaagccagcgtggttctggaaggatcgagaacaccaaggtgttagggctgcagcaggggtcctgtcccctggcacccctcaccgccctaatcttttacccttaggaggcagcagacacgaggggctgcccgaggctctagggcggccagtgaggcaggaaacatgttccagccccagctaggtactggtccgtggacccacctcccagaaagcccatcactgtgtaatcgtctaacctggggctcgccgaggcctgtgagttcatccttttggcagttcctggtgtctccttactctgctcagcatttcctgggcgggagcttagggtgcaggaccctccccaggacgacgagggcccagtgtccatgac

SEQ ID NO: 84610 - DNA, 1082 bp, Homo sapiens
gacggcctggagtcgacactggggttcgtggattttgctgtgtagccatgcagtggtttttctctcgcccccgtggtcacgcatgaggtgtccaccttagaaatgggatgtctctataatgctgtcttgaggacttttggcaccgagtgtcattccacctcctcattttgagtggctctttcctgtctacacaaggctgtgggctcctctgtgaatgcagactggacggtgtgcagatctgagtggtgcccagctctcacggtgcctcctttctgtgcggcttcctgaatccctttcccactcctggctatctcagctcctccctaggggatgggaggcaggaggtagcagctgacgctccacacctgtccccgtcttcctccagaggccctgcctgagctgccccctggggagccggaattccgctgccctgaacgcgtgatggatctcggcctgtctgaggaccacttctcccgccctgtggtaaggttttagatctcggaggggagagggactgagggaacccccaaggcaggaagggccagggtttccttgtcactccctcccaggtggcagggcagtgtcctgtgagctggggtacagtctcactccattgtcaggctcagcagcccccacctcagccagggctcctggcttcgaatctgaggcctgcatgacaccacagacccccaccctcagagcctgagtgaaggcaggtggagagagcctgggattggggttcatgaacctggggctgcttctgtcccctgagctccatgtcttcatgaagcaaatgtgcagagaatagattccctctggggtccttgaggtcctgtacacttgccgagagtcagggtgtgggaggcaaggggaagccccttgtctgcctcgtactgaccagtcggtattacagggccactcttgtttgttccgtgttttgttccatggaagccttgtgttgaagaagaaaagggggaggatataatgatttttttaaaaaagtttgaggccgggcgcggtggctcacgcctgtaatcccagcactttgggaggctgaggcgggcggatcacgaggtcaggag

SEQ ID NO: 84611 - DNA, 1057 bp, Homo sapiens
aaagaaaaatgtatttgcttggtgactggaagatcctccagtgtcaggaatcttgctctcttccaactcgacttcctgtgtctgatccagcctcaggcaggccttccctgtgcggtggcagagacggtcccggcaaccacatcttgctttccaggagctgagcctccctgtgcagatgacagctgccttttcacagtggttatagcaggaacctcaggcctgactttcattggccagtcctgaccggatgacagtggctgactggccagttctgggtcatgtgcccacccctgacccaatgacagtggccgattggctagttctgggctgtgtgcccgcccactgacccaatgacggtggccgattggctagttctgggctgtgtgcccacccactgaagcaagcgggtgggctaagtaagttcctccctgagtgagccacatggacaaggacgggtggtgtcttgaaggtgacaacaaaagaaggtggtgggtcccaggccacagatgttcctgatgcagtccttgggtctgtgtgtgctttggcctggctgccctgtgtcccctgtgctgattcaggtatccctgggaatgtagaaagtagaatattcatgaggaaacaggtaaattggtggtaagaaaaaaaaaccccaaaacatagtggcttagagaagatgtgttcgtttcctcacgtaaaaatcccataggtggtctggggcctctatgacagctaatggtgttggggagggcctccttttccattgccctgcacctaaccggcaaaaagcaggaggggcagagaggccgggtcgctcccgctcacatgcccatggcccggtgcaatcccacacagcccctcgctgcaagggatgctgggaaaggtcgcaagggatgctgggaaaggtagcatgtgaccttggcggtccttgtccagctgatcattgtttactgtgaaagggagaaaagggacatggcattgtgctgaaactcacaatctctgccctaaatggtgcctggaagaaataagttgaggggcttgtgcgaagggaaaggaactt

SEQ ID NO: 84612 - DNA, 2375 bp, Homo sapiens
cagctctacagagcgatggtgtcacacagatgggactgtggcagaaactaaggttgagactgaactcgctcgagctagtcgtttgctcagtgtctgacaggtgttaattactgctacgttctgtttaaaagtttgaactaggctgcggtgccccagggtgccgtgatgtacagtttgggagccaggggagggataggaacaggtgggaatcgtgaggaagggctctgagtcgagtctggcgtggccacctggctcagcccctcagctgtgtgaactgggacctgtgtggttgggggatagcaggtagcgtgaggacccctggaggtccacatctgcacgcccgtaagcgctctgcacacggccatacagtcacttgcatctggctgcagactccgactctgccctttggtaacggctgtagaggggatgataggagctgacctaggacgcttggggggattcagtgctggagtttcctgtgcagagagccccgacctctttctgcccccagggactgctactacgacaactccaccacttgtcccaagtgtgcccggctcagcctgaggaagcagtcgctcttccaggagccaggtcccgatgtggaggcctagcgccgaggaacagtgctgggcaccccgcctggcccgccaggacccaccctgccaacatcaagttgttccttctgctccggagacccctggggtgcggccctggccccctccacccctgctgggccagagcgggtgggcagtgtcaaggcccgctgtctcccaggtgcttgctgggactcggggcggctgcacctggctgtcacctgggtgtgctgctgtgaggggtccttgcgtggcccccatccttcccccaatgcagaactccatgggcagggagctggggggacatctcacctcccccatggcacagagccctccacacccctggaccagggcatccgggccctagaaattccacagctcccgtcctggccaccctggaagctcatcaggccaagacccggacagagcttcagaggagtgttgagtgacacctgaggatgcggctgcacacactcagccaagggccgagtctcacctgcggtggggtgtcggctctgcctgggggctccatccctttcagccactcgtggccttggggatttctggttgtccccagctgggactgttcacagttgtcacctgcagacctgcctctccctggcctgaggttcaaaggcctcatcggatggtcagtacagtggggtcacctgttgtttctatacaacagcagggaaggggccatggagcttttccctgctgggtgctcctgctttggcccagcccacctttcctggtgctccaagctaggaggctgtggccccagcctgaggagggtgtcctggcctccaggtgtgcagcaggggctgtgtgctgggggaggttccagttaggcgatgggatcctgcagtggtctggtggcatttcttggaaccagatttacctgaggagctctgtcctgctccctgtggagggctccagatagctcagaaatgaccagccaatggccttttgtttgggggcctgaggtcaagagagctgagagtattcgctcgactgagcacattcaggaagatcagggcaggcgtgtgggaggtccctcactccacgggacagaggcccctgggcagcagaggaaacctacagctctgggtgaggggacacttggctttggtgtttgcactttacagatcctgcggtccacgaggggcctcaggagaggacgtgtcaggacgtggcttcccagccttctgccttgggcagtgggggtgctcctgtctgtccttttcccccacaccctggactgtgcttggctgttggtgcacatggttggcacacggtgggcagagggcagagaatgccactgcttggttattggtcccctttgaccaggaaacccaagaggagacacctcagtcagcagaaaggccacctggctcactggctcattccaggagtgggagagacggcagggtctcctctttgtcctccggcatcaggaaggggatggtgtccactccccactgtggtggctttaggcaaggttcttattgtctgctctgcctcggtttccccatctggaaaatgggggcaggggtcctgacctacctcaggtggaacggtgagcagggaacatgtcggagtccttcagagaatgtgatgtgaggttggatcaacagtgtgggttcctgtcctgtttccccttcctctttggggctgaggaggaggttaaaggccaaatgctgtttcccaacaccccaaagtctgcacacgtctcatgaatgcatcacatttctgtcatatggatattagccattccga

SEQ ID NO: 84613 - DNA, 1073 bp, Homo sapiens
gcgtgttggggccgtgcggccgcaggcacatacaagcggcctgggtcctggggctccagagaacaaccgaccaagcagacaaacggaactccgtgagggggacactgcggcagaaacgtccaggggcggttttccagtgcagcggagggcggaccgggcgggtgttgtttcgggagctgctttccatggaggaccccagaaataagtgttgatgccgatgcccgatttaagataagtctaaaggcgctggctatccccttagggcccagctgtctgggcagggcgaggctgcgctggcgatcaaaccctcgaacggtcaggcgacggcgtggacacccaagacggggccccagccggcgccgcgcccctgccgcgcctgcgcgagtcctccctgcgctcgcggggccctaggaccgctctcccattgcgcatgcgcgcgcccgggcggcgcgggatctgggtctggggatgtggtaccggctgctggcggcggccggcagtagagcggtggccaggccgctggccttgctgtggcgatgtggtggcccaggaggcggcaggacggccaagaccagcgcgagggccctgggcaaggcccgacaggtgagcggggaggcgctctccgccggtgccgggcggctggtctgctctggacgccgcgtgacgccattcgcctgcgccggccgcgggggagcgcgggagggcggcggccctgacctggtccgcgcagtgaggccgacagcacctggccagagcttcccgcccccccgcctcctccgtctccaaactcctgctcttctcctcgctacctcttccacccacttcttgcggaattcccgctgtttactggatgcccggtcccctcggacatcggaaccgggacctccagcctccttgctcggctttgtaaagcgccgggcgttgagcgatttgcgcttgagtcccacctcctcgcgaaccagctttgtggccccgcgtgccagcccgtgtcctcctgggctcggcggcgttcggctttatccacctcgcagttactcagtgaaccagacacgataagaggcgtgaaagggttt

SEQ ID NO: 84614 - DNA, 1113 bp, Homo sapiens
ggcaagaccgacgttattttcctggtggctgtgttcaaaaccacccaaaggtacctgtctttcatccaccatcattaacagcatgaggtttacaggaactgagtggcttcctcagagtgtgacttctacagtgagtgaccagggggcgagggtccagacaactcagggcacaccccactccaccccgccccatcctaccccttcctggcttccatatcgagccacacaacatccagcaccttctccatgtctttatggtgttgatatctcactaaagctggtgagagaaaagctctttccaaaggaaggtgctagatgaatcttttggaaggtatgggaacaaaccttggtttctgcgtatctgactctgaggaccagctaagcctcatgtttggaaagcagaacagaaacaatgtgcagactggcattacctcagagcacacttgcccacttggagtccttctgtaggccatggacctgtgctttgtgctttgtgtccagggacagtgttcactgaagcccctggagaccctgtgtctccacagagtagaaggtgctccctgcacttccctcagtgttaggacctgagggctcatgccgattgtatgaagcaagaagagaggcaggaggagggaaaactggcgtctctctcactttctctatatcgtcttgacagtacggttgcttttcttggtgtgattctgtcttctaaaatattagaaccaggctgggcgccaccgtctgtaatcccagcactttgggaggccgaggcgggcagatcacctgaggtcaagagttcgagaccagctgggcaacacggtgaaaccccgtctctaccaaaaatacaaaatttagctgggtgtagtggcgggtgcctgtaatcctagctactcaggaggctgaggcaggagagtcacttgaacccggaaggcggaggttgcagtgagccgagatcgtgccactgcactccagcctgggtgacaaagtgagactctgtctcaaaaaaaaagaaaaaaaaaaaaaagaaatactagaacctcatcattttgtccctcagggtttgagaaatactttaagaggagtggaaggaacacaaactgagaaacatcaaca

SEQ ID NO: 84615 - DNA, 1028 bp, Homo sapiens
ttcatggtgttattttgcagctgttggagtagcactgtatttgtgaagtggacagtgtcatggcttacttgttctggaacttgtcctggaacattacaggaagaggctggtaggtccgtgggacacaaatatacgtaggaggccagattttttggaggagaggcagactctgcttagaacaggtggtttgtgttccctggttctcttgagaagggggaccacccataccagtctgtcttaacattttcttcctttctttctttcccctaataacagccagttttgggactgttaccccaaaaaagtttactattaaagctcaatatgaagccagcgaggtgaaattttagggattttagatgtatctgaagctacttctcagcaatatctccccagcctcatccttttcctgttgtctctttatttccagaaggcactggtgttattaaaattgtgtgttggaaggtgtttttctgttttctgaatcttctttctctggaaaatcatatgtaattgctttgtgaagtcttactttgttttctctcagagactggtgaactagagaatgctgagtctggaggagacggaggcaggagaggagggaagcaggataacgttgcctggtggaggcggatgcagaaggtttgtgtgcatcttagtctgcgcctgctgctgtaacaatacatcagactgggtaatttataaacagggtacatttactgctcacagttgtggaggctggaggtacaagatcatagcctggacaacatgaacgctgtctccacaaaaaatacaaaaataagccaggcgtggtggtgcgtgcctgtagtcccagttactcaggaggctcaggcgggaggattgcatgaagctgggagtcgaggctgcggtgagccgtgatcacaccactgcactccaacctgggcaacagattgtgagggcaccaatcccattcgggaaggcagagcccttgggacctaatcccctcccaggggccccatctcttaataccttcaccttagggattg

SEQ ID NO: 84616 - DNA, 1082 bp, Homo sapiens
actagcctggccaacatggtgaaaccccatctctactaaaaatacaataattagccggacatggtggcctgtgcctgtaatcgcagctactcaggaggttgaggcatgagaattgcttgaacccgggaggtggaggttacagtgagccaagatcatcccactgcacttcagcccgggtgacagagggagactgtctcaaaaaaaaaaaaaaagaaaagaaaaagagacaaaggcacaccccagcagttgttggacattttacacttccatctagaacttaaagactaatttcgtggggccaaaaccagagtcttctgctgttagttagtttcccttggagctagcctctgcacaggcctcacccatgtggagattaaggctaggagaagaggcagtgggagatgcgtgtgtgagggtggggctcagtgtgggacacggcgatgcaccctaagcttgctcttgctctctgcagaagttcttgtggtttaacattggcagcgttgataccttcgagcggaacctggagtctgctcaaggggagctggggatcgagccccacaaccaggcagtggtagtctacaccagcgagagtgatgggtgaggaggatggcgaagggcctctgtgtgaacacaaaacagaaatgcaacatttaagctgtgttggaatttgtttttcaagcttattagaggcatctgtaataagcaatgtctgtagtaaaaaatatatatatacttttatatatatatatatacttttatatatacatacttttacatatatatacttttatatatgtatacttttatatatatacttttatatatgtatacttttatatatatacttttatatatgtatacttttatatatataatatacttttatatatacacttttatatatatacttttttacatatatatatatatatatatatatatatatatacacacacacacacacccccacacacatatatgtatatatttgttttttactgttttttcatgagaattgaagcagggaaatatttggctaggcaatgttacaaaagaaaaccagtcgttgggttattgttgga

SEQ ID NO: 84617 - DNA, 1078 bp, Homo sapiens
cgaggcaagcgcccagctccttgatgacgaggtccggcacctcgtcagtgccacctacaggtgcaccctggacctgctgacacggtgccgggagcatgtggagaaggtgagtgtggcctctgcccagacaggtcgtgggtcccatgttgagtcacggtcatgccacacccgaaggccacacccgtccttcagcttgcttaggtttgggctgtgatcatgtcctcagagccgtctgacaggtgggccgttgtttccaggtgggccagcggctcctggagaaggaagtactggagaaggcagacatggtggagctgctgggcccccggcccttctcggagaagtctacctatgaggagtttgtagagggcgtgggcagcctggaggaggacacatcccttcccgaggggctgaagggttggaaccgcggacaggaggaggaagatgtggagagcagcctgtgcagggggctctgtgtagcctgtggcggtcgcctgcacctgctgctgggtggagttggggtgactgccacttacctggggccttggcaaagcagctgcggaatctcacccaaaacaaattaaaacgtgacaactgtgaatgggtgttttagatgagggtgctctgagcccacatgcagggagtaggagtgggagtgggcagagggggtaccctgagtccctgggccctcccgctggaggacagtcgggtccaggcttagacgggagaggccccagggctctggcccctgtggtgctgaggaaggcacgactgtagcttcgagaggggcttgcgtgggacaccttggagacaccaggccttcctggggcctccgtggaggagcgttgatatggtcataaagacactcggaggagcctgggtccagcacagaaaccctcaccgtttggtagaattcagaagaggagaacgtcagccaggcatcaaggggaagtcagggttctaaagcagctgtttggatcggtagaagccgatctgctgttctgtccttagaaaggaaaaagcccacaccacccacaggtgcatggctgagggaggaggtggagctgtggggcctcacacc

SEQ ID NO: 84618 - DNA, 1011 bp, Homo sapiens
gattgtggctgggtggccacacaggcctcggttactgctcactggggtcagctgacattcagctgttggcacccccagtgcagggagcgattagcaatgcctgtcactggcaaaggcaggccgacagtggtgtgtgtgctgagtgtgagcatcagcagaaaaactcagtctaaacccctttgttcttctcttgcagagcttttgcctgcaaggctgttctgaccacagtgggcgttttgggcccgtttacaggctccatgttctgtagccgtaggggcaccacgtcttcctctgctaagctgctgtttgctgctgcctttcagaaattgaggccaagtatgataagaagatgaagatgctgagggacgaactcgacttgcggagaaagactgagctccacgaagtggaggagaggaagaatggccagatccacacgctgatgcagcgccacgaggaggccttcaccgacattaagaactactacaacgacatcaccctcaacaacctggccctcatcaactccctcaaggtgctgtgcgtgggctgggctggggaggcacactctgcctgtcctagaatgtgggctgcagagtcctggggatccagaccccagctctccaccccaacacacccagtactttttataagattgtttgacaatgcccctctcatatccttaactgaaattcctaaataacgtaacctatctctacctattgttaaaagcagtcaggatattgccctcaccgtagtgcagagggggaagtaatgaagtgtgttctggtttgtaaaagctcagatggaaccgcagtgagggccgtgatgtggctggagtggataggtgtcatagtcactgcctgcgacaggtggataggtgtcatcgtcactgcatgctggcagtgacaggattttctacagtagacaacggcccttggtggaatcttgaacaaagtatagtccttcagtctgcatggaagctgcattcccagaaaactcagaataagttgaagc

SEQ ID NO: 84619 - DNA, 1027 bp, Homo sapiens
acccgaaagcacgtcctgcaccccagtgaagtcgtgggcagggggcataggcttgccgtgtttcattctttcataaaccaaaagccatcatctgtccctgacagtgcagaccacacccaacccagaccaggccatgtcccctgtatgcctgagcctggggcctttctcctgagccagcaggatggtcctggccccagaggagtccactgcctggcctttgcttttcctgttctctgtccaggatgcctggcacaccccagcctcagcttttgtgtctaaattatgcccatccttaaattccagctcgtccaggaagcccttactgagtgcccctctctccctgaatggtcccccgcacttcgcgttctctctggagggagccgatctcttcttccgtccatccacctttcattctatctggagctcctcaagcgagtgcagggactgtgagatttcgatgctggtgaccacatctctatcgatttgaggatttgtcttcgttatctggtgcctcctgtctgtctctgggcctgaaggagggagtaaatgaaaatcgatggtaaatgaataagcaagtgcaggacgccctcctccactccccagacctggattcccagccctgtctgtgcccatcagctcccgtgcctggggctgtcctcgggggcctttccatggcagcctggaagggggaccaaggaagcagcgctccccaggtaccatgtcctctccagccctctgaggtagtcctgtggctgtcaggggtggtcaggtggtagccagcaaagggccagaagcacaccccatatctcctggctccagggtccctgagggagggagggaggggcaggctctgagctgcttctggctgccagtggacccctccctaagcggacaggccctctgggcctcagagccccctttctccctttccagacccacaacctgcagggagtttccaaaccaaaggaagagcgtgtttcccccaaccctgcaccctggcccggaggtgggtttggaagagcaggct

SEQ ID NO: 84620 - DNA, 1104 bp, Homo sapiens
cttggtgtgcagcctgcaggcactttgtcctcagcaccccgactccctcatagcagcctctcctcgctggtcctaccggatgctgcgtacacctctgctgcctatgagttcacccccgacatcgctgccacggacagacattggtggggaccgtgggatgcaatgcagtggagaccgtgcaggcggggagtccctcaggaggagggggtgcaggcctggctgggacactggcctgaggggcactgtggctgcccagcctggaactgagtggcccgagattggctggagaagtggcggtcctccacctggtccctctgccacccttggacctcagaccttctcctgctgagccctcgagatctgtccatgtccctcagacagtgggagcagaagctggtggacacctgtgggtttaaaatgctgcttggagccagttgagccggagaggctgaaggcctatgggggcagctgtggcctatgccccacttcaagagctgccactgccccgtctgctccaagtcagggcatacacacacactcacatccacgcacacaaacacaaccgcattgacacacgctcacacctacacacacatcaccatgcacacacacacactgatatccacacacacactgacatccacacacacacactgacatccacatacacactcacatccacacacacacactgacatccacatccacacacacatccacacacacacccacgtacacacacactgacatccacgtgcacacacacatgctctcatccacacgcacacacacatccacatggacacacacgctcacatccacacacacagacatccacgtacacacagacacatccatgtgcacacacacatccacatggacacacacatccacacacacatccacatgtacacacacgtctacacacacttgcgcatgcacatttatgcacacacatccacatgcacacatagtgctcacatccacacacacatccacatacacacactcatatccacatgcatacacacttgctcacatgcagacacacaagctcacacacacatgcatgtacacacactagcgttacactcatgcacacag

SEQ ID NO: 84621 - DNA, 1044 bp, Homo sapiens
gtgcagtggcatgatcattgttcactgcagccttcaactcctggggtcctgcaatcttcccaccccagcttcccgggcagctgagactacagatgtgtgccaccacgcctgtctaatttttaattttttgtagagacagggtatcgctttgttgcccgggctggtctctaactagccctcaagcaatcctcccacctccgcttcccaaagcactgggattacagacgtgagccacagcacccggcctctcccttttcttataaagacactagtcctatcggattagggcctcacccttgcaccctcattttaccttaattacctcctaaagaccttctctccaaatacagtcactctgggggtcagggcttcaacataggaattttgaagggacacagttcagtccatagcacccacattctcctcgttggaattcttgttttcttaaaattggagctcccacagctagtcccatattttctgtaatttacataaaagcctctggaagcctttgtagctctccagcactggatgtcctgagccggcagggaaacgcctcagtctttgtgctcgtataaatgtctcgttataattgtctcgttactcgtataaatgtctttcttgatcgcttcgcccattgtgagccaatcctgggttggggggatccaaaaagagaggttttcagaataatcgcttccctcacgtcctgaccgtcaagatgggcagacagtattctctagtgtgacgtgcactgtggttgggactggggttcccaggactcagagcagccaggagggctgcctggaggagtgggcccctggaggctgggcaggtttctgaaaggctgagggcagagggaagggcatccggggaggggaagaccacacaggctgaggccggaagctggaaacgggctgggcaagtgctcaactgtgaggatgatgcctggggagcacagaggcgtgtgctgaaggaaaaaggaacacaggatgcaatggcagattcgacttaggaacagtggaccgaggaggagggacggggcat

SEQ ID NO: 84622 - DNA, 1049 bp, Homo sapiens
gtctcgctctgttgcccaggctgagtggaatggcgccaactcagctcactgcaaccttcacctcccaggctcaagcgactctcctgcctcagcctcctgagcagctgggattacaggtgcccaccaccacgcccagctaatttttgtatttttagtagagacggggtttcaccatgttggccaggctggtctcgaacacctgaccttgtgatccacccgcctcggcctcccaataatttgtaagttatgttagcgggatcctcaaggccttgctttgccccgtggagacgcttgctcggatgagctcaggaaacagtaccggctgcgtggcaggtctgggtgttgtgtgcgaggacgtggcctttgaacaccgctgtgttctcagaggtccttaggagatatttttttttgtcttagggggactgtgttaagttcagacaaatcatgctgggtgtgtagagagtgtgaaatacgtcagtgaagtaagtagcagtgagcgattgtgaatgtgtaatgtaaatggaaaaccgggttttaccgtgttaagttattcactagggagccagtcgtagttctttgtaatcctctttcttccaaacctgctttgctgaaagttgcagaaaaggaagtgtgtggagagaaacagaacccttcagggtgggtcagaggacgccatccacagtggattcgtgttcgtttgcaggtggaagcagtgatttttaggacccactgattaaaaacaaacattcccaagtgtctctgagagatgctgtttatttgttaattaaaaagcttttttctctgtcttttaaattatggctttcatgtaataaggatatttttagtgaaaaattgttttcctttcaaattacagaccttttaaaaaaacttaatttgagcgagtaccttttcatttgacacttttcctgtttctaaccttaggaaaccagaatagcgtttggcagacacgacgttttcagtttacctttgacacctgccccactccattttgctttgtgatgtcttcatttaacaataaattatctgaa

SEQ ID NO: 84623 - DNA, 1047 bp, Homo sapiens
accactgcactctagcctgggtgacagagcgagactccatctcaaaaaaaaaaaaaaaaaaagaggaaacggaggctcggaagagtgaagtaacttggctgaggtcttaagcttgtgcgagtgggagcaggatccagggctgctgcccgcagtggctaacagtgatgtggggccagctttggaagcctgcacccctgtatttaaatcccagctccagtactcagtggcgctgtgaccttcacctctgcacctcggtttcttctctcagggtcgttggggagattaaattggatcccgtaagtaaagtacttagacgacgggtacctggcacatagtaagtactttatagactctgtgaccctatgctgcttctcactggggcggccacgtttctacatgtgcaccccacaaatgactcacggtcacagtggggaccccaagcccccggctcagaggagcggcttcacgcggcctcttatgtctcccgcccaggtacacctccttggtcaagtacgactccgagaggcacttcatcgacgacgtgcagctgcccctgggcctggcggtggcctcctgcagccagacggtcacctgtgtccccaatggcacgtggcgcaactacaaggccgaggtgcgcttcgagccacgccacaggcccacccgcttcctcagtaccaccatcgtgtaccccaagtaccccaaggccgtctacaccaccaccctggattacaactgccgcaagacgctgaggaggtttctgtccagcgtggagctcgaagccgcggagctcccgggcagcgacgacctctctgatgaatgctgacccagcaggctgggctggggtcggaccggctctcccgctgtcctgcccccgactgccctggccaagctgggcgaccttacccttcacgtcattccagccccagaggagtctaacctagagatacctccaagcgcggccgggggaagagaaaaaaaagaaaaaatcactgcatctcataattattgagatctttgtgttgtaattttcaagctgtttttagaggg

SEQ ID NO: 84624 - DNA, 1047 bp, Homo sapiens
cagcatgggggacacagatcccagttgggcccatcagctggaggctcagacccacagccttctgtgggcaatgcttagaaatggcccgtgggggccgggtgcggtggctcacgcctgtaatcccagcactttgggaggccgaggtgggcggatcatctgaggtcaggagttcgagaccagcctggccaacatgacgaaaccccgtctctactaaaaatacaaaaaaaaaaaaaaattggccaagcgtggtggcacatgcctgtaattccagctactcaggaggctgaggcaggcgaattgcttgaacctgggaggcagaggttgcagtgagctgagattgtacgattgcactccagcctgggtaacagagcgagactctgtctcacaaaaataaaaaataaaaaaaaataaaaaataaaagaaatggcccgtaagagctctaactgcattcttctctgtccttgaagagtccagcgtctctccccctggctcccggctgtgcgctgaggctttgtcccctgtcctttggcgaaggagtggagtttgaccccttaccaccaaaggaagtaaggtaaatatagcaggccccaattttattctttttttttttttaacaatttttattttttattccagatattaatgcttgttgttataaaaaattagttaattgcaaaagtatgacagagatgattaatagtttggtgggtcctctttctgttcctgcattctaaccaattaaatatatagacatgcttttaaaattaaaataaaaatgagatcatgttatgtataaagttctgcattttctttttgcaattcatgtatcatggctgtcagagggttacaattttgtcaaatattaattcttctttccagaagctgctgtaccctactcccttacctgccaacccagtctctgaggtcttttaaccttgtctcatagtataatttcactaggcaagcgctggtcttcctctggggattatctcatccaggattatctgggggcaaagatgcattgaaaggctcaggtaaagagaggtc

SEQ ID NO: 84625 - DNA, 1061 bp, Homo sapiens
catgcccggctaattttttttttgtatttttagtagagacggggtttcaacgtgttaggatggtcttgatctcctgaccttgtgatccgcctgccttggcctcccaaagtgctgggattacaggcatgagccactgtgcctggcccacaccacgctaatttttgtatttttagtagagacggggttttgccatgttggccaggctggtctcgaactcctggcctcaagtgatccgccgcctgggcctcccaaagtgttgggattacaggcatgagccaccgcacccggcccacacccggctaatttttgtatttttagtagagacggggttttgccatgttggccaggctggtctcgaactcctgtcctcaagtgatctgcccgcctcggcctcccacagtgctgggattacaggcttgagccaccacactctgcccgtaccctctcttttcctaagatttttttaaacctttgattctggaagttctaagaaaaaactaaatcggaggagaaagaaaccattataacacatttcacagtttctctttgtttaggcatctgtctcttgggcacatttaggttcgtgatgtctaaatatgtgctgacatcataacctttttgtttttaggaagtagagtgcttaaaggcttgaagcttagagccaggctgcttagtttttaatcgtggctctcctgttttcttgctgtattactctggacaaggtactcaacttttctgtacttaactctttgaaaatgaggatagtaataatacatactatgtaagtttattgtaaaaagtaaatgagctgggcgcagtgagtggctcacacctgtaatcccagcactttgggaggccaaggtgggtggatcacctgaggtcaggatgtcgagaccagcctgggcaacatggtgaaaccctgtctctactgaaaataaaagttagctgggcatggtggcgtgtgcctgtagtcccagctacatgggaggctgacgcaggagaattgcttgaaccctgaagatggaggttgcagtgggccaagatcatgccgctgcactcca

SEQ ID NO: 84626 - DNA, 1030 bp, Homo sapiens
aggatgcttgaatgacattcttgccaagcacttgttttgagccattcttcaccctctctggctgggccctacttcctggtgatttgtcttttacatttagggagctataggaccacagaggaacaaatggccctgttgcatctgaggaccagggtagcctgtgaacctgggtctgtcccaggacctctccaaggaaaaatcccccaaaggccaaaagtggtaagggaacgagggcagggaaggcccttctggacaagctgaggcagctgaacagggtaaccacgtagagaccatgaaaaactgacaggagcttactcaagtttgcaaagacaatgctttattgtaaaacacaggtacaggactgtcagaatggcagttggccaactgtcagacaccttctgtcccgggaggactgggctgggggtactggtttctcagggcagcacagcccctttctgcctgaactcactcggccagggccaagctcctggcctggagcccagtgtctcctggccgaggtggtgctctgtggtggtggtcaggggtcagctaggaacacttgagcctttttccccagctccttcctttttggttttcatatttgaaatgttttggcagaactggtctttaaatcatcccctcttcattgttcagttgttgctctcctctcctctcaagtttgcagagtttcaggttctaaatccttagccagaaaagcctgatgaacaccatgagttctttctttccctctctatttagtcagctctcctctccacagacttctctaaatccttcagcttctttaattcaacttcgtcctcctaccctattctttgtgccaggtatcacgacctggcagttattctgcattccaaatcctgaaaatggctgtctgatatccttcaagggttttcccttaaagataagtttctaggaaggcaacagaagccctatggccactttacccaggtgggacgggccttgaggaatcggttcactgcagctctgctgtgaggagacgtgaaggctg

SEQ ID NO: 84627 - DNA, 1093 bp, Homo sapiens
tgtctggtgcagacgttcccccactttaccccttcccatgtcttccaaagctgcctgtggtagatagttacagttgtatatatggacaactctcagttgtccccatttgtgagagaaactgttctaggtatctatttctttgtaacaaaccagcacaaaacttagtagcttaaaacaataattgttttgcacgtataatttggcctggctcggggaccagctcatccctgctccgtgcagcattagccgaggcagctcaggaggggactggagaatgcattggctcactctcatggctggctccttggtgcttgctgtcagctgggagcttggccaggccgttgctgggattctttgttgtcttccacgggctgcttggacttcctcacggtaaggtggctggttccaagaatgagcgtcccaagagaaccaagccttggaaatttcatagcatcacttctgccatagtcacaaggctgctaagattcaagaggaaggaacatagtcttctcccacccactaacgggaggaatgtcaaagtcacattgttacaaaaagcatgtgggatgggatagattgctgtggcggtctttagaaaatacagtgagccacggccgggtatggtggctcacacctgtaatcccagcactttgggaggccgaggcgggtggatcacccgaggtcaggagttcgaggccagcctggccaacatggcgaaaccccgtctctactaaaaatacaaaaattatctggacatggtggcaggtgcctgtaatcccagctactcgggaagctgaggcaggagtcacttgaacctgggaagtggaggttgcagtgagctgagatcctgccattgtactctagcctgggcgacagggtgagactcaaaaaaaaaaaaaaatacagtgaaccacaaaaactttagatacgataaaaagatgactttccccccaaccttattctttccttcttattgctgttgagttttaatcccagattcagatccagtggaaaggaaagtaatttctcagagcgaaggaggatgaggattccaagggaggacgaggaggagttgatgcaccaccttttctgt

SEQ ID NO: 84628 - DNA, 1039 bp, Homo sapiens
ttccattaccttggatttgctgagatttttgattgtagacattgttcttccattaccttggatttgctgagattttttattttagacactattcttccattaccttggatttgctgagatttttggcagccgtattacatggttggcttctactgagttggcagtcacctgaaacccccaggtcaagagtcgcaaacagatgtccgcagagctgggaaagtaacctaagcggcgtaagcaggctggtgtgtgtccacatgcatccaccaggtcctaaggggatagtcacaagtgaattctaatcagctgttgtcacgtctgaacgcagacctggaattgccagatctatcagtttttcaagagcagccggaaatccggattttcatgtaactctcacaatttttaactattggcttagtgtttttcacaaacactgcaaagggcaaacaaaacacatctgtgggccagtactgtcccaggtctttcttcatatgactttcatttaaactttctccacctctgtttgtgcaagagagtctttgaaattgtcagaccgtgtgtgtctcagctttcgtttcatcccactagttctgctcgattgtttatcccatcaagatctttgggagccttgatgacctccccactttatcattagcagatttgccagacatgccttctgtgtcttcattcaagttgtagatgaaaaggcagaatggagtggattcagagccgtgtgacgtgccgtcagaggcttcctgttcttcctcctcacttcagcgcaaagtgccagacccaaaaaacaggatttctacctgtctgtgtgtgtcgtccggggctgtttcttcatcttcccatgtcttgattttcaccaaaaaaggaggctgttaatacttgccttcttcacttttacatagagatatcataaagattatgaactaaagcagcaaagtacattgccttccaaggagaaagtgttccttgcttttcttcctcaaaattagcatattatgcaattcaagcattagaacgaaaataggcc

SEQ ID NO: 84629 - DNA, 1047 bp, Homo sapiens
agtcttacagtgcaggagtcatagatgtttaaaatttcaagaatgtgaaaatagtgagtgattcatcggcattttttgttgggtcatgctgtgcataatagatgtgtatctttcagttatttacgtttcaacctgtggttctggactcttgcaaactagcggtattacagagtcagacccagaattcgacagtctgcaggaatgtcggcgttctcccccatcccgtattaataggttacaggttgccgcagcagagcaggtcgtatttcacagagcaagaccacattttcaagaatgtttagatagcatttcaatctgtgatggaactttgtattcgtctccttagaatccagacagaaaggaagcccagaagaaataactgcttttcctgtcatggccccatctgtcttttccagcactttgtaatgcaaactgaagtacaagcttttttttttccaaggagctcttgggtcctgtccttgtcaactcctaggtatgaaagccttgctctccagccctggctggctggtttgctaaaaggagtctatttgactgcaacagacttggtggaattacggatgttccaaaatactgagttttgtaggtcaagaggccccacgttcccctcttccctggaagagaagagaagtttgctttcagcactcgcttcctaagcttctgaagaacactcagaagggagtggcatatggacaaaaggaggttttcgttttataaatttaatcttgattgtgtttaaccagaaccgatgtgccgcttttaaatttgtatttattattatcatgttagggacagggtcctgccttgttgctcaggctggagtgcaatcatttttcacggtaaccttgaactcctggggccaagtgatcctcccaccttagcctccgaagtagctaggactacaggcatgtgccaccacacacagctatttttaatttttaattttttatttttggtagagatgggttcttgctgtgttgcccgggctggtcttgaactcctggcctgaagtgatcctcctgccttggg

SEQ ID NO: 84630 - DNA, 1045 bp, Homo sapiens
agaggagctggaagccgtagatctgcctcaggcatggattgcatgatcagggcccggaagcactgattccatctatcactctggctctttccgcctcataaggggaccgagaaagggattgtgtgtgaggtaatttgagttatctggcatgttcacgtaaaggctccggaactttgtcattcctgatgtactccatgaaaaatcctgcagattttattagtcctttcagatagctctgactattaagtgaaaataggcatttttaacaacaaggcgatgcatcagcctgcactgggcttgacttcccgcacggctgtcgctgccctcctcctgcctgatgccactcacacatgtttggttttctggacaattaggtgcagtctgcagaagttgatgaataaattactttttactttttttcttttggtcaacctagaataaagattatttgaatgactgtatccttgaactgttttgctaggagactggatgacaatattcgaactgttgtaagaggtcagacgaacgtggggcaggatggacggcaagtaagtaactcattcctccatattacctatgctcccctggtttctcccggcaaccagatgaccaaaacgtcgatgtgccctcttgcagagcactttccgattgatccgtttcatacatggcaggacaagacagggcaggcgcccacagcagccacgtgctgtccctcagtgtcccttggaccaggaccgtgaactgtggcaccgctcacccgaggccagatgagaacactggggcttccttgtctttctccttcgtgtcgggcatctcttgtgccctcttttattttgtgggctgtggctaaatgaggttgctgcattcgtcagctgagttgttggggttttgatattttgtggctgtaaaagatagtaacctgacatagttaccatttcctcgtacctcgctttgccagcaggcaggtgactcaagattcattaaaaaattttacaagttggccgggcacagcgggcacagcggctcacgcctgtaatcccagcta

SEQ ID NO: 84631 - DNA, 1026 bp, Homo sapiens
acttgagttcaggagtttgaaatcagcctggccaacatggcaaaaccccatctctactaaaaatacaaacattagccgggcgtggtggtgggcacctgcaatcccagctactcaggaggctgaggcaggagaatcgcttgaacccgggaggcggaggttgcagtgagctgagatcacaccactgcactccagctggggcggcagagtgagactgtctcagaaaaaaaaaaaaaaaaagacacccagctcaacccagctgctggtctgctgtcctggaaggccatacctgtgcgactggcacaaggacaaagagaatgaccgcatgatgtgtgatcatgaggcggtttcgacttaggaagtttcgaagagtgagggagggcgcacggttctggtctctggttcggcaccattcacagaggtacatggcgtacgagtcatagatcatgtatggaatcagaaaccacacatattcccgggcaagccagtgcctgaaagaaagcatatgaatggcccgtgaaatcattgtggatatccattatgaaggctcacagccaagcttggtgcttgatcagctattattattccaaatactttacaataaagatgttgaaactgataaacagggagagtagaccacttgctctcagtttcagggccaattcgtgagtgtcaaaggcaaaaagcaggcattcactcagccctgcctgttgaagcagcttgctgtcactacttgcctgacttagctactaatttgtagtagatgttctggcattttgtgataaaactgattttgatatagatagatatacaaatgattcaacggccccaccaagaagctggtttggaaagtgtcccaaatcacaaatccaacatttctagtttaactccttagctgctcaacagttgggggttttactaacttaaatcctggaacctgtgagttttctcttgtctgcatgcaaccccactctatggagtttctgggaggcaaccctggccattttctttacaattctagagctggcc

SEQ ID NO: 84632 - DNA, 1105 bp, Homo sapiens
aggttgcagtgagctgagatcacgccattgctctccagcctgggcaacaagaacaaaactccgtctcaaaaaataaaaataaaataaataaataagggtaacgtgcattaaattctttaagaagtgtctgggacctaccatctaggaaccagaacatctagggtgctttgagaccctaacatctagcacagggcctggcacattttgttgaaccaaacaggctgagtgtcttggcatgactaagttcgatacacaaaagtaggcttgcagccttccttccggctgtcatcaaaattcagagcttggtgtgggacgccgtcatcctgtctgaatttgcctctggatcctagggcttggaccatcaaagtgctgttgccacggaagcagcggtacagtagtctgcgcttgcctattgagcgtcctttgcccgtcacagttacccttttcagtagccctcgttggaattttccttctggtggtttcttaacctccacttacttccccttttcgtttcgtcatccgcagaggctccggggagaccttggggacttctttgtcggctgcatcttcacggcagaactgagcactccgtttgtgtcgctgggcagggttctgattcaggcatgtatgaatgaaatgacagagagtgtgagggttctgattcaggcatgtatgaatgaaatgacagagagagtgagggttctgattcaggcatgtatgaatgaatggcagagagagtgaaggttctgattcaggcatgtatgaatgaatggcagagagagtgagggttctgattcaggcatgcatgaatgaaatggcagaaagagtgtgggagggagtggattctgcttttccttcggagatggtgggtgtggagaaatccctagtgccaggagagtgggatgagagatccttcaacagccttaaaggtcagctggtcatctcagccagtgggggtgaaattgtaggtttgatctaagtttgatagtttgatacagctcattctattttttccctggttacacacatactttaatccacggttcctgtactcctgtcagctgggtggcctgggtcaaattcaaaatcactattggagaaaatg

SEQ ID NO: 84633 - DNA, 1086 bp, Homo sapiens
cccacgccaagtcagaagctgctcatcttctgcaacagggtttggcgccgttcttcagggccgatgccctcagcaatggactttaagaagcgctgctcgtgtgccctctggagcaaggagctgacagaagggttggtcttgctcaaagtctcatagcaggtgagggtttccaaggctaaaacgtagagtggctcacagacctccgggtggagcatggccatgatgtgcagagcatggcagaacacctgggtgtaaacaaacagggcttcctgggtcaggtcctgctctggtccttgaacccaagggccagctgcctgtatcgccctgactgagtccaggaggcgggtcagactgccacagaggagtttgaccacgtggttccagccttccagaggaagccaatcacgacagctatggctgcagagaaactggaaagtcctcaggaagaggacggagagttgcaactcctgggcaaagggcttcaggttgagcaggggaacaaactgaatatattccaggctataagggacatggaggagctgcttctccagcagtctcctggtcagctggtgaaggcgctgccactcctgagggctgcaccaaggcatgacttgcaccagggccaccagaaagcctttgctgaacagtctgacctcctcaggattgcccacgtccaccaccaagagagacagcatcctctccgagatgccgctggagacgcagcagcactccatccaggccaggagccccgtgccagccccgtaccctgggtgggcctgggaggtccactcgtcttctgaaagcttacagatctcaaaaagtgtggctggcacttcacacttgaagtgcccctcgaagaagctcttcagcctcaggcccacagtccagtctagctgttctaacttgcggtggagccaggacagggacttgatccagacatccggggagaaggtctcagcattggctgatacaatctcacacaggagctccaggatatggatcgctagatccttcctatccaaagagaggcaccgcttctccttgggaagctgccagtatttgctgaagcggtccaagagctggcac

SEQ ID NO: 84634 - DNA, 1147 bp, Homo sapiens
gggcagatacctctcagaatcacatttcccagcttacttccctcctgaacttccacctggcatttccgttgctggaggacatctgtaccttgatggccaaagctgaactcatctttcctcacacctgctctgattctcctccattccctgtatgtgatgtcacctggtggcctcccagttcccaggctggagagctcggaagccattctggattcctcggccaagtccttctgactccagctgtgcagtggctcttgtagtcatcccttctccccgtccgctgatgtcctttaaaacccttgtcatctcaaaccatgacagcctactaacagcagtggccatctggaaacattttcactatactgtcttatttggcttgtctgtgtgcaggacccttgaacatctgtgaagaaatgactattctgcatggaggcttcttgctggccgagcagctgttccaccctaaggcactggcagaattaacaaagtctgactgggaacgtgttggacggcccatcgtggaggccttaagggagatctcctcggctgcagcacactcccagccctttgcctggaagaagaaagccctgatcatcatctgggccaaggttctgcagccgcaccccgtgaccccgtccgacacagagacacggtggcaggaagacctgttcttctcggtgggcaacatgatccccaccatcaaccacaccatcctcttcgagctgctcaaatccctggaagcttctggactctttatccagctcctgatggccctgcccaccaccatctgccatgcagaactagagcgctttctggaacatgtgaccgttgacacttctgccgaagacgtggccttcttcctggacgtctggtgggaggtgatgaagcacaagggtcacccgcaggaccccctgctctcccagtttagtgcaatggcccataagtacctgcctgccttagatgagttcccccatcctccaaagaggcttaggtcagacccagacgcgtgccccaccatgcccctgttggccatgctgctccgcgggctgacacagatccagagtcggatcctgggcccggggaggaagtgctgtgcgctggccaacctggctgacatgctgactgtgtttgcgctgacagaggacga

SEQ ID NO: 84635 - DNA, 1055 bp, Homo sapiens
gcgcttggcgcgctcgttcgtgaggactgcgcgtgcgcggcggaggctgtgggcggggccgggcggaggttgtgagcaggcctaagcgcggccgccgtggctcctgcgtctcccatcgtgccgtgcgtcccgcgccgcgttcgagttctcggaggggagggggcgttagccccgcgcagccgccggcgtcgccgccatggacctaggtgggtgccgcggctccccggccccgggctgcgtccagcaatgcgccaccagagcggtgctgccccgtcgcgtctcctcctgtcgcgcacgctcgcgcgggcccggaccgaaacgtcccccgcgtcggggcgggtctaggggtcccggggtggccttggcggggggtggtccgggtcccgccgcgcgttgggccgcgtcttgccgcctccggccccctgcgcttgaaaacacggagcagacgtgaagttagagcccttggaagcgcccggggctcgcgcacgtgctttgggaaacgggctccctccgagcacccctgggcgccccgacggcctcatttcctgaacggcagctgcgttcttgagcaagtgtcttaacgctccaagtgtcttacgctcatgacgtttcctcatcgacagagcggggagaatggaagtgtgtctccccactgagttttgggcgactttgcattgagatcgccgaggtacagtgtcccttgtggggttgcgcgggtcacacccgcggtgggggcggctgcgctcctgaggtatcactttgtgaacctgcgtgcgtccggattcagaatcttacaggcaaggtctgggagggagcccataggaactagatgctccctgctaaatcttggcacacgctgctaagaccaggaggctgttctgggagagctgggggtgaggcaccccgagatgtgtcagcagtagtaggctggggggaaatggtctggtccccgcccccagacagcttttcaggagcggaatggcagagctctaagggcttggagcccctcagccgtaattgcttcccagccccaccacattcaggctgggacaccc

SEQ ID NO: 84636 - DNA, 1014 bp, Homo sapiens
aacgcttgataccagatcgtttgagctttctgactagctagttcaacccagctaagaactttgtccttcccttcttgaggtcctttttgattgtggctttagtatcaagttcagcagttgtttcaagagcagctgagataataaattcaaacaaatggcgccttggttctttatggtatctgatactcctctaggactgacgagggccgtgtcctgagtagtgtgtgacccctggctcacgttgcctctgttttcctcaagttgccagacttagaagacttgatgaaaagggagaaccagaagattctgactcccctggtgagcctggacaccccagggaaagcaacagtacaggtggtcattctggccgaccctgtaagtatttctcaggcagggggcaggctggaccaggggtttcttcaaggatgtctttggcaggtgtcttttctctttattggtgtaggacggacatgaaatttgctttgtcggggatgaagcatttcgagaactttctaagatggatccagagggaagcaaattgttggatgatgtgagtcccatttctacatttatgtcaccatgggcctgagagggatggcattaagtgtgtgtgggaggagactaagcaacagggtccaggttcttaatgtcagaaccacgtcctttcgctgttgggttgacctcagccaaggaccgatgtcttcactgccacctgtgtagactgcttgtctagacttagcatttgtgccttaccacaacctcaggctgccctggaaccactgctggtggatctgtgcttattctgctctccacatggagatgcctctatccgaccccctcagctctccccatggagatgcctccatccgaccccctcagctctccccatggagatgcctccatccgaccccctcagctctctgcatggagatgcctccatctgaccccctcagctctccccatggagatgcctctatccgttcccctcagctctcgccagggagatgcctccat

SEQ ID NO: 84637 - DNA, 1036 bp, Homo sapiens
tcaggatttccgatgaccaactacaagtcagggctcccgctcctgcttccttgggtttgatagtctgctacagtggctcatggaactaagggaaacgctggaaacacttacttacatttactggtttatcataaagagtacgagtcagaaatggctggacagaggagatacacagggcagggcatggggagtgggtggcagagcttccatgctcttctgggcaggctccaatccagcacctccctacgttcagcatcccagaagctcatgagtctcattgttcaagcctaatagagcccagtctccatccctttccttcccagaggttggtggatgggactgaaagttcagtcctctaatcatttgtctttctggtgaccagccccatcctgagtctatgtagaggccccactctaagtcacttcattagcataaactcaggtgtgactgaaaggggctcattatgaatataacaaaagatattcctatcaggaaattccagaggttttgggagctctgagacaggaaccagggacaatgaccagatatgtttcatattatgccacaaatgcaaataagtacatgctctagatgaagcagcggctttccagtatctttttttttttgagacagaatctcactttgtcacccaggtgggagtgcggggtcattatcctggctcactgcaacctctgtcttctgagttcaagcaattctcctccctcagcctccctagtacgtgggactatgggcatgtgccaccatgcccagctaatttttgtatttttagtagagacggggtttcaccatgttggccaggctggtctcgaactcctgacctcaggtgatcctcccgcctcggcctcccaaagtgctgggattacaggcctgagccaccacgcccgtccatctcttaagcttagtaccgtgacaagttggaacagtccaaggcctattaggaatttcatgcttgttgattgatagtcaaggaaataacaggtcagttggagaactgtctttaggattctgttccttg

SEQ ID NO: 84638 - DNA, 1104 bp, Homo sapiens
cttgctgcagccgtcggctcctccctccccagccttgttccctgttcccttcctgcatttcttttttttttttttaaagacaagagtttcacttttgtcacccaggctggagtgcagtggcacgatctgactcactgcaacctccgcctcccacattcaagcaagtctcctgtctcagcctcccaagtagctgggactacaggcacacgccaccacgccgggctaatgtttgtatttttagtagagacagggtgtcgccatgtttgccaggctgatctcaaactcctgacctcgtgatccgcccgccttggcctcccaaagtgctgggattacaggcgtgagccaccgcacgcggcccccttcgtgccttttgaggaagcagcagccttggtcatggcccataagaactcagacttcaactgaaaaaagtggctcttccctacacaacagtccaggaagctggatattgggagtgtggtgagacgagaactgacccatccataagctattctggattctctgtcactctcagccgtggagcatcaagcaggcttcctgaagcttcgggaggacctggcttcagctgctgtctcagctgctcgaatgtaacatggttccgtagttgagacttcagtcatcctgagcaataaaccagctcatccactaacttggctcctagcttattacatgtgtgcactccctgcactgatgaaaacaggaaacatggcgggcgcaggggctcacgcctggcatcccagcactttcgaggctgaagcaggaggatagcttgaggccgggagttcaagactagcctaggcaacgtggcaaaaccccatctaaaaaaaaaaaaagaaaacagaggaaacacaatcatggaatttttaaggtggcaacatgttttcttaaaaacaggtgagcctgtcagctctgctcctgagggagaggtagcttggtcaagagggcagccccaggccctgcagtacagctggtgattttcagcccagagccctggaaccttggatggggagtgtgtgtgagggctgtgcgtggtagaatggcaaaagtggggctaagtgtggcccagcgtggctggtgcggacatct

SEQ ID NO: 84639 - DNA, 1003 bp, Homo sapiens
gtctgtggaagagaggcaggcacgggggacggggagggaggagaagccaacctgaaggcaaagctgcccatttcccggctcagcgcctggggctctccgagggcctcctccaagcggcctttttcctgactgtggctgcagcctcttttgagtccgtgcctgcggggcccaggacagcatggcgaggacacggagcccccacctggcttctgaggagcactcaggggcttccccgaggaacggctcctcctaagacgaggtgtgccgggacgggccgtgttgggccgcgtgactgtctgcataagcagaaaccaacttgggcccaaggaagccactcgtgttcggcccctgcacgggggaaagcacccatgtctgctgtgccaggctgcctcccctcagctggtcctgacgagcttggcctacagccatgacgagtgcacatccctccaaaggtgaaccaggggcgggaaacggaactggcttctgcggccgtctgccctgtgctaggcacggcacagatggcactggctaatccttatcacagatggggcgggcagcatcaggatccccctaacagatggtcaaggtgacccccaggtcacccagccaggcagtggttacagtagggatgggggtcacccagccaggcagtggttacactggggacaggaccctgatccacctgttgcagaagctgctgctcttcctgccaggccgtggacgcttctggggtcctcacagcacctgcgatggggactgtcttaaccagggcggggaagtcctgtacctgcagctttctgcaccacccacctccctctgctcctgggggagaaggctgagaccacagccaccatttccctttctcccccttcacacacgccctgttcccccagcccttgaagcaggttctctgaaatacacattttttttttttttttagacgcagtctccctctgctgcccaggctggagtgcagtggcgcgatctcggctcactgcaagct

SEQ ID NO: 84640 - DNA, 1071 bp, Homo sapiens
ggggagctgaggaaaacctcttcttgctgtaaatactgggggatgtcccaattcaggcctggattgtttgagattaggacgtattttctgatttgctcagctttttagattgtggtgaagagacagggaagggggaggaagggggaggatggaaaagagccagagacgaatgtaatcagacacctgtcttggatggctgttttttgttttttgggttttttttgagacggagtctcgctctgtcgcccaggctggggtgcagtggtgcgatcttggctcactgcaagctccacctcccgggttcacgccattctcctgcctcagcctctcgaatagctgggactacaggcgcccaccagcatgcctggctaattttttgtattagccatggggtttcaccatgttagccaggatggtctcgatctcctgaccccgtgatcctcctgccttggcctcccaaaatgctgggattacaggcatgagccaccgcgcccggccggatggctgttatctcagctctggccctttgctgtgtctggtgctatttgaatgtacacggatacacgcggataaggaatcacaaaacaggcattcttcccggagtcagtcagctcctctgagcctcagtttcctctgcttattgccctctctaaggcctcacttatcagtgaatttccttcacctcaaaactcccgccccagtttagactgagtcaccagtggcctctgccgcttatgttcctgttcccaaaaggatccgagatgccggcacacacagggcactttgtacattgttgtatctgcggtgtccacaccatcctgggcttggcttattggcccgcagtcctgctctgccatgccacagctcccgcctctgccgtgccacagctcccgtctctgccatgccacagctccccgtctctgccgtgccgcagctccccgtctctgccatgccacagctcccgtctctgccatgccacagctcccgtctcagcgtgaagccgtgccaggtgcagcagtcagtttttttttttgtttttttttttttttttaggtggagtctcgctctgtt

SEQ ID NO: 84641 - DNA, 1062 bp, Homo sapiens
ctgagtcccctatgctgttgcagactatgggggccagtggggtcatcagcctccacctccaagtcccccacactgtcgcagaccccggggggcagtgggaccatcacctccctcctcggagccccccgcactgtcacagaccccggggggcagtgggattgtagttaacgtgcccctttgcccagcagccctgcttggcatccattattcttttctgtgtgcttgaatgcttgcctgttcatccagcctccagacctaaggggctcaaaagaactctgcaatgaatctggtttggacttaaccaccttcttttgcttttcttcatacagctcaaactttggaacaaataccgaatttccaacattccatcactaatattcctcgacgccaccactgggaaggttgtgtgcaggaacgggctgctggtgatccgagatgacccagaaggtaaaacctcagcccgtgcatatggtcctcttattacccagccctccctcctccatgcccttaggctaatctccgtcccaccggtggagagagtactggtgaaatagatacacgtgggtttacgtggtagagaatgtcgtcttggtgaaatcatagtattccctaggacatggttttaagattttcacagggatcagaatgtccctcctaggggctttaattcatgggccaaaagagatggactctgccgtaagaagctccgcttggagggccgcagaggctgtgggaaagcggagagctcagaccccggcctctagtgctgcatccgtggcggctgcccccttcacagttagaggcaggctgagtggggtttttcctctttaaaacattacatagcgaagtcccagcccccgtgtcactctcctggccttggcggtgagtgcacctcgttgcttggagctgtcactccctgcgggccttggtcttgctggctacgcgtgggctgtgctcctccagccgccccgctcagggccgtccgcgtggcgtctttccctctggcagtgagtgagaacagggctgtgagatctcctcccctcacttaatccgtccagtgag

SEQ ID NO: 84642 - DNA, 1069 bp, Homo sapiens
cggaggttgcagtgagctgagatcaggtcactgccctccaacctaggcaacagagcaagactatgtcttaaataataataataataataataaattttttaaagttaaaagtatataacataatatacaaagagaaggctcactttcactgccgggagtgagcgttttccttagcttctgactcaccctttccaacttccttactgcagaagtaacccacacctctctgccctgggccctttgcttgatgcttacaaaggaagggtctgagatgctggttctcaggatcggctatgaccagaggagacacattagaacagattggagttcctgctcttccctctgttaatttgctcggttttgcctgttgtttagtcacctatgaaaagtcagagtaccccgtggaggacagggaaggggtgtctggaacggcctgagggccaggcctttcagagagaaggaagcagcctgagtttggtttggatggtccattgaatcgcgtttgatgggagtggagctgactgtggtgtccccagagcagatctgggatccgtgaaacaggtcgtgacagagcagatcagttgtttctctggcaggcccgtccgtgcagctgttgttttgtatttgagtagtttgcgtttccctttccttttcatacaagattatctggtcctaatcccctccctcctgcataagggttgctgggaaccatttttttttcttttgaataaacgtcttggggaagtcaacttttcacatttgttgttgttctttacttgacattaaggagcttttataagcaattaaaactaggagaaaacccaaaccaaaaatttcccctaaactccccgtgacctcagtcggaatcgctccagtattcctggtcttaactcctttggtgaatttagagagcgactctttattccacttccaaacgaccgctttgaactatcggtcagcgtggataaacacatctcagggagggggcccatgaaatatggttgtgggctcagactgagaaggcctcattttcaaactagagctggacgggaaactgcatctgaaagta

SEQ ID NO: 84643 - DNA, 1130 bp, Homo sapiens
ggcggctcacgcctgtaatcccagcactgtgggaggccgaggtgggcggatcacctgagttcaggagttcaagaccagcctggccaacatggtgaaaccccgtctctactaaaaacagaaaaattagccgagcatagtggcacttgtttgtaaccccagctactcaggaggccgagccacacaaatcacttgaacccaggaggcggaggttgcagtgagccgagatggtgccactgcattccagcgcaggcgacagagtgaaactgtgtctcaaaaaaaagaaagagctgagaaatttaaatgtgttttaaaatcttgagttgatactgatatgttgcactcagaaccagctgcccagggcccttccttacttccccagtccgtatctgtgttcctctcatcccactgtgataaccttgtttacagatttgcaacatccgtaatcatggccagcagtgatcctaacaagtcaagttcaaactttcttttcagttctttttgtccttagatcacatccaagaaaggaggaatagtcagagagctagatccaaaagtcacttaaattatttgcctttttgtctagataggtaatagttactattagagttagggtcacatgtttctgctcatattaaactttaggatttgctgtttgctcctacttttgacttgattttattcttttagtaaaagtaaaatgtttacgaggttcaaaagtcaaaactatgcaggccgggcgcggcggctcacgcctgtcatcccagcactttgggaggccaaggtgggtggatcacctgaggtcaggagttcaagaccagcctggccaggatggcgaaaccctgtctctatggaaaatacaaaaattagccgggcgcggtggctcacgcctgtcatcccagcactttgggaggccaaggtgggtggatcacctgaggtcaggagttcaagaccagcctggccaggatggcgaaaccctgtctctatggaaaatacaaaaattagccgggcgcggtggctcacgcctgtcatcccagcactttgggaggccaaggtgggtggatcacctgaggtcaggagttcaagaccagcctggccaggatggcgaaaccctgtctctatggaaaatacaa

SEQ ID NO: 84644 - DNA, 1008 bp, Homo sapiens
cactggttgtgtaatgtttagctttataagtgtttgtaatttcagattttgcaatgttttatgagattaaaagtgaaaaacaaaacccaagatgtttcttgtttaatcttcattattctgtcacttaaaagaagattttgagatgtgttcctctcgtttgactaggacagactgctggcagggagtgtttttttttttttttttttttttttttttgagacgaagtctcactctgtcgcccaggctggagtgcagtggtgtgatctcgactcactgcgacctctgcctcccaggttcaagcacttctcctgcccccgagtagctgaggctacagacaagtgccaccacacccggctaatttgttttgtagttttagtagagacgggggtttcaccatgttggccaggctggtctcaaactcctgacctcgtgatctgcctgcctcggcctcccaaagtgctgggattacaggtgtgagccaccgcacccagccgggagtgtattattaaaagtgctagtcgtggttttcagtgtttaaaacatgaggcaaaggtttcatggatcctacacctaatggcacctgtagtcttgaatttttggtctgaagacagttgttggtgctcatgggatggaaggagctttgtgataaccctgaagcgctctccagggggcctttggtacatgtttgggatccactgccgtggactatttggtttaaccataatggcttcggtccaaaaaagtagaacatgggttttttgttttgttttgtttcctttgagacagagtctcgttctgttgcccaggctggagtgcaacggcacaatctcagttcactgcaacatccacctcccaggttcaagggattctcttgcctcagcctcccaagtagctgggattacaggctcccaccaacatgcctggctaatttctgtatttttagtagagatggggtttcaccatgttggccaggctggtctcaaactcttgacctcatgatccgcctgc

SEQ ID NO: 84645 - DNA, 1046 bp, Homo sapiens
gagactccgtctcaaaaaaaaaaaaaaaaaaaaagaagacttgcattaatggagaaacagactgttcctggctagaaatacaaaatattgtaaagatgtcatttctttaaaattaatttatagatttaatgcagtcatagttaaaaatcccaagcaggggcagggcatgatttttattgttaagaagcttagggtagagtatgggagacagaaacataatgttcacaaaaatatgccttgagcagttacaaagccgtatatcaagtgcaaagcaataaaattggatacatatgcactgtgggaacttggagtcctttgagaggacacactattggcagagtggagttaatcagcaaaaaaaatactttaaaaaaaagctaaaaaagataagctagagcaggaaggaatcttccttaaagtccagagtctcccggaacatggagactgtccttcccaagccttctcgcggggagggaattccttctttctgccgcctgttacatccctgtgtgagaaggtctgtgagctgagcccacatcactcgttctgctgcccaggtgtgcttccatcttcactgtggaaaagtcattttgaactccccggtgactgcaaattaagtaatcaaggacagatgggactgggttgaccattccaaggagtacagttacttgaagaatctggaagcaataccgagcacatttgttggcattaattcattggagcaataatgctgtacgtagaaagtatgttgcttttttaaaaaaacatcatcagttctgagcatttgtagcaagtgaactctaacttggaacggatgataaattcttctaaaaaacaaataaaaaccctccagacaatattatgcattgagagctttaaaaaatatatatcctacagcatttggaaaacactttgtctgtctatgccacttacaaagattagaacttttttttttttttttaatggagtctcactctgtcacccaggctggagtgcagcggcgcgatctcggctcaccacaacctccgcctcccgggttcaagtga

SEQ ID NO: 84646 - DNA, 1379 bp, Homo sapiens
ctctctgtctgtcgtgttgaggagtctctgctgtgggcaggggccgacatcttcatctgtgatcacttctgtgttgaaacagctaagccagcgctagaggcaaaaagggttcccagactctggaaaactgacaagcgaatggacttttcagactccaggagaaaatgggccatcctgggctgtgggggtgctctgtggatgagttctgtcatttgggagctggcagtggtttggtgatcaactgttggcttttccagattttacaaaatcgggaaggatttttggtgactcatgaattttctgttcaattttacttctcctaataagaagttagcctctatttatgttcagagaattaatctagattttattggtgactataaaagagatgactgtaatataaaacttctatatggtccaaaataccagaaaccagatcaaatgataaaccctagggtgagaaaagatatttccaacgtatatgacagagaaaagtgctatttttcttttctttctttcttttttccgtcctttcctttctcttttctcctttccttgtttcactctgtcgcccaggctggagtgcggtggtgcaatcttggctcactgcaagctccatctcccgggttcaagcgattctcctgcctcagcctcccgagtagctgggattacagacacgtaccaccacgcccggctaatttttcgtatttttagtagagacggggtttcaccatgttggccaggctggtctcgaactcctgacctcaggtgatccgcccgcatcggcctcccaaatgtaatcttcatgctgggattacaggtgtgagccactgcccactggcctgttttttttcttaatgcataaagagcttttaaaatcaatttgggtaaagaatttgaacagagaaagacacataaacatgaaaagatgcctggttctgtttgcaattaaagaagtacaacttttgaaatatgtgattattaaactggcaaaaggaacatttgataacatacagtgttggcaaggatgtagacggggtctctcccgcgtggttgggggagcgtaatctgatgcggtgtctttggcagtgttttaacacagttaaaaatgtgtggaccgtttgacctgtcagtccaatttctgggaatttctcaacagatcttacaaatacggttgaccctcaaacaacgttggtttgaactacaccgttccatttatacacagatttttttcaaccgaatgtggattaaaaaatagagtatttggccgggtgtggtggctcacgcttataagcccagcactttgggaggctgaggagggtggatcacttgatgttaggagttcaacaccagcctggccaacatggcaaaaccccatc

SEQ ID NO: 84647 - DNA, 1031 bp, Homo sapiens
tccatctcaaaaaataaataaataagctgtcccaaataaataaaataaaaaattagtcgggtttggtgatacacacctgtggtcccagatatgcaggatgcagaggtgggaagacccttgagcccagaatcgtgccactgcacggcagcctgggcaacagagtgagaccctgtctcaaaaaaaaaaaaaaactttttgagaatttgaaaaatgtagaaaagcactagaatataggaatcataaacctccccactgctaacattttgcactttatttgtatatctttcctttcttctgtaaaatatacttaaaaaaatacaaaagtggggtttaactatatacctgtcgttttgtcgtttccacttaactatctcacgaatattctcctcgctcatcaaatattaccaagtgtttcatcttcactcttgcttgatgtttcatcattcctgacccccgatgaggttgtccttctggtatcaaacgcacttgtgtcctatctgtttcttttatgctgcttatcaaagtttctagttacatatgttttggggatatttgatgtctgttttcttacaagagcgtaaactctgtgaggacctgtccccaatgctggacgcagtgtcctgcacgttgcaggtctgcaaatagtgactatatggatatgttgttgaacattacattttccaatttttgcttggatgggatggcctttattttaaaattaattaaaaatttttgtttgtttttgagacacggtctcgctgtgttgcccaggctggagtgcagtggtgtgatcacagctcactgcagcctagacttgctcaagcaatcctcccgtctcagcctccggggtagctaggactacaggtatgtgccaacacacctgactaatataaaatttttttggtgtaaagcggggtcttgctttaagttggtgcacaagtaattgcaccaacgtggttatttttctgtgcgaaacactggagtggcacccaggtggatgtaaacagagtgaataagacaagggccctgcc

SEQ ID NO: 84648 - DNA, 1164 bp, Homo sapiens
aaactagccagacatggtggcgggcgcctgtaatcccagctactcgggaggctgaggcaggagaatcgcttgaacccgggaggcggaggttgcagtgagctgagatcgcgccattgcattacagcctgggtgataagagcaaaactctgtctcagtcagtcaatcaggaaaaagccagaagcctctccagcctcctctgtgttcctgggtttggggtttctgaagctgcctggatgtgcttctctggaatgttggggcctccttgtacccgtcactggacttgttcaggcaggtgcagtgtgaccagctgtcaagagtattcctaggtttgctttccgggaggcgggaggcctcattcttgacttaagtctctgtatctcctttccaccccttctttcttcctccctgtcctctcctttggtgcttctgcgagacaccaaagcctgagacagtcaaacctgagacaatcagctttgaacaagagatgcagaggcttttggtggctagttcttacacctgaatccgccggctgctcccaaggccctgggccaaacctcaaagcaaatagttacttttccttcccatctgacttgtaaaatctcttctcccaacccccatcccaaattgccacccaggcctgtctccagctctgtgtacctgtacttcctgcctttacctgggcattcctttctgagtgatgggagtttcgcagatgaaagtaacttacaccgaaggtgtgaatgaggcttggtctttgaatgtttgcattttaaaactgaatgaggcttggtgctgccaagggctggggctggggagcaggggaacggaacggaacggaacggagttagtctttactgaggacggaatttcagtttgggaagatggaaagttctggagacagatggtggtgatggtagcagaacaggagatgcacctaatgctgcaggacggtccaccggaacacacttgaaataggacattttctgttatgtatgttctatcacaacaacaaattaaaaatcggccgggcgcagtggctcatccctgtaatcctagcacttcgggaggccgaggtgggcggatcacctgaggttgggagttcaagagcagcctggccaacatggtgaaaccccatctctactaaaaatacaaaattagccggac

SEQ ID NO: 84649 - DNA, 1029 bp, Homo sapiens
ggcgtgagccaccgtgcccggccaaatattgttattttttttttaggagaaggattgtcgagttaaacaacttttaaaaaacattattttaagaattgtggtagaatatacataacataatttactgtcttcaccatttttttttccttttttagagacggagtcatactctgtcactcaggctggagtgcagtggcgcgatctcggctccctgcaacctccgcctcctgggttcaagcagttctcctgtctcagccccccgagtcgtagctgggattacaggcgtgcatcaccaagcccggttaatttttatatttttagtacagacggggtttcaccatgttggccaggctggttttgaactcctggcctcaagtgatccgcctgcctcagcctcccaaactgctgggattacaggcgtgagccactgtgcccagcccggtaatattcttttgaagaaagatatgatttaatgaccagatgttacttttttttgggatctcaaggctgggcagagtaacttagaaagttacggcacgtggggaacagacgtgcttgaggtcatcactcggggcctctctgggccttccctctgtgaccttagaaccctctggccagtcgacctccgtggagcctcctttccctgttggtgacctttctctggaggtcctcgaacctgggtagttcatacagagctgggagtcggtggttcgctgggtaacttcatgcaggacaagcacctcagttgacagatttaaagttcacaaacattttagtcgagagagagaatgatgatgcctgcgcaggggctaacattaatatttaccttaagaaaccgacggttattttaaaacgatgaagtatgttggtgcagggaagggaggagggtctagtgccgggccaccccactgtaaatccagggaggtgtttggtgaattcatggctgcaccctggaatcttgttcactgtaaatccaggaaggtgtgatgtgagttcatggctgcaccctggaatcttgttcactgtaaa

SEQ ID NO: 84650 - DNA, 1050 bp, Homo sapiens
aggctggtctcgaactcctggcctcaagtgatccgcccacctcggcctcctgcattgctgggattacaggtgtgagccaccacgccgagccctgaatatttttgatttggggttagtcgaatccgtggatgtagaacctgtgggtacagagggcccattgtccataactgtgtaaaatcagctcaatgcctgtgtagccccattatgtctgcccataatatttaggaaagtgagtcttttagcctcattcacatacagagtccatctcacatcagcacctgcgcgtccccgtcacgcttgtgacctcgaaggccctgaggatgattcctgtgacggtttttcagccactactgtacgtgggttactagtgctttgtcatctagaatggggttcgtaaccgagggggacgctgccggtgcatgatcatgacaagcctaagagtgagaggatgcttttcactgagtggggggcccgtgctgggccctgagtgctggcgtgtatcgtctctcctcatgcggcccctggaggacgcaccgtggggccgactggctttcccggttgtgctgctgatacgtggctgaaccaggatctgtgctctggccctgaagctgtgaactgcgtgataaccagccaaggctgccacagaaggctgcaacctccccgtgccagggactgcagtggagacaccttctaggcattgcctcatttcattctcccaaggactctgtgacgttggcgtgatcacccccattttccaggtgaggacactgaggcccagcgatgcggagatgtgctggccgagcccgtcagcggtacagtcgcccgctgcggggggtcgtccctccagagccgattctttttccctgtgaggcgccgaggctaacggggagcgtggttttgggacttttgggaagcaaatgtcaccgctgtcttttggtgggaacttctcagccagggcgttagtgggcatgataactcaagctcaggtcttgagcacacccactacggactcttgcaagagggagagttgaggaaaatggttctaaaacc

SEQ ID NO: 84651 - DNA, 1018 bp, Homo sapiens
ccaggcacagtgtctcatgcctgtaatcccagcacttcgggaggccgaggcgggtggatcacctgaggtcaggagttcgagaccagcctggccaagatggtgaaaccccatctctactaaaaaaaataaaaaattagcagggtgtggtggcgcatgcctgtaatcccagctactcgggaggctgaggcaggagaatcgcttgaacccgggaggcggaggttgcagtgagctgagaacatagcactgcactccagcctgggtgacagagcgagactctgtctcaggaaaaaaaaaaaaaaaaaaaagaaagagatgagcatgctggaaaagagggaaataccacaggcccatctttcccgtgtgagtttacatatcccagcctctagaaaagaccactctccccgtcgcgggggctcattcctgacagcagagttgttttcctgtggaagggctggggtcaggcccgggacgcggggcagacctcctatgtggaaagcctcgagtggctgtaacccagggctgaaaaaacaaacatgttacctcactggacaacagctcagagctcttaagagggggaataccagcgctgaaatatgtgcaatgtaaagaaaggaatttacagaaggtcaggtgcttcaatctgggagtctaggccgatgcggcccctaactggtagagagccattccattccatccagatggcttggcagccacagtactttttcctgttgggccatcagggaaggagaggaggctcgtgatcctggggcccgtccgggcagttagcccccttcccgagtggtgttgagggacagctgcgacctgagcacctggcactcggccctggggcctggggtcgtgggaatcagccctgttgctctgaggaagtcactggaacctgagcagggaggtcgaatatgcctgagtaggagaaaaacaaaaagttggtgcaggacagccccggacacgtgcttgccctgagcctggagaatttggaagggaggctgccgggtcagac

SEQ ID NO: 84652 - DNA, 1032 bp, Homo sapiens
ccgcgccctgctgcttccagtttttgaaggctttgctttagcgtagggttagccccagtcagcacgttagcattttcggaagatgagtaaccttgctcaccgtcatgtcttgttgggcagaggcaccggggaagggacaagctggcagccacctcctgcaagaaaagccttctggaaagaagaatgtgcaagtgaccttttcaaacgagggggagggtagtccagtggattaagacagagagatattccagatataaatagccgtgtgggaaggaaggggaaagttgagacggagagggttcatttgatcctgccgaggcgcctaagtataggatggagcgagaggatgcatgtttggaacctgatgagtgatgggggctgcccgtgctccgtggaaacattttcacgttctgtgaggaaaacagaggttcccttggcagagccccaggaacatacattctgggcgatgctgacgtggaggtgtgatttctgtgtgaagactgagaagctgactgcgggggtctgtttgcaaggtgagagctgcctctctcgggtctgggcttggactgagaaagagagtctgggttccagacatgccacaggacaggaaacaggtgctttttgtaccaaggaggtttgacctccttgacgggataggagacaggtgcttttgaccaaggaggccacactcaaaccaaagaaccttctgctgggccgggttgcagaaatgcttttttttttttttgagatggagtcttgctctgtcgcccaggctggagtgcagtggcttgatcttggctcactgcaacctacacctcccgtgttcaagcagttctcctgcctcagcctcccgagtagctgggactacaggcgtgcaccaccacgctcaggtaatttttgtatttttagtagagacggtgtttcgccatcttggccaggctggtcttgaactcctgacctcatgatccacccgctttggcctcccaaagtgctgggatggccgaagtgagcccctgcgcccggcccagaaat

SEQ ID NO: 84653 - DNA, 1073 bp, Homo sapiens
tgttcaacctgtgattgcctctgcttaggaaaattcacctgcagtgtctcaggaatgtatctattgctttgagaaaagtgtacaaatatgatgtcaaaagtcttctcacctactattacacacaactctcccccgttttcctgaatgttccttcttttcttcttttcttgagacagaatctcactttgttgcccaggctggagtgcagtggcgcgatctcggctcactgcagctccacctcccgggttcaagtgattctcctgcctcagcctcctgagtagctgggattacaggcacgcgccaccacgcctggctaatttttgtgttcttggtagaaacgaggtttcaccatgttggtcaggaaggtcttgaactcctgacctcaggtgatccacccgcctccacctggcaaagtgttgggattacaggtgtgagccactgcacccagctaatgttccttattttcttctttatgaggccactgagaaaatttataattcatttggttgcaggttcatgtaagcaagttgcttaagaaaagtcaaagggttgctatgggaatgttaattaaataaatagatagtagaaattatgaaaggcaaacttttcaaagattcagtgagccctaagggaggacttgatttaagaagggaaggggaattaatgtcagtttagaagtgagaatatgatctgaattagtcataaatgcagatgaaatgtacatcctgtaggttaggacaaaactgttaagatgcttacctcattttaccttgccctcctgaagagattccttacagctgtatatcctagtgagaccctggaaatcctctgaatgttaacaatcatggaagggttaagtaaattacaatacttactgtcttgttgaacagctatttctttttcttttttttttttcttgagacggagtctcactctgtcgcccaggctggagtgcaatggcatgatctcggctcactgcaacctctgcctcccgggttcaagcgattctcccgcctcagcctcccaagtggcaggcacgcgccaccacacccggctaatttttgtatttttag

SEQ ID NO: 84654 - DNA, 1055 bp, Homo sapiens
tactcccagctactcgggaggctgaggcaggagaatcgcttgaacccgagaggtggagttggcagtgagctgagatcgggccacggcactccagcctgggtgacagagcaagactccgtcttggaaaaaaaaaattaaataaaaaaaattgccccataagagattataactgcgaagaaagacctagaagaatgaaacaacaaatacagtgccttaaagtcccgggatattactgatacttactgagctctgtatttctatctgccaatgacgctccagactgctgctgatcgacgaagcctgggaaagatttaagttactattaagttaccctttcagtcacccttgtaacttaaagatgatcaggcactcttcttgagagaaattacgcacaaagcaatcattttgtggtttcccaaagctattaggtgtgtcttccgctgaccctgtttgcttaactctgggcggtgtagaggttgaaagactgctgtttcgcgtgggaaatggagggtgctcatctctggagctgtagaaacgccacctctagcgtggacctgcctcccgtcccagctctggaatgctgcgggatgggtttgctcagacatgtaggcattgctggtttggtactcatctcccagttagcagctcaggcctgcctctgagtagccgtccacagctcttgctgatcgatttgtcttctgacacgggttggaatgtgagctagagcacagaggcaagccctggaagttagggtcactgatttgattctacctttttttttttttttttgagacgcagtctcgctctgtcgcccaggctggagtgcagtggagcgatctgggctcaccgcaatctccgcctcccgggttcctgccattctcctgcctcagcctcccgagtagctgggactacaggggcccgtcaccacccctggctaattttttgtattattagtagagacggggtttcaccgtgttagccatgatggtctcgatctcctgacctcgtgatccacccgcgtcagcctcccaaagtgctgggattacaggcgtgag

SEQ ID NO: 84655 - DNA, 1059 bp, Homo sapiens
aaattaggattttctgccttcttcataagaagcccggaccagccaggacaggctcccactggtgactgtgtttctaggacttgggccagtcttttagtaataaaggacaacagtccagttaggagcaggccgggtgtgatggctcacacctgtaattcagcactttgggaggccaaggtggggggatcacttgagcctaggagtttgagaccagcctgggcaacatggtgaaacattgtctttgcaaaaaataacaattagctggtcacagtggtgggtacctgtggtcccagctactcgggaggctgaggcaggaggattgcttaaacccaggaggtggaggctgcagtgagccatgtttgtgtcactacactccagccaggacaacacagcaagaccctgtattaaataaataaataaataaataaataaataaaaataaagtaataagagcaatgttccttgagaggctttttcttgttccatcatttgtaatatattttttaatctctttgttttttctctgcataataaggcagtctaatacatggctaaaaatatagagtcttttgtccttctgcttgagttcacgcccccgctctgccgtttattagctgtgtgtccttgtgcaaggcgctgtacatctctgtaccacacgttccttttccatttgtgataacagcacctgccttattgtgtaaaggctacgcgagataatatacacgtgcctggcatgtggtgagtgctcaataaatgctattattgtgtttagataaatgatcattaagtttagtcattcatttcatagcttgagccttgggaatctatcacattactgaactgtaaaacggttatgaggtatatccatatatctatatatatatatctatatacttttttgagatggagtctcgctctgtcacccaggctggagtgcagtggtgcgatctcggctcactgcaagctccgcctcccgggttcacgccatgctcctgcctcagcctcctgagtagctgggactacaggcgcccaccaccacgcctggctaattttttttgt

SEQ ID NO: 84656 - DNA, 1048 bp, Homo sapiens
ccagacctggtggcgcatgcctctagtcccagctactagggaggctgaggcaggagaatcgcttgaacctgggaggcggaggttgcggtgagccgagatcgcaccattgcaccccagtctgggcaacaagagcgaaactctgtctcaaaaaaaaaaaaaaaggaattattttcccccttgaaaccaaagagatgtggaacaaatgccttttctgtaactgagtttttgtctcatttgaagttagggtgcttagaagcccgtgagctaatgatgctaatttccccatcagaacaagtgaagagccggagttctcccagctgagggcactggatgggtgaacacgtcttgtggatggactctatccgtgtcatttcgccaatgataaaaataactctagagaagggaattttgttttacactgaagggaaaccagagttccagattgctaattttttttaaattctcattaacatttgttctttaagcccatgcgtatacttcttcccattgggataacaaagggtatggttctaattagttattggctggcatttctctaaagaaaattgaaaaattatggtggggaaagaaaatgctgtgtggtatttctttttttcttttattaatttctcctttatatagttaaaaaaaacctggggatgaccgtatatgttaagcctgcattttgcctggttcctctcaccttgacaggaactgtgagaaaacaccaaaaaaaaaaaggacaaaaatgtaaaaaaacattctttatacaaaattgtcctgtttctgcctgttgtcatggtaggtacaaaagtaattgaagcttaatttttttggcttccaaaacacatattatttcagcttccaaaacacacattattatatagctgtgcataaattgtaattagatggtaatagaactttgagagcatttataacaatttcatcagcaaatctataatcctgaagttaaggcagttagacttgttttaataagtaggttggtagatgattttcacatttctagagagaaggaatgtgatcgata

SEQ ID NO: 84657 - DNA, 1259 bp, Homo sapiens
ggaggatttggggaaatggatactttgctgtcaacttctcgtgtctcccagtttgctgccgagttgagtttgggtttctgagtgtgtcccttgggtgaggatgtctgtctctgtgataataaagcacatccaggacattttgtaatgaatggagtcagaaaaagttttggagcgctgttgcttcgtgagtgtatatgatgcaacgtgtgaatccagcccctttccctttttgaggaaagcctgtttctggagtggacagaagggctattctgggggcgtttagtttcctctggggagcatggcgaggcgtgccacgtgttccttttatatgtgcagaatcttgttgagaagcatgatttagatttactgggagcaaaaggcttacactgtgaccccaaatgtcttgagtaaatcatccatcccgaagcagtgggaggtagagattcgagatttaaagtatgaaatacagttgatccgatgcagtttgtaaatttcatattgggaaaacataggttcactaaccactcagaggcaagagttggcatttttactgctttttaggttattttgcccattttgattgacatgcttgatatagtatgaatatgcatggccagtactttttgattcaaaatacgagaatcctttgttttccttggtggtggtttttgtgatacgttcgtggagaaataatgttcagaaagggatttgccaaaaaacattttcattgttacggcaagtttctgttgtagactaaagtctacttaaaataatgtccttatccggcaatacaaatgatttctagcttttgaaaacatagaattatggtaaaatgttacaggcttaacagcctattgttgtgttttttactgaagaggaaatacattttttggatagtaaaaatatggagcaaacagatgttttgcaaatgcttagagctttttccgaaaaaggagaatatttgataggacatgggccatggctggctctctataccctggacaggctctttgcatgacaaaaagtattctgcggccctagcctggacctgctgattcctccatgatgagaacctggatgacacagggcagactctcatttgaaaataccgttgagagtgctggacgtgcccaaaccctggtgcgttagcatcttaaacattttattttttggcccagagtttttctgactcacatcctatactttattctctaaaaccagtccagttttcaaggaggtagtttctttccttggtcgtg

SEQ ID NO: 84658 - DNA, 1041 bp, Homo sapiens
gttacagctccccggctcttctgtgtggcagagcgtcgtttccgggccctcagggctggggagctcagttcccattgcttgtgctcagggctgagtcttaaagaagggtttgccggccctaacgctgcagcgcgtgcgcggtgagaggccctttttgagcctgtttactcctgtggccttgggcagaacagtaaatactctgtgcacggaggaaagacatgcccaagaggaaggaagtactgaccatcggctgcctgtgagcagcttagcaaggagcccttgctccctgggaaaggcggtgaacttgagtctaaagatgcagtgcctggcccttcctaaggtccctgcctggcatccgagtgtcggtgtgtggcacagaaggctcctgcttgcttccaaagtgatggacaggaaggggcagagtgagtcacggcccagactgggcaccttcgcgtctcagcctcagggagccccacagccccaagctcgctgaggcaacgtgagaacaggctatgggaaggctgcaaaggctgagaaatgcaaaggctcatatttataaatcccacccccagagtggggagggtcaggtgccagacctggactaaactgcaccaaggaaacacccagcagggtctcctgtgagccggggaccatgcagcccgaaacctccagtcactgcgcccggcaggagtcaggagccagggactgtgcagcctggaacctccagtcactgtgcccagcagggtgggctgtgcccagcaggagtcaggctaagaaacgccaggtctgcctgttcttgctgggcaatggctgatggctgccagtttctgctgatacacaggtaggatgggacccttcatgaatatctgactttaataagttggtaaggatatatttttttgtctatgttctgtttcaacttatgtagattattataaattgatgtaaaccacgtgagaggaaaatgttaataaaaaatgcaaagccccatcatttgcacaaaactcagccctgtggtgtggatgtttgtgttcgcggtgg

SEQ ID NO: 84659 - DNA, 1037 bp, Homo sapiens
caccctccgccagccacgggcccgggcggtgccagggtacctgcgccatgacgtcatgggaccgtcaccctccgccagccacgggcccgggcggtgccagggtacctgcgccatgacgtcatgggaccgtcaccctccgccagccacgggcccgggcggtgccagggtacctgcgccatgacgtcatgggaccagatgtccgcagccgaggtgaggtgtgctttgctctccacttctgagggtctcagtaacgtgggtccaaacacggtagccaggttgtgaagtgacattttgttgatgggctccttctcggcaaccctaagaaggagaagatggggaggaaagaagcccttcctcagcagccactcggagctccaggacccttggccttcgctgtgggaactcctgaaggactcctggaaggggtcacctcgtctctgtctcctaggagtggggacctcccccgggggaaggggactcatccaggagagcagggccccagccatgtgccagtgttctgtgctaacatctccagctgctgggtccccctgaactgatggtgaactgccagagccagggagcccacagatgccaactccagctcccttgcctgagagcagatactgttctgaaaactccctggaacaactcacactcgccgcagtcctttgaggtaaatatgattatcgtcacccccatcgtgtagatgaagaaaccgaagtacagaggggttaagtgacttgcccaaggtcacacagccagcaactggtagagctgggatttgaaccccggtagctgcctccaggacctaccgctctgttgctttctcatgtgctaagtggcccaaaagaagagttaaggtgggtggggcaggggagaaaggcaggcagggcctggagcccagcaggagtcactagctagacccggggctctgccagctgtgctggggcaggagcagccctacttccagatgagcccggggactgtccccccgtgcctgtccggaaaggtcggcctcgtgggacccagggcttcct

SEQ ID NO: 84660 - DNA, 1026 bp, Homo sapiens
actagacatagggaaactgagtccccacaccaggcggagacttgcttgggttagtagcagacctgtccttagagccctcaacttccagatcctaaattcagacccttcttgccttcccaccaccctttctagtcaggtccaaccaagagtggctaaagttggttgtacttgtagcaaagttcagaggtcctcaggcttgcgtggggaggtggtccctgggcgtcccttaaacccacctgcacgccaggaccggggagccccctcagactgctctgcggaacaattcttccctgagctcagccccagctcagggccaggccccccgctgcagctcagccacgccaggctcgggagagccagtggagacctggacgcgcccggggctggtgtcttgtttttcccatcatgaaacatttttcctctggtttggccaggactagagccccaaccaattccgaaagcatttggcaagccttgtggggaggagtgggaagggaaaattcattcggcttccaccctgggaactgggcacagtctgttcccacatctgggcccctggctggaccgtgtgcgcgcgtgtggtgaggggctggccccgctgcacagctgcctgttggcatcacagtgtttgtttgcctgtttccaaagcaggcgcagccacagctcctgcctggagggtgggaatgatggtattgagggtgagaggcgctgcttagggtgggtgggtctcagcccagaaacattttttgagactgaaggagaaccagaggccctctgatatgtttgctgaccctgggcctgcctggacaccagccctgatggcagctcctgctgttaccccagggaagcatcgcagagcatctggcctgttgagtaagagaagcaggagaggatccagagggaggacaatcctgggtcccacgaggcagacggagaggcataggaggcagccctgggtcccatgaggcagacccttccggagaggcacaagaggaagccctgggtcccacgaggccgacctttccg

SEQ ID NO: 84661 - DNA, 1123 bp, Homo sapiens
tgtggctaaggttaagccagtagggacatatcctgccagcggtggattctctttctccaccccttctgctgctggagcgtgggtgcaagcagccttccgtgggggctgaagctccagtctgccccaggagcagagaaggctgaagggattccttggggctgggtttggcccaggtgggtggaggcggaaggcctgctggccggggccctccgcagaggtgacgggacggtgtgtggtcccgctggaaggctcagcacaacccatctcgagtgccctatggcttaagccagcctcctccttggttctgggatgctggcttctggccactcacctcagggcagtcttccctggatgctcgagcttccaagcaagaggccaacgtccaaataggaagcagaaggggctgcccatggggacatcaggggcaagaggcaggcgagaaagggcccagtgtctgcaccaggtcccagcaggccacacctcaccctcggacccctcagccacaggccccagtgcactgggaaggtcagccagcaaaggaagccacagatatttctcctgctggttacttctccgggcagggagtcctggctcagtctggcccagcccagtcctaggagccctcagggcctcaccgatgccctccatgaaggctgggtagagtcggtccgtgaggagcggctcgggcagttcccggaagtacagcttgagcgtcccggcgatggcgttgatgtccatgtcactcagcatcagcaggatgtccttgttatctgcaggggtggggccgaggtcaggcagccttagctgggccagcagccccgttccacccccgacccatcctgacacagcccccacccactccagctctggttctggtctcccctggaagagcaggatgtagagagggcccacaggtgtctgtgactcggctctgtgggtcggggttgggggaacagggagagatagcctgggggccatctgctgtggctgcttgggaaagggtgtttggggagtgaaatccatcacccagagttcagagccacattcataccatgtggcctgcagcttccttccgactggaacctctccatcgctaagcccctctctggaaggcattgcacac

SEQ ID NO: 84662 - DNA, 1035 bp, Homo sapiens
gcccctgcccccgccccagctctccatcccaaatgctagaagctctccagggtgtgtgtgtgctgggtgggggttgctacgggagagctgtcgtgggggctgccctccacccatcctcacgctccaccccaggcgggagcgctccaaggtgccctacatcgtccggcagtgtgtggaggaggtggagaagaggggtatcgaggaggttggcatctacaggatatcgggcgtggccacggacatccaggcgctcaaggccgtcttcgatgccagtgagtctgggaggcccagccggggcaggtgtggctgtgtctgagcaggctggtgggatggacaggagagctcgggggaaccaggagcctccctggagaggaggcttgctctgcttcagagtccccgtggcaagtgctttctcttgtaatcccctcccctccaatctcttgtcccttgctgcaggtaagcaactgcagaaactcacaagggccgactcacttgcccaggatgacccaacttgtaggttttggttctggacttaaaactcagatctgactccagtgtctttcttgctagttcctgggtgcctggtgagccgcagggaaagagctttgagcctgcacctgctgtctccagggccccaggtcccctctggggcagtgctgcctctgcgtgaagcccaccatggtgaggcctgacctttctggtttctcctccctgctcctgctggttcaggtgcagcagccacataccccactgtcaagaaacctgcactggccaggcagggatgaatccgtggggagcctggagtggaggacggggtggggcctgggaactggccggcgttggtgcctctgtgcagcctagaagctgaggctttgtcggaacatgcttttacgtgtgaaaagtgtgcaatgccttccagagaggggcttagcgatggagaggttccagtcggaaggaagctgcaggccacatggtatgaatgtggctctgaactctgggtgatggatttcactccccaaacaccctttcccaagc

SEQ ID NO: 84663 - DNA, 1071 bp, Homo sapiens
ttgacccaagttttctccctgaatcttcccagcaatcccagggaggcaggttctgttgcagatggaataactgaggcttagtgagtttaaaacttgccaggattcaaacccaggcagcctcctgtgcgcgggctcctgactcttcaacacctccacgtggatgggctggttccctcctgatggacttgagcgcctcctaatcaggtgcttaccttttgtgagcctcagtttctgcatctgtgaaatggggtaataatacccatgtcccgggctggcagccaggagtgcctaacagggtgtgccctgcctcccccacggtgggtaacagagtgtgccctgcctcccccacggcgggtaacagggtgtgccctgcctcccccacggcgggtaacagggtgtgccctgcctcccccacggcggccacaggggcctgggggctagggtccccccaaagggttgatttccaggtaaacatcagcttatcccagctgctcacttccgccttcctgactgtgtagctggctctgagcagtgctgacccacggggagatctctggcttggcctccgagctggcacctctctcacccacattctctctctgcagctggacccacaaaccgtggagaccaagaactggcacacggacgtgattgagatgaacggggtgagccggggatgggaatgatcagtggcgtgagccgggaggtggaacgtctgtgcagcaggtgggcagcccggccctgtggctgctcctggggccgctgtgccgcctcgacctccccgcagcccagccccctctcccctcctgcccacaccctgcccgctgctgtcctgcaggtgttgtgttgagggagacctgggtgtgagctagccctcatttgcagtcttggggaggggacccctgtgttttgggggcattcctcgggcactcacaccctggggaatctttacctgcctcaccccccaaccagatcaaagtggaattttccatgaaattcaccagccgagatatgagcctgaagaggaccccgtccaaaaagcagaccggcgtcttcggtgtgaagatcagc

SEQ ID NO: 84664 - DNA, 1030 bp, Homo sapiens
gtggccccggccctgggctgctctgtgtgacgagcgattccatcccctaacgtgtgctgtgtgccacagtgtgtccgtgtcgtggacgcaggggtcagcgctgtggcggacggagggacgtctgccacagtgtgtccgtgtcgtggacgcaggggtcagcgctgtggtggacggagggacgtctgccacagtgtgtccgtgtcgtggacacgggtcagcgctgtggtggacggagggacgtctgccctgtgcttcccacctcactgtgcgcaggccagcgggtgagcagcagagtcaaagggccaggcctcttgctttctatcctcagccacattaacctggcattttcctgcaggagcttcacagttgggccgaggggctgggactaggcagtttcgtttcggtggggtaagggaagggtgcctggtactgcccagactggcaggagggattgcctcattaactcctcgttaactttgccctgagtgatgctgtgggtgcgagaaacaccggtggccctcctgcttccactgacctgaaggttcattaaaggctggaggcggggcgtgactcatccagggctgggattaaacaatctgttcagatggaaaggtctcatgatcagaactgagcctttaaatagtgcagggcctctggtttctgggggagaggaggcagggacactcacggaggatcctttgggtaccagcgggggtccctgtggttgggctgttcttgtcaccggaggagagttcaggggccaaagcctcattccagcccctgacttggcagtcagctttttgtgcgagtgtttagctgggagacacgtggcatctgggtttgtgggttcagccagggctctcggtattgaacttcgcgtttctacttttctttccttttccctgtttgtttttttttttttttgcctcaaatcacactcaagtagaccaggcccggtgccttcctctccctcccatccttccctcttctagattcttggttgagctttggatgggaaggggctgaattc

SEQ ID NO: 84665 - DNA, 1161 bp, Homo sapiens
cgagcgcggggaaagccggcgggactagggaactagcgggactggcagccgggactgagcgctccacaggcgccttctctccagcgccgcgtcccgtcccccccggcatgaccgacgtcctgccccagcccgactgcagcccgaaggcggggcgcgaacccctggcgctggaggagtcggggagcaagcgcccccccaacaccggcgcccggctctggggccgcgtgcgcaacaagctgctccgaaacaaggtgcccgcgggggctggaggttccggggggtgggggctcgggggcgctgcggggctcggggggctgcgggggctgcgggggctgatggggtcccgctcccgccccctccgtggagtcccgggacagagctggggtctgtgcgcgtccctctaagtggcttgaacttgatggcgaacgctggggccgcccccacccggaccctggcgctcgggcatctgcccctgcctcgggagaagggaggtttcttctcggcaggtggaccctgctttccactccgggagtgcaaacagcgcacggggagacgcctgcctctgggtctatgtcttgccgccctgttcagcctctacctgatccctgcatccagcgggccttgctggctgcccctttgctgaggggcgccgaccgcagcaccgtctgccgtgtgaggtttctctgtgcaggattgtggggaggggagatgctgccgggtctgggggctcgaggcttcccttcagggaccacccatctgactgtgggcccagtgcccgccgggcaccaggcgttccgtccatgtgccagggcagaccgccggtgcccctgcagccccagacctgagttgggattaaaatctgagatagaagccgactgtcctgcagctgggcaggctgcctcggggctggcttggggccctggcatcaggcacgtgaggaagagccagacccagcgcccagcgcacaggaagtgctcgataactctgcagatcaaatcaactgtccgagttagctgtctcagagtgccagtccggctggccagggctgggcccatccatcaagagagcaacaagggaggccttggccagtccgtggtggggatctgcagctcctcctgaggctcacaggacctctctgcaggctcttactgccagccggca

SEQ ID NO: 84666 - DNA, 1051 bp, Homo sapiens
ctgggctcaagccatcctcccacctcagcctcccaaagtgctgagattacaggcgtgagctgctgcgcccggcctggttgcgctttttatctacctgttatccacacgggaatctgtgagtcagttagacagctaatagtttctacccatttgccagaggaggtaaccgagtcacagagaggagaaaagacttaacatcacagaggatcagaaaccctgactctctccctctccacctgcccctcccactccctgctcttcactggcaggtggggtctgccctcacccctccctgcagcgccccacacagaggtgactccccgggccgttagagcagcctttcccaggaagcctccctgagttcctgggggcaaactggcctcccttctttgtcccttctttgtgcccacatcccctcaggttccttgtgcccccatcccctcaggttccttgtgcccccatcccctgaggttccttgtgcccccatcccctcaggttccttgtgcccccatcccctgaggttccttgtgcccacatcccctgaggttccttgtgcccccatcccctcaggttccttgtgcccccatcccctcaggttctttgtgcccccgtcccctcaggttctttgtgcccccatcccctgaggttccttgtatccccatccctttgaggttccttgtgcccccatcccctgaggttccttgtgcccccatcctgctcagggcaagctggttatggcacctgtcatgctgttttgtcacttaacaatttgcgtctcccactgtgagttctctgagggcgggaaccaggtctcctttaccctgggatgcatgggagctcagaaatgtggaatgaagtcgttaatttacacagcacctaccgtgcacctggagaaggtgagaacatggctggcgtgtggacgtactcacatgtgcaaagcctgtggcgtgttcagagcctctcagtctcacggtccgctctgagcctccggcatcccgccgaggtcacggaaaccatccctgttttacacacgaggacgccgaggctcgga

SEQ ID NO: 84667 - DNA, 1050 bp, Homo sapiens
cgggagtctgggggggttttgagcagtggggagctgtgatcagggctgggaactgaccggagtgggtgtattctagctgcctgtgtgctgggaaagggtccactttgtgaacggggtcctgaaggcaagctttcctcgacataaatcattagcagaatgatttatcatattggtcagttttcagtgccaggataggcaggatttggagggagagacagtacccatggggaatggtactaagtccctgggccaggatggtgggtgtgctggacccccccaggctgagtggaggagagaaggaccccctagccctaccccgggcagctcacatataaggccgccgtggccttcggaaactttttcatctggccaccaggtggtgatgttggaccaagactcagctgagtctcataccccgtctgcctcccgccggcctggggtggaggctgaggggatccgctgaccaccctctgccctgggggcttttctctcttgcagacgatgagtctccaggactctatggcttccttcatgtcatcgtccactctgccaagggatttaagcaatcagccagtaagtgccctggccaggacgaggttgggtgggccattgtggattctgcactgctctgcccaggatggggccctgccagcacgcctttagacatggggcattcccctggaggccagaaaccagctcctcttggcagggaggtcacccctggcctttgtctccaaagtcctctttctcaagccctccctgaagctgtctgaaacctaggggccgggcgcggtggctcacccctgtaatcccagcactttgggaggcccaggcgggcggatcacgaggtcaggagttcgagaccatccgggccaacatggtgaaaccccgtctctactaaaaatactaaaattagcgtgggcatggcggtggacgcctgtagtcccagctacttgggaggctgaggccagagaatcccttgaacccgggaggcggaggttgctgtgagctgagatcatggcattgcactccaccctgggcgacagagcg

SEQ ID NO: 84668 - DNA, 1178 bp, Homo sapiens
ggagtgcaatggcgcaatctcagctcactgcaacctctgcctcctggattcaagagattcccctgcctcagcctcccaagtagttgggattataggcgcctgccaccacacctggctaatttttgtatttttagtagagatggggtttcaccatgttggccaggctgttcttgaactcctgacctcaaatgatccacccgcttcggcctcccaaagtgctgggattacaggcgtgagccaccctgcccggcccctcgtctctatatttttaaaaaaattaaaataaatacataaataaaacataaagcagtggttttcaaccattattatacattcaaatcagtaaagaagctttatagaaatgctgatggcccttgtggtcttgcagagatttgggttgagttgacggggctggggagcagcatctgtatcttttaaccgctcccccagtgattccgacaggcagccaagctcggactgcgggtaaggctggtggccctgctgaggctgcattttcttcacagccagcagattgctccctgaagtgtctgcttagccgcgcacggggtatttatatctcaggctttggagaactatcaggtttggggcccggctagggcgtgcgtgttcacgctgggacctgtcacaacctggtcttatgggacacccagtctgggatccttcttcccagatgaccaacctgcctctgtcactgcccctgcggcaggaggcccaaggtcatgaccccagggacagagcatccaggtgcaggactgaagctgagcctcctgttgggagggtgggcgcagccgcgtacaggaagggtgttgggaagtgttgatccaccagctgccacctccacctgtccctgctgaatcccagccatcctcacttggtgtccgggttgtggagggtgtggctcttgggggcctgggctggccttgcctgcgtcctcccagcctctttggggctctcatatgtgaggcctaacctgagttgcttcaggaaacctttgcccctcaggctgccacgtgtttgagagcacagccttttttctttttttttgagatggagttttgctcttgttacccaggctggagtgcagtggcatgatcttggctcgctacaacttccgcctcccgggttcaagtgatttccctgcctcagcctcccaaata

SEQ ID NO: 84669 - DNA, 1060 bp, Homo sapiens
tggaggttgcagtgagctgcgatcacgccactgcactccagtctggtgacagagcgagaccctgtctggaaaaaaaaaagtatctattgagtcccttgcaggaataggaaaacacaggcccctctccacaatgaggacagagcccacgcctcttacccagtgtgcagagagaggatggctgaccatagtttcttctcccagacccatggagcagatgtgtcaccctctgcctgggaggacgaagtgcagggtggggaagtccctctccatggagtcaagtggctggagaggccaggtgcagtggctcacgcctgtaatcccagcactttgggaggccgaggcgggagattggcttgagcccaggagttcaagaccggcctgggaaacatggtgaaaccccgtctctattaaaaatacaaataaaaggggctggagaaatggtgctttccctgcggtttccagcccaacccaggaactacctggactcccctggtctgtgttcagatcagccctgccaaggccgcccaagatcccggggtcagacatggtgcagagagtgtggggtcttctcttggcctgggctgattgcctgttctctgtgcctaggcagaaacccccacacccaaccataagcccctcacagcctgcccaccctggagggcagagccaggcccctggctttctgccaggtggcttctcatcctgactcactcgatgacgtgcttgcttcctgctgaggctgccacttaattactgcaattaggctcctctctgcagcaggagtgatttcataccctagacttcactggagggggcgtgaggaaacattcccgaaatctgggagtccaggcaccagccagagacacaggctggggacgctgagtatcccccacccccccgccccccaaaatatacacacacccaagctccatctccaggagttttctctgtctagaaacagcttgagacagaagtaggaagttcctgctgtctgagcgcttcctcccctgcagaccaagcaggtggcatcacctcggcagctgaccttggcctcatcacc

SEQ ID NO: 84670 - DNA, 1105 bp, Homo sapiens
gtacctaaaaccatgtgcacacacggggcagacgagcctccacacagaagcctccgtcctggcctctggggtgcttgtgggggtcatcttctggggccctcctgcttcctggtgggctctgattacaggaaaagcctgggagcctgggccgaagtagggggtgaaggaaaaaagatgaagccaactgcattgaaattctggatctccttgacactgggaactgagcttgggaactgtgtcttgctacgctggggccacagggtgaggccactccccagagcccctcccaccgctggccacgactggccctcctggggtggactcctggccacgctgcatcgcaggctctttatctataaaacaggtgaatgaggccttcctccctgggctccagtgacgagtgactcgggtggcatggcagcaagcatgccaggccttctggggcaggaggtggaggaagtgggtacatttctttcccttatttcgaaaggccggtcgctgggggacagagctgacaaacggctatgtgaagtcccactggcaagtgagaaccggcccaggcccgtcttcctgagaagcagctggtatgggagccagggttgaagtcactcacgggtcctctccgagaactcgagtggtgaaatggagagccggggcctgcccttgtccctgcagcaggactggggaggagggggtgcctgagtggtgtgctagcgctttggcagaatggctgtgccgtgccgaagctcagtgtgggtcaccttgcctttcagtccaccctcctgcccctgagcccatacgcaggacttcaccagagacaaataacggcctcgagggtcctggccagccaagggcacacacccagccctgtcccctccccgcgagtgaaatcaggagtaacagccaaggtccccatcgtgtcatgagaaccatctgatgccccaagcgcaggccccgtccttgtgactggctgtgggtgagcgtccatttcttccccttttgcagacggggtgggaagttgaggaggaagcataaccattgtgttttgtcttcgtgtgggtggcagatgagcgcgtcgcggcttctgagaaatcccgtctccttg

SEQ ID NO: 84671 - DNA, 1090 bp, Homo sapiens
cccctcaagggctcaccccgcaatcccctgctctgtatttcagctctgcaacaggatggagcctctctccagggagggcagcttctctgctgccaatggaattgcatgagccccacctagagcccagagcttctgaagaattctggggggagtggggggctgtggcctgaactcgggccacaggtgtggttcatttagacggcaccatgttgttttaaaatgttaattatttgccatcgttttaaaatcaggagcattcctgttaataagccagattttagcttattttgaacagagatcaggcagccatgagcttgcgtttcctccagcagccatcggctggagtgagtggtggtttcaccctgccctacctggctcgcttcaccggctggcctcacccgcaggcctcacccgcaccctcatgggtgccgtttgcaacctttgctccatcgttgggttgtaaaagagcttttcccagggcctcctctggactcctcctcccatggaaggaggtgtatgtgcatctgggaactagggccagggggaccagaatgtggcctcactccctgcacagttgggggttctgcaaccattggagaagccaggggaagctggctgggagtgggcagggccggagatggtgcctgtcctgggttctgtgtgcactccccttgcaggatggctccctgcggtggggtggctgggggggctgcttggaggaggtgggggtgctggtctcagcagtgcctgtgagtaggtgggaggctgctcagaggaggtgggggtcctggtctctgcagcgcctgtgagtaggggggctggtctgtgagtgggggggctgctcagaggaggtgggggtgctggtgtcagtagcgtccgtgagtggggggactgctcggaggaggggggctgcttggaggagggggatcctggtccctgtgagtgggacgcccaccgctcctgtgcaggacagtggtggcgccgcgctcctgcctgggggcaggtcaggcctgtctgttgcaaagcctgactcctccagcggcggcgggacgcggctgtggcttctgggcgggccggggcctcccctccg

SEQ ID NO: 84672 - DNA, 1056 bp, Homo sapiens
aggagaagactctcgctcccatctctgccttcagctctcaaaccacagcagggctcagagccccgcccggggggactcagctctcaccccactgtgagcagctgcaggaagatgctgcggaatcccggtgtggggccagggtctttgccgctgcctgtccccgcgccacctccctctttgctccctgtccctgtgccctgtccttgtcgcgtgaccaccatgactggtttccgtgtccgtcgattttccgattcctttggtgctggcaggtgccttctctcgggagacagatcacgggcgtcacgcacagatgcccccgcctggcgctccggggcttcggggcagaacttgacttggtggctgtgcgtcttgcttggtggctcacgagggactcacttggcttgaggaccttgaaatccagagatgctagagtgactgccccctaaagtgcttgtggcccccagggttgatgtttacaccatcgactagaagccacgcaaggcaggagtagggagcacttgtccagcctggggatcgtccgggcaaaggtcccatccgcgcacctgccttccctcctcggggagcgtttctgccctttccgctgggtcaccggccccacctagtggactctgcagggattgctgtttacacggggtgcctggagggagctgacgcctcttcctgagtacttggggatgttttggttaaaaacactattaataaaagaccgaggtttctgcggcttggctgtgcttatttggccaaacaggtcccctcccctaccaggcttcctgctggggccttgggaacaggggggacttctggaccaaatcagacaattgttgtagatattcagatatctggcttctggcaccgccttatcgctgggccttccacgcccaaatatgcagccaacgggaagcccaaggttgagtctttgtgttagtcagtgttctctagagaaacaaaaccaacagggcgtgtgcgttatctgtatctatatctacatacgaagaaaagtattagaaggaattgattcaggtgattatggaggct

SEQ ID NO: 84673 - DNA, 1160 bp, Homo sapiens
ttccctccccacctgctttgccaacgctgccgcccctgtctctccccgtctactagccgtctgctccccaggcctcccagacccctccgtgcctctttcagctttcccctgttagcctgtctcctccagaggacccaggagaggaccaggctctcctcccctctgcacccaggccaggcagtggctgcatgcgtggcccgtgggctccaggtgttcagatgctgctcccgcaaagccagcctgggcctggtgctccctgtgggtgcaatgagctgcccgctccagccctcctctgttcactctggaagggaacaaactctgatggcatccacctctccttgttgacagagacaagagttctgctccagagagaagcattgtagaaggaatattaagtatgtgctctgagacaggccagggatagaaactgtggagggtttgcggtccttgtcattaacgtgttcctggcgacagggactgacgctgtctgagcgcagctcgtgtgtgcgtgtcggagacacatgaacgagcaaaacagaggttctgggggttgtttgcctggagctggtgggggagaagaatccaagccggtcctctgtggggggtgtgtgttgcaggaggcggtgggagtgccccatccttgcttggtcctgctcgtccgggtgtgttttgtagggggtctccgtcctgccttctgacgtccccagaggagcagtcgctgagatgccacgggctgcctcttcttcctccaggggctagtgcccccccaccccagctgaggccgcctgaaccctcccattcttgagaaccccctgctccttccagccccgccggccaccctccaccccccacagagctctcacccctcttcacacaccggggtggctgttatagcctttggcaacaagggccttggcaacgggcttcccacttgggggaagccacattgctgccatggcaacagaggccgaggccgagtttagcggcagtccaggcgtgcacctgtgggaagggctggcggggggcaggtgggaggcaagggggccggcgagggggttggtcagtgtgttgttgacctgccctaagacgggaggcgggttagagacaagcgtctcggacctgcgggggcagggtttttgccctggttctcctggaggcat

SEQ ID NO: 84674 - DNA, 1019 bp, Homo sapiens
ttggaaaatgtgaagccctgagctgctgacctgcacaccccgctcgctgcactggctcagcctcccctcccaaggtgggtgggctccgtgcctgggctctggagcccaagtggtgctggcagccctggggggttaatgcggctcaacttcccggtcgcctttccttccctcctcctttgaaggaagcccacactggggtgatagaaataagcaccggctccgaggagtctgctgtgagcccctgtccctgccaggcctgggcacagcctcctcgcccacgccctgctgccttgggctccgtcctccgtgcggggccttgttctgagggctgagggctcccctcccacactccagaacctgccctggacccctggagggagtgggctcagtacaaatggtacccaaggaggagggccacaggaagtgacatcgaccggccccccccacctccttattccctataaaaagcaaaatggtgactcagagaggagagttggaagcgtcctgcctcttgctcccactgttaatttttacacttggaattaggcagaaggcaaagaaaacagcagcttgaaatacgcggctgacatgctcttcatcgggtagcaacagcagagccgctcctccccgcctcccagcagccccggagcgggcagggcccggtgcctgctggctctcccccgcccctcaccaggcccaggcccccgcacagcccccgcccgggccaggcgtggatggtgcggccggggccatggctgccgggggccgccgccggcgcccactacgctaccagtccctggcagctctggtggaggattctcagtggcctttcttgttccttgtctcagacttcagctacgggacggacgagtacgacggagaggggaatgaggagcagaaggggcccccggagggctcagagaccatgccgtacatcgatgagtcgcccaccatgtccccgcagctcagcgcccgcagccagggcgggggggatggcgtctccccgactccacctgagg

SEQ ID NO: 84675 - DNA, 1051 bp, Homo sapiens
cgggcgtcccaccttgggagatttccgtatcgctgaagttccctttgtggagcgtggcctctgtgaaaagtgttaataattcacggtagaataggttctcagatgcgccacgtctgtcctcccccacttcttcaacagagaatggcaacacctccattaacctgaatgtgagctcctcgggggtggccctggctgagtcatctgcgccgcctccctccccagagcctcgtacgcgctcggcgtctggctgtcgtgtgaactcagctccacagggcagacatttggtctgtttgctgctccgtcgtacccctggcacctggaacagtgcctgaaccatgagaagtgtttggtgagtgaatgaatgaatgaaaaatgaatgaacggacattcactgggattcagttctccttagagtcagagagacgtaggtgtcaatgctggttgcatgaagctgttacatctttgagcctgtttcctcatctgaatttggggtgtaattcctactgactgtacagttgcagagctgacatttcatgaactttgcttaaataatgtgtgagtgcctggcccataagaggctgtgttagtccttttgtgtgtgtgtgtgtgtgtgtgtgtggtttttttttgttattgttttttgtttttgagacagagtcttgctctgtcgcctaggctggagtgcagtggtgtaatctcagctcactgcagcctccacctcctgggttcaagcaattcttgaaccttgtaccagagaggagaggtacagcggccctagaccccagggctctgctcctattggtgtaagtgtttcctcctgcgccctacctccctgtctccaggcagggcctgctgtgggtccctctcctctcagccccaagggacctgttccctccagaaggcacctccccaagcggcggcagcgtcacgtgtgaggcctgcagttcagggccagcatccctcatccctcgccgagatcaggccctggaggggctcccacaggtctgactcaaaggcacaggtccctgggcctccctcctcagcatcgtgg

SEQ ID NO: 84676 - DNA, 1034 bp, Homo sapiens
gcatttctagcaagtcccaggtgaggcccgcgctgcccacactggatgggaaggaccaggcgcctgcagcatctgccctccaagccttcgtagctccctccttcctgcaggataaactctaaactccttagcacaacgtgggagccttctcagagactgggtccaacccatctccagccgcagcctcccctcctggccccactgccacacccccgggcctccggccacactgagcctctcccggtttcccaggatacaacactcgcccattcatagtgtggtgccttttgcacgtgctgttcctctgcttggggatgctgttggtctttctcagccaggtgaagaggacgctgaatgtcacctgcttgagtatcaggaccggggactgggcactggacctagactcttggccctggagagaagccctgcatggggccgcagcctgcccccgtccctgctcacagaaaagctcagccttgcagccgcgtggagtcagacgacttgcctgtcctgctttgaacgtgtggtgttcctaccacctttgagtaaaaatagagctgagaatgaccgaagtgaaactccaccttgggctctgggagagcagaggtgggaccacgctggggagggtgggtgcggacactccgggggcgggggctgaggccatctgcgtgggctctgggagagcggaggtggggaccgcgctggggagggtgggtgcggacactccggggggtgggagctgaggtcatctgcgtgggctctggggagggggccctgtgagccgggccaagctgccaggcactgggggtctacgccctggactcagagagaccatggcaccctcaaggctgctctcacttgaaaattttcgttttggggctggacatggtggcccacgcctgtaatcccagtactttgggaggctgaggcaggaggatcacctgaggtcatgagttcgagaccagcttgcctaacatggtgaaaccccgtctctactaaaatatacaaaaattagctgggcgtggtggtggatg

SEQ ID NO: 84677 - DNA, 1029 bp, Homo sapiens
tctgcctcactcttgcgagtaggatggaagacttgttctctgtctgaggtatgatctgctttctgggacaattccggtaccttccttcgtagagggagggcatgatggctctcgtgggtgttgtgtggattaattcatatttataaagtgctttgaaggtgaggagagctattgagcagctcagctgtccagctcattgcgctcctcatccgggaaagcctcgagggactgggagaggccggcacaggacttaggaaggggcagggaatgtggcaggaggaccggcaggaacagggtatcagaccagctctgaggcagcgcctcccacagcggctcccgcacaggccctccataggtgttggttgtctgagtacgggtgggaaaaagaaaactcgagttcttggctccttgagctcctccccgcagcagaaacccctgttagctgaaacctgtcagctggcccgtccatgcgtttccggctgtgtggatttggtcattgtactcgctcgtagtggagtcagagacccccaaagggagtctcgcgcttttgccagggtttatgattggaggacttcactgccagcgttggcggcagctgtttggctgagcttgagccctttgggcgcaaacctagggcaggcggcttcaagacaaccctgcgcccactgcccctgccaggcccttggtggtggcgggtgttggtgatgtgtggggggtgggctgaggtgatgtgttgagtggactgaggtgatgtgttgggtgggctgaggtgatggggggggtggactgaggtgatgtgttgggtgggctgaggtgatgtgttgggtgggctgaggtgatgtgttgggtgggctgaggtgatgtgttgagtggactgaggtgatgtgttgcgttgactgaggtgatgtgttgggtggactgaggtgatgtgtggggggtggactgaggtgatgtgtggggggtggactgaggtgatgtgttgggtgggctgagatgatggggggggtggactgaggtgatgtgttgggt

SEQ ID NO: 84678 - DNA, 1081 bp, Homo sapiens
cgtctttgcccaggctggagtgcagtggtgcgatcttggctcactgcaacctccacctcctggattcaagcagttcccctgcctcagcctcctgagtagctgggattatgggcgcctgccaccacaacccagctaagttttgtatttttagtagagatggggtttcaccatattggtcaggctggtctcgaactcctgacctcaggtgatcttcccaccttggcctcccaaagtgctgggattactggcgtgagccactgcgcccggcctgtgctaggcactttctatccattctctccaaatctcacaactctgcaactcttacagagtaggaaagtgaggctcagttagcataaatcatagacctaagatcacataagtaacaaatggctgagctggaattcaggttgtaccctagaataatgaggaggatcccgagtaccacctgggtatgtctgagtttattcaaggtcttgggatgtcacggaatgggggacgccattctctatggtcctctgttgcagagttctccctgaaacggtccagcagggtaaatggcttcaatggctctgaccccaacctggccctgtgcctcttgcaggacctgggggctgggcctggagcccaggcagggacagctgaggctgtctgaacccactgaggctggtggctctctgctcctaaggtgccagcctgccagccagcccctcccctcacacacttcttttttttttttgacacggagtctcgctctttcacccaggctggagctggagtgcagtggcactatctcagctcgctgcaagctccacctcccaggttcacgccattctcctgcctcagcctcccgagtagctgggactgcaggcgcccgccaccacgcccggctaattttttgtgtttttagtagagacggggtttcaccgtgttggccaggatggtctcgatctcctgacctcgtgatccacccgcctcggcctcccaaagtgctgggattacaggcgtgagccaccgcgcccggccctgaacacacttcctgcctttggggttggcagttcattctttctggttttgacaggag

SEQ ID NO: 84679 - DNA, 1098 bp, Homo sapiens
ggggggggtggggggagtagagaagggtgatgccttgagccccaaagccttactctggaggctgtgtggtacccaacattcaacctctgacctcagcatccccttgggtccaggtcattccctgtatcttcttctccacccgcctcctcctccatccatgttccttcctctcctccccccaggagctgtccttgtgatggttcattctgctttggtttctcaacatcaaaggggcaaagccggatcccctgggcataggtcctgtgccaggtgccgccgctccatctgctccttcccctgcagaggccagcgtcgttgggtgaaggtcagggcccatggctgtgtggcatgtgcgtgcacgtgcgtctgcatgaatgggggcacacatctgttcggagcgcagatgcagatcagctcctgacccggaggcaggattagtggccctctcttagctgtgtgcttgcaaacagccgtcataacaatgcctcagattcacgcgtgcttatgttcctgagtgtttctggctctttgcaaaacccagttcttgtttccctatttcccgaagcctggaatcgtatggaaccctgtctctagctttctctgcagcagaagactcctctgagctgatcatttccaagtcttccataccccaccctcttcctcccacgcctggagcaaaaaagcaaaattgcctgaggccaccttgaaaattcctgaccagaggaatgccagaaaagggaattaggccaaggcctcttagggggttctgttgggcagccctgattcaggcagattggcacctgagctgtctaccctcctgctgctgccctggcctctgggcggctcctggggtggcctggatggtgggtgggagggggcactgatgtggccgcagtgtgaggagtccctgcctccctcttcggaacagcttagtggagagctgtagcaggaggcttcccggggaggtgctgtgcagtcatgtttgggctgttagccatcaactttcctcttgacaagagcctaaattaaaacaaatacccgagctgtcatttgcctggcagcaaggttttgtggctcccagaggaagttcctctgctt

SEQ ID NO: 84680 - DNA, 1029 bp, Homo sapiens
ccggggctccctgcctggcccccgcatgggaacatatttttgtcatcagcggtgacctctgggtgatcaaggaagcagagactcctggggccttcctgtcgtgtgcagtggagctgagctgctaacatgagaagggaggaaatgtggagatacccagttttggttctagggcccgtccccttttttctgtcctggccaagaaccaaggcttctaccttgattggtagaagcaagagttggtcgttggagaggccgtgagtagcacgtgcttgggaattaggagcagggcaaatagccttgaaaatgggatgtaccttcttcccactcagcccctcgtcattaacccagtgctcctggcggtgcacccaaccatgaaatcccctttaagtccagtgatgaggcaggagcaggcaggtcaccctggggttggagagccgcagacagtctgagtgcacaggctggagggagggctgggagggtggagagcactggccccagggactgtctggggaatgcttagaaggggcctggaggaggcagcgtgatagatgggggttcagtgccttggggagcactggctggtccccacccggtccacatttagctgaatcaggaaggtctgtctgccacagctccccgctcctctgacagattggggttgatcgctggggttagagcacttcagggtagcatcacctttggcaaagcccggaggagaaggactctttaactccttccttcccagcgcgtgacgttggatctccccaactcctcagtgccagggatgcggaggtttctgttcccacccaaatcactgtggtgctcaaaggctcacacacttgtctctgtggccaaggttagcatctggccgtggtgttaacatctactggaagccatccaacaaaggcatcaagggaatctcgaagtgactgccctttcctgagacacgttgtctgagacagacgtctggagatggaagagggttgacagggtttcccagagggtggtctctaaccccatggacccgca

SEQ ID NO: 84681 - DNA, 1053 bp, Homo sapiens
aaggagattggagccactgaactgaatctctgggttttggagacttagagaatccattggactcttctgctggcgtctttctgaatgctgatggggacttggtggtaagtaaatgagtagggggctccaggccctgctgtcgagccctcggacggaccctttgggaaaactctgctgttgacctgtgggtggtgtcatctgagccatgtcaggtgagggccacgtgagctggggcttggcgagagaccctcctaaaacggtggctcggggagtgcataatctaagccagcggctctgcccaggatgctgcccttgctgtggcccctggccatgggaacggggcttcaactcggcccctgggaagtgtgtgggggcgtgtggggagtgtcacagctgcaaggacctgatgtcactgtgctttatcctgcagtgatgcctagggaggcagtgagggggtgaatgcagctccccggggagcaggtccacatcttgccagggcagcaggtcttcccatgactcaagctgacacaaaagtttggtgcagaaatgactaactgggaagggcttccagttcacctctgttgcctgtagatctcactggctgctggaaaagccgggaggctgagcagagggcaggtgagaagagggcaaaagacagactcataggctgagacttcacccttacaggtgacactgtggaggcctggggaattttcttctttccccagactggagggctgaggatgaatcttagaatagtaaatgctggccgcacatggtggctcacgcctgtaatcccagcactttgggaggtggaggcgggcggatcacctgaggttgggagttcgagaccagcctggccaacatggcgaaaccccatttctactaaaaatacaaaaaattggccaggtgtggtggcgggctcctgtaatcctagctactcgggaggctgaggcaggagaatcgcttgaacccaggaggcagaggttgcagtgagccgagatcctgccactgcactccagccaggcaataagagtgaaactccatctcaaa

SEQ ID NO: 84682 - DNA, 2044 bp, Homo sapiens
agtggagagatttctgctcactgcaacctctgcctcctgggctcaagcaattctcctgcctcagcctcctgagtagctgggactatgggcgtctgccaccacgcctggctaatttttgtattttttagtagagacggggtttcaccatattggacaggctggtctcaaactcctgacctcatgatccgtccgccttggcctcccaaagtgctgggattataggcgtgagccaccacgctcggccaggaatctctgtttttaacaagctcgggagatttttcagcagccagtccagcaccccagagtttggcaggctttgccaagtgcttgatatgaggtggtaaatgtctggcacctttaaaatatagggccctttccgtccatctggccctacaggttgatgttaaaaggatgcaaaaatacggttctaaatgtccttaagaggctaaggttggtctaagcaaagcatggaggaaaaagcccttttgagtttgtgtgtgagtagataggagttgccagttggttgataaagtgataaagtaatccttttgtgttaggagccaggaagcagagagagaggaaacagcccaaagtgatttttggcttgagagcaaacacaatagcagaaagctgagtgacacctggacgatagtgcagagaagctgagtgacacctggacgatagtgcagacaagctgagtgatacgcggacaatagcatggagaaactgagtgacacctggacgatagtgcagagaagctgagtgacacctggacgatagtgcagacaagctgagtgatacgcggacaacagcatggagaaactgagtgacacctggacgatagtgcagagaagctgagtgataacgtggacgatagtgcggagaagctgggtagcagagatggggtttcaccatgttggccaggctggtcttgaactcttgacctcaggtgattcacccacctcggcctcccaaagagttgggattacaggtgtgagccacggcgcccggcttaggtcagaactttctacgcaggtaaaaagtgacagcccccacagtaccaacacagctgggctgagcttccgcctctctagattctgttactttctacctctactttctccctgtctctctaagagatcagccgtcactaatttagtgctttactaatttaggtgtctttgccatgaaagatatgtgttttctttttttaatttgttggaggttctgaaggcactttggcatatgtatctgttttcttcagcagcaaagatcatcgtggagttaagatggcagctttgttgtgattcgtaaatttgctgaatttgtaaataactggggatacctgctggactttgataaatgcaactttttccagtgcttaaaagaattgctgcagaaaatttagagtgattatacctccaaactgctcaatgaaaaaggtcaacaaaacagtataattatctatgtatatgtgtaactcgtatgtgtgtggggtgtccacgtcaccaagtattagaaagttaagagagaaggatgtggacaataaaacaccacccacttcaaagcaggtgcagagagtaaggcattgtatgtctgattttatgaccacgagaggtcagttctgggctaccataaactctatctggaagaaagggattcaggcaccattcaagcaaactttggctgagcatggtggctcactgggaggccgagacaggtgaatcaccttagtccaggagttcgagaccagcctggccaacatggcaaaaccctgtctctattaaaaatacaaaaattagctaggcgtggtggcgcatgcctgtaatcccagctacttgggaggctgaggcaggaaaatggcttgaacccaggaggtggaggttgcggtgagccgagatcacaccactgcactccagcctgaaggacagagtaagacggtctcaaaaaaaaaaagaaagaaacaaacaggttaaaagagaaggatgtgaacaataaaacaccacccacttcaacgcagctgcagagagtaaaacactgtatg

SEQ ID NO: 84683 - DNA, 1052 bp, Homo sapiens
tcgtgacctcaggtgatctgcctgactcggactcccaaagtgctgggattacaggtgtaagccactgtccctggcctattttattttaagacagggtcttactctgttgcccaagctggagtgcagtggcatgaacacagctcactgcagcctccacctcctaggctcaagcgatcctcccacctcagcctcccatgtagctggaactataggcacatgccacgagccggctaatttttaattttttgtagagacggggtctcactatgttccccaggctcgtctagaactcccgggctcaagtgatcctcgctccttggcctccacaagtgctgagattacagatatgagccaccacacttggccctgagactttttatttttaatctttatgggaaatgaatttcctactaagtagtcatgttacctgaacctgattcatctgtaacctgatgggttttctgcccttcccatcagtgactaatgagattgttgctctaggaagaattccttgtgttcagtggatgtctgagtaacttaatttgaaggattgaattttcagcctcagctgtgatagagtaattttttcccatccctattgtgaagagatattaagaagccatttgaggccgggcgcggtggctcacgtacgcctgtaatcccagcactttgggaggccgaggtgggtggatcacttgaggtcaggagttcgagaccagcctggccaacatggtgaaaccccgtctctactaaaaatacaaaaattatccgggcagagtggcacatacctgtaatcccagctacttgggaggctgaggcaggagaattgcttgaacccgggaggcagaggttgcagtgagccgagatcacgactctgcactccagcttggtgacagggtgaaactccgtctcagaaaaaaagatgggatcctccatggtgctgttatcgttactcttcctcgatggtgtctttattgttgctgttataagtccaggaattttcagttggctaaaccaggctactgcttatatttgaatctctccaggtaata

SEQ ID NO: 84684 - DNA, 1282 bp, Homo sapiens
ttaagctcgggcgactctatgaaaatgaactggcggcggcggcagggccggcgcccgggcctttgcgctttgcgctccgtggccctgacatcccccagcccctccctccggcctggcccccgccagatcccttggcgccaccgggtgctgtcacccttctgtctgtcacccctctctgcacacaccccaggggcttcccatctcccggaaatccccgatccttctgagctccgctttcctaaccgcggaaggccgaaccttccactccattttctgaacttagtctcctcttctccaggctgctctgtgtgttggggccacgtgcaaacttcagggaagggccacggccctcaccagccccctctgcggactcgttttcttcttagaaggcggcgcccggcctcttggctttctaggagtctgggagcaagagggcaaggggaggcttaggcccatctcgttttccggctggcctggtgcccagagaccatgtctagtccagcgtcttcactggataaaagaggaaaccgaagctcagaaagattaagtgctcgttggggtgagctgagaccttcaccgggtctcctgtcatctctctcccctcgcatctgctctcttttctgaggacagggcctgatcttagtcatctttgaacccccttctggtagtatgcacggtgctttgcagcagtcaaagctcaacgcataatggctgaataaatgattgcctggaattgagcgtccaccgagctctttctaggtcagggagtgggaatggggctaaggaggagaggtcaggtggggatgggggtggcgtgggagccctttgctgtgtctgtgaactgtcacggtctcctcagccacgcggaaagcagcacactggtggtgtccggttgggtcaagctgcaaccaggaatttaagatgccttcctgctcagtgaaggaggaaaaaaaatcattgatgctgggattgttccaaaatctccattattagattttatctggatgagtttgcatttgaatgaaaaactgtccactttgctaaaagcacagttggaaggtccatcaagtcatctgttttgatcaattacacttattccttagcaaagattggctgtgtttcccacaggcaatgctcttgccgcccatgctggtaacatttttatatgtctctttaacttaagggaagagcctgaagatttcaccctagtgccaagttccaaatgcccttggtggaggctacccaactggccccagctgcttcagagctggctgcaatcctg

SEQ ID NO: 84685 - DNA, 2383 bp, Homo sapiens
ctgtgtagtaattgtaagtggtttttttaaaaaagtacaagtgaatgtaacttttacctgttacatcatttttaagggaaaagcctgcatgcttctttattttggctgacttgtttaatgcatactaataggtagatgaccctccaaccaataggtggctttctgttgcatgtcatagtgcagttgaaactccttagggtaatcaccctctttaaaggcaaaagacaaatagcatgagtgaagtggtccaaatgccattctttaataacctcagtggtctgatttactttgagcatgctgtgtttcactctgaagtaaaatctgattatagtttggtgtatctggccaagatacaaaagctgaaatatttataacagcagaaccccacaataaaatacgatagaacttcttggcaacagtttattgctcagttaactattttgaagcatttctgataattagcttgtgggtaaattagattttgcaaaaagtttgcaaaatactcttgattcttgaagaggtgaggttattgagaaagagtattttgacccaagatttatgtgaaagcttgaatgtcattttagtaagatggtttccttggctgtctacgtcaagagcttatttagcgtaaaaacattgagttgtactgcgcatcagtttttttcattctgttgaccaataaatactttcaggaccataatcccttcttggcttaggcatctcaggtgtcaaggatgatagaagtcctttgcctgcgtttaataccaattgtagcaagtagaagagtctttatgcttggaatgacacctttgtttgtggctgccatagcctaatgtagtcaatacgaaataattgactttttttcttttttaacaggtgaagagcagaataaagaagcgctgcaggacgtggaagacgaaaatcagtgagacataagccaacaagagaaaccatctctgaccaccccctcctccccatcccaccctttggaaactccccattgtcactgagaaccaccaaatctgacttttacatttggtctcagaatttaggttcctgccctgttggttttttttttttttttttaaacagttttcaaaagttcttaaaggcaagagtgaatttctgtggattttactggtcccagcttttaggttctttaagacactaacaggactacatagaggctttttcagcattactgtgtcgtctccgtgccagatgtggcaagatcaccattagcaaatggaaattacatttgaaagccattagacttataggtgatgcaagcatctaagagagaggttaatcacactatagaggcataagtggtatcagttttcatttttctaattgtttaaactgtgttttataccagtgtttgcaagtaattgggtgttagcttgagatggttaaaggtggtttggggagggacttcgttgtaatggttttgctgtaaaaaatgtttccaactccgctgaaatgttgctgaaaagcatggtgctggtaacagttcaacaatccgtggctgctcattcttgcctactttactctcccactgaagcaggttagcgttgaaggtggtatggaaaagcctgcatgcctgttcaattcttttgtttcttctccttccccctccccctacctccttcccctcactcctcccctccttcgctcgctcaacctcttttgttcagtatgtgtaacttgaagctaatttgtactactggatatctgactggagccacagatacagaatctgtattgttcttactgaaacacagcatggaattaacattaaacttaaataaaacaaacctaaattaaaaatgccaaatatcgcgcctccatcctttatacttctaaaataaaatctctagtccaaacacactgacagtattatgtttgcctgaatgtgaaacattcctccttttttcttccataaataatttgtttgcttcccaaagatgtatgttttggaaaaaaattgcctgtagtctggttgtgaagaacactgagtcagttgatggtgtgtcttgtcctccagaccaggcagcaacatggtatttattttaatcattaaagtacaacatgagtagtacaaggtgtaattatggatcattttctagcatagtatttcatacaaccaaataaggctgaatgtcttataataattcttagaggtaaaaactgtgtgccctcttcctccagaggctagtggcagtagtggagaattactcaatcctttcttagtaatccatacacacattatagacagcaggatagcagtctccctttccagaaacactgtataagaagcttctttccataaacagtttatacatcaatgtgtatagatacctagttactgtagatcttttta

SEQ ID NO: 84686 - DNA, 1035 bp, Homo sapiens
tgaaagtggcagtttactaggatgtgactttgcatttagtttaaggattatttagatttttttgttttttaaagagacggtatttatgtcttttaattttagaatatgttaatgtctgtcccagcatgttggaacataatttctttaaagggagggatcattgctttttctcaagtgattttagtctcttcaccctgtggtaagaggattgtttcatatacgaatccataggtaggaaatacatgttctccctgcctgttcccctctctccaaaatgtagatacactgggcaaagaaacatagccaaggaatcctttttcccctaatatctgtatgtctttcaagaggatattacttccttctcagagtagaagggaggaggagtagacagattgttgcttagagtgaagtttacacgaagtaagaccaaagtccggctcctgtatcattgttttcctttgtcctgctctgttggtttatttttcttgtaatgttgctttcatatgattgttctccctccctttttccttgcaatatagattcctaaaggaaaacccaactcttcctttcctaaaaactctactttgtaagtcacgttcatggcacagtgaattccgctttcagttttggttcttcactaatcatgcctgcgtatgatcgtcctgttgcttacagactctgcctgttccaccttccagggcgctgacctaagccttttccggcctgctcctcctgcctactgtggttggatgtgatgtatatgacagtgacatttttatgccaaagttacttggaacttctggcacatctcatggttgcttacaagcgagttgtgttctagtgtttgtgttaatgatactttggcagtgatttgctgttagagtgaatgttcctatcatgtttcctacgtttgaatacgttattgtcctttggagaacagttgggtgcccatcagttctttcatccctaagcaatttttttttgcctttgcatattttttttctgtcttatgaattaaagatcttcatgtatttt

SEQ ID NO: 84687 - DNA, 1220 bp, Homo sapiens
tctactaaaaatacaaaaaattagccgggtgtggtggcgggcgcctgtagtcccagccattcgggaggctgaggcaggagaatggcatgaacctgagaggcgaagcttgcagtgagccgagatcacgccactgcactccagcctgggcgacagagccagactccgtcttaaaaacaaacaaacaaaactttttgaaataagtgaactattgcctagaacttggaggtatattttttggtgatggtttaggatggaagttgttctatgtattttattagtcgatatgtatattatagcatatcagtagcaggcttaaagcatagtaagaagtagtgttccacatacctttaagttaatttttattgtatttgctttttctttgcattatcattgtgactattacaaactggaataactgaagaaaagattgctgtctagcatgtcatttctaattctgattttggacttaatttttataacacttctattgaaatacctttaggttggcaaaagcagcttttgatgatgcaattgcagaactggatacgctgagtgaagaaagctataaggactctacacttatcatgcagttgttacgtgataatctgacactatggacttcagacatgcagggtgacggtaagcaagcacggagtgaaacaggcacctctttcagttgcaggatttgtttgtactctctttagacattccttggcttgtcgttatatcaagctagaatttagattcaccgcctgccctctatgaaattgtaattgctgcctttataggaaatggtgctacagtacggagttccattttgggaacttagtttagctcttcctttacactgtttcaaaggttgaggacaggaggagtggagagcaagcagtttattttatcttcattcaattcaattttagggggctgaagttaagtgtatttaaatccagatggtatcagtaggtatttatgaagtttttctctttgttgaaatattttatctaaaagggaactggtttcccatttccctctgggattctgtagagaaattgaatgttggcccttgggtctcttttttttttttttgagacggagtcttgctgcgacacccaggctggagtgcggtggctcaatctcggcttactgcaaactctgcctcccgggttcaagcgattctcctgcctcagcttcccagggtagctggggttgcaggcacccgt

SEQ ID NO: 84688 - DNA, 1941 bp, Homo sapiens
cctggtgaatgttgttaaggatgtgagtgctgaaggcaaactgcctgggtttaaattttgattctgtcccttgcagcctgcctgggttcaaatcctagctctgcttattaaattcttatttaattgttgatcttagagcaatgtctttacgttgctaccttgtgaaagaaggtaattcatgtaattgaccagcatttaccaagaagcatcagtgttcagttttagtcattggtaattctgtagctgtactgtggtactgtgaagggggtgtgggggctggcgtgtgtgcgtgcctgcatgtgtgtgtgtaacaataggcagcatgcagaagggaaaagatactttttataacctagaggcagcttttctctgcttttgtgtcaagaaggaagaagggagtttggagagggatacaaattctttttaatactaagctctctacctcaaaaccagagatagaatatgtaataatttgtagaatttctagacttaatctgatttaaaaaaaatttttttttttttaggttgagactgagctaaagttaatctgttgtgacattctggatgtactggacaaacacctcattccagcagctaacactggcgagtccaaggttttctattataaaatgtaggttctatactagaagggaaaatgtaagattgaaagttggtccttttagaaccataactttgttctatgtaggttttcaacttttatttaagaataattgttcaatgttagaaggatagttaatattgtaatgaaaaggtggttgggctattatgaaaatgtattagcttttgcttatttatattcttttgtttttgtgagacctatcccattcccctcccccaaacggcatacatttcacagtgcttagtgttatatatagacattttattttatgattaataaactgtcatgccattccttggaaccacttgcttgtttaattctggtctatcaggtgataattttattaatttttagaggctcctcagttaatttcctgggatttttgcttatatttagtaatatgaaatgtctaaggaaaaaaatgaaacgaagccagttattcctgagagtgtttaaaattattgaagtacacctaattgttacatatatttttgtcacattttatataatatagaacaattttagcttattttcctttaaaaatcgttcctagtttaaattttttttttttttttaattttggttttgttttaggaaaggggactaccacaggtatctggcagaatttgccacaggaaacgacaggaaggaggctgcggagaacagcctagtggcttataaagctgctagtgatattgcaatgacagaacttccaccaacgcatcctattcgcttaggtcttgctctcaatttttccgtattctactacgaaattcttaattcccctgaccgtgcctgcaggtaagttgtggggaagaacagcagcgctcagcgtgaaagttaaggggggcgctgtttgggttttccgtgttgtttcttgggcctgtctttgtagacttggctgcatagtaattcttttggctcttactgaaactactttggatagtattaaaacagacctgtctcaacccactagcatagcagtcagcataattattttgatgtgggatatttttgttgctggtagattgaaatctaacatgttaaaatgagtagaggaaggaaatgagaggaattagaattattttaatttttgttatattagttttcagtctttttttaaatttgagaccatgtctcactctgtctcccaggctagagtgcagtggcgccatctcagatcactgcagccttcacctcctgggttcaagtgattctcctgtctcagcctcctgagtaactggagttacaggggcctgccaccatgcccaactaattttttttgtatttttagtagagac

SEQ ID NO: 84689 - DNA, 1790 bp, Homo sapiens
caccttctgggttcaagcgattctcctgtctcagtctctagagtacctgggactacaggcgtgcatcaccacgcccagctaatttttgtatttttagtagagacagtgtttcaccatgttggccaggatagtctttatctcttgacctggtgatgtgccacctcggcctgccaaagtgctgggatttacaggcatgagccactgtgcccagcctctgtttttattttttagagacagggtctcgaactcctgagctcgagtgattctcctgcctcagctctcaaagtgctaggggtatgagccacttactcctggccctaaaatgcagattcttgagtctcatcaccaaagattgaaacgtgggtaatgttggagagccacatggtaatatggcatcaaaaataagtttttattaatgtatttattcagttactatttcttgtgctgtttgtggcgctttgcattcacacgccgttgtgtttccctatgcttgcggtagatgccaaggcttttctgggcccctttctttgctcgccacctagtggtaacaagtaggaatcatcagaagttttaccaatgaaggagcttcatacgaggaaggatagaaaacatccaaagtctgttggtggccaaccatatactccgtatatttttgctgtatgaacaaattccccttccttttgtatttttggaaatactatttatttgtgagacaatacattttagaacctgtaaattcttaatctttctcttaaactgacagctcatttttttttgctggaaaatagttaggtgtgcctaattaccttatttaatgagaggtgctttcagaccacactaaattatattagatagtatatgaagtctttctcactccacctaactaccttctggagtctttgtattggctcttagtttggtttcctttacatgtttttggctttttactcatattagttttgatgattatgaaattatttttgttaaaatgtttttttcgcagtagcttgacagaaaaaaactactttgaaaggaatatgttaagaaaacttcaaatttgtaaggtctgacttttccttttcccatacagaaatggtggagtcaatgaagaaagtagcagggatggatgtggagctgacagttgaagaaagaaacctcctatctgttgcatataagaatgtgattggagctagaagagcctcctggagaataatcagcagcattgaacagaaagaagaaaacaagggaggagaagacaagctaaaaatgattcgggaatatcggcaaatggtgagattgttgtgccatcatccccccttatccacagtttgagttacctgtaggacggtacacttaagattttgagagaaaaggagactacattcatataacttgtattacagtatgttataatgtttctgatattgatctttgtgcctggtttataagttaaacttacccgtggctatgcatgaggacaaaacatagtctgtatcaggtttggtattttccatggtttcatcacatccactggcaggtctcaatggatccctcttggataagggggaactattgtattttcaagcaaaatgatgactgttttttaaaaaaatatggtgggttggccaggcgcggtggctcaggcctgtaatcccagcactttgggaggctgaggtgggcggatcacgaggtcaggagatcgagaccatcctggctaacatggtgaaaccccgtctctactaaaaatacaaaacattagctgggcgtggtggcgggagcctgtggtccca

SEQ ID NO: 84690 - DNA, 1012 bp, Homo sapiens
tgatccacccgccttggcctctcaaagtgctgggattacaggcgtgagccgccgtgcctggcctgtactgaatttcttttatagtaaacgagtagtattgctcctgaaatggtctgagtcaggctttttagacatgctttttagtacagaactgatgcttcccagattatttgtcagtgtgatagagaaggtgcgtgataatcgttttagaaaaaattttgctccatctttatatttctgaatagtaacaagagagttgtcatgtgactagcaagatattgggaccttttagaaatcagtaaggcagaatgttgattgtcatgaattatctgtgaattgactatgtttagtgattgtcaagcttttgcctaattttattcattccttggaggttgtccaagctgaatcagattatttgaaagccacacaattcctgagcattctcatatgtcagccttctgcagaaatgtcctcagttatttcatggggtcagaagtatccaattgaagactgcttctcacatgtaaatctaggcatacattttctgtgatgactcctttttaagaaaatatccgcaaggtaaatttcttagtaagtagcaccttgtaagtttctctccaacaaacttgcatactatcccctccaaaccataaaaacaatttgagacttttattttgagacggagtctcacctctgttgcccaggctggagtgcagtgacgcgatcttggctcactgcaacctccgcctctcgggttcaagcaattctcctgcctcagcctcccgagtagctgggattacaggcacccgccaccatgcccagctaatttttgtatttttagtagagacggggtttcaccatgttggccaggctggtctcgaactcctgacctcaggtgatccacctgcctcggcctcccaaagtgctgggattacaggcatgagccactgcttccagccaggaagtctttacatagtaagacatttgagtttgatccagagggatgatgttt

SEQ ID NO: 84691 - DNA, 1615 bp, Homo sapiens
catttatggctcactgcagctttgaccccctgggcacctcagcatgccaagtagctggggctacagaagtataccaccacttctggctaatttttgtagagacaggattttaccatgttgcccaggtcttgaactcgagctcaagattcacctgcctcggcctcccaaagttttgcgattacaggcgtgagccaccatggctggcaaaaaaatttttttggtagaggcctggtcccagcggattgcccaggctgatgttgaactcctgagctcatgtgatcttcccaccaggtagctggtaccgccatgaccagctaattaaaactttttttttgtggagacgggatcccactgtgttgtccaggtaactcctgggttcaagcgatcctcccactgtggcctccccaaagtgcagggattataggcatgaaccactgcgcccggccagcttgatatatttaggtattgatatatccaaattgacgaattggttgccaacagaacctcatggttctctgactaaatgttaatgctagtcatggccctaagaacaatttcagatgttcatttaaatttattaaattgtagcaaataataatgaaagtcaccataatttaacatccacatgagtatatcttgaaaagacagactaattcatcagctacaacagcaggcataaactgggattgtcctgggcaacaaacttgccttgtggtcaccctacttaatggccatttgttactagattttgtcatttagactcatacaacagtttcctaaacgttgtccagctttttatcacagagatagcttagatctacgtctctaggaggttgaatttttttttttcaaatgaagttagcctttggcagaatataagtcaaaggaaaagtgaaaatttcctcctcctagctccctcccccacaaatgggaacgtgctagttaaggatgtggtagttgctgaaaatagagcttgctggcattccaaatcctctgatggtgtcaacacctagtgtgttggttttcttatggctaccttgagccagttctgtgtttaaaaatataatagacctaggtgttggtagcagtgtcctaagctcagagctttccctacatacattttatttttttatttttacaagtgtctttcataccaaatacccacataaaaatttaaaggctcacccatatcttgttacaactgttatgtttagaatgccaaactgtgtagttcagaccatatgaccatgatcctggcttatctcttctgaaatttttatcttgaatttattgcccttccaacaatctaccatagtagctggacggatctgttgttggtgggcttgatttgtgatcagatcaggattttatcgagctaaagcaatatgaaatgtgtttaactcttcattcatatctaaagtttgaaggagatgcattactgtaagagttatgacagtatttcatcatttggcagatgtggtaaatctgccatcacagaatgcacaggaatcactgggttccttatctttcaaatggggattagtgatgtctctcttgcctactaatttgcagggtggttatgaaattttgggcttttgtaaactgtaaagtgtaa

SEQ ID NO: 84692 - DNA, 3693 bp, Homo sapiens
caccactgcactccagcctggggaacaagagggaaactccgtctcaaaaagaaaaaagaaaaaagaaaaaagaaaagaaaaccagggcgcggtagtgacagcctcagatttcgggaaagaagacctgccatgacagaaaccgttacagcctccgtcgttcttttccgcaggtcgggcctcgggccccggtctgacccaggtctctcgctggcttttttcaggagcagtcccggccggccccgcctcagcccttctcgttccccgggggccgctccctttcggcagtcgcagttcccgcctctgggctccggcgcccgctgagccgacagaggagaggcgtctcgtgcgctcgttccagccgcttcgggcgccgagttccaggacccgccccccgcgccagttgccagggagcggttgccatagagctgagcagttgtccgcgtgcgcaggcggaagtcccggattgaggcgccgccatttttgctgcccggacgcggagcgagaggctgagagagtcggagacactatccgcttccatccgtcgcgcagaccctgccggagccgctgccgctatggatgatcgagaggatctggtgtaccaggcgaagctggccgagcaggctgagcgatacgacggtgagttgggggggcaacggggggctggaattctcggaccctctgccgccgcccacagaggccgggaacaggagacaaaatggcggcatcgtctgcgagcctggcccgggggcttgggttcgggaagcaggaaatggcctgggagctcccggggcgatgggaggctctatgccctggaatgtgaccccttcgccgtccttaactgcaaacaactcgcgggccgggaggccggggcgacggggtggaggagttggttgtaaaatggcggctggggggagggcgagtcccggggcgggggagggggaggagatggcgggtgctgtctccgaacgagccaccctcatgggagcttctgggacggccttgggatgtggagaacaattgggtggggtgacgggggaagcagcacccgccacatgggagagagcgaagaccgggagctgtagcgcgggcgcctttcagggaaatatggcgggtgggggcggtggcttttccccggaggccccgtgtggggcggcggccgtggagtctcacaaaggaggacctttgagagcgatgggcttcctcaggcctgaggtgggggacagtcgtggatgatggtggggggagaggggtgagtgggaatcactgcagttcgtcttcgggcggtggcaggctcccatgctgcgatcgggtttctttcccgtaggccggcacctcgtagtgaggggtttcggggcttttcctcctcgtcgtcttctggggaggcccagaaaatcctcactccctccctttcctcagacttaaaacaggagatctcgaagttcctgtaacctttctctggctccatcacccgtgggttctgatggatagaaccaggaggccacgactctgagagttcgagcctttgtagagcccgagcctccgtccccccgtttgtaaaaacgatgactttacagtttgtgcgcaccgtgatgacaaatgggaagacctgttgaaataaagttatttccaatagtgttcagtaactgtattttggttgactctgcaggctcggaatgctggtctgtacttcgtgggggatcttaacctattccaggcgctcggctgaggctgggttttttgagttatgaaggttgaagatcctgttgctttctttttttccgttttaaataaatgggtttatgtagaaatattagtaggtcctctttgttcgttgttcttttgcccctaatgggttctccagtcctttttcagaacttcatcgaatgtccattgtgtctgtccagtcattgtcaggaagtttattcttaatcctctctcccagtccaccttttggaccaccttttgaaatacccacacatttataattgtgcgatactgtagtattaaacgaaaggtcatgtctgtgggtcctgtggttttaatgcttttgcgtggtagggtggggtgagacatggttggaatcaagtatctttgattcttagatttttttcctaattaaaatacctatatttcaaaatgttagggcccttgctttcctcgaaatgcggatttagtcatgtgaataacctcagggttagtcccccttatcatcagaaataagattcagggatttgaaaataagacaaggcctctagaactcatatttaggaaatatagtgaactaaatttcgtcttgtaaattcttaaattgctatttgtattcaacaaggttcctgttggggggggggataagatggggaagtacagctcaaggtctgctttgtctttatttcagtgtttaaaaatcaaagagatatgaatgtgcttgtattggaagtctcctcctccgccccctcatctccagatgttcccctcttaatctgttagtgttcttgggaggaaacaaattgtacttgaatgctttctattttgtgggtattggggctttttaagtaaacttgctgtgataactagaaaggatgtgaggaaaggtctttttctttttgaaagctcctttaaaaaactgatttgaaagcttgtgattgtagtttccaaataaagtacaggttagtgataattatatttttgatgtgagtggtgaggatttctgaccagagcccttattggttattgaacatgggactctgatacagccacattattacagttgttaatgttaggtgtccccttcaggatctaaaggggtaaggaaataggatctacaaggtgaggagctattgctgtgacttggggcataaggtagggactcagtggaaaggagaggaggaggaggagacagaaaccaggaatttctacctgtgtcctctacctgtgtccattcctttattgagtgcggtatttttttgtttctggtggcaaagttttcccggagttctggtcaccaaacagaacttagcaggtgtcgggggtggaagaaggtaagacagtgtattggcaggatttctttgttgggtacttgtacccaaatgctgggtttccagctgcccttttatctctctgttactgcagcaggcttattttattttgcttgctgtgttgaattagtgcctaaacttctttgtatcctcatttaattctatcctggggcgttggaatcaatttatatggattatttaacagtacgggaggaagagctaacctgtgttcaggaaaatgacaattttgggtcacaggaaatatttaagtttggggctgggagttgaagattaaatctagcatctcatcactttaacaagccagtagtctattcgaatcgtttttacctcctttgaaaccatattaagcaagtccattatttcttagcatttctcaaacagctcttactgtcccgtatatgaaatagtacaagaaagtggggaagaaaggccgggcggggtggctcacgcctgtaatcccagcaccttgggaggtcgaggcgggtggatcacctgaggtcgggagttcaagaccagcctggccaacatggtgaaaccctgtctctacaaaaataaaaaaattatccgggcatagctactgaggaggttgaggtggaagaatcacttgaacccgggaggtgaaggttgtagtgaacca

SEQ ID NO: 84693 - DNA, 3397 bp, Homo sapiens
aagctgagggtagtgagtacaaagaaagggaatagtagctaactcactgaagttgggattgctcatgcagagacagctgagatttccaataattatcactttccttttttaatcaaaaagtatcattatctggaatcccttttactttctgtattctctgtttttccacactgctaaaaacacttttccttctgcctgcattaaccacaagtaatcagtctggtggctggggctggggaggcagcaaatggccatttctgtaatatccctagagcagtcacatgggcagggtgtgcctaaccagagaatggagttgttcagcttgcattcctacctggaaataaagtgctctccttattctcctcctgcaggtcggtgagctggtaaaggttacgaagattaatgtgagtggtcagtgggaaggggagtgtaatggcaaacgaggtcacttcccattcacacatgtccgtctgctggatcaacagaatcccgatgaggacttcagctgagtatagttcaacagttttgctgacagatgggaacaatcttttttttttttttccaactgccatctatacaattttcttacagatgtcaaaagcagtctagtttatataagcattctgttacctgtgatattttttagactgaactgctccattcctagtcttaattaccatattcagggtacgaactggagggcttgtgtgttagcttctgaattggcaattggaggcggtagtggtcgtgcctgtgtgtatcagaagggataggtatcttgcctcctttctctcaggcagtgcaaatcaccctgtggaaaaccgatggacaggaaggagtgttacacactgcttaccctgatttattcagtggttttgttttcattctggaaccatactatcaaatggcgacagactgttccgttccacccccgtgaagtaatcatgcaccgtgtgaatagtatcaagcaggattgctttcattgtatggagcatgaccagcgtgtgactcattctgacatttcagatcctaagaattctaagaacactactagaagcatttgttccctcctagtcaatgcttcatactttttcttgggattcttttagcccttgacattcttgtcccccaaacctgtaagtaggtgaattcctaagataagtgtgtattttcattccaggtgaaaagcaggatgtaccgagcactttattcagtgcatagctttaagccagtgttggattcactaagtggacagccagtctcccagctctctgccttccccaaaagggtcgtagtaggtcacccttctacagcagctaactagagtcctaactaatgggatccagcagggccatttctccagagggccagtatcctattaggagactcttggaattcttaggttctactcaagagtggaaggaccaatcacctctgatattctgtggaaggttttggggtcaaattctgccctctgcattctgtgcaacttgtataaaagtcaagttagtattacatgaatttggggtagggttagtgctttgaaaaaatgttgaaccggctgggcgcggtggctcacgtctgtaatcccagcactttgggaggccgaggcgggtggatcatgaggtcaggagttcgagaccagcctggccaacatagtgaaaccccatctctgctaaagatataaaaaattagcccggcgtggtggtgcacgcctgtaatcccagctactcgggaggctgaggcaggagaattgcttcaacctgggaggtggaggctgcagtgagccgagatcgcaccactgcgttccagcctgagcgacagggcaagactcagtctcaaaaaaaaaaaaaaggaaaaaaaaaagaaaaaaaaatgttgaaccaattgtgaattacttatgtattattcatttctcatggggagagtaatgctgttgaagaacattacattgtaaactgccttcatttttggctctttgtttatgttcaggtttagtttacaaacccatttaagtatggaatgatttatatggggtcaggtgctccacaaaatagacctatgagaccaaaaatgacctaggctatttagacgacagcatgaaacttccacgttagttctcagtctataaaggcacttaccggtctctggtgtggtatgaccaatagaaacaccttatagtttgctttggacctcattttggaaaaataatctgcctttctaattgttctgcataggttaaaatgataaatttacattctttgaacctataccagattgtggtgtccgagtgaccggcacactgtctgacacacagtcagtgtgcacgtatttgtctgagtgaatgaggagacctgagaaaccggtgacgtggcacagggaagccagctggcccaggattccgtacatggccgcaagcagactaacgcgttgacgctaatttaatgtattttacctcacactaaggtcatgcttgataaagacgttaaactcaacttgtaaaatggtagcccagtgctatgcacagagtgggtgctcattagtgttgaatgaacacatttgtaatactacatgtaattccatctgactgctttgttaaattttcagttagaacgtagatactgtaaagtccacacacacattaaatcttgttttcctgaaagtatggcatcaaaaatacttgtagaaaaaccttgtcacaactgatttgaatgttcctattttcttttcctttgactttgatattggcttgtaatgtctcttttcatcatatgtaatatcagtggaacaggcagcgctactcaagtcctaaggattcctcagtgatcagtgatccagggccgttcatgaaccactgggctggatttgactgttgagtgtggcagttaatgcccctcaagaaatcaaaggatgtcttataagtgtcttccaaaaaaaagcaaatgctgaaatcctattggcaaagtaaactgaaattggctgctatattttatataatcatttctgcaaatcccattttttgaatactaatatttgacatggttaattcttattaatttgttggaattgtttattgttaataatgcaaatagataatttttaattatccacaagtaacatttcactgttaatggtttgaaataggtgataagcaaaccaatttgaaataaaatataaacatgtgccattgtattataacactatacactttcttgacagttaaatttaaaaaaaaattttttttggtagcatgtattgtatatgtttatagtatatgtagtaaataaaaatatggccaaatgtttggcttggtgatcttttgcaaaaaagtaatctttgaatatttttcacaaaagaactaaatctttttttttttttgagacagagtttcgctctt

SEQ ID NO: 84694 - DNA, 1065 bp, Homo sapiens
tgctcagccggcattgtcacgacacaggctgggttagctgcttggttttctctttttttgcagacagggtcttgttgcccaggctagggggcagccttgacctcccaggaggctcaggtgacctcctacctcagcctcccaagtaactgggaccacaggcgcacaccagcacgcttggccacgcttggccacacttggctttttaaatttttttgtagagacaagatctcactcttttgccagggctgctctcaaaatcatgggctcaagccatccccccacctcagtttcccaaagtgctgggattacaggcatgagccactgcaccaagcctgctgctatttttttctcaacctctgtgtcttatgtgtctctctatccccttctttctgtccctccttttctcagcatcctatgacccatacagtgacttcaggcctctgtaatttttagagagttcttcaggaaacaacagaggggccaataggcaagctgttccatctgtaagtgaggtcaggctgggcctggaagaggccctgcggctggacttacgttggctttggccagtagatgtgcctgcgtacatttttagggaacccagtacaagcccagatgcataatttgaaagttcctgatactgtatgaaatgcataaatggtgtggaggctcatgcctgtaattagctgggcatggtggcgtgcacctgtagtctcagctactcgggaggctaaggttggaggatcccatgagcccaagagttacaggctgcagtgagccatgatggtgtcagtgctctccagcctgagtgacagagtgagaccctgtctcaaaaacaaaagataaaaagatggccaggcgtggtggctcacacctgtaatcatagcactttgggaggccgaggcgggcggatcacgaggtcaggagatcgagaccatcttggctaacatggtgaaaccccatctctactaaacaaaatacaaaaaattagctgggcgtggtggcgggcggctgtagtcccagctactagggaggctgaggcaggagaatggcgtgaacccgggaggc

SEQ ID NO: 84695 - DNA, 1010 bp, Homo sapiens
gcggtggctcacgcctgtaatctcagcactttggaaggctgaggcaggcagatcacctgagatcaggagtttgagaccagcctgaccgatatgatgaaaccctgtctgtactaaaaatacaaaaattagccaggcgtggtggtgggcgcctgtaattccagctactcgggaggctaagacaggagaatcacttgaacccgggaggcagagatttcagtgagctgagatcgtgccatagcacttcagcctgggcaacaagagtgaaactccatctcaaaaaaaaaaaaaaaaaaaaaaaaaagccaggcgtggtggtgtgcacctgtggtctcagctgcttgggaggctgaggtaggaaaactgcttgagcctaggaggttggaagagaaggctcctgtgctgcctctctgtacttgctcttccctggttttgtgtgtatgaatttgtgtgtgcttcctgccctgagctcactgaaagcaagtctggatcaaggcatgttagcagtcagtgatgtgctgctggttggtagtagggacctagaaaagcagtcacctgggtttgcgccagcaaagaaaaccagttctgtgatgtcccctgtgtagtgaattccaaacattgataccatttgggttctgattttgttctcattatctctggaacgcattgatcagctgggtaatcttttgttcctgtaccaattctagatctgattgcaccaggatcgattagccttgaaaacgacacagagctagggaatagccagtgtttgttacgttccttgggagcaaagaaactgtagtaaccacattcagtcttctttatgaatgactccatgatacagccgggacttgcttcctaaaaaagtgaagatgaaaggatgcttgttatattttagtcaacttttctaggtgttttgtggattgtggttctttaggatatagtcttaagtccaccattctacttgatagcaaactctgtttaaatacctcaatcttatattgtctttgttc

SEQ ID NO: 84696 - DNA, 1929 bp, Homo sapiens
caaaaaaaaaaaaacatgcaacagaaccttgaggcttacactgctctgtaaatggggtagcgacagaacatatttggagaatgcagtgaaagcccccgtcgttgatcaagtatgagagcacgtcctgatcagcctagtctcctggcctcctcatccttccctggggctgtagtgatgggcatctttcttcccaggggatgtttcagcttccaaatgtgatgttggtgtgctgtgaagagaaggggttattttttctagagttttttttgctgattaaatcttgactaaatgtgtatgaggcatgcatgaaagctccatttcggccaggcacagtggtgggctcctgtagtcccagctactcaggagtttgtggtgagaggatcacttgagccccggaggtcaagaccagcctgggtaacatagtgagatcccaactctaaaaaaaataaaaataaaatctgcatttcatttccagtgtagtacatcattaaataacagcctgctctgttttttccaggggtgagcccctccagactccgaataggagatcaagagtttgattcattgcctgctttactggaattctacaaaatacactatttggacactacaacgttgatagaaccagtttccagatccaggcagggtagtggagtgattctcaggcaggaggaggcggagtatgtgcgagccctctttgactttaatgggaatgatgaggaagatcttccctttaagaaaggagacatcttgagaatccgggacaagcctgaagagcagtggtggaatgcggaggacagcgaaggcaagagagggatgattccagtcccttacgtcgagaagtatagacctgcctccgcctcagtatcggctctgattggaggtaaccaggagggttcccacccacagccactgggtgggccggagcctgggccctatgcccaacccagcgtcaacactccgctccctaacctccagaatgggcccatatatgccagggttatccagaagcgagtccccaatgcctacgacaagacagccttggctttggaggtacataacgtgcacaatgtagaaagaagagatctgctgcagggtctcctctcggtcctcttagagctttgtagcaatgctgactacagcattgggatgttgtagatggcaagccgctaagcactgatgttggcattgaatgttgggttttctcttcttcatagaaaacctgtttgggaatgagtaagcttaaaactgtataactgaatgttcttaattgatctactaaacacacttggactactttaataacaccacctgaattcacaggaattaacctcaaatgtttttcctcatctacatcctcatctgtttcttgctttctgtttgtcgttgtctaaaagaaggtgggttcagatggatttgagtgtaataagtggtctctatcaaagcacttaaatggaattttcccgcaaaaacttgtttttgcttcaggggacttgaagttccttaccactaatgttcattgagtagaatccgggaggaaataggcctagtagaggtttgaagagatgcacacccagaagtcctcattccgaggagtggcaggtgcacgggtctttctaaatcattcaaaaagccagttcttcctcaggaattaatttttgcctttactgatgaaatatctttggcagcccacttccttctggccagccattacatggtgttaattcctttattcctctcttccacgctcacaccttgctctcctacctccttcctttcttcttccttcctccctctctcccttcctttcttttcagaagaattgatggttcagtgtaaaagctagtacagactgggcacagtggctcacacttgtaatcctagtgctctgggaggctaaggcaggaagaccacttgagaccaggtgtt

SEQ ID NO: 84697 - DNA, 1038 bp, Homo sapiens
accttggaagtgttcacagatggtcgtagttgctcatggcgattctgttgtatctcaggacacagtgcgttattccaactgtctttagcaggaacatagatccaggtgaaggtgaaagccgggtgggaggttgtcttcctaagacgtgccgctttctccttgttcaccagccacactgtgcttgctgtgttatctccaacaatgctgtgaacttctctgagcttctccagtctaggaaggcattgtgcttagcttctttccatcacttcagagttaggcttattaagataatatctggctgggcgcggtggctcatgcctgtcatcccagtactttgggaggccgaggcaggcagatcacaaggtcaagagatcaagaccatcctggccaacatggtgaaaccccatctcttctaaaaatataaaaattagcaacacttaactgagcactgacctgccaaccactgtcccaaaaggacaactaatagaacaccttggcatgtagttgggtaaaccttagcaagggagcttttctccacccagctgtgatcagaaccatttctaagccatgggtgcccaggtggcctccttaccactctgccctagagttttcttgaccaggcagtgctaagtaggtccctatgcgctcacactgaccctgtcctaaacagtttctccataggcctgaaagatcacccagaattagcctaatggtgataggcaaggtagccatgaatctccttgactaccagacttgaataggaattattctccatcagtgatcctcctcaataaagagaatctccagaatatagcacctccgtgctctgctacagtcataaccaaaatcccctctccagtcctgccctcggaacttttgcgatcatcttctattggtgcatgaggagtgtttgccatagaggacagtcctggcactcgcacccctttcagtgtcttaaattggagagacagccagtattcctgagtctgggctgttcactgttttaagctgacagctgtgaattccacaggtggactt

SEQ ID NO: 84698 - DNA, 1077 bp, Homo sapiens
agaccccattctccataaaaaggaaaaaacaaggacgaaaagaaaagtctgagtaccggggcccccgtctgctcccctcaccacttggccgtctctctccgcccccacaggtcgccccacggctgaattctcggtgataaaggcgcccactggaccctcccaacgcccaatgctttgcttttctcctcctccccttcccagttaccaaagactcgaacttccagacagggacccagggacaccccgaagcccacctgcaatctcccacctcctgcccatccctctcttgagggagcagcaggggccaggagctaccccaggagtgggccaggccgggccacagcaataggaaagccagggccagagcgagccatgccagccctactgccgatgccaaatatttgagagaagggaacttttgctgaggttttctctgaggtttttttgatgctttataggaaactattttttaaaaaaagccatttcccacccaaggacacagtggatgtgttttccctgactccagcagggcaaggaatgtagccgagaggttgtgtgggctgggctctggtgccctcttccctggccaggacacctctcctcctgattcccttggcaccttgtctttctgtctgtttacctgtctccctgcctgcccatctgcatcttttgcagcccactctgacttccatctgggggctgagaccacccttgcctgcccccttctttctgccttaagaatgtccttttaggctgggcatggtggctcacgcctgtaaccccagcactttgggaggcggagacgggcagataacctgaggtcaggatttcgagaccaacctgacctacatggagaaactccgcctctagtaaaaatacaaaattagccgggcatggtggtgcacgcctctaatcccagctactcgggaggctgaggcaggagaatcacttgaacccgggaagtggaggttgcagtgagccaagagtacaccactgcactccagcctgggcaacagagcgagactccgtcttaaaaaaaaaaaaaaagaacgcccttttactgtcctcatcatccca

SEQ ID NO: 84699 - DNA, 1022 bp, Homo sapiens
ctgacccctcctcctgcctggccccccagggagatgtggtgctgcagagtgaccacgtgattgagacgctgaccaagacagccctcagtgccaaccgcgtgaacagcatcaacatcaaccagggcaggtgaggcgcgggcggcccccggggacagggcgggggtggcgagggggctgtgtgggcacccagggacagggtgggggtccaccttagggttgggggtctgcctccatggaaaaaccctcacccaccccgttcccccagcatcacgtttgcagggggccccggcagggatggcaccattgacttcacacccggctcggagctgctcatcaccaaggccaagaacgggcacctggctgtggtgagtggggcctgctttcccgcttatggcctggctgtgatagccaagccttccttggctgtgcttggcagagcccaggcacctcaccatgggccttcatccagaggccatcataccacctcttccatcccttggcccacccatgagggccagagagagcccctcagtgcagaaagttgtaaaggtggcagcacggtggctcatgcctataatcccagcactttgggaggctgaggcgggtggatcaccagaggccaggagtttgaaaccagcctggccaacatggcaaaacccatctactaaaaaaatgcaaaaggctgggtgcagtggctcacacctttaatcccagcactttgggaggccgaggtgtgtggatcacccgagatcaggagttcgagaccagcctggccaacatcgtgaaaccccatctctactaataacacaaaaattagccgggcgtggtggtgcacgcctgtaataccagctactagtgggggctgaggcgggagaattgcttgaacccaggaggtggagattgcagtgagctgatatcatgccactgcactccaggcctggggaacagagtgagatgtcatctcaaaaaaaaaaaaaaaggccaggcacagtggctcacgcctgtaatcccagcactttggg

SEQ ID NO: 84700 - DNA, 1018 bp, Homo sapiens
ctgcaacctctgcctcccaggttcaagcgattctcctttgtcagcctcctgagtagctgggactacaggcgcccaccaccacgcctggctaatttttgtatttttggtagagatggggtttcaccatattgaccaagctggtctcgaagtactgactttgtgatctacccacctcggcctccccaactgctgggattacagccgtgagccactgtgcccggcctggggtgcacctgggcagctggttcctgctcctgaggccctttcagcaggcagagggcttggctcaggccggcagccatctgcagcttcctccctgtcacccccaggcacaagctggctgaccagcggaccaggaaatctctgggccgaggggaattccgccttctgcactatgcgggggaggtgacctacagcgtgaccggtgaggatcctggggctgtgtccccacaggggcctgcggggaggctctgtctcacctcacgtcggttctcccctcccagggtttctggacaaaaacaatgaccttctcttccggaaccttaaggaggtgaggaggacgtggggaggccggggtgggggtggggatagcccacagctctgcacctgtgtccaggagcctgtcctgcctgtccctgtgccccaccctgaccccggctctgcccacacagaccatgtgtagctcaaagaatcccattatgagccagtgctttgaccggagcgagctcagtgacaagaagcggccagagacggtgaggaggtggcgggaccgggcgcaggggtgcatgcgcctgagtgtgcatgagggcctgtgtgagcctgggagctggcagcgtgcgtgtgaacgcgtgtgagcccgtgcacatctgcaggtgtctgtagggggctgccttaggtgcctctttgcctactttttttttttttttttttttttgagacagggtctcgctctgttgcccaggctggagtgcagtggcgcaatctgggctcactgcaacctccacctccctggttcaag

SEQ ID NO: 84701 - DNA, 1038 bp, Homo sapiens
ggggactgtctctgtgtttctcacctcctgtgctcaggggcgtcgtccagcttttcccctctcctggtcctgtgtccccactgagccactgtgggctcttctccttccttacagctttgagcagttctgcatcaattactgcaacgagaagctgcagcagctcttcatcgagctcacgctcaagtcggagcaggaggagtacgaggcagagggcatcgcggtgtgtgctagcctgggggcactctccgtgggccacggggagcctgggtatcggggcccctgggagagggtgccaggaccccacggtgatcccttccttcccttctgcccctcagtgggagcccgtccagtatttcaacaacaaaatcatctgtgatctggtggaggagaagtttaagggcatcatctcgattttggtgagtcctctgcgcctccaaggcctggtgctggaggctgggtgggaggatgtcccccttctccgttctctccaggctggtccacggagggccagagtttggggctgagtagagacagggcagagctgtgaatggaggatggagggaggtgccgccccagttggaagctctctgtggagactccctgtgatctgcccctcccctgtgtctgtgcctcccagcacggtgaccccaatcctctgtgcgctctgacctgtcccccatacgtccttccccctgtgccacaccccccaggatgaggagtgtctgcgccccggggaggccacagacctgaccttcctggagaagctggaggatactgtcaagcaccatccacacttcctgacgtgagtggggctgcggggctgctgggggcaagggctcacttgcagcagagcctgcggagtgcaggagtccctccgccatcacaaaacaccagccacaaggaggtgaccagggacggtgctgagttaaggacccctcacatgtgtccagaaactaagaagcttagccaggcatgctgacacgcctggagtcccatctatgcagaaggctggggcaagagcatcacttgagccctgga

SEQ ID NO: 84702 - DNA, 1056 bp, Homo sapiens
gcttggggatgtggccagcatagctattcctctggcaagtatcaggcagcccagaagttcacctccaagtcgaacgtgccggagacaggcttgtggtcgctgatgccgtacgtcatgtggctgctgtagcccctcagagacaaggagaagtgtgacgccggcggtatgggagtgtcggggccagcacagggctgccgcttcagcctccacaggatgcgatcggtccatgcaggcttgcgttttttctcactgcaggggcagggggcataaagaggaagaatggggaaagaagaaagggttggctaagagcagaaatgagcccacatgagcttgctggagcccctaactccagcaactactggcagccacagacccccggggccagagccggagggagcaaggcagcaggcaggaaggtgcctaacagaatccaaagtatgccagcacttgtcagacttagccaggaccctctgtatgtctagctcatgtttttatggatcaaattgtgactcagaaacattccatttcaaagctttgcttctttcttgagcaaaagcagcagtggatcaaagcagctgaggtttgagattctgaggctggacacacctgagcttgtatttggctgccctgcatactagaagtatgcctcaggaaagggaagggaagcatttaggaaatgcttaccagaggatgcctgtgatcagtactgttaccacacctttttttaaatttaattttatttttttaaagagacagggtcttgctctgtcatgcaggctggagtgcagtggtgacatcacagcttactgtagcctcaaactactgggctcaggcgatcccacctcagcctcctgagtggctgggacggtaagtgcgtggcactatgcctggctaatttttaaacatttttttgtaaagacagtatgtttcccagcctagttttgaactgctggcctcaaaggatcttcccatctcagcttcccaaagtgttgggattagaaggcatggaccactgtgcctgggtgtatcatgctctctttacaggtggagaaactg

SEQ ID NO: 84703 - DNA, 1529 bp, Homo sapiens
agcgagactccgtctcaaaaaaaaaagaatgctgaaaccaaaaaataatagctttcagataatccccacagcatctatgagatggattcctactttatcaatgagaaaatacactgagaaactgcctcaatgtcaaatactaagaatcagagccagggtttgaacccagatctaacttcaaagccagtatccttagcttatcttctcttcccgccacccgcacgcctaggcgcagaatcgaaaacctcagcccccagaatgtatcatttggcagctgagaagaagaatggaaaggcttgaaactctgagattcaaactgggatatcgtagaccctggagcaggacactgcatgtagctgagggctctctagagtccctagcacggagcttggaagggatgcacttggcctgtgtggtttaatgagcgacctttgccctctctctcctgcaggtctcccatgtccgtatgcaggggatcctcttactggtctttgccaagtatcagcatttgccctatatccagattctgtctactaaatccacccccactggcctgtttgggtactgggtaaggactgagctattgtctgagtcgtgagctgggaagggctgggaactgtggagctgggcaaaagaaaaaggaagtgaaaggaatcttggtcctctgtccagcccaatgcatgtttgttcttttgcctcagagtgggcttgctatccctgaggccaggcgaggcgagctgggctctgtgcatggagagatcaccctgggaagcttagttactgtccctaggagaccctgcaggaagtgagactgtctgccctcaggtccaggatgtggaaagaggggtgtgtccaacccgagtagcttcccactcttctgttgacctgttctaccaggggaacaaaggtggagtcaacatctgcctgaagctttatggctactatgtcagcatcatcaactgccacctgcctccccacatttccaacaattaccagcggctggagcactttgaccggatcctggagatgcagaattgtgaggggcgagacatcccaaacatcctggaccacgagtgagcctgggtctggcagaccgttccccgccctctgccccacgctaacccccactaacccccacgagtgagcctgggtctgcagaccgctccccgccctctgccccacgctgacccccacgagtgagcctgggtctgcagactgttccccgccctctgccccacgctgaccgccacgagtgagcctgggtctgcagactgttccccgccctctgccccacgctgacccccacgagtgagcctgggtctgcagaccgttccccgccctctgccccacgctgaccgccacgagtgagcctgggtctgcagaccgttccccgccctctgccccacgctgacccccacgagtgagcctgggtctgcagactgttccccgccctctgccccagctgaccgccacgagtgagcctgggtctgcagactgttccccgccctctgccccacgctaacccaagc

SEQ ID NO: 84704 - DNA, 1047 bp, Homo sapiens
ctgcaggcctccttgcttctcggctgactggcaaaggattggtaggatggaattgagccaaggaaattagctcaacttgtggcagagacacagccctttctacccatgtggcctactgagattgggaggccagactgagggcctggcacccaaaatgaatgcccttctttccccagccaagaatcagggtggatgggtgagctccgtgcatttgccagctatagactgagaagggctgacccccttccactgctccagggcccccagccacctcctgctagtcctttcttcgctcctcctacttcatttcctccaactagaactttccctagaactctcctgcttttcccacagccccaccctttctcccagtctaactctgtcctgccccgaccccaccctccccgcccccacttccctgctgctccttcacaaagcgagccagtgtctttgtggtggaacccagtggcctaaagctgctttgtgggtggggattaagcctgaaacttttcctgagtctttatcagtccccttgcttcaatcctgaccctgggagtcagcccctcatggtccagcccgtcctccatccctgttggcacgtgtgcttgggtgtaggagagagaagactggggaggaagtaggcttgaggacacacctgtagcaacctctggcccacctgaagttctgatgcctcccttacccagtgctgggtttgaggttccccctgcttcgactccgctatgccagggctcgtggcctgcaggatcaagtttcataattcctggaaggccccagtacacgctccccacccggggatttcctccttggcctccacacttcattctccggaaacggctcctcgggtgccggtggtagacagcctgaacctgagagggagagctactggctgcggcccattcccaccccaccttttgcagctgcagatagtagggatcttggcagtcctagccctttgatgttgttttacaatacaggtagccctactggttccttagcctccctaaatcttagttcctcaactacaaa

SEQ ID NO: 84705 - DNA, 2239 bp, Homo sapiens
ctaaccctacgggcaaggagggccagggtctcaccaggagtgacggcaggccctgcttactctccctgccccatgttcccaaagcagcctcggggaggctggagggtggaatgaggcggactgctgtgatgccagcttctcagtcactgctctgggcctcagtgctctcccccactcccttccccacccacccactggcttccctcctcctcttgaaattatccattcaggacgatttacagtgtttctgttttctcctcttgcttccttaatactttcatttttcttctagttttgcaagacagtggtcaacaggaagacccagcagctccaccctcccaagtgacaggccattttcggacgcagccgttctgtgcccattcttcaggcaactttcgattccttactgtagctaattctagatgcccttcagtattgtgaacaaatagaccgtctggtgtcacagagcccgcgtgtgcaggagcctgctcctccgagatacgtggcgtgtaggttgctgtagttacagcgcctccgtctctctccattgtgttccgatccatttctgtgtgttcccccaacctttatttccaagtgacattttcagtctttcaaatagctgccttttgtgatgtggtgatttaaatgatttaagttcatttgttctcaaccttggggtaaactgaggtattttgcttcctgggaagatcttcgcaattttgagtgctcctgtggggagcggggatgagctaaagatacaatgtttccctgccccgcaccgcttccacaaaatagcaatgtggttttgcagctctgacttctgctcccagtaacccatcgttagggcactctagcactatggaggtacccaaggctcagccagtctctatttaagaaaatttaacaaatacgagtaaccctgtcccaatcactgaatctctagttactactcttagaaacacctgtggcttcttggccctcctgttgcccgctctgaatctctctgcagtctacaaaatcgccccagtcaactctccacttggagggaattgtccagtgtggcccctagaattgagtcaccccctagataccaactgtctgaccccgaggagctctgtaagtccctgctcctcctcttccctttggggctggtgctgccactcagcaataatcctcttttctctgtgctttcttaggtccctgtcctctgtctttgaggctggttaggaagcaagagtcctgatctttcatgctgcacaatatgagcatgcaaaaagctttttccagcagaacatgttccctcgtctccagttgccggaaaggaatttggggatcaagaacttagctcgtcctacccccatgttgagttctgccctggaaaacccaaagcaagtagtgatcatagtacagaacccgaccaaagtaggctggtgaggaagtccaggctccaggggaacagacgctgcccagtgttcatagcttcctgcaacttgacagagcctgagtttgcctcttagtgggagaatgagagagagctgtagtgtcacctgacattccccaaaccttgtgaagcacgttggcctaagtgtgccgtgatcccagcccacactagcctgggtgcatctgctaatgggagaccaaatctttgtccgggaagcaagaagtgggtgggagaatgtatcctgtttttgtcagtttgtttgccttactcatttctaagtgcaataagggagtgtctcacaggattgcacctgtgacatcctgatggatgcttccctgtggccctcctggggcaagggtggacagactcagacccccagcatggttagcgctgaccttcattgaggtccctttggaaccagatgtcttgttacagacaccttcctctgtgtaagtctcctcaccttgaggggtctttagtaatgcatctgggtagcatctcaactgctggtagcatttatctgacttggaaagttggagaagaggcattcctactggagaaaaatgtcagtgttttcctataagctctgtgttagctattcattatatttgtgcttaaagatgttccttcattcatcaactaggggaagtccagatgcgggttatcttgaaagaaacaaactgacattctaggcagacagttgtctatgtggtctgagggtcagcagctgttagtctccttcctttggctcttgagacccacacatatcactttagccctaacaagggctcctcccac

SEQ ID NO: 84706 - DNA, 1051 bp, Homo sapiens
tctgtaacaagacatctggttccaaagggacctcaatgaaggtcagcgctaaccatgctgggggtctgagtctgtccacccttgccccaggagggccacagggaagcatccatcaggatgtcacaggtgcaatcctgtgagacactcccttattgcacttagaaatgagtaaggcaaacaaactgacaaaaacaggatacattctcccacccacttcttgcttcccggacaaagatttggtctcccattagcagatgcacccaggctagtgtgggctgggatcacggcacacttaggccaacgtgcttcacaaggtttggggaatgtcaggtgacactacagctctctctcattctcccactaagaggcaaactcaggctctgtcaagttgcaggaagctatgaacactgggcagcgtctgttcccctggagcctggacttcctcaccagcctactttggtcgggttctgtactatgatcactacttgctttgggttttccagggcagaactcaacatgggggtaggacgagctaagttcttgatccccaaattcctttccggcaactggagacgagggaacatgttctgctggaaaaagctttttgcatgctcatattgtgcagcatgaaagatcaggactcttgcttcctaaccagcctcaaagacagaggacagggacctaagaaagcacagagaaaagaggattattgctgagtggcagcaccagccccaaagggaagaggaggagcagggacttacagagctcctcggggtcagacagttggtatctagggggtgactcaattctaggggccacactggacaattccctccaagtggagagttgactggggcgattttgtagactgcagagagattcagagcgggcaacaggagggccaagaagccacaggtgtttctaagagtagtaactagagattcagtgattgggacagggttactcgtatttgttaaattttcttaaatagagactggctgagccttgggtacctccatagtgctagagtgccctaacgatgggttactgg

SEQ ID NO: 84707 - DNA, 1135 bp, Homo sapiens
gagacccaactctgtcgtgatctctgtgacttttttttttttttcgaaacggagtcttgctgttgtttcctagactggagtgcagtggtgcaatctcggctccctgcagcttctgcctcctgggttcaggcgattctcctgcctcagcctcccgagtagctgggattacaggcacccgccaccatgcctggataatttttgtatttttagtagagacgggtttcaccactgttggccagactggtctcgatcttgtgacctcaagtgatccgcccgcctcggcctcccaaagtgctgagatgacaggcgtgagccaccatgcctggcccgatctctgtgactttggttaagtcacctaacctctttgaacctcatctgtaaaatgagggtgattctacagagctctcaggctggggtgaggattgaatgggataatacatgcctagtgtgtcgtgggctcccagtcaagttaactgttattacaaggcagaggctggaatctcctagctgcccatgatccagtaatgcccatctccagtaatgggagatggttactctcaactgtgaacctagtgactttcatgtattttttttccttcttccagaatgagtacatgaaagaagactttctgattaaaattgaaacctggcacaaaccagatcttggcacgcaggagaatgtgagtagtagttcccaaaagccccaggggtgaggtcttgagtctctgccttgtagcctctccagggctaccatggggtcctctctgtggtcctcttttgcctggccgggaaggcagtggcctctgcctagacctatcttaccagcatgggattgctatgtctctgatttgcaaaatgtgatctccggaactttttatggggccttctcgtactgcttggattggtgcagttcctggtacatgggagctatatctttaaaagaccaaaattacagttttctatagagcacaatttgcagtaactcccaaaaaataaaatacacctatcctttagcatttccatgcccaagaatttagacagttattttcacatgtgtgaaataacatatatacaaggagactcattgcagtcttctttgtgtagccaaagatcaaaaacaatgtaagaccatcct

SEQ ID NO: 84708 - DNA, 1037 bp, Homo sapiens
ctgacggcttccctttgccttcaggacgaagtccgtgctgtctgacataacttataggaccttttagccagcctgggcaacatagcaagaccctgtctctaccagaaaatacaaaaatgagccaggcatagtggtgtgcacctgtagtcccagctacttgggaggctgaggtgggaggatcacctgagcccaggaagtcaaggctgccagtgagccatgatcacaccactgcactccagcctgggccacagagtgagaccctgtctcaaaaaaaaaacaaaaaaatcttttaggatccagcttcaggtgtctccttgaattccccaccttgtacctgcaccggttactctgaacttgtccctcttttctccagcttttcccaccccactcccatctgtctcttagcttagccccactcattgtcccatgtgttggttcatcctgactttcctcgcagagcctgcccggtgcactgcatgtcccccactgtgttctcacagcactccgccacccagggccctgtgcccaccgcattatggcatgaacttacagtgttgtgcttggccttgtctagttacacgccccagtagaccggaaactccttgagggtgggagccacatctgtttggtttctctgtgtgtccccctgcctggacctagaaatactcgcctgaatggggatggcagtgagttcgtgaatcacagaggccgccccaagtgctccaggttagctctctgctctagtttgctcttctttcttaggcctgaggcactaaagctgatgaggttgccagagcttgccaaagactggacagattatctgttagaaaccaaggacggctgggcgcggtggctcacgcctgtaatccccgcactttaggaggctgaggcaggcagattgcccgaggtcaggagttcgagaccagcctggcctacatgacaaaaccccatctctaccaaaaatacaaaaattagctgggcgtggtggcgcatgcctgtagtcccagctacttaggaggctgaggaaggaggattgc

SEQ ID NO: 84709 - DNA, 1030 bp, Homo sapiens
tcttagaacctgccctctgattcctgcagctgaagagaaaccaaatgaaggcgattagtctctgcctggggtcccccttcccaagtggtaccactagctgggaacctcgccccctccaccaggccctctccccagcctgtcctttaggattgctgagtcagtggttagatgttcttacggctcttctctgaaacggagttactgctccttcttaggcacccctggctcagccaagccctgacccacctgacgggttttcatgtgtgcctagctgggtggtggacttggagaggcacagggacagcttggggctccaggggggcattgaggcagcactgatgcagcttaggattagcaaggtcaaggtgactggctttcacccatatgttcctctgtatggatttcactgagcctcgattgctgccccttttcatggcattttgttctgggattttgctttgaaagttagggctctttcagccttgtggtgagcagtgaattgtcctcgtcctctgcttcactttccagattttgcccagaaatttccctgcagtgcttaggaagctgcctggtagagcaggtttctaagtttgaggcgaagcagctctggaagctgcctctgtccttgctgttggaggcagtgatttaagtagcagttgcctagagatacatcctttctgttttaatctcaaagagagaaaaacccagtccctgtaatcccagctacttcggaggctgaggcaggaggcaggaggcaggagaatcacttgaacccaggaggcggaggttgcagtgacctgagatcgcaccactgtgcgatctctgtctaaaaaaaaaaaaaaaaaaaaaaaaaaatagagaaacacccttgtcttccccccgggggtgccaggagttgggcatagagctcgaggaaaccctttgtccccctccaccccccagcatgttgggtaatcccatagcttttttcctttttctcatactccctaagcagccatgcctgattagcaccggcagcggtaggaaagac

SEQ ID NO: 84710 - DNA, 1031 bp, Homo sapiens
ggggcctgtacgctgccgtgtaagtcctggaagccgcaggtggcctggtgggcgagggtgtgggaatggccggggggaggttgctggtgggactgagactctgaggcagggtcagcctgtcccagaagggctcatcttcctgcttcaggggacaggtaccagggtttctgctgggtgtttcagggaaaggccatacctcgtgggaagcaggtcagtgggcagacagttgggtgctcacaagccttggcattcaacacgaagtcagttcccccagccagggtcaggcacctgtgcagctcattatggcctcaggggccactacagccgagtcctggggctggccctggctgctcactgggaaggatgggtaggttctggctgcctgaagctaaatgcggaagttccagttgccctcatcacgggcagcaacatgggtgactgagtccagaatacaccagacgggcccatccagagcctcagtgcgcccagctctggccatagctttctccagccctggctaaaatgaaacctgtatctttttccaagaagccccagaaacataaaaggaaccacagtggttccttcttctctggctcaggccttgacccaaaaactgaaactcaaacatcatcatccacagtctctgatgtgggaccagctcatgtgttgctgggattcctttcccacctctgggccagcagagcctgacatgtgctaagatttagcccggaactctctcccaattcccgcaacagcccctggggtaatcccagctccgcttgccctccgcctgcccctccccaggcctggaggaagctgtggctgtcctggcagggtctgagggaggggggcgggatctgtggtgctgagtttccgcgattactcaatgcttctctggacgagggcactgcagagccaagcccagcctccacactcctctctgggcctgtttcccaaaccgcaggtccccgctggcaccacgctttccactcggctcagccagacacccacaggccctgggcacagctgag

SEQ ID NO: 84711 - DNA, 1093 bp, Homo sapiens
tgaccccggcaaggaaaataagaaaggtgcatatcggctgggtgtggcggctcacgcctgtgatcccagcactttgggaggcagaggtgagaggatcacctgaggtcaggagttcgagaccagcctgggcaacatgatgaaaccccatctttactaaaaatacaaacactagccgggcgcggtggcaggtgcctgtaatcccagctactcgggaggctgaggcaggagaattgcttgaacccgggaggcggaggttgcagtgagccgagatcgtgctactgcactccagcctgggcaacagagtgagactccgcctcaaaaaaaaaaagaaaaagaaaatatcagggggagaaggtggcatctgttctatgtttgagaaggcagctggacttcccattgaaggaggcgccgcagtctccccacatggacagaggagaaccaggctattggggtgagaccagtgcttgtgcttcccaagtggtctgggttctgcctccatactggctgcagtctgtccccacggacatagctgccgtgagaaggttctcaccagcctggggccccacagccaaggctgggccctgaggtctgccgttctagggtggcggatgctctcgaatgggactctcagcctgggcttcgttgctcttcaagggacacacaaagctcctgaaactgtggataaaccttggtgtgcattttctggggaggtctttattggatttttcaaagggtccatggcccccacaaaagttaagaacctctacattttcactccaggggacttgggccaaatggccatccaagcctgctgcggggtagcctgagccctcgagaggccgccagccagccctggcattcccagtggggggactctgaatgggcacctgcccttctgatctttgggaatccctgtcatgaccctgaggtcagggtttccttccctcttcacacagagaatgtcaccaatggcacagtgggcggcacagcagagccggggcacgaggaggtgagctggatgaacggctggctcagctgccaggcccaggacgagatgctaaatttggccttcactgtgggctcctttctgctc

SEQ ID NO: 84712 - DNA, 1044 bp, Homo sapiens
aagcagaaaaaaagtcatcgtccccagagaaagcttttagtgtctcacccagaccagagaactgttgtgggcaggtgtttttttgtgtgttttttttttaacccaccatgatgtcggaaggtcagattctaggtgttttttgtttgttttttgttttttgtttttttttaatagaatgtccacggatttaattgattgtatggttttggcagaattgggtctggtcctttcattcctgcctcaacctcagcttcctcctctgtctaagtgggaggagtcccagagattgtgccagcgcagtgctgagttggtgttttaagccctgggcagacttgacaggtaactccactaaaccaaagtgaaggtgaagggtcaggattgtgggttgaacatcaacttcttatcccgaacttttgctcctgcctccaattttggtttttcttattatctggcaaacatgctgagcccacgttctgggcgggaaggctgctgattccacacagcttatctctctggtcacactgctccttgattcttggagtctgcatcaccagttttctttcaggccagaaatccccgcatttggctcgtctgggagtgcctggcgaagttagggtgaaggtttctgcttcagtctaacattttcaaacttggtgcatggctgaattgcagagaagcagataggccatttttgaatttattgaattagacttgtgaaagcctgagcagtgtccggctgattgagatgcaaatttgtcagcttcgtgtcactctaggacgatgctttagtttgttctctaaagaaaatttgcctgaacctgttgaaaggttcttagaactctttcttacgactccagccagaatctcgccacagacaccgtgttgggttccagcctggtgaggtggcagaaggaaggaaacagctcatttctcggctgccccgcagtttgttcttccttgcctgctgggagacgtggcaggctgggtttggggacctgggtgcgggaagttggcaatgggttttgcacaacgtcctccaggtgt

SEQ ID NO: 84713 - DNA, 2112 bp, Homo sapiens
ctccatctcaaacccactatttagtggctgtcaggttggcaaatttgaaaagattgttaatatcctgtgtgggtgagtttatagtaaacagatcctctttctttcttggtgataatgtaaaacttaaaatagcaccaagtgctggttttccagatgttttcagcttgtgaaaatacactgagctgcatgtgtgctcatttgcttgtgaatactatgcttaataatcagctggggagcttgtgagcagtgcagattcctggaccccactcaggagattctgatgtggtaagtccgcgatgaggtccatgtctaacattttgaacaagcaccccagctgattctgatacagggggttctgatcacgttttaagaaactctgtcctcgttcttgggggaaggaaggaaacagagggctggcagctccaactctgacctggtactaagaagagttttggttcctgacccctttgtctccagattgcaggatacctatatggggtgagcccaccagataacccccaggtgaaggagatccgctgcattgtgatggtgccgcagtggggcactcaccagaccgtgcacctgcctggccagctgccccagcatgagtacctcaaggtaatggggagtgatggagcctgggagtgtggaaaagctggtgcgattcctgtctgtggatgggattcagctctgtactcctctttacctataggagatggaacccttaggttggatccacactcagcccaatgagtccccgcagttatcaccccaggatgtcaccacccatgccaagatcatggctgacaacccatcttgggatggcgagaagaccattatcatcacatgcaggtgggcctgggctccttgggaggaagtatggtggggcagggattgcaggccagggcccagaacagtggcctgagctgttactctgtcctcgttcctcccccagcttcacgccaggctcctgtacactgacggcctacaagctgacccccagtggctacgaatggggccgccagaacacagacaagggcaacaaccccaagggctacctgccttcacactatgagagggtgcagatgctgctgtcggaccgtttccttggcttcttcatggtccctgcccagtcctcgtggaactacaacttcatgggtaagtgggaggagcctggggatgtggggatagcagtagggataaggtgaggccatcgccctttgcacttggggcctggctggcttggaggtggcgcaggctgcatgaggcaggagccctgttaacattggctgtttccttctccccgaaggtgttcggcatgaccccaacatgaaatatgagctacagctggcgaaccccaaagagttctaccacgaggtgcacaggccctctcacttcctcaactttgctctcctgcaggagggggaggtttactctgcggatcgggaggacctgtatgcctgaccgtttccctgcctcctgcttcagcctcccgaggccgaagcctcagcccctccagacaggccgctgacattcagcagtttggcctctttccctctgtctgtgcttgtgttgttgacctcctgatggcttgtcatcctgaataaaatataataataaattttgtataaataggagttcaggggctggtttgttttttttttcccccccaaactcaaattctggatttaggtctaacaggaggctggactggagcggttcacagcaagatgctgggctcggctgtgaaggggggagtatgaggcccccttcctattcagggctttggggtagatagcccctggactcagtggagacctgaggcagggctgggctttcacactccgctgccttgaccacatttgctgctttttccacaaaactacttggaagctctcgcctcctttccacagttttgggagcagttgccctttcccgggtctaggaactctgtggcttgtgctgagcggctgcggtgtccagcccagccctttaagctttctgtgtcagtcctggtcaggaaaacaagcacacaggcaggcagtttgtgtacagccgggcggaggccagagaccggctgcctacctgtcacctctcgcctggagcgggcca

SEQ ID NO: 84714 - DNA, 1420 bp, Homo sapiens
cctaagtatccgagactgctgccaacacacacacacaccttcctcccctcgtctccctccctgtcatcgtggcaaccaaaattatccatagggtgacggacaataccacctctgattaagaaccagtattctagggtttctggggtttccatttctgagaacagttccatgccagagcattgttttggtcaaggaagcgtagggtttatggatgctaaacagtgggaaggtgcacacgcagtgtgctgtcccgcttggatctgacgaatcttggaagtgttagtgcacctccgtttcacacttcctgtagaagcagctcttgtggattgtctggggcgtgagtataggctgtcctgtcctaccaagttacaccctttccattgaggcagaagtgaccaaggggaagggatccttgtaatataacccacaccatccccacagtgtgaacgtggcatcactgacacaatcagaaattcgagacatcatcctgggtatggagatctcggcaccgtcacagcagcggcagcagatcgctgagatcgagaagcagaccaaggaacaatcgcagctgacggcaacacagactcgcactgtcaacaagcatggcgatgagatcatcacctccaccaccagcaactatgagacccagactttctcatccaagactgagtggagggtcaggtactgtcgggcaagagggtggggatggaaaggccggctgcactacctaaggtgctgggctgagcgatgctgacactccctgcctgtttttagggccatctctgctgccaacctgcacctaaggaccaatcacatctatgtttcatctgacgacatcaaggagactggctacacctacatccttcccaagaatgtgcttaagaagttcatctgcatatctgaccttcgggcccaagtgagtaagtggactcagctaggccacagtgtgtgcccaactcattttgtgcctaaaactcagacctgagattgtctggaacttgagatgctggtttcaagattcatggatgagtaattatacaaggatagccaaaacaacgaggtgggttttggccccatgagatagcaaaagctgtggcagctgagagaaggtagtaattgtagtattggcctgatagtatttggaagagaacagatatggtcagaaacaaattcctgaccaggtgtgcgtgctggctcatgcctgtaatcccaacactcggctgggcacagtggctaatgcctataatcccagcactttgggaggcctaggtgggtggatcacctgaggtcaggggtttgagaccagcctgaccaatatggtgaaaccctgtctctactaaaaatacaaaaaattagccaggcatggtggcatgcgcccgtagttgcagctactagggaggttgagacaggagaattgctt

SEQ ID NO: 84715 - DNA, 1168 bp, Homo sapiens
aggctgaggcaccagaatcactggaacccaggaggcagaggttgcagtgagccgagatggcaccattgcactccagcctgggcgacagagtaagactgtctaaaaaaaaaaaaaaaaaggccgggcgcagtggctcacgcctgtaatcccagcactttgggaggccgaggcggcggatcacgaggtcaggagattgagaccatcctggctaacacagtgaaaccccatctctactaaaaatacaaaaaattagccgggcgtggtggcaggtgcctgtcatcccagctattcgggaggctgaggcaggagaatggtatgaacctgggaggcggagcttgcagtgagccgagatcatgccactgcactccagcctgggcgacagagcaagactctgtctcaaaagaaaaaaaaaaaattcttgggtttcatgaaaggttaggattaaagtgggagagcctcaagcagctgacctaccccactcttccaaatcttttcccaggccttctcccgtctcatcctgattctgcgtgccctacatgtgaacaacgatcgggcaaaagtgatcctgaagccagacaagactactattacagaaccacaccacatctggcccactctgactgacgaagaatggatcaaggtcgaggtgcagctcaaggatctgatcttggctgactacggcaagaaaaacaagtgagcagtgctggtggggacacagacaggaggtctatatacggttttctggggttttttggaagcacttaggcttagaagtttctcaagaaggccaggcgcggtggctcatgcctgtaatcccagcactttgggaggccaaggtgggtagatcatttgaggtcaggagtttgaaaccatcctggccaacgtggtgaaactccgtctctactaaaaatacaaaagttagccgggtgcgatggcgcctacctgtaatcccagctactcgggaggctgaggcaggagaattgcttgaacctgggggcagaggttgcagtgagccgagatcatgccactgcactccagcctgggcgacaagagtgagactgtctccaaaaaaaaaaaaaaaaaagacgtttctcaagaaattatcttgtcttagccaggcttgagtgctcatgctagtaataccagcactttgggaggccaaggtggg

SEQ ID NO: 84716 - DNA, 1068 bp, Homo sapiens
ctggctgggctgtatctgtccagccagtttctcttcctttacatttatagcatgtttcatcttacattcagtccaggatcttagtagcccaaacccctgatgctcatctccaaatctgtgttttgcttgtatttttctttctagaatgaactcccctctttgctctgttaatcacagtccctccttaagacacgtttttttgtgcagcttttttctgatcctagtagccttaatttcttttgttcctgaactctgtaaaacagtgtatagtttagcacatactcatgtgtcagcttgtggtattgtcttgttgaaaggggctgtcagcctggtcattggacacggccatttgatactctttgtaccttctaagtgcctaacatttaacatcagtgttcaatagaaacgtagttggattatttcaaaactaggatattctgttctagttgatctgggagggtagagactaaatttccattttcttctctcttgcttttaagttggctaagtggaagacagctgaggaggtggccgccctgatccgatctctgcctgtggaggagcagcccaagcagatcattgtcaccaggaagggcatgctggacccactggaggtaagagggtggggtggggtaggagaaaagagaccttgagaccttcaggctgtttctcatcttggacttgatcttgtcttaggtgcacttactggacttccccaatattgtcatcaaaggatcggagctccaactccctttccaggcgtgtctcaaggtggaaaaattcggggatctcatccttaaagccactgagccccagatggttctcttcaacctctatgacgactggctcaagactatttcatcttacacggtatgaacctcgggaagagaagatcgctggaggaggagcgggtttagggttaggagaagatcctgtgtcaggtttttgccattttcacatttttagcctatagattgggtgggaactctgttgactttcatgagagtttaagaccttaaagttaaaaatcaactcttggggccgggcgtggtggctcacgcccgtaat

SEQ ID NO: 84717 - DNA, 1421 bp, Homo sapiens
cacgcctgtagtcccagctactcagaaggttgaggtgggagaattacttgaacccgggaggcggagcttgcagtgaaccgagattgcgccactgcactccagcctgggcgacagagtgagactccatctcaaagaaaaataataataataataaataaataaataatccgtgtattttccattagctccatactttaacgtagtcatacttttttactttacctaagtgagaggaagtggcccattcctcctatgggtcactgattctcttctccagcctgtatgtacacatgagcagagtgttgtcagcctggcgaacagtctttcttcctctgtagagttggcagcttgtcttgtttctggggctgtcattctcgtcttaacttttcttgacccttttatcctcacagtgcctatggaaactggttcccaggcagcaagcctctcatacaacaggccatggccaagatcatgaaggcaaaccctgccctgtatgtgttacgtgaacggatccgcaaggggctacagctctattcatctgaacccactgagccttatttgtcttctcagaactatggtgagctcttctccaaccagattatctggtttgtggatgacaccaacgtctacagagtgactattcacaaggtgagtgttagcagcagtgtataggtgcgggactctgtacatggctgtgggagagtaatgggctaagtgtgtacacatgctgggaagaaggcaggatggggatgtgttgtgtaggccatgctaacgaatgccgtcctcctctagacctttgaagggaacttgacaaccaagcccatcaacggagccatcttcatcttcaacccacgcacagggcagctgttcctcaagataatccacacgtccgtgtgggcgggacagaagcgtttggggcaggtgagcaggtttaaagatgaagaggctgtagaaccatgttgcctcttattcttggggtggacttggtaatatttactggtttattagatgaaaggctgagaacatctcatttgaacttatccccaaaataccttgggaagtattctgtgggaggtccaagagtgtatgaggtgcttcgttcccttccagctggtctgtttcctgaatttctaaccttgaacagggctatcaaaaatcatttttccaaaggcaacgcatactctttttttttttttttttttttagccggagtctcgctgtgtggcccaggctggagcacagtggctcaatctcggttcactgcaagctccgcctcccgggttcacgccattctcctgccttagcctcccgagtagctgggactacaggcgcccgccaccacgcctggctaattttttttgtattttttagtagagacagggtttcaacgtgttagccaggatggtctcgatctcctgact

SEQ ID NO: 84718 - DNA, 1180 bp, Homo sapiens
ctgtatttttagtagagacggtttcatgttggccaggctggtcttgaactcctgacctcaggtgatccacccacctcggcctcccaaagtgctggcatgacaggcgtgagccaccacacctggcccaggggaaccatttttttttttttttcccctgagatggagtctcgctgtgttgcccaggctggaatgcagtggcacaatctcagctcactgcaacctccacctcccaggttcaagcgattctcttgcctcagccttctgagtagctgggattacaggcgtctgccaccacacccggctaattcttgtatttttagtagaaacagggttttgccatgttggccaggctggtctccaactcccgggctcaagcagtcctcccaccttggcctcccaaagtgctgggattataggcatgagccatcgcgcccagcctcattgtgttttgctttctatttccctagtgactaatgatgttgaactcaaatctttctttagtagtagggataaaactaactgcatcaagtagtctccaccctccccgcccctggctcatctgtaatttacttttttttctactacctttagattgtgaataagtggaatacagctctcattggccttatgacatactttcgggaggctgtggtgaacacccaagagctcttggacttactggtgaagtgtgagaacaaaatccagacacgtatcaagattggactcaactccaagatgccaagtcggttccccccggttgtgttctacacccctaaggagttgggtggactcggcatgctctcaatgggccatgtgctcatcccccaatccgacctcaggtacagcctggttcaacgtatttctaaaccctattgctcaggccctaagggaagtgggtatttctttagttttaggctttattttttctgtaatcttggttgtacacccaaacaggtggtccaaacagacagatgtaggtatcacacactttcgttcaggaatgagccatgaagaagaccagctcattcccaacttgtaccgctacatacagccatgggagagcgagttcattgattctcagcgggtctgggctgagtacgcactcaagaggcaagaggccattgctcagaacaggtgggcacctaggagggcatgccaaccctggggcaggggcagtggt

SEQ ID NO: 84719 - DNA, 1051 bp, Homo sapiens
agttggcctttgaagggaagttccttccaagaaactgctgtgaccatgtgttctctgtgggcagaggccgggcggtattctgggacatcaagaaccgcttgccacggtcagtgactacagttcagtgggagaacagcttcgtgtctgtgtacagtaaggacaaccccaacctgctgttcaacatgtgtggcttcgagtgccgcatcctgcctaagtgccgcaccagctatgaggagttcacccacaaggacggggtctggaacctgcagaatgaggtacagcctgggcggggctgggagtgacatgaacgcgcctgcacttcctgggtcagtcaccggagtcttgttgggtggaaagacttgagtggtgggcacagttggctcttgcttctgtgggagttcctcggacatgttaaccttgactttgtggtttaggttactaaggagcgcacagctcagtgtttcctgcgtgtggacgatgagtcaatgcagcgcttccacaaccgcgtgcgtcagattctcatggcctctgggtccaccaccttcaccaaggtacagggccgtcatgcccagcttccctcttgtcctctgctgtcctctgctcatttcacacccctttcacttcgtcccctgctggctgcttccttctcttctttgcttagtgtgccagtttccatgctctgtgccatagtggcttatagtatgtcaggtcacttcatcgttattttctgagcgttccttgtagaaattgtgtagcctccttcttgtggacttgtgatgattctaaattaaggcaagagtaaaagttggatttattattttgaacagaaaagcattatttttgcattttctcaggtgcttatctaagtcatgttaaccagtggcatagagaacctgtgaaaaagcagccctcataggcatctcggggttcgtttctccttcacttaccttcagaggcccagccgaaggcaaccggaattgagaaagaaaaatctgaggaattttgaactacgtatatttaaggttttgcaaaatttaaaaagttacctcgg

SEQ ID NO: 84720 - DNA, 11346 bp, Homo sapiens
cccctgtgaactctactggttgtcttttttcctgctttatccctcgtcctcggtagacagtgatggttaaatgaatgaatgcatgaacaaatgactgtccaggagctagtactgcattgcatgtacacattgatgacaacagacatcgtacaatgcgcaatcttggcaaatttattcaaaccctttagacttcgctctctcacagtgcgacgccgggagcccatcacacgctgaggtctgtcagaggccccagaaacagcctcggaaatggaggaggcggggcttcaccccgaccacacccccttgcgttcaaagcctttccgcctatgggcccgcctcctcggcgcagtgtgcaactctaattggtcgtctcactaatccatctgagcacctcggcgccgactggatcaactgctgaactcgggttgcgcacttcccggcgctgggaacgcggagcggacgcagtctggccgccattgcgctgcggggaaagcggcctcttgtgtgagggcctgtggggtgcgtggcaggcgtttaaggccgggctgcgggaggcgtggtcgggtcgggccgagtgaccgaaggggttaggccgggcggggctggatgcactgtgtggcgggactgcaggccggggtccccggacgcctttctgctgcgcttcttgtgggcccgggcctgtggttagtgaatttttctatcccgccgctccccagattctccggatatggccggagtgtttccttatcgagggccgggtaacccggtgcctggccctctagccccgctaccggactacatgtcggaggagaagctgcaggagaaaggtgaggcgagagtgtggagcggcgcgcgggccggaggcggggcgggtgtgcgcgcgcgcaggcgggtggggaccctccccgtttgggcagctcctgaggtgtcagctcccttgttatttccagttaatttttcatcaagtcattttaagcgcgtattatttgcaagcgctgatccagcgggggtacagtagtgacggagacaaaattcctgtccttacggggtttaaattacagcgggagagacagagaataacaaaaccttgaagctctgtaataaaaatgtcaggccgggcgcggtggctcacggttgtaatcccagcactttgggaggcccaggcgggcggatcacctgaggtcaggagttcgagaccagcctggccaacacagtgaaacctcgtctctacgaaaaatacaaaaatgagtcgtgtgtggtggcgcgtgtctataatcccagctactggggaggctgaggcaggagaatggcttgaacccaggaggcggaggttgcagtgagccgacatcgcaccattgcactccagcctgggagacagagtgaaacaacctctcaaaaaaaaaaaaaaaagtcagatagtgatcaatgtgatgaaaggaaaaacagagtaaaatggtaagggaattggcaaggggtgcttcttcctgctggtgcctgcttctccctcacactcactgacaggagcttaccctagggcaagaggtgaagaggattagggggagggtgtgcaggcctttaaactgaggtgcctttccagctcgaaaatggcagcaattgcaggccaagcgctatgcagaaaagcggaagtttgggtttgtggatgcccagaaggaagacatgcccccagaacatgtcaggaagatcattcgagaccatggagacatgaccaacaggaagttccgccatgacaaaagggtttacttggggtaaggaacatcctgaaataatttcatttggaatttggcccttttcccttctccctgtcccacagtcttggattgatgctttgacagctcatcttggtggatataagagaaaggagaaaaccagtaggagtctctgataatttctacatcttccacttttgcagtctgtttcccctctcttcccgatctgggactggtgctttaatttgtcctgttgatgatattataagatgtccctggccaggcgcggtggctcatgcctgtaatcccagcactttgggaggccgaggcgggtggatcatgaggtcaggagatcgagaccatcctggctaacacggtgaaaccccgtctctactaaaaatacacaaaattagctgggcgtggtggcaggtgtctgtagtcccagctacttgggaggctgaggcaggagaatggcgtgaacctgggaggcggaacttgtagtgagccgagatcacaccactgcactctggcctgggcgaaagtacgagactccgtctcaaaaaaaaaaaaaaaatgaaaaataagatgtccctatggttgagctggttgaagtccagagtgggatactgtgcatagtggcagcctgtcgctcctcagggacctgaattctgtgtttggggtatttaatttcagaggtttccctactcctgttttttctgtggctctaaactgggctagtacaggtacagatgtcttagcagattcctgttctatttggacacaaaaatgtttgccatgtaatgaactggaagttttgtttatttcaaaaaatacttagagaactgtgctggctgctggggatatagtagcgagcagagggtaacaatctccgcctttctgcagtgtgcggtctagtggcctgacagacatgagacaactggtgatagtgaagtatggtgaatactttattatgatttatgggaagatgcggagggaataggatgtgagagagccgcaaagctgtctccagagggatagccgttgatttagaggagctgataccagcattgtgggattatgacgtttaagaagagtggtgcaaggtgaagttggagagggagaggcagggtttctggttaggaagggcctgtgggctaagtttgggagtttggattgtaaggtaggactgtggaacatgaacatgtggcttctctgcatgggacaggtagcagaacacctcgtcatttctgatagccttctctttttctaatgtgccagtgccctaaagtacatgccccacgcagtcctcaaactcctggagaacatgcctatgccttgggagcagattcgggatgtgcctgtgctgtaccacatcactggagccatttccttcgtcaatgagattccctgggtcattgaacctgtctacatctcccagtgggggtgagaaaggctgaaatatggtgggtggtggtggtggtggtggttgggaggcagtgggtagaaatggttgtgtgatgtcttgccttccaggtcaatgtggattatgatgcgccgagaaaaaagagataggaggcatttcaagaggatgcgttttcccccttttgatgatgaggagccgcccttggactatgctgacaacatcctagatgttgagccactggaggccattcagctagagctggaccctgaggaggacgcccctgtgttggactggttctatgaccaccagccgttgagggacagcaggaagtgagtgatagatggagatactacacctgggaggagttctggaaatgcagaaggagtcctgggagatcagtaggtggtatgggtttgtctagctgcttacttgaggtgggcctttcattttttacctaggtatgtaaatggctccacttaccagcgctggcagttcacactacctatgatgtcgactctctaccgcctggctaatcagctcctgacagacttggtggatgacaactacttctacctgtttgatttgaaggccttctttacgtccaaggcactcaatatggccattcctggaggccccaaatttgaacctcttgttcgagacatcaacctacagtgagttggagagattagggattttagacattttgagttgaatgaaacgtaatcttgatccttaaagtcctgatataacttccaaattagtctgtttacaccaggtgcagtggctcacgctgtaatctcagcactttgggaagctgaggcaggaggattgcttgagcccagaagtttgagaccaatctgggcaaaatggcaaaaccctatctttaccaaaaaatgtagctgggcgtggtgacactcacagcttcgtgtagtctcagttacttgggaagctgagctgtgggaggattgtttgagcccaggaggtcacggctgcagtgaacgatgatcatgccattgcattccagcttgggtgataagagtgagaccctgtctcaaaaaaaaaaaagtctgcttattcttgatgttgtaccctagggatgaagactggaatgaattcaatgatattaacaagattatcatccggcagcctatccgcactgagtacaagattgcttttccttacttgtacaacaatcttccacaccatgtccacctcacctggtaagagacctggaacacaacatttggaaaggagaaggctgctgtttaggttgggccagggcgggaaaactttggctgactcttcctttcattttaggtaccatactcccaatgttgtattcatcaaaactgaggatcctgacttgccagctttctactttgaccctttgatcaacccaatctcccataggcactcagtcaaggtgaggaagggaagggatgctttccctcagctcttctaggagaaatgcgtgaggttggctgatgttactaaacgctcaggtggagggagatgtgttttccgtcttgctaagtgttccccttgagctataagcgaatatgagaattcagcatttgctttaaaacatgtcattggtataatcctgttttctgtgattatccttttggactttacggttcttttcttgggtgctctagataatctgtcccggtctgtctctattgtgtttgtttgttttagcctttatattgagatgtagttaacataccatacaagttatccatttaaagtgtgtaatttgatggtttttagcttattctcagagttgtcccaactgtcacgacatgcaatttgagaatatttttattacttgagaaagaaacccttagcagttactcgccatttctccccaacttccttacgcaaccactaatctactttctgtctatagatttggctattctacacatttcatatgatagaatgaaatagaatcgtacactatgtagtcttcagtgactggcttcttaagcttaccataatgtttttgatgctcatctgtgttccgttgtgtccaagcccagtgtttggagcttgggtgggagatgattgcaatgttgacctcctgtgatgttggggctccattgggaggctttctggtggtcagccagttgaggtgtgagaagtgacgcttgctttcctggtggccctgtcttgttctttgctgtcttggtttcctttgtgctggcacttcagggctgcttttgtcagacagcccagtttccatagcagatacaggctttgtgcttggccccagagaatttccctcatcttaagtctgtgcctagttcagcaggagctaaacccttagagggattcctttttcagagccaggaaccattgccggatgatgatgaggaatttgagctcccggagtttgtggagcccttcctgaaggacacacccctctatacagacaatacagccaatggcattgccctgctctgggccccgcggcccttcaacctacgctctggtcgcacccgtcgggccctggacataccccttgtcaagaactggtaaggtttttccctgtggcagggggaatgatagtggatgtgtaggagaaaagactccaactaggtgggcatgtagccttttttttaaattctttttttttttttcccataaaaatggtagacaacccaaggcttgcagcctttagcagagtgtctggaagaagagatggccaaactctggtgggcttatttttccaggtatcgggagcattgtcctgccgggcagcctgtgaaagtgagggtctcctaccagaagctgcttaagtactatgtgctgaatgccctgaagcatcggccccctaaggctcaaaagaagaggtaaggtgccccaggggccctgcgcagacttctgttccagagatatcagtaggctgactcttactctccatgttcccacctcaggtatttgttccgctccttcaaagccaccaaattctttcagtccacaaagctggactgggtggaggttgggctccaggtttgccgccagggctacaacatgctcaaccttctcattcaccgcaaaaacctcaactacctgcacctggactacaacttcaacctcaagcctgtgaaaacgctcaccaccaaggtgcctgcattggaccctaggggcctcctgggcttcaaggacggacagttgttttcctctggttactgatgaaggcatacatcagttgggtccattgctcattcacgttctgtctgttttttgcatcttctccaggaaagaaagaaatctcgttttgggaatgctttccacctgtgtcgggaagttctgcgtttgactaagctggtggtggatagtcacgtgcagtatcggctgggcaatgtggatgccttccaggtaaggttaggtattcccaacccctgcctgggtgaggacgctggaggaagcctgtgctgaccgtggagctggtttaagctccaggtctgatggggcaattgtattgcagctggcagatggattgcagtatatatttgcccatgttgggcagttgacgggcatgtatcgatacaaatacaagctgatgcgacagattcgcatgtgcaaggacctgaagcatctcatctattatcgtttcaacacggtgagaccttgactttactgactttcttttttttgagacagagtcttactcttgtctcttgggctggtgtgcaatggcacgatcttggctcactgcaacctccgcctcctgagttcaagcaattctcctgcctcagcctcccgagtagctgggattacaggtgcccgccaccacgcctggcaattttttttttgttttgttttgaaactgagtctttctctgttgccccagctggagtacaatggcacgatcttggctcaccacagcctccgcctcccgggttgaagtgattctcctgcttcagcctcccaagtagctgggactacaggcgcgcaccaccatgcctggctagtttttgaaattttagtagagatggggtttcactgtattggccaggctggtcttgaactcctgacctcaggtgatccacactcctcggcctcccaaagtactgggattaccagcgtgagtcaccgtgcccagcctcactggacttaactttctcagatcttttttcatgtatacatttagacagggctctttccagggacctatttggagagcagctatgactgtgtccttactgctcctttaaattcacatgggcgatcttagttcctggtttttgccttaaggtttctcatttacccttttgttttagatgttgaggtcccagagtttttttttctttttacccctctactgccatacctacattcctctgtatgtatattatacatatatgccccacctctgcccaggtttctattgttgtttaaatgcattgctaacttgtattcttaacttctgcttgggatcgtagggccctgtagggaagggtcctggctgtggcttctgggctgccggttggcgagtctggctctttttcatgcgtggcattacccctttattagagcgatggcttggcaacctcctggcccggcagtttgaaggtgagtggttttctctgtgtccaacttctcctgttattgcttcaaaagtacctgcccctgtttgagtctgttccctgctcttgtatgagcactcttcctactggattgcctttaggtccagttctgaaatgagtctgacctagtattctatttcttgggcttccttctggggccttgagaggcagtcatgcatttgcaggagtggaaattcctcagaagcatagttgtgaatgtttaaggtagctcgtctttttgcatatgctgggcacagggacgctttgttaatacctaattttattaataaccataatgagtgaggagcatgaaggtagagacccttattgaaagcaaggaatcttccttgtaatccccttgggacactctacttccaggtcgacactcaaagggggtggcaaagacagtaacaaagcagcgagtggagtcacattttgaccttgagctgcgggcagctgtgatgcatgatattctggacatgatgcctgaggggatcaagcagaacaaggcccggacaatcctgcagcacctcagtgaagcctggcgctgctggaaagccaacattccctggaaggtgggtgtctctttatttccttggaggcgtaaacatccgtctttagggtaggattaccacttcgggaatcattagggggctatctggctccaatctcttttcttttcccttttagacagggaaaagaagcaccatgttgcttaggctggcctcaagctcctgagctcaagcgatcctccttagcctcctgagtagccgggactacagatgtgtgccacagtgcctggctggatcctggcttgattgtgctttttggacttttaggtccctgggctgccgacgcccatagagaatatgatccttcgatacgtgaaggccaaggctgactggtggaccaacactgcccactacaaccgagaacggatccgccgaggggccactgtggacaagactgtttgtaaaaagaatctgggccgcctcacccggctctatctgaaggcagaacaggagcggcagcacaactacctgaaggttgggcagagtaggctgggctgggtgtgagtggtgggggagtgggcaagagggaggactgtagagttgtgactgaaccttgttctggcaggatcgggctgtagcgggaggctaatttcatgtccaccttacaggacgggccttacatcacagcggaggaagcagtggcagtatataccaccacagtgcattggttggaaagccgcaggttttcacccatcccattccccccactctcctataagcatgacaccaagttgctcatcttggcattggagcggctcaaggaagcttataggtgagtagtagggtagataggttcctgctgggaaggtgacagcagggaatggcgtcatcctcagagtccaaagaaagaaggtgtagccccagtctttcctggttttacttcctcctagttttcccattcacccttcccattgcttttgtcagtgtgaagtctcggttgaaccagtctcagagggaggagctaggtctgatcgagcaggcctacgataacccccacgaggcgctgtcccgcatcaagcgtcacctcctcacacagagagccttcaaagaggtgagtgaggcctcccaagttttctttttggttctaccaaaggtagcagttgcctttggttctaccaaaggtagcagttggtggattggtgtgaaccagcctccttgtcccacaggtgggcattgagttcatggatctgtatagccacctcgttccagtatatgatgttgagcccctggagaagataactgatgcttacctggaccagtacctgtggtatgaagccgacaagcgccgcctgttcccaccctggattaagcctgcagacacagaaccacctccgctgcttgtttacaagtggtgtcaaggtagaactttcatgagatcgccctgtgaggaacggggcaggaatttagttctacgtcaaaaatctcatctgggtagcatgattggtttactctcttgatgcgtggtagtaaagggaagtagtgttcgtgttaaactgaggaaaagcccatagtcaaagcaatccaaatgaatacgtggaatcatagtgggattggttatggaaggtaatgatagttcctgtggggctagtcttgcaagaggatttctaacctgctggagacctgccttgctactcctcaggcatcaataacctgcaggacgtgtgggagacgagtgaaggcgagtgcaatgtcatgctggaatcccgctttgagaagatgtatgagaagatcgacttgactctgctcaacaggctgctgcgcctcatcgtggaccacaacatagccgactacatgacagccaagaacaacgtcgtcatcaactataaggtgcgtctcaggcgcagtagcatggaattgtgtgtggagtgcttgtctggcccactgactcagaatttgctgaggaggaggctgggtgcggtggctcatgcctgtaatcccagcactttgggaggctgaggcgggcagatcacgaggtcaggagttcgagaccagtctggccaacatggtgaaaccccgtctctacttaaaaaaatacaaaaattagttgggtgtggtggtgggcgcctgtaatcccagctacttgggaggctgaggcaggagaatcacttgaacccgggaagtggaggttgcagtgagctgagattgcgccagtgcactctcagcctgggtgactgagcacaactccgcctcgggagtggaaaaaagtagaatttgctgaggggagaacaaaagaggttaactctggagaatcctggggcatggctcacattcttaagaattgtagttctttctttctaggacatgaaccatacgaattcatatgggatcatcagaggcctgcagtttgcctcattcatcgtgcagtattatggcctggtgatggatttgcttgtattgggattgcaccgggccagtgagatggctgggccccctcagatgccaaatgactttctcagtttccaggacatagccactgaggctgcccaccccatccgtctcttctgcagatacattgatcgcatccatatttttttcaggtgagggctttcctggattcctagccttgcagggtactgaggcatgtgctttgcctctgaaatcagctattgtacctgagttgacttaactgctgttggggctttaaaatggaatgaagcggccgggtgcggtagctcacgcctgtaatcccagcactttgggaggccgaggcaggcggatcacgaggtcaggagatcgagaccatcctggctaacacagtgaaaccccgtctctactaaaaatacaaaaaattagctgggcgtggtggcgggtgcctgtagtcccagctactccggaggctgaggctggagaagggcgtgaacctgggaggcggagcttgcagtgagccgggattgcgccgctgcgctccagcctggggaaagagcgagactgtctcaaaaaataaataaataaaaataaaatggaatgaagcccggggagggtgggggtaggatggggtggggtctccgtctattgagctggaggac

SEQ ID NO: 84721 - DNA, 1328 bp, Homo sapiens
tctggaaggtgacagaaatgggctgggaaggtccgaacagcagggtggatgatacgttttgggcaagttggagagcctttgcccagattggcccagcaaggagcggttttagattagagacactggctggattgaggagtagaaggctcaaacaacccaaggttagttggtctttgtgtgacagtgggaagaagtggagagaacactctgtctccccgacttccttcttgaccctccttccgtatctttcattcttccccactggcctttccagatgaggtccaaaagtaagctcactcttcagggaaaagtgatactaaacccaggcgtgaggagtcatccttctgctcttacttttccctgcatttccttaggctggcccagactctagattcctgggcacttacctgtatctgagacccttagacctcctgtctcagtttctccacctgtgagatgggcagtcacacagatgagtgtgcatgagggaatcagaagcccatctgggttgactcagaacccgggctctccccctgctgtgggtggaaacaaaacaccttttcacagaagctgttgtccctcccccatccctgataccatcacccagaagctgggtggggaatgggaagctggaggagggggttagagttagaccaatgcgaggagctagtaagagctcgcctctccgtgacttccccccatgcaagggtggcccaaggcttcccctgatatccaaagcaggacagcagccccttggtgggattctaactgctgctactctgtttctttcctcactttgctttccaaggtggtatgtgatccccagctcaggcctgtgcagacaggaaattctcccctgcagcaagtaggggaggtgggttgtgggatgtgacctccttccagatatcaggcagtgagtgtaaacctgccacctccagccctgatccattctcacctagcggctacaggaagctgtgtctgttcgatttggtgggaggagatgtgcagggagctgtatcttgtcctccgcttgtgaaaaactcaaggatgtggagaagagtagaccgtggaaccctgctcttctgcagccaagctgaggggcaggatgcgtgtgggacagtggtagagaagcaggggatagactcataggctgcaacaaaggtgactctgtccctggacactgcctccgtactttctccttgcttcactggccacagcatctccctccagccctcgctatgtgcctctgccatcttcacccatcatggagcagaggtgaggagaggcagcctgggaatatggagaccagtgaaggaccaggcctggag

SEQ ID NO: 84722 - DNA, 1046 bp, Homo sapiens
atctttcttaccctctgagtatagaaattccaaggcaagaccgccttggcccctcagcctggcgtgggccatgcccttggactgagtgtcagcacggacccgccctccccagctcacatcccccgagcctgccacgcccccagccccctccctgggccatgctgcagggcccggcttttcctgctgattcatgcgttggaactgtgggggcggggcttggaacttggaacaaagttcagacatggaggggccggcagacagcctggaattcataccagatgtacccggaatgcgcaagcggaatgcctggcatctgagagtcctggggaagctgcccagccaccctgcccatacctccctcccctccagcctgtggtcccctgcccgcccctcacagccccggccaccctgccgatacctccctcctctccagcctgtggtcccctgtccgcccctcacagccccgggggcctctgctgaccttctttcaaacgctaggcctcctcccttcctcactcttccccaatccaggcccccagaactctccttccagctgaactccctgggaacaagtcagttgggctgatcactgaactcacatttctggacctgaggtaccacacttctagtacctgcgtgctggtggggtgtgtccagggtcccgggccccaccctgtctgaatgctgaggaggctgggcccccaggggccgctagggcaggggagggtgagagcaggactgggtttctctagactccagttctggaaagaagagcaagggaagtctgtttacagccacctcttgctgctcagcgaggttaacagcttccgcgggcccagatcagagctgcagccctgcattagaatctcagaggtctactggggcaggaccctgatggccagcgagtgggtcagcgttgcagcaacatgccctgctcagatctttcccattttccctccctttcccttaggagcctgttcctctcacgccctcacctggctgagccgcagtagttcttcagtggcaagctttatgtcctgacccag

SEQ ID NO: 84723 - DNA, 1021 bp, Homo sapiens
ccctttctccacagttctcccctgtgagcgccatggagcccttgggccggcaggtactggggagtgaggagcctgtgatggggggaaggtcccgggggtctcactggtggcttgggcagggtggggggcctgtgggaagggtcggtctccatctgcttgctcctttccgcagctaactagcgggccgaaccaggagcaggtgtccccacttaccctcctcaagttgggcaaccaggtacaaccaggtggggctggggaagagtgggcggggctagagggaggagggcccatcggcaggggtcggggggtgggggcgcgtgctgaggctgaggctctggagtccagaggccagaagggagagagggtggggaggaccgaaggtgggcgccaggccccagaatgccagtgccctccgtctgacgctccctcttccctggggctgggacaaggccctgctgtcctcaggcacaggggctgtgacaaggccttcaacacagaacctggagctgaccccttgacctccctgacccctgatctgtccctgcaggagcctggtggccagactgccctgaagagtcccccaggagtctgcagcagagaccccaccccagagcagacccacaggctggcccgggccatgatggccttcactgccgacctgttctccctggtggctcaaacgtccacctgccccaacctcatcctgtcacccctgagtgtggccctggcgctgtctcacctggcactaggtaccctggcaccacttgtccagaccaagagagctgggaggccagtaggaactcagtactccaatggttctccgcgggcggttcctccaccagggtcacgtggctgtttggtaaaaatgcagattcctaggccggggcggtggctcacgcctgtaatcccaacactttgggaggctgaggcgggtggatcacgaggtcaggagttcaagaccagcctggccaacatggtgaaactctctctactaaaaatacaaaaaatttagctgtgcgtg

SEQ ID NO: 84724 - DNA, 1063 bp, Homo sapiens
gaaacacatgtattggcttgagttgatccgcctcacgtggaggcaagatcacaaaagcttctgtgtttcttgatgtgggcaattgtcagaaaataaggcctgaccttggcccagcagggagggtatctacctctccctgagccctcccccgcctgctaggacgagagcggggcttggatactgccctttggacaggatggcatcattgtctgtggctgcagccagccagcggtcgcctgctcagcccatgagcaaccactgtggacagggtattgcgtgtgtgctgaggggcgtccatgcagacccccacgcttgccctctcactgcccttgtagggttttcaatcatctctcctcttcccttatccagatggcttgaagtggaggattcagacttgccgttaatactctgggtccctgtgtctagctcggggccacctttggacccatgtcccttccctgccaggctccctcacctcacctcagcctacccacattgtgacaatcatctaccacctgatctggggtttgggcttagattctgtaggcaccaagactaaagtcgctccttcaagtccatttgaattgtgactttagtttccttaaatactatgccaggataatggccagggatggtggctcacgcctgtactcctggcactttgggatgctggtggatcacctgagatcaggattccaggccagcctggccaacacggtgaaaccccatctctactaaaacataaaaattaaccaggtgtggtggcgggcacctgtaatcccagctactcaggagactgaggcaggagaattgcttgaacccgggaggtggaagttgcactgagctgagatcgcgccactgcactttagcctgggcgacaagagtgaaactctgtctcaaaaacaaaaaaaactatgccgggatgagcctgtctcctcccttaatttcttacttgggccagaggaactagaactaacaacttctcttctagccttgcctcctgtgtacctcactgaatttttggtctctaataaaccagtctgcagaggctcaggggaggcag

SEQ ID NO: 84725 - DNA, 1107 bp, Homo sapiens
cgtctcaaaaaaaaaaaaaaaagtgggtcataggtttcggcttataggtcacaagtgtttaaacctggccatgaggccaggcgcagtggcgcatgcctgtaatcccagccatttgggaggctaaggcaggaaaatcgcttgaaccggggaggtggaggttgcagtgagctgagatcgcgccactgaactctagcctgggtgacacagtaagactctgtctcaaataaaaaaaaaacagctgatctctcttctgcgctgtctctccacagagagctcatgcgtgatcagggagtaaaactcattcccgttttaggccaaacacagaaaaattaggaaggacagccccaaggggccagaaccaccaccctacacaaagccgtgaggagacagtccctgtgcatctctgcgagtccctgaactcaaacccaagacttcctgtctcctgccagggctccccagaccccgacagcacaggggcgctggtggaggaggaggatcctttcttcaaagtccccgtgaacaagctggcagcggctgtctccaacttcggctatgacctgtaccgggtgcgatccagcacgagccccacgaccaacgtgctcctgtctcctctcagtgtggccacggccctctcggccctctcgctgggtgagtgctcagatgcaggaagccccaggcagacctggagaggccccctgtggcctctgcgtaaacgtggctgagtttattgacatttcagttcagcgaggggtgaagtagcaccaggggcctggcctgggggtcccagctgtgtaagcaggagctcaggggctgcacacacacgattccccagctccccgaaaggggctgggcaccactgacatggcgcttggcctcagggttcgcttattgacacagtgacttcaaggcacattcttgcattccttaaccaagctggtgctagcctaggttcctgggatgtaactgcaaacaagcaggtgtgggcttgccctcaccgaggacacagctgggttcacaggggaactaataccagctcactacagaatagtctttttttttttttttttttctttctgagacggagtctcgctttgtcgccaaggctgg

SEQ ID NO: 84726 - DNA, 1056 bp, Homo sapiens
gagaagctgtccgtgccttatccaacacaggtaactaagagttcttatgaacggtgacttcctgcagtgtttagataaaaccaggctagaagtagaggaccaccaaattcctcaagagctgtttctcttcatatgatatttcgcatagctcaaaataggaggaggaacgaagtaacagaagttagggataaagctcttttattgtatgcattgaaaccttacaggggcagccttcgtgtcctgtggaatctgctgtccctcgggttttcttctagggtattggaatattaaactgggatattaggggcccctggggtccagaatcttgccaatgaagagaagggcccctgtgtctgtgtccctcagtacgaagatgaaaggctggttaaggtgatagtccagcgggaaggtgaggtgggcaggctgcagccctgggctgggggtggttcccgccccatcctcgttccactcaaagccagcccggtgttccacctgagtcagcttgatgggtttgcctgtgatcttgctaaagtctggtgaatcaaacaaggattgcagctctgtagagatggagagagatttccgttaaaaccctgccttccccaacaccccaaccaagggatccctttgcaagcaagctgggatggcgcagcactgttgactttctctgaggcctgaagaggtctgagctgaccgagggtggagtgacttgcccaggagcatttagcaagttaggtcaagatgagaaaacaggtcagacagactcgtcttgagaggcagtgttgtgagcgcctgtcagggaggtctgctcgtgaggctgaggaatgagtctgatgagagaaggcagttcagccttcccttctggcacgatgaggattaaggactcatccacggcccccctacaagcctgtggagcccttgcgttctgcttagcacagtggaaggcccaaagaccctgccccaccccatccacccaccaagagcgaaagggtcttcagacatactcatctcctgcagggacttggtgacttcgccttcataactcagcttcagctt

SEQ ID NO: 84727 - DNA, 1049 bp, Homo sapiens
gaagggaaggctgaactgccttctctcatcagactcattcctcagcctcacgagcagacctccctgacaggcgctcacaacactgcctctcaagacgagtctgtctgacctgttttctcatcttgacctaacttgctaaatgctcctgggcaagtcactccaccctcggtcagctcagacctcttcaggcctcagagaaagtcaacagtgctgcgccatcccagcttgcttgcaaagggatcccttggttggggtgttggggaaggcagggttttaacggaaatctctctccatctctacagagctgcaatccttgtttgattcaccagactttagcaagatcacaggcaaacccatcaagctgactcaggtggaacaccgggctggctttgagtggaacgaggatggggcgggaaccacccccagcccagggctgcagcctgcccacctcaccttcccgctggactatcaccttaaccagcctttcatcttcgtactgagggacacagacacaggggcccttctcttcattggcaagattctggaccccaggggcccctaatatcccagtttaatattccaataccctagaagaaaacccgagggacagcagattccacaggacacgaaggctgcccctgtaaggtttcaatgcatacaataaaagagctttatccctaacttctgttacttcgttcctcctcctattttgagctatgcgaaatatcatatgaagagaaacagctcttgaggaatttggtggtcctctacttctagcctggttttatctaaacactgcaggaagtcaccgttcataagaactcttagttacctgtgttggataaggcacggacagcttctctgctctgggggtatttctgtactaggatcagtgatcctcccgggaggccatttcctgcccccataatcagggaagcctgctcgtaaacaacacatggacagataggagaggccatttgtaacttaaggaaatggacccgatacgtaaagattctgaacatattctttgtaaggaggtatgcctattt

SEQ ID NO: 84728 - DNA, 1037 bp, Homo sapiens
tcatcgctgacatccgtgagctgtgtgcagttccagaagttgagtgtcatttattttaattccagggcctagtgatgtaacttcctagaagggcggttcttccctcctcagagctagtctctgctagagagcagtggggcgtgagcccagctgataggagtgtcttgcttttgtctgagacttgcggagctccccattgcccttgaaaaccctgccttagagcttgacatcatgggatttttatttaccctgctttatgaaagttgacctttagcttagatttcagggtcaagagaaatcatggccgtacgtgaaaggtagagttggtcgagttgggaagttaatgttgaaaatacagtgtaaatgtggggaggcctcccctagcgcctttctccactgacagagaaaacagaagaaaacagcagctttattggaacagacattgtgcgttggtgacaacccagggaggccagggggaatttccacattcagcccagctgattcagaggatttgagacctggattctcattcctaggactgggcttctgtctatagtgagacgtctttcctctgcattgacagagcgagctgttcagcggctgtcggggtgccagcgtgacgccgagagcttcctgtgggcagagcacgccgtggtgggagagatcgcggatggcctggcccgggcctgtgctgccttaggtacagcatgagccttcacgttctgcgtcgggaacagtctgctgtgggcacttcgccgtggccccggccttgtctgcctggttaccccccgctctgtaaactgagggtgctccccctctcgttccatttcctccccctgaaaatatgcatccacagttgacagtggttcttttctggaacaagatttttctcttctcacaggagactggcaaaagtcagccacccatctacagaggagtctctacgtggtggaggttcgccacgggccgtccagtgttgaaatgggccatgagctcttcaaattggcccagatctttttcaacgggtgagtcccttt

SEQ ID NO: 84729 - DNA, 1086 bp, Homo sapiens
caaaaaaaaaaaaaaaaaaaaaaagaaattctgctgatcatttgagcccaggagttcaagaccagcctgggcaacatggcaaaaccccacctctactaaaagtacaaacattagccaggcctggtggcacacatcctcccaattagtgccagctactcaggaggctgaggtgggagaatcatctgagcctgggaagtcaaggctgcagtgagtggagatggcaccacggcactccagcctgggtgacagagtgagaccctgtctcaaaaaattctggtccctgtgtctctgagactatgagatttctttcctctaatcacattgcacaatgtacatatcctcatgtgtgtgaaatgttttgcgggcccactttcttgttttgagggcaatggtttagagctttccttgaaataacacatttctgcttactttgtttcctcctttcttcatgcagacctgaggatgagctgtttctaaaaagactttctaaaggttacttggtgggaaaggactcggacgctcctcttttctacagagaagaaggaaacaaaaaatttcaggagaaagattacacaggagctgcagtgctgtactctaaggtaaaacactcccagctcaagcaatttattatttatttttctctgagacagaatcttgctgtgttacccaggctggagtacagtggtataatctcagctcactgcaacattcgcctcctgggttcaagcgatcctcccaccttagtctcctgagtagctgggattacaggcatgtggcaccacgcccagctaatttttgtatttttagtagagatgggttttcgccatgttggccaggctggtctcaaactactgacctcaggtgttgcgcccgcctcagcctcccaaagtgctgggattacaggcatgagccaccatgccctgcccagcccagcaatgtaacaatgcgtgtttcttcaggagatggacccatattgctaaattgtatagccagtgttatctttgtctataatttattgaatggatttgaaaaagaaacctggcggaattctgctgtggttatagtctgaaacaaaaggtagttttt

SEQ ID NO: 84730 - DNA, 2047 bp, Homo sapiens
ctctgttgcccatgctggagtgcagtggcacattctcggctcactgcaacctctgcctcccgggttcaagcgattctcctgtcttagcctccctagaagctgggattacaggtgcccaccaccacaccctgctaatttttgtatttttagtagagacagggtttcgccatgtaggccaggctggtcttgaactcctggcctcgagatccacccaccttggcctcccagtatgctgggatcacaggcttgagccactgtgcctggcctaatactttgtgtaaattccatgaggcctgcaatcatgtctgggttattttactctgcattgtatccccaatacctggagaagtgctggcaagttttaggtgctgaataaatgcttgctagttgcatgaatgaatgaggcagtgggaagaaagggacaggtgaatggggaagaaaggcagcttgggggaaaaacaggaacaggaagaactattgttggactcaagtgaatatttaaataaattaggaatgtgtgaatgctgaaaccggggaagtgattttaaattgtagctttcatttactttatagctgctaccttgtgtctttaagacaaattaagaatgtttctaggccaggcgcagtggctcacgcctgtaatcccagcattttgggaagccaaggcaggcagatcacctgagattgggagtttgagaccagcttggccaacatggagaaactctgtctctattagaaatacaaaattagccaggtgtgggggcgcatgcctggaatcccagctacttgggaggctgaggcaggagaatctcttgaacccgggagatagaggttccggtaagccaagatcgcaccattgcactccagcaacaagagcaaaactccatctcaaaagaaaaaaagaaaagaatggttcttcacttttaaaaagactgatcatgggccaggcgcagtggctcatgcctgtaatctaagcactttaggaggccaaggcaggtggatcacttgaggtcaggagttcgagatcagcctggccaacatggggaaaccctggtctactaaaaatacaaaattagctgggtgtgttggcgtgtgcctgtaatccctgctgcttgagagcctgaggcaggataattgcttgaacccgtgaggcagaggttgcagtgagccgagattgcaccagtgcattccagactgggcgacagagtgagactgtctcaaaaaaaaataaagaatgatcatggagatatttaaataatttgataagtttttttattttttagagatggggtctcactctgttgcccatgctagtctcaaactcctgggcttaagcgatcctctcgcctcagcttcccaaagtgctgtgattatagatgtgagccactgcacctggccatgtttttatattcaaaattttataaacctatttccagcgtaggtgaagtattttgttcataaatgaagaatgaaagtttcacatgtgtttgtggtgatggaatgagttggagaacctttgctgactttcattatcagctaaagcaggtatcattttcgttcaaaagacacaggccacaaagggtacgcaaataccacacacatgtgaaggcgtttgggcaagagtcacatgataaaataagagatgatgcatagaactcttgtggtcaacagaatacatagcatttgtatcttaattatataacgaaaggggaagggaactaatgtttttgactatttctaatgtgacagatgctttagtagtcagtacttaagtaaccctagaagatagctattatactcccattttacagaggaaggaagtacagagaggttgaataatgtgtccatggggtgaagatttgaacacatgtgcccttgagtattacatttgttgctttatatacttactagggattttttttttaaagggtctcactctgttgcccaggctggggtgcagaagcacaatctcagctcactgcaaccttcacctcccaggttcaagtgattcttttgcctctgtctctcgattacagacgtgcgccac

SEQ ID NO: 84731 - DNA, 1622 bp, Homo sapiens
ttgcagctgtcagagagcattctaacaatagactggaggtagtggaaagctgccacttggcttaattaattttccctaactggtgttctgtgttttctctgattaatttccctaaggatgatattgacatcgactgagtgcgaggggtcagctgccctatactttccttttctggggttttatttctgtgttggaagctgtaaaggggagaaaggagagaatttttaaatgattttggccactttaacaaattcacacatttaagagtagcagcaaatgtttaacaggcagcaaaatacacagtttttcactctgcagagtctgactagttttaatttcaggagcatatgtaaggcatttttctttgctagcacaggtatgagtagctctcagaggcttaagactgcaggattttggaggctaaagaaatctctgtggttttcagctttcatgttggcgacacagttgaaccctctcgtggaggaagaacaattgtccagcaactgtgtatgccagattcacagatttattgtgaacactctgaaagacggaaggtatgtgctgtgtttttttctgtcttattgtatcgtagaatgggaacaaatttaggaataaaaaaggcaatagtgagttttcagctaagaatctgcagcttttcagttaagaactcaggtagctaacacatggcacccaaggaggagaaacatggaaacaagttggaaatttcagagcagaagattaaagtagaatgcagaaatcttgttatttctaatttcttcagaagcagcatttttaggatttcccccaaaagaatcttatctcttttgtttgtttttggtagaaacggggttttgccatgttgcccaggctggtctcgaactcctgagatcaggcaatctgcccacctcagcctcccaaagtgctgggattacaggtgcgagccatcatgcccggcctcaaaagtatcttttaatgaaaagaggtactttattttacagcagaaaatgataattattttgtaatgctgctttgtgtgtgtgtgtgtgtgtgtgtgtgtgtgtgtacaatcttgaatcttttatattaaatgctatatttagccaatatagaatacattgaaccacatgtggtggctcatgcctgtaatcccagcgctttgtggtgctaaggtgggaggattgcttgaggccaggagtttgagaccagcctgggtgacatagccaggccctgtctctacaaaaaaaaaaaagttaaattagtgaggtgtggcggcacacgctacagtcctagctacatgggaggctgaagtgggaggattccctaaccccaggagtttgagactgcagtgagctgtgattgcaccgccgcacttcagcctgggcagcacagcaagaggccatctctaaaaaaataaatttaaaaaaagaatgtgttgtacacggacaagttactgcatgctagagatacagtgatgaacagaactgttactctcattgctaaaacatgactgatttcaggcaaggtgcagtggctcacacctgtcatgccaacactttgggagaccaggtagggaggatcacttgagcccaggagtttgcaaccagcctggacaatatggtgag

SEQ ID NO: 84732 - DNA, 1032 bp, Homo sapiens
ccaaaaacagcagtcagaccatttaaagtctaaaacgtgatgaatttgggtagattattgcttaaatattgccctaggcctgtttcttcagctcccttgccactaacctcattcaggcctctgtcattttgtctcttctcttggtctccctgcctccagtcatgttcccattaaattccttctttttaaaatgcagacattgtgatatgctcatcaagtatgtattgagcaacaactgtgggccatttgcttcattaagcactgagggatacctgtctttattgacagtacagtctagtaggagcgagagagaataataaaataatcactaatgaacatataattaagacggagcagagtgttctgaaggaaagaaatcaaggctgtaggaaagactagaacaaagcaacctgatctcaactagagattaaggaagtgtctcttgaagtgatgtttgagacgagagctaaaaaatgagtattagatgaggcaaaatgagaaggaacacaacaccgcaatctcagagcatcacggacaaaggccttgtggcaagagggactgtcccatgtggtggaactgaaagaaaacaggaaggccagagggcagagggcagagggcaggcagcggcacgggaggggggttagcaaggccaggccaggcaagccatggcccaggtttttctttgtggcctaaggtcattgggaagttatcacaacgttttaattagagttaaaaagcaaaagaactgtaagttcttaaaaatgggtcattattacattttttaaaatatctattgtcataattggttttcactgggaaaaagtcattgttgagataagtatgtgtttctgaaaacagttcatctctttttatgccatatattcttgtgtttagtaatctaaattcttaccatgtcggttggctccttgaagatacggtgcgtagcgagaacactgcattttaattaaggaactagttgggaactgaaaaccctgcaatcacttgataatgatgcggcgaaagatgaagaga

SEQ ID NO: 84733 - DNA, 1055 bp, Homo sapiens
gagttgagatcgcgccactgccctccagcttgggcaacacagcgagaccccgtctcaggaaaagaaaaaagaaattgtctgatatttatagaattttcaaagtgtgagaaataaaacttcagacataattcgtgcttcatactatattgaattagatgattttaaagtctcccgtatttaccactgtatttttgtctgcgtatataagttccatgcacctatactatggctaacaatattttactttgactaaaatttgttacacaatacttaattattagtgttacttattattgaaagacattagttgaaatttctttcagcctgatttcatccattttctgccaagaggcaattgtaaattattggattgactcttctacatattgtttgtagttgttaagaaagtacttactggtagaagttgaattttttgttgcccttattctccattgtctgtttagcgaatttttctctgcgatggctcacttaaccattataatgataaaaatgataggtgtgagtgcaaataatttgaggtgctaagagtctgctctgaaatatcctgtttcggccgggcatggtggcttatgcctgtaatcccagcactttgggagattgaggtgggcgggtcacctgaggtcaggagtttgagaccagcctggccaacatggtgaaaccctgtctctactaaaaatcacaaaaattagctgggtgtggtggccagcgcctgtaatcctagctactcgggaggctgaggcaggagaatctcttgaaatcgggaggcggaggttgcagtgagccgagatggcgccgttgcactccagcctgggtaacaagagcgagactacgtctcaaaaaaaaaaaaaaatcctattttccccctaggtcaaagccagtgatatgtaaagctagcatagagcaaaagagtctgagaaccatgatgttgacctgtcttattagaatggtttgatttgcaggtgacacaaagcagaagatgtgtcagaagttaagtctctgcattactgctttggggtgtaatttaatttttagaa

SEQ ID NO: 84734 - DNA, 1629 bp, Homo sapiens
ctctaatggcacaaccacctctcatttagttgtgccagttaagagtaatattggcagaagtaaattaaatcagtgtgtaatgtgcccgtttgagttaggaccttggaaaacgcagcaggaatgcgaactcagcagttggagaaggcagagacagggtggcaggtgggaagccctcccagccgtgggtaccatttttgttctcagggcactctaggaaagttttttgagttgcctttgtgtgctgcaagtacccttggtgagctgcccacatgaggttgacttctgccttttagagccaatcactaaggcaaagtcaaattccataaatctgttatttcacaaaatgaggcatattttacagttttaacattcttcagctccatcaacatttgtgtaaagagtgatggcaaatacatgctcttatggtggcatttcttattttctgcttgagacacgctcatttccccccctttacttttaatcttcctgtttccttgacacacctgcttccgaaccccattgtcatctctccccgctgtgacagttcaccagcacttcatggtactggagactctttcaacttgccttttccaccaactgtcagttgcaaaataaggttgctttgtttgggagggagagggtggaatcctttctgaatgtctcctgttcctttgaagcaggagcacttcagagacaactgaactgcttttaggtttttcttaccacccagctttttcttctgattgatcctgccgtgaacacacggttctgttgatgacatcgatttgttgctatggaaatagtggtaatgtcacagattcaacccagtgactttactgcaggttgttgcaggagaaatgggcaaggctttaggggagaacctcattaacactgaaggctatcaattctaagcaggtgaaaggtagatggagccaaccttttgtgtaatgaaaacaaaaagtgaacccctagcaaattcaccgagtgccatggaatgcctcagcacgaattctaatccatgggagtctttgacaaaataaaaaatttacactttcccagagcattccttctacccaagtttaaatctcttaacccaaatcctttgcactaaaacggggtttcccttttgatcttcaggactcgggcagccgcaagtagctcctccagcgccagcagccagcccagcagcaagcagcaggccccagccgcagaatggaagctcgggaatgggtgagatgcctcacggggcgtgcgctgaccaggggtgtcagacttcggaatcatgttttgaagttgaatctgggactaaagggagttttccaaatgccattcattacagggttgtgtcttggaaagaataattctgattcatattttagagtatgtgattgaaaaaataattaaagattgtctttttttttttttttttttttggaagtagggtcttgctctgtcagcggggctggagtgcagtggaagcatcacagctcgttgcagccttaacctcccaagtagctggtactatgggcgcatgccaccatgcctggctaatttttttgtagaaatggtgtcttactatgttgccctggctggtctcaaactgccctggcctcaagcagtcctccgtcc

SEQ ID NO: 84735 - DNA, 1059 bp, Homo sapiens
tagctggattaaaatacaggttggaaaacggaatatgcgtaagacgagaaaggctgtaggaagatgatttcttacttgatcttttccaaggaagaccccatacactaatatgatcgatttggtttgtaggtggaccatttgtgctcgtgttaccaacaaaagtcagatccgtacctggagcaactcccgaggggaagggaagcttttctccctagaactggttgacgaaagtgtgagtgtttgtcatgctggggagtgagggcagtgggctcgccgggaaacagaaggctcagctctgcggagggcagtgggctcgctgggaaacagaaggctcagctctgcggagggcagtgggctcgccgagaaacagaaggctcagctctgcgggcctatgaggtgaagaataatagtaggccagagagaagcatgattgttattgtgcttttccctctgtcatagtcttttgatgctgtctggagtagagggttaaggtcataaataaaatctttgatcttaaatgacagcgtttgtagcagtagaaagtagttttctaaatatataagtagcctcctgggcaggagaagctggaaacagtctgatttgctggcaggtgtactggaagcactgggaggtgatgcctgcttgtgagcgccgtggagctttgggacacagcagaaggcacacagttgtgacctcgatatgggagtggttttgtgggaaatgggttctgactgtgcagattctctatttgctttatttaaactaaacaaaaccatgacgatgagacaaaattcctatgccatggaagtacgacagtcttgatagctgttaatcagtccattcgttttgctaataattcctgaaattgccgggtgtggtggctcacgcctgtaatcccaacactttgggaggccagggtgcacagatcacttgaggtcaggagttcgagaccagcctggccaacatagtgaaaccccgtttatactaaaaatacaaaaattagctgggtatggtggcaggtgcctgtagtcccagctacttgggaggctgaggcaggag

SEQ ID NO: 84736 - DNA, 1437 bp, Homo sapiens
aataataataattcctaaaatgtacttcagcattcttttcaaagtgctgcagatttcctgtttgttcagactcccaaatagggagaaaaaaatagatgttttttttggaagttgatataacacccaaaatgtttgtgtgatggcagaatcaatattagaacctaatttttttttagaaattattgctctaatgtatggtggttggctaaaatttcttgtccacttgtaaattttggctgacagaaaagcaaaagtgaaaatcagatcacaagcaacttgcaaacatgacttactctgacatttttggcaatggctccgaatgtgaagtggtttgtcactgagagggcactgtggagggagccggtgaatcaccccgtggcagcaccttcctcgtgggctctgggcgtgtccctcagtattcaactttttttgtttttattgtcagaataaattaaactcgtcattgccgttttgttctgttctgtttctcagttgaggctaatgcagcatgattatgggatcggctagctgaaattctcattcttcagcggggccagtgacttcagtgtgtgactgtaaaatgcgggttcctgggatgtccgtagccctctctggaccctgtttgtgcaagggccactgctctcaagatgtcactttggtgctagggtggcctgtgttctatcccagtgtcacttgggtgctggggtggcctgtgttcaatcccgcagccctaacctgcccacgtgcttctgcagggtgaaatccgagctacagctttcaatgagcaagtggacaagttctttcctcttattgaagtgaacaaggtatggccgtgctgactttagaactgacaccgcctgggggtggagtgcggatgaaaagacgctggcccaggggaggggtgtgtggtggcagactaggggtttctgtccgatttgatggtagtctcaggttctgtggcttggcctccttcgcaggtgtattatttctcgaaaggcaccctgaagattgctaacaagcagttcacagctgttaaaaatgactacgagatgaccttcaataacgagacttccgtcatgccctgtgaggacgaccatcatttacctacggttcagtttgatttcacggggattgatgacctcgagaacaagtcgaaagactcacttgtaggtaagctcgtgtatgagaaggaagagcagggatgactagctttctttgcagtgtacggggtggtgtcaggcttcagtgcttgccgttcatcatttgctggcgtcggaatgggagtcttgaccacctcctgctaacacgtgcatgtgttttagacatcatcgggatctgcaagagctatgaagacgccactaaaatcacagtgaggtctaacaacagagaagttgccaagaggaatatctacttgatggacacatccgggaaggtggt

SEQ ID NO: 84737 - DNA, 1519 bp, Homo sapiens
acatgctttctttctctgtcaagtctttggtgccgatcacatcttctagtgtgtattcactagactctgatcaagtgtggtgagaacaatgggctttttgttaggattagattgttattcccaaagcactcaagggatgaggagagcctgttaaaatctcctcactgtatctagctttttaggacattcaaactctgtcttaaaagagtacttcaaactgagacacaggatgcaagaattgatgtggtcagggaaaacactttcacccaagcttcaataattcccatagctgtagtctatgggggggaagtgtgtcagtttccagctgtgtcttaggatttaagcagctaaagaatgagctcattttacatactcctcctttgttttgagtcatttaaaccaatggcactggtgtttgaccagtttcatgaagcatcttctggaatgttcatgtcactgagccatcctcatgagtagtacggtccacacgtatctgccgaactgcagggcccgttcatagtctgaccagaactagccacagatttgcttttttcttattgcttgattttcttttaggctctggagttcgactccaggttaattgcattcccacattaaaatcgcattcccacattaaaattgcattcccacattaatgtcttcatcttttacttgtcaataatcatgatcccagtcaacataaaaagcacggctgtccccagaataaaataacttggcattgatcaaagacaagctcagtgcatacatgatacctggacaaggattagagatgtttagatcttggctataacaatgcagagtttttattgtaagaagggccgccttgactcctgacgagtgatctttggtggcaaatgtctccttggagcttttgaaaccgtgaacttgtgtagctagtagtggtgaaacagatggatgggccttgctgtgcccctgtgagggatttagccgcttacctgacaggagaaggcagctgtctgcagctcagggtaacatccattctgttagatggtctctgtttaaggaacctgttctttgtgtggttacccaccttgggatggtatttggcctttcatctccggccagctcctctccgccaccactgtgttcccgagccactttctccttggccccttttccttcatatcaattgatgtgtgatcaagaagtacaatcagttttcataataatttaatacaaattaatttagcttcgatattagcaaaagtaaaatttcactaagaaggtaaatctacaagaaaaaagataatgccttctgataagttgctctggtttataaaatcttttgggccaggcacggtggctcataccttaattccagcactttgggaggccgaggtggacaattgcttgaggccaggagttcaagaccagcctggccaacatggtgaaacctcgtctctacaaaaaatacaaaaatcagccgggcctgtagtcccagctactcggtgcgtgcctgtagtcccagctactcggg

SEQ ID NO: 84738 - DNA, 1291 bp, Homo sapiens
ggcgacaaggtacccagcattcctaaccaccttcacaaagggctgtaaagtgtgcagaaggatggatttagaaacttggtttccagcaccagctgtcagagccgtaattcttacccggggctgtgacctgagcgtggcatgggggttgagaatcactggcagagggaagcagccaggtgtgctcatgggaatatgtgttacccctcaggggactggaggcaggagagtctgaagaactcttagagtcaattcctagagggatcttggagcaggggtgacagtcaagctttgtggtataatatcacctgctttcgggtccacgtttctttcctgtgatccttcctgcaaatttaagcgcccacatatcaaaaagatgttttttgagatgagcgttagtccgcctcaggtcagacatgaggcagtttcacgggtgctgttcctggctgtagaatagtgtattaacctcataggctgagagctgccggcattcccggacaaggattggccctgacatttgacttttagttgcagctttttcctttcagtgtttgtatttaatgaccctcctcccatcttgatctaagcctgtgttctgccagcagtttagtatttagatcatttatttctcctttacgcctgctcttttattttcatcatatacagtgtaggtttcattcctcctgtctcatttcactgtatacccttatccatcattgtcaacagcagctcttaagtgctcttatagaacatctcaagaattaaacactggacagatcctcgttgtcctgtcatgggacacccactctttcggttctctgtaatcccagctacccaggaggctgaggcaggtggattacatgagcccaggagttcgactgagcaacatggaagaccccttctcttgaaacaaaaactttattgctgaaaaatgctgacaatcatctgagtcgtaatcttcttgctggtgggggtttgtttcagggttgatggctgagcagtcacggcgatggttgctgaacatcggcgtgtctttggcagtttcttaaaataagacagcagtgaagtgtgccacattggttgactcttcctttcacaaaagctttctccatagccggcgatgctgtttgacagcattttacccacaggagaactttttcaaactggagtctctccctctcaggtcctgtcactgctttatcagccaagcttatgcaaattctaaatcctttgtcgtcatttcaacaatgctcacagcgttctcaccacaagagatttcatctcaagaaagcac

SEQ ID NO: 84739 - DNA, 1020 bp, Homo sapiens
ggttgatcgttgctgcactgggtgtttgtggtccgcattctgtatttcctagatctgtggcctttggagggtcagaggatcgggaggaacaaatctttgtctttcatacagtgttcaagcaaacaggaaaacaatttcacttttaattaacttagtgtaatttaggattaactcttttattgtgaaggaattatctgcctcagaacttggcttattagaacttggcttattaccttcatgggttttgtactcggcacatgtgatttctaaaactacagaatgaatgattccctgtgatcatgtgtaatcttgaggatgtagaaacacttaccacctaaacgtaagggcaggctttgagctgcctctcggtccgatcctgggcgggctcgcgactccgtgcctcatgctgttcttttctcccgaagccggactactttagttctgtggccacagtggtgtatcttcgcaaagagaactgcatgtaccaagcctgcccgactcaggactgcaataagaaagtgattgatcaacagaatggattgtaccgctgtgagaagtgcgacaccgaatttcccaatttcaagtaccgcatgatcctgtcagtaagtagcctcggtagatgagaaccacggttgtgttcacggaggccctcccgtgtgccaggcactgtggtcacaacagtagagacaaagcattcctggtaggaagcccgcagatgagtaggtgtggaagagcttatccatccgctttttcatgccagaaagtggtgttgagataccccagctgattcagtctttcatgcacgtcatacagccatagcgtcagtgacacttgcctgctaactgctatgaagataaattaatttgaaaacggcatttatagacagcactaattgtacttacacagccaatgcccgtatttagtcactttcatgtggataatctattctctagctttagtatagctgacttcagaggaatgtgacggtgtgctgatgtgagattgttgcttttttgcatt

SEQ ID NO: 84740 - DNA, 1629 bp, Homo sapiens
tcctaggaactacagagtgggcaattgaaaatgcagagaactcccccgattcactcaaaacccttcatccaaagccagctgcacctcgacaggaactaatctgatgggcctctctctgtcacccaggctggagtgcagtggctcgatctcagctcgctgcaacctccgcctcccgggttcaagtgattctcccgcctcagcctcctgagtagctgggattacaggcacccgccaccatgcctggctaatttttgtatttttcgtagagacggagtttcaccatgttggccaggctggtttcaaactcctggcctcaagtgttccacccgccttggcctcccaaagtgctgggatgacaggcatgagcccactgcacctggccctctctggaaattattttaataagtggaaaaagaacattaacctctccccatcttctcagtgtgtctttttattatttctttgctgaaataatgtagaattgtgttttttaggtaaatattgcagattttcaagagaatcagtgggtgacttgtttccaggagtctgctgaagctatccttggacaaaatgctgcttatcttggggaattaaaagacaaggtcagccacatattttattataacttctataacttttaatggttctcattctataacactgaccccacacatttttttttttttgagatggagtcttgccctgtttcctaggctggagtgcagtggcgcgatctcagctcaccgcagtctccgcctcccgggttcaagtgattctcctgccccagcctcctgagtagctgggatgacaggcacccgccacgatgcccggctagtttttgtatttttagtagagacggggttttaccatgttggccaggctggtctcgaactcctgacctcatgatctgcccgcttcagccacccgaaatgctgggattacaggtgtgagccaccacaccttgcccaacactggccctctttttgctgtttaatattttttagtttgtttctttttggtattgtttgtatacagtttctcagcctgataattatttaagagctcatctgatgttatctaatcttgtccatttgggatgtgcttaacagtgaaataatgtatataaaagtactttaaaaccaaagcactttctaaatcgaagccacccgtttctcctgttcctattagcacatcagagctagtgtgcctgagatgacttaggtcgggaggtgtccctgaaacaacctgaattattacaggcatgcttttttaacatagtaaataccttccagaaaagttgagtcagatcctggttaaaatgcacgtatgtcaagttcctgggtctgtcctataaaacaataataataaatgcacatataaggtgcctgccatttcagcccatcagatgcaattcttatgcggtgactttcttccgtaaggtaactttgtccatttcatttttataagtttgcattttcacatattaggtttatttaatgtacagaatagattgctaataatgctgaatttaggaaaggtagttgctcaggtaaaacataaggaagaccaataaaagctatgttttctgggccacataaatgggcacctttctgtagatggcttttcccc

SEQ ID NO: 84741 - DNA, 1050 bp, Homo sapiens
catacataaccaaatttgcctttgtaaccatttttacgtgtacagtttagtggcgttaggtacattcacattactgtgcccctgtcaccaccatccttttccagtacttttttaaataggcaaattcatagagacagacgacagccttgtgttttccaaggatggagggaaggggagaatggagacacactgttcatgggtggcgatttgaaactctgcacattaagcaatagctccttttccaaaaccctcttctccctggccctgacaactgccattctaccttctatgaatgtgattagtgttttaattttcaataagattctacttaaaacagtttcatgtaatgttacctgtagatgagtcattcctaagtaatttgaaactacccaggagatgcattttcagaagtctttttaaaagtcttatcagtatttgcaagttgtccagtggtttccatgtgtcaagttttatgtttgtttttgcagaatgaacaggcatttgaagaagttttccagaatgccaacttccgatctttcatattcagagtcagggtcaaagtggagacctacaacgtaagtaagggcctgggcagcagggttggtggtggggaggtgctgtttgtcacctacggcagtgtcgtgacactccctggcagggagttactgtactcactgccagaccccggtgctgactttgcccaacacaggtgctgttatgatccccattttcagatgaggaaggagagagagcttaagtgtcttgtcgaaacaatggcgggggggtggggaatacaatatggatttttttgtttgtttattttttttatttttattttttttcagttaaatcctaggattttttcgtctgtgttctgacaaaaaaattataacgcatgcagtagagtcatatctttgacaaatttagattgtagaaaagtatattaagtatatgagccgggcgtggtggtgtgtgcctgtggtcccagctacttgggagactgaggcagcagttcaaggccagcctgggtaacatagtgaaaccccgttt

SEQ ID NO: 84742 - DNA, 1017 bp, Homo sapiens
agtcagtatatgaaacaaaggccacgtgtggttaaaactaccttgaaaattcctgaaattgcccataataccatatagtatttatttatttatttatttatttatttatttatttatttatttgagacagagtctctgtcacccaggctggagtgcagtgggacgatcttggctcaccacaacctccgcctcccgggttcaagtgattctcctgccttagcccctcgagtagctgggattacaggcgcccgccaccatgcccggctaatttttgtatttttagtagagacggagttttcaccatgttggccaggctggtctcgaactcctgacctcagatgatccacccgcctcagcctcccaaagtgccaggattacaggcatgagccaccgcgcccagcttagttatagttataatcaaacagtattgagcatggtctgccaggtaactgttctacatcctttacgtggaacatctcacttgagcctagtaaccctatatgtagaaactgtggttaccctattttgccactgaaggaattacatacagagagacacgggcattcagagaacaagtcacttgcctaagttgtatgctagcaagtggtcgagctaacgtccaacccaggcagcctgacttcagagctttgcttttgatcatgcttacgagtatcacgggatttagtaccgaccaagcacacagcagtgtgacagccccgagctcgcctgtgcagccttcctgggtatcactccgttctgcccggaaaggcaccattcaggccgtgagtgtaaacgtacgagtgggcagggggagtggtagaaacgcccctgctgattgcagggtttactcacgtatttaccttaacgcccgttcttctgcgactactataaacattaaatgagataggggatcagatgtcaccgtgaaacaatgtcagggagtggggtggggctgggggggatttttggggccattcagccccatcgtgtctggacagggaaggtgaagtgaagaga

SEQ ID NO: 84743 - DNA, 1017 bp, Homo sapiens
gcttctgggtgtttgggagcttgggtaaagaatcagaagggcctgtgctggagaaaggacctgttcactcgcccagccccagacattcaggaggaggctgtcactcactggaatgactgaactctgaacccgtgcgtctgttccctcccgctgggctcactgaaaccactgaagcaaaaggggtttcactgctccacaccacactttcactgctcacaaactacttctccctttttgaaggacgagtctcgaattaaggccactgtgatggacgtgaagcccgtggactacagagagtatggccgaaggctggtcatgagcatcaggagaagtgcattgatgtgagaggagcagtgccaatcgggcagaagtttgcaaataggcagaatggaatcgatttcctcccacctccgtgtgacgatcccatgttagctacacagtgcagaggctcttgatggtggactaagcaatttcccccctcgtgcgcatctcagaacccatcggtaggcaaaggaaaatacgctcaggtggttgtggtgtagactgtgtcaggcctacggagtcagccagtggctagcgcaagaccagtcactccctctgccttcaggcttctgtcaatttcattatcatcaagcaggaattatgtcgtaagtcactgaccctaactgcagaccatgaagtaaattatgtaactaggtttttgcttctccagtggtgaccacccccccccatccccgctcacaacttgggttcttctcagcggggcgagctgagaagcggtcatgagcacctggggattttagtaagtgtgtcttcctagaattcgaaggctctctctttctagaggtgctacatagttggtaatgcttggaatggcaatagggtagaatgattaatcaaaggcatatcttctatatctgaagagtatccttccttcagggtttaatagactgagtcagatgggtctgatattaatcaaaattgtctcttctgaggaccgctgataagcattgactt

SEQ ID NO: 84744 - DNA, 1042 bp, Homo sapiens
tgaggcctcagccatttttacggaagttcttttctgtctgaccttgcttataaagcatcgacgagaaaattacagtcttcaaccctcttctggattgacaaattgtggctgggaagtggcgatctagctttcagcccagtaaccagtctttcatgcctactactcccagcattccctcctctccccacgtgtctgtccacacagtgaagaggcctgaccagccgtggtaccaggacaggacgtgtccagggaacgctgacacctgtcctcgcgccttctcagtggccagcgtgatgaaaccagcacgtctccgtggatgtgattgggaacccaggggcagtgccagggggagggctccctcgaggaggctgtttctaacagatttccccactcaaagatcagatcaccagcagaggagcatcagaaactggctccactgttgggcttttcagagattttggtccctgcgggttgcctaaatagattctggcccacagtttacctcgaaaggctgttgatgttgttctgtttctcctctttcacttagagatcaatgttgattttgcgtacaccatgacatcagcgttaggcaattaggagaaaaaaatctaatcatttcgcctttatttcaagtggttcttgaattccctccagtctcattgtgaaaggggcagggaaaaaaataaaagggtaataatctgatttctgtccatatttccagtgttttatgctttccattaaaaccttgctaatctctcgcgtgctgttccttttttgaactgcagggtcaaaaatgttcccctcccccacttctgtttcctgagtgggctgtcttcaaaaagtataaatactattgatcgtggtatttaatacactaatgaaacccatggttattgactacataattaatatactgtccaaaagtgaagtttggccgcccagtatgtaaaggtttatattgactcatgtttctttggcaatatgccgcccaaggttttatttatagaggatgaaacaggttgtttggtctccttttcttctt

SEQ ID NO: 84745 - DNA, 1025 bp, Homo sapiens
tttggggaactctaaagctcgaaaggggacagtggggctgggcacggtggctcatgcctgtaatctcagcactttgggaggccaaggaggatggatcacctgaggtcaggagttcgagaccagcctggccaacatggtgaaaccccatctctgctaaaaatacaaaaattagctgggtgtgatgacacgtgcctgtaatcccagctgctcgagaggctaagccacaagaatcccttgaacccgggaggcggaggttgcggtgagccgagatcacaccactgcactccagcctgggtgacagagccagatctatctcaaaaaaaaaaaaaaaaaaaaaaaaggaaaggggacagtgggcctcctgcaaggagcagagcagaggaaagaggacacctgcttacctcctgccctcctccagggactcctgcacctcctgatgtcctcacatgtgcagcgagggggacagttgtctctcccatctcacagggcggaagtgaggatcaaatgcagtaatttgtgagaaagaaaaaacataaaacagtccataaatgtgcaaggaatcataattattatattttctcctctgggtgaaccagagtttggatgtatgaagctcacatacgaggaaaatcaaccgggtccgatccatgagctgctcttttcaaatctcagtgatgtgcctctggaagagactttggtgaaggtttgcatctgtttggggatgtccatcattttgattgttctgtacacgtccgctgaaatgtaatacttgacatttctcgagaacccgttgtattttttttttaaaccttgtaactgaactatatgttcagggaaatggaaataaaacatgattgcttagtttagatatgaaagtggagtttctgctttatcctcaccctcctttgaggacactcattctttccccactttccggcccccaggcgtagaaaataggctgttcctttgcacatgagggaggcagcgtggggagaaagacaacgtgaggactgtggtcaggcaga

SEQ ID NO: 84746 - DNA, 1003 bp, Homo sapiens
cttccctgtttactcagcccaaagccacggggccaggctgctcccagacccactgggcaggccctgtagggacagtggcagtaggcggttagccctgtagggacagtggcagtaggaggttagccctgtagggacagtggcagtaggcaggccctgtagggacagtggcagtaggcgggccctgtagggacagtggcagtaggcgggccctgtagggacagtggcagtaggcagtcagccctgtagggacagtggcagtaggaggttagccctgtagggacagtggcagtaggcaggccctgtagggacagtggcagtaggcgggccctgtagagacagtggcagtaggcagtcagccctgtagggacagtggcagtaggcagttagccctgtagggacagtggcagtaggcaggccctgtagggacagtggcagtaggcgggccctgtagggacagtggcagtaggcaggccctgtagggacagtggcagtaggcggttagccctgtagggacagtggcagtaggaggttagccctgtagggacagtggcagtaggcaggccctgtagggacagtggcagtaggcgggccctgtagggacagtggcagtaggaggttagccctgttgcagagaacctgccaccaccatccctatctggcgctctccctgcccttggttctttcccttcttctctctctacccccttctctttttttttctcactcagcttctctgctgaattctgcattgacatcagcacttccaaaaacaacaacaaaggaaagtaggtcaccggcgtaccggatcggagctgggccccggtgccagctgagtccggggctgcggcccatctcatggagagccgggggcgccccaaactctgcgccacagcctcacacatgcagcttggttcctgccctgtgttcttagcgggaaggggtaggtatgcgtgcatggcctgtatgttggcatgctggctcacggacggggcagcgttggggt

SEQ ID NO: 84747 - DNA, 1389 bp, Homo sapiens
ccggggcctggtgaacctggaccgtcttttgctgcacgagaaccagctgcagtgggtccaccacaaggcgttccacgacctccgcaggctgaccaccctcttcctcttcaacaacagcctctcggagctgcagggtgagtgcctggccccgctgggggccctggagttcctccgcctcaacggcaacccctgggactgtggttgtcgcgcgcgctccctgtgggaatggctgcagaggttccggggctccagctccgctgtcccctgtgtgtcccctgggctgcggcacggccaggacctgaagctgctgagggccgaggacttccggaactgcacgggaccagcgtccccgcaccagatcaagtcacacacgctcaccaccaccgacagggccgcccgcaaggaacaccactcaccccacggccccaccaggagcaagggccacccgcacggcccccggcccggccacaggaagccggggaagaactgcaccaaccccaggaaccgcaatcagatctctaaggcgggcgccgggaaacaggcccccgagctgccagactatgccccagactaccagcacaagttcagttttgacatcatgcctacggcccggcccaagaggaagggcaagtgtgcccgcaggacccccatccgtgcccccagcggggtgcagcaggcctcctcggccagttccctgggggcctccctcctggcctggacactggggctggcggtcactctccgctgaggacccagggcgtcagcacccagcactgccacatgtccaccaaggaacagaatttattttcttctttttttaacaagtggaagatctgctgggtttcaggaaaaggctggtagagccttcggctgctgtctggacgtctggaccctgccatgtggattataaacccaaagtgtacagccctaggcgggagggggtggcgcttctcagccggctgtcccagccagccccgcagagcgcccacggacagtgtccactctggcaaggtgggaaaaggcactccaagtgcatcctccactggcaacagtgggacaattgcccccgacggcggcaccggggctctgtggaatcccgatcgttccgagaggtctggagggccccgtggttcctggagaaagcaggacgcagagaagaacaaatgaggctcacccacgaggctgggtggccagcagtctgggcacacacgagcaggtggcatcttggctcttgcctgaggccagtcaccctgccctgaattctatcctactccaccttcagcccctccctcgggggtagcgcctctcattcctgatgtctcaggcaaccctggcagacccaggtccaactgctggggtccaagaaccaattaccaaaggaaagatcat

SEQ ID NO: 84748 - DNA, 1089 bp, Homo sapiens
agtcagagtcagttacagctccgtaaatagagcaattccacttccaggaattgatctactgctacccttgtatctgtgggcagaaatgcgcatgtgggagcatgcaagttcagaaactggaaacaacctacttgtccatcaggaggggatccactgggtagatgacaacacccccgtgcgatgggattttccgctgcgaggaatgggtgactctgtgtgcactgagatggggtggatgccaagctaccttgcaaagtgaaaaagcagtggtaatacatggcgctaccatttgggttctaaaaagacatgcttgtatgtgatagaaattttctggaaatacacaaaagaaactgttaacagtaggatacctctgaagaaagaaactggggcctggaggtctgggagaggaaaggagacttactttttattgtatacccttttgtgttctttgaagtttttttttgtttttttttttttttttactatgtgcatgtattatcttttcgattaaaaagaaagttgggggaggttcaaaaaaaaacaaactcacaggctttatctggcttctcagtccaccttttcttccgtttccagcccggtcctaccaccctgattctcaggccttttctcagctcctctccctccctacaagcctatgcctacccttccccggggcatccattaccgcctcttacaggtacttaaaacctatctttttgccttgaaatacaaataactctaatctggagagaaggctgagctccattgcacttatagaacagacagaaatcagctggcactgagatgctcgataaatgtttgctgaatcgaatggaatctgcgactcggttggttacactgagcaaggtactaattggccaaggtcaggcatccaaattgcacatgggttggtgctctctgcgcctagagagggactcgttccctggatgctctcattttctccattgtggctatgcagggggagcactacacatgcaggaaagggtgggtgcagggctgtgtgcacaccgtctcctctcttggagacacagctcagagagactttaagaggtagagcgaaacaacagt

SEQ ID NO: 84749 - DNA, 1049 bp, Homo sapiens
ccaggcctggctgactccagcatcttcactcagactcattgtcctctgccttctgtgaagttaggtagtggcaggaccttctcccaaattgtgggtttgataagctcgcaagctggtgggaaggggatggagcaggccccttggcattttctgacctgagaattgagaatatcaggggatgaggccgaggatattcaggacttgggcagtactcgccctgcttttgcccgaggagggaccaagtgtgtccctggctgggagagctggtaggtcctctgtaacacggtgggctcagcacaggggagacatggctgtgcccccaaggcatctagttgctggccccctgtccctggactccctcctcactatccccataagggatggagtgaaagccgctttgtcctccccagctcttgcccatcacttccccctcaagctcccagcgcctgtgaattccacctgggcacactcttctcagaggcagcaaaatgagatcttactccagagactggggaaagcaatccacagattgggacccggagcggcgaggttcgagtgcacgtgtcctgaggaacggggtggttcagcgtagccgggggtggggactggggggctttgtttttctaccagttctgctgtgcttgcttaaaacttgatgagttcttcttgggaaattgcttcagatttcacagcattttcctcttaatagccttggcagtggtgaatccttgacctttgagggtgggtttgattttttggaaaaggccaaaagtaatttgaagctgtgtgttgtgaatacaggggctgagcaatttgcagaatgtgatttgtttttgttatcggaattttttttttttttgagattcaaaacgcgatggcaccctaaccaactgagccagttttctcacgaggaagttccagaattgtttcaagtaatggcagtgctttgcaatgggggacttgggttcaaagatgaccactctgatggaagggtaggggaagggaacggatgctttattgaaccgttactatgtgccagacactttaca

SEQ ID NO: 84750 - DNA, 2003 bp, Homo sapiens
tgtagcgtgccttcttgtggcagagcaaggcctcccggagccgctgctgctgttcctcctgcatcactgtcctctatcactgcagccatggacgaggcctctcggtggcaggctctggggggactctgggcacccaaatgaaaatgccacagtcctcttctcggtgggcttgcctccctggcctttctcctcaccgtagatccctcttgccttccctgttttaggagccataacaaaagagtctgtgggtgtcacccgcccgtctgccagcctgcaggatcaggtatcggaggccttcaggactctcgtaggctgccttggcatctctgcaccacacttatgcctggcccccattcggcaggcagatccaatccctgggaggataagggtgtgttctggaagctggcagtgccccctggtgaagccctcagaagcctggggcgagagctgtcacctcccccacagagaaagctggaatcgattcctctctcaccactcccttggaaagaacagcaacacaagggaaggcctgttattggtggagggtttgtcctgagagagcagcaggtacataaaaaaatagctggggcaacacgccggcctcggacccagcctgtgcagcccaaaacgggggcacagatccgtcccgccccacccttgctgctgagttgggtctgggcccctcctggtagccggggtatggaggaccctggctgctgcccctgcctcctcgccgggacctgactttccctctgccccccactgggaactggccagagtgtttttactaacaagctagccatgtcacaatctcaacagagagagacgggcgtggggaggaagagagagggagacagagacagagaaaagaaaggaaggaaggaagggagggagggaggagggaagagacagagagaggaaataaagaaagacaggccgggcgcggtggctcacgcctgtaatcccagcactttgggaggccgaggtgggcggatcacgaggtcaggagattgagaccatcctggctaacacggtgaaaccccatctgtactaaaaatacaaaaaattagccaggcgaggtggcgggcgcctgtagtcccagctactcgggaggctgaggcaggagaatggcgtgaacccgggaggcggagcttgcagtgagccgagatcgcgccactgcactccagcctgggcgacagagcaagactccgtctcaaaaaaaaaattaaaattaaaaattaaaaaaaagagaaagagagaaagaaaaaagaaaggagggagggagggaaggaaggaagaaagggaaagaaagagaaagaaggaaggaaggaagacagtccttgcagaaataccgctgcagtgtctgccaggacctaagatctcgtactatctattttttaataattgagggtaataaatatgtatttctttctcctcatcatcccccaacctccgatgcttgtcagctccctgcgtctctcctctgatcagaccaagtcttccccaagcaaaaaaaaaaaatcctttaagcaaaaaggattaaaaccttgaaagtaggtctgcctgagctccccccactccctcccctcccctcccccagggctgaagtgaagaggcccctcaggggagccggggacggggggagctgatgctgcaaaccccaagtggggaccttagcaggggagaatcccgcagtcaccccttcccgcagcccatcgagtcctgggggaggcagcctagcccggcccagctctccactggccattgaggaggggctgctcgagaacaaggctgccctagtccccagcagtacaggacataggaaggaggcctttggtctcagaaagacccagttctaccttgcagcatggctctgtgctttaggggcctgtgtgaccttggaacaagcacttgagtctcagtttcttcatctggaaaatgggaatataaatagtgcctaccttacagaggatcaaataaggccgggcgcggtggctcatgcc

SEQ ID NO: 84751 - DNA, 1549 bp, Homo sapiens
ccttcctagggtctgacctggcttcccttcccaggtgggtgcaggtggcatgtccacgtctctccattgactggggcacagccttccccaagccgctgctgacaccctatgaggtaacaccaagctctgggagagagtgggctttggacgtggttctcaaaggtgaggtctggagtggagtggggtgggtgggcagcacttcgttatgttcgtagattccggagtctgtctcgatttctccagcggagtcacttcctagctgtgtagccttaggcaaggccctgaaccacacagttcccttctgtggcaggggacagtgtgcccttcacaggccgtcgtgaggactgaattcagtaatccaggggcagaaaaacactggcagatgttattgtccctccctcccctcccctaggcggccgtggctctgagggacatttcctggcagcagccctacccgatggacttctacgctggcagctccttggggccctggacggtgaaccacggccaggaccgccgtccccacgccccgggccggcccgcgcgggggaaggtaggcgggggcttccaggagggaggagagaccgcgcctgggcactggccgccgccctgcgaccgcgacgggaaacgcacaggagcggagcggagggaaacgcagggtcgcaggagcgagaccctaaccaaagtctgcgacctcaggtgcaggaggggtccgcgcgtcccccttcggccgtggcttgcgaggactgcagctgcagggacgagaaggtggcgccgctggctccttgacgcgctcccgggcctcaggtatcagcccccgctctgggtgcgccccgccttttgccgttgtcatgggaacgccttggcgctccgaggcccgccctcggggcggtgctgacgttcggttccgccccgtgcattgtgcttccgctcggggaaagaccgcttccggtgcttccgtcgctccttgccgggcataatggccgcgcagcgacccctgcgggtcctgtgcctggcgggcttccggcagagcgagcggggcttccgtgagaagaccggggcgctgaggaaggcgctgcggggtcgcgccgagctcgtgtgcctcagcggcccgcacccggtccccgaccccccgggccccgagggcgccagatcagacttcggtgagacaagccccgctccggaaacgcactcagtttcctccatcttgtttcgtccccctcgacacccttcagcatcccccaccctgcgtccacccgcattcctcccacccagtccacacccttcatttctcgcgacccataccctctttgctcaaactgcagcctgtcctcccaggcttccgccttcaccgtcttcctccgctgtctcctgttcaggccaatccactcatttcccccctctcatttcccccagacttttgcctcgattccctttttctctctgtcatctcgaaccctcctgccctttctcatttctttccttcctggagcctcccatgccctaatcccatcctttttcctcatatcgctgtagggtcctgccctcc

SEQ ID NO: 84752 - DNA, 1068 bp, Homo sapiens
attataagggccctgccctgtactgaagaaaaggggagcacaaggccttaatggacattgacttgtgaaaacgcaaacatgaatatggttggagagccctggattaggagggtgacatggggaaggcagaggctggcaccatggtgactgccacataataaagtggtgatttggattttgagcatctttttcctggtacacacagaaaaacattttataatggaagtcggtttcttggccatctacatagttttctgggcagcgccaagcagggaggtgtctccagttgtgagtcctcggacaggctgctgcatgggtgcacatactcacgttattggtggaagttttaagtcccaaactgaagggaaggaggcctaggtggcacaatcagggaggaatatacatctgagaagttttgggaagacatcacctggcaaggctgcctgaaccacagtaatttagtcttcctctatccagatcactgagagttgtgtgctggtcttctctcaaaccctggatgtgttacctgcttctccctaagtgctctaacctcgctgaactatgagcctgaagggtgggtcgatgccagaccttaggtggaggccaaagacagtacagaataaacagcttcttcctaaattgaccccatcttgagggtttctgagattgatgccattctttagtgactacagccaaggcctaagcaatccagctggttttccccttggggcgtgtagttgttcttggatactttgaggattgctcactctttttttttttttttttgagacaggctcactctgtcacccaggctggagagcagtggccaagatcctggctcactgcaacctcagcctcctgggttcaagcagttctgtctcagcctcctgagtaggtggcgttacaggcatgcgccaccacgcctggctaatttctatatttttttgtagagatagggttttgccacgttgcccaggctggtctcaaaactctttagctcaaacaatccacctgcctcagcctcccaaagtgctaggattataggcctgagccactgcacctacctag

SEQ ID NO: 84753 - DNA, 1045 bp, Homo sapiens
tcccctctgcccaccacagccccttgcctcccttcacactctccttcctcctgtcgtcttctctcgccaccaccaaccccacaagcctctccctcccaaatcctccaaactcctccccaggctgaaagccagttctcagcctccctgcctggagctggcaagcctgagcttcctagaggggtacctcctgagagaaaggtaggcgggattgctgaaggccttgttgggaagtgtggttccaggactgctgggccccaccccagcctcagaactttctttctcagaacggacacattttggctttggtcctactagtcctcccacccccgacttcaccccaaacagcctacaggaacccattgccatccgggggaccgcccctatcagaatgacatcagcaatggctggtgtaatcaaagcccatttgtcagtgtgaattcttagcagattaacttgtcagattcacagagaaaccgtcactaaatgtttatgtgtaaacgatgttgaattttaaaatcatgtggattatggcggatggggcctgacaagatgacagtctctggtttctaacaaagtgaagttaccagtgtcaaaacagaggatgtttattgtgaaaaatgtcaaagtatccacagaaacccctgcagacccctgccagcaatgtcgggccttggttagctgacctaaggcctgggacgctcctggtttgaggcccagggcaggaatagtggggctgctacagacgcagccagtcagctgggagccccacacagccctgcataccaccaccccagccacacttatctgcagaggggcctggcccaggcagctgagtagtctctgagtatcccctcacccgaggccaccttcctttcccctctgcccacagccccttgcctcccttcacactctccttcctcctgtcctcttctctcgccaccaccaaccccacaaacctctccctcccgaatcctccaaactcctccccaggctgaaagccagttctcagcctccctgcctggagctggcaagcctgagactgctc

SEQ ID NO: 84754 - DNA, 1032 bp, Homo sapiens
cctgagggaccctttcacgtgagtcctgtaaccaaggaatgcaatagagggaccagatttcttcctctaaatacagcagctccagaagattcctttaagttcctcccaagaggagggcagggcccaggagaagagacagaaagggagtagagccctgtgaaatctcgagacacttcttgcccccacaagctcccctccggccctagtttcattggaagactcctgtgggggaaggatggattctggtctgggaaggtgttggctgggaaagtgaatggacagaggcctaggatgaaagctgattgctgaggctgataccttgtggggctctatctcatcagtgatcaatgagctggacggcctggccaaggggcaggagacagaccaccgggctgggggctacgcccgtgtggtacaagagaaggcccgcaagtccatcgagttcctcgagcagcgattcgagagtcgggactcttgcctgcgagccctgaccagccgtggcaatgaactcgaatccatcgccttccgcagtgaggacatcactggccagctggtgagaccctgtggcaggaagggaaagcccacagccagcttccagaacaaggtctccaggaaggaagggctgaaggaggcccatcagcctgggcagctgagggccagccaccatggaggcccaggtgggggagttccttctcccctaagtcactcgtagcacagtcagatcaggccaggcagggccagcgcatgcatgggagggatcggggaggtggccctgcccagggcccccgaggcagaggatccctcctcctcctccacatggcgcccccttctgcccagtggtgcttctcacacacgtcttcctccagggtaacaacgatgatctcatcctgtcctgctgcctccactactgcaaagacaaggctaaggacttcatgcccgccagcaaaggtacagctttgcctccgccttgggatcttccatccccactgccctacctcatcctacccatcctcagcccctgagaagggctcc

SEQ ID NO: 84755 - DNA, 1029 bp, Homo sapiens
ctgaaaattctccttttgggagtctggagcaggggtgctgggagaggagtggagagtggcagcgaggggccccagaaagctctatgctgtgaaagcactccactcttccctctgctggttctagaccaaacttagaagatatgtcatatattctgttttgtatcaggaccttactcaaataaatgtaaggcacctgtcactggtccctggggttgtctgctgccccagagataacctaaggagagataacctcagaagatcttgatcctcagcctgccctgggccctcacttaccacctgacatgcccttgtgccctccgcaccccgtcattcattctgacccccttgcctggtagctttgacacagttcccctgtgcccctcagccggcaagcaacatctcgtctccatcttccctttcagaaaatgctgtttttcttctctccctctcaccctgtaggttattgcagctgactgcaaaagggtcacagtgctgaagtattttctggaagccctttgtggacaagaagagcctctgctggcattcaagggtggaaagtatgtgtcagtggcacccgtcccagacaccatgggaaaggaaatgggaagccaagagggaacacgactggaagatgaggtactatgcgggaagagcccgctgtggcagagggaaggccccctccccattctgctcgtggcttcagcttttcctcctgcttatttatgagcacagagaacagcgtctgtgttaatgtgaccagccagcttctcgagagtgtgctctgatggtgccccttcctgccagtccaccccggtgcctccatcctactccactacgagttccagatgcttcttttaatgctgcattgaggagaagggaggaaaagaaagaaaggagttgaataatgtgcagctctcgaggcttaggaaagggagaggggggtggtcaggatcaagtttatagatgtgtggagcccaatgcagcacaggcctgaactccagcctccagcacacgtacaggaagagctga

SEQ ID NO: 84756 - DNA, 1029 bp, Homo sapiens
ctgcgattacaggcatgagccactgcacccggcctgtattatcttttaaacctcacaaacaacttgagcaaacaaaggctcagagaggttaagtaacttgtctaaggataaacagccaggaagtggcagttagtacttgaactcacgtctgtgtaactatgaagcccaggctcttgtccaacctcctgtattgccttgtcttgcctcttgccagaatggccctgttttttatactttatttacctcattacttcctgtgtgtgcttcacaactcccctgttcccctggttctcccttcagtgtgaacatcgtctccttcctagtagccaaatatacgtgtaccttttgggatcttcagtaaccctgtcttgggatagtctccccaccagcaccaggtcttgccatctgaccatttgccagttcccacctccccttctctaagagacttcagcacacacctggtggttacaggtggggacagcaggcatctgtgcaatgctggctgattgataatggccctcattgcctcctctaagaagaaaacacagctgttgggaccagacacatggaatggtgtggttgctgtgggtggaccaatgatgttagcatttcatcttgtgacccaatgacccttcagctagcacaggccaaccataggactacggagggttggatctggacaccgggattagaaatgactgagaaaggccgggcgcggtggatcacttgaggtcaggcgttcgagaccagcctggccaacatggcgaaaccccgtctctactgaaaatacataaattagccaggcatggtagtgcgcacctgtaatcccagctactcaggaggctgaggcaggagaatcgcttcaacccgggaggcggaggttgcagtgagctgagatcatgccagtgcaactccagcttgggtgactgagcaagactctgtctcaaaaaaaaaaaaagaaaaaggggccaggcgcagtggctcacgcctgtaatcccagcactttggttggccaaggcgggcggatca

SEQ ID NO: 84757 - DNA, 1035 bp, Homo sapiens
acaaaccgagactctgtctcaaaaaaaaaaaaaaaattcctgcctagagagaagatcccagaatttctttcactctttctttcctgtcagcagggacacggaggtttcctgtctgccttgtcatcagctttgaaacattttcctcctgcattcccccatatatgtagtggcctgtaagctttgcccccttcatgttcccagcatcctccttccctctctcataatcggctgggtctggttaattttgcccttgtgacaggacagcctttcccttgtcctcggagttattcctgtgggacataagacctctctggtcatggtctccctctctttcccttccttcttgccctttcctctctaactatagcctttgtaaatagactcctctgaggtcaccgaggaatggtagtatgtgcctttgctgctataggactctcttttcccccagtaagcagagttcccttgagagacccccctcccttcctttattaaaaggcacgttggtggcttatctgcttgaactctggcataacagggcatggaacaatggcatgtgcagagtgctttggccaaagggaaattaactttgagccagagacagcagtttgaagaaacttcccttagtaagaaaagagacaagaagaaaagtgatggggtggaaagggaaaattctatggcagagaaggtctccctgagaactcaatcagaaatcagtatctcctccttaagcctggtttttccactgagaagtaaactattattctctcttctcctccttcataccttctccaagatcaagcgttgccagataagtaacacaccctgttgcttgcaaagtaaaagttacttggattgacagatttgtggagcctttgggtgccaagtatcaggagggagctttgatttccattttcctgtcttcatgatggactttactctttacattcagtagaaaagttcaaggctgtggtgcagacaactttcagaggttacccacatataggtcttaaaacttaacatctggcagttactagt

SEQ ID NO: 84758 - DNA, 1145 bp, Homo sapiens
tctcaaactcctaaccctcaggtgatccacccaccttggcctcccaaagttctggaattaaagggatgagccaccacacctggctcagaatttttttattattattattatctgagacagagtctcgctttgtggcccaggctggagtgcagtgacacaatctcggctcactacaacctctgcctcccagattcaagcaattcttctgcctcagcctcctgggtagctgggactgcaggtgtgcacctgcaggtttgcaggcgtgggcctggttaatttttgtatttttagtagagacagggtttcactatgttggccaggctggtctcgaacacctgacctcaagttacccgcccgcctcggcctttcaaaggcctgggattacaggcgtgagtcactgcgcctggcaagatttttaaaaatgaaagtttcaatatgtgttttcatagtggacgctggggattggagagtggctaagaagactccaaagaggtccagttacaactcagtcacacatcagattcccatgtctccttctggatcatcctgtagtttctatagctgttttctgtaattcatgcaaattctctgtaatccttcatttccgttttctacccacttagctgttgccattattttgaggcattggatgtaaaaaacaaaacaaaacaaaaaaaaacctgttagatttatcttgtaggctaaggctcagaaattgggcaaggttcaggtagcttttcagaaggcgaggcaggtgtgcttagttacactattccaagattctcccagaaatagaactctaaagtgaggacttgggtgcccttgaaggagaacaacaaaataccattttggaaataaaattctgctgtcctgggtgttccagcccctcccatgctggcctcctttcggcaccattcctttctgcagtcccaccccgcttggccctggcacgcagtcccatgaacatgccacctgccttctctctctctctggccccatccattggctgttcagtttattttttccacatcctcaccctcttccagctccaagttaaataaccctcacagatggcttgttccatcagagctgtttaagaacacagagcagtgaactagtgcccagaggagctgccccagcccaag

SEQ ID NO: 84759 - DNA, 1040 bp, Homo sapiens
ttctgtgaggctctacgagctcctctgataaggaaactggcactgaaggtgggcgtagcggccttcagatgtaccaggcagctcttgccgtaacacctatagcctacacatcgaaatggaattggagccgcttaattttcacagtaaatacatatatagcactctttgtttctggccttcaaatttgttgatgaccctcctgatattgattcctctggggtgggagctctttctgggcagcgtgcagactggagcacatgtatatactttgcacattattttgcccaactttttgtcatttgagaccctgcttggctggggagactgttgttgctgacctctcccaggcctgttggacttgatgatgactgatggacttgagcacctcatcagggtctttcttccgtctgctttcctttgctgcttccgccagatctttccatcagtccccccaacacagagtgctttattgttgatgatccttagtatttggcatgaaatgtgcttcacaaatgatgttgattatctttaaaataccgtgtgtgtgcgtgtgcgtgtgtcatagtatatcaccacttacataaatgtatctataaaaggcatagagagagctcgtagttaatcacatatgtcagtaaatgcagaactatctctgaagaacataccagaaactcgcaacagggcctaaaaatcaaaggtgggaaggttttgtttttaaaattcggcctttgtattgctttttttcaccatgtgccatgtttctgaactccacgttactaagcagctttggcttcagtttggcctggtacttgattctgagatgccaccatatctcattgaactcctttggtactttgtcagcagcaagagtgactttagcttaagtaacagaattaagtgacagcttttagttctgtgttgtcttttttttttttttttttttttttgagatggaatctcactctgtcgcccatactggaatgcagtagtgcaatctctgctcactgcaacctctgcctccgggttcaagcaattctcat

SEQ ID NO: 84760 - DNA, 1521 bp, Homo sapiens
gcaagactctgtctcttaaaaaagaaaataaaaggctgggaacagtggctcacacctgtaatcccagcactttgggaagctgaggccagtagatcacttgagctcaggaggtcaagaccagcctggttaacatggtgaaaccccatctctaccaaaaatacaaaaattagtcaggcatggtgacgcatgtctgtggtcccagctactcaggaggctgaggcagggggattgcttgagcctgggaggcagaggttgcagtgagctgtgattgcgccactgcactctagcctgggtggcggagtgagagtctgtctcaaaaaaaaaaaaaaaaaaaagtttggagctcattacacctggcttttattgtttgctgttttgctttttaatatagctaaagtatgcagatttatttagctttaagttttgttctcaattccctagtggaaaaaaaaaagcaccaaaaaaattcaatttttacatttcaattcaaatgcaagaacttggaacagaccattgccttttatttatttatttatttatttatttatttatttatttatttattttttattttattttttttgagacagagtcttgctcagtcacccaggctggagtgcagtggcacgatctcggctcactgcaacctccgcctcccgggttcatgccattctcctgcctcagcctcccgagtagctgggactccagacgcccgccacgacgcctggctaattttttttttgtatttttagtagagacggggtttcaccatgttagccatgatggtctcgatctcctgacctcgtgatccacccgcctcagcctcccaaagtgctgggattacaggcgtgagccaccgcgcccggccgacttttttttttttaagagggaagcggtaataggaaatttaatcaggaagatttctaagcttcaattgtaaagatacctccttttcccaagagttaggcctaatgaagactatacctaccagtacggagggggaggggataaatcacaactaaagaccttggcacttctgtaagaaatttaaataacaggcagacatatagagatttgtaaatatgtacttgctgccagataaaccacagggaagatactgtatttgtggtccagggaagtttaaatatttgtggtcaaacttaaaattcaacgtaaaactctcatctgtgatggaaactttccagaaactgcatggagcgggtgtgcaagctgcataaactctcaaaggcctctcctctcaccaggctgagctggaaaagcctgttctccttccttcaaactgtgtagctaacaagcccttcgatcagagaaggaactccttgatgctccagccaccacccaagaaacccgctctaaggacctttcgggccaggcacagtagctcatgcctgtaatcccagcactttaagaggccaaggccggaggatcccttgaacctaggagttcaaggccagtctgggcaatatagggagaccccgtttctataaaaaattagccagg

SEQ ID NO: 84761 - DNA, 1687 bp, Homo sapiens
taaatggagggtggggtgagcagatagcactctcttcctgctctgttttcaggaagtgattataaaagcagctctaagtttgaatgaaatcaaaagaatgaattgtcaccttcccccaacaaaaaccagatgagcacaaacatatacacaaacacactcctcctctgcactccatccaagatccacaccctggctctgccgggcttcacttcggtgctatttcagagcaaagagcctttgttgtgccatctccattctcttccctgggagagagcttagtagtcttatgaatgagagctcgacttcccttttggcatactgtgggtttcacttccctgtcctctctccttccaagaagagtgtgggcagaagtgtataggtgggaggaataaccattgccaagatttaattcatcagttagggattggggtttcagaactggtaataaaattgtttgcagttaattgtcaatgaaaggagtttctgtgccgttaacacacttccattccttccttccagctgcctctttccgtcgtactgcctttttcctggtacctccatggggtttaagccatatggctcttaggaatatcgtttggagtctccagaagtggaagatttggctgtgcagcacacagcacccctgggtctactcctcccctcccctctcagcagctgtttgccactgaccgaggtggcgaccaagcctatgtgtgtggccagagtcagtgacaagcctcccacccaggcctggggaagcccttagccagcgcggttcctgaggcagccgccaacacgccagggtttcctcataccttcagggctgcggtggagcagccagcgttatgcggcagcattgtctagcgttgcttcacttgacttctctgtccccaccctctgtgtttaagggaatctggccatcatccagcagggaagaagctggcatttacagagagtggctttctgccacccctcatgtggtaggagccaggaccacctccatctctgcttcctacccatgtggcaaagaggaaggggcccctctgtgctcagtctcctgttgtggagtttcgagttgcctaagatgagaataaggctgtctgccaggttatctgcccagataaacatttattgtttacagggacatgtttcagctgctctggcacctcccactggtgagatcctctagtatcttgaggttttaagccagtatatggggccgacgtccagacacagaactactggagctggagaggctaagtggctcgcggcttctaacttagcttcgccattgccccccgccccgcttcccactgccagagctagatttacatctcttgttcttagttctgcctcctggatattgaagctgcatctacattttaaacctttctagcctttagaatttggggatttatatgcgatccagtgttaggacacagcaagctgaagacttcttttacatggcaaaaccagccctctgacactgtgttttccttaatagctaatgagacagctgtttagtgacggcaacagggattgatgcagattttctttttttaatctgactaggtccactgcttccagatattgtctttttatttttttagtgatgtgattgattttccaacattttattatacagcaaagttgaacattctccagtgagctcacttatacccagtac

SEQ ID NO: 84762 - DNA, 1093 bp, Homo sapiens
ttggtgtctcccagaagagaaaaatctggttccttggcatttattttacctaccccatttgggggctgtttcttctgccttttcttgcacaacttccccattgttagatgcctctgtagtcactcccaataccctggaaacatctcccttttttagggtttaacagacttcacctgtatagttactgtcttttaatatgactttcgtcctcttatgcttgaaacctagaagaggagctggcttgttctgctggccttgagccagatgtcataacttcaggcagtgccacgctacacatctccagcagtttggaatggagaacagagttagagataagatcagcagctttaggtgatggctttgtttcaaataaaccatgcatgacccaagcctccacttcaaatggggaatgaaattgctttatcctttgacagcttgctctatgaaatacatttatcttcacttaattgctttagatcccaagaggctacatacagtaatttctaggagataattatatcaaattttaaaaatatgtgactgtggacatgaatatgtaactgcagtggacagggagggagagaggtgggggaaaccaaaagtcctgctgaccttgctggtaagtttccattcttattcttagagtttccttgggtcatagaccacttactctctgaatctgctgattcatatgtggggtcctttgtaccccatgctgctagggttaaagcatctggtctactactcctgtagctggatagtgttttgctcagtctcctcctgaaactgggaggggtcaggctggtggctgacttccggttatatgtcttcatttagtctggctgggcacagtctgtctacactgtaggccacagccactgggggttctggttagtggcagctgagaaccagcaaacttgttgattttaaaacatgactatttagatgtcagggataaacttcctgtagatgggggacaggcttctttatcttggagtgtttgagtatccagttctcatttccctaacctttacatttgaaaaaatctaaagctttcactgtcattttcactaatcccagccactgcctacct

SEQ ID NO: 84763 - DNA, 1004 bp, Homo sapiens
tcataaagaaaccctctacctatcgcgtcatctccattttcccttcttcctagcccctgtcaaccactagtttactttcagtctctctagatttgcctcttctgcttctttcatatgaatgggatcatataattatggccttttgtatctggtgtcttctggtttgcttaatgttttaaggttcatccatgtcacagctcatatcagtacttcattcctttttatgcctgaatcatattccattatatggtaattccacatttgtttatccattcatcagtttcataaacatttaggttgtttgcattttttggctattatgaataatgttgatatgaacatttgtgtatgagtttttatgtggacatatgttttcatttctcttagatatatatacctagaagtagtattgtttggtcatatggtaaactgtgtttaactcttggaggaacttccacactagacagttttccaaagcagctgcaacattttacattctcactagcagcaaatgtatgagggttcaatttccccacatcttcactaacacttattattttttttattatagccatcctagtgtgtgtgaagtggtatctcagttgtgattttcacttgcatttctcaataactaatgatgttgaacagcttttcatgtgttcagtggctgttggtatttctttggaatactgttcaaatatttgcctacttttttttttttttttttttttttgagacagtgttttgctcttgttgcccaggctggagtgcaatggcgcaatcttggctcaccgcaacctccgcctcccaggttcaaccaattctcccgcctcagcctcccgagtagctggggttacaggcatgcgccaccacgcctggctaatttttttttttatttttagtagagacggggtttctccatgttggtcaggctggtctcgaactcctggcctcaggtgatccgcccacctcagcctcccaaagtgctgggattacaggcgtga

SEQ ID NO: 84764 - DNA, 1663 bp, Homo sapiens
agatcagctctatgaaagcactttgtaaagattttataaaaatacaatttaggccatgcgtggtggctcacacgtgtaatcccagctttttgggaggctgaggtgagtggctcacttcaggccaggaattgaagactagcctggtcaacatggtgaaacccaatttctactaaaaatacaaaacttagccgggcgtggcagcatgcgcctgtagtcctagctacctgggaggctgaagtgggcagatcacttgagcttaagagttcgagaatcacttgaacatgggaggtggaggttgcagtgagctgagatcacgccaccgcactgtagcctgagtggcagagtcttagtctcaaaaaaagaaaagacattatcatcttgagccatcaaattcactgttactgaaattctttgctaaacctgaaggcaaaacaaatttagtctttttgtcttagaccaaaggctgtatgtttctttggtaggtaaggggaacagagcacaggtgacctacttactcatatctgttcatctcccagtatggggttgcctcctctgaactagggcaagggtcaagtctctgacttggtttttccctgaaaatggtcacaaagtctgctcagcattgtttagggatgtggatgcattggccccatcacctgcccatctaaagtaagcatgttatgtaatctaacaaatatttaccacttagcatgtgccagacaccagagttcatgcttccacatgcttcactaggttttacttaagcatatttttgcattactattgttttttgagaattataacctcccacatatattattttagttcatttaatcatatcttctaggccctttttctcctgttgtttctttgtttcaacaaagagaaatatttaggaaaggagtcccttaagattttacttattttaaatatttttagttattcagatgctaatctgaataactgaaagacatggaatatatattgagatttagatagagcatcattcatctactcaggaacagttgcagacaggtagaatctacattgacccaaacttcagggtggattgtgctttccagaaactattccagttaccaacagtcacctaattgagttcagaatggatgaataagaatggattttcctctctgtggcttcttgttttttgttttttcttttttgtttttatttctggaggtacatcagcatcctctctgtggcttctgatgcaaaggtaagctatatgctttttttttttttttttttttttggggagatggagccttgctctgtcaccaaggctggagtgcagtggcgcgatctcggccatttcggcctcccaaagttttgggattacaggtgtgagccactgcgcccaccctacatgaggtttttagaactcaaggagcttaatagggtcttccatttttagttgtatggtaggattagatacactgaacaaccttctcaattaacacagctaaagtgctccctgtaggctgggcacagtggctcacgcctgtaatcccagcactttgggaggctgaggcaggtggattgcctgagctcaggagttgaagaccagcctgggggaaaccctgtctttactaagaggacaaaaaaaaaaaaaaaattagctgggtgtggtggcacacgcctg

SEQ ID NO: 84765 - DNA, 1043 bp, Homo sapiens
aggaagagagattagtcttattctttaagtaatgttcattctatttttttaattgtgatgaaatatacataagataaaatttaccattttaaccctttttttttttttttttttttttttgagggggaatctcgctctgtcacccagggtagagtgtagtggtgtgatctcggctcactgcagcctctgcctcctgggttcaagtgattctcctgcttcagcctcccgagtagctgggattacaggcatgtgccaccacgcccggctaatttttgtattttttgtagagacagggtttcgccatgttggccaggctggtctcgaactcctgacctcaagtgatccactctccccggcctcccaaagtgctgggattataggcgtgacccactttgcccagccattttaaccagttttttaaatgtacggttctacagcattaagtacattcaaactgttgtgtagccatcaccacaaccatctctagagctttttcatcttcaccaactcaaacactgtacccatgaaataataagtctccattcctccctccccacagcccctgacaaccatcattctatttactttctctctgaattttttttttttttgagacagagtcttactctgcctcccaggttggagagcagtggtgccatctcagctcactgcaacctcagttttctgggttcaggcaattctcctgcctcagccttctaagtagttgggattacaggtgcctgccaccacacctggctaatttttgtatttttagtagagacggagtcttggcatgttgtccaggttggtcttgagctcctggcctcaagtgatccgcccgccttggcctctcaaagtgttgggattacaagtatgagccatggtgcccagcttttctctataaatttgactactctgtgaacctcatataagtggaatcataaaatatttgtccttttgtgattggcttatttcactcagcataatgatttcacgttttatccgtgccgtagcacgtggcaaaagttcatttctttttaatg

SEQ ID NO: 84766 - DNA, 1050 bp, Homo sapiens
tgccactgactagacattagtagagtttctttttctttgtgcatgtgacatggatcactaacactgcatgtgatggtcagaggaggcctgccttagtgctggagatctgaccatttctccaggacagtggagcctggtgaaggctctctgacttctgatcccagttggagcaatgtgttcagagaagaatttctgagccttcgtgaatctcagttatttgcatgtctttttgtaagcaaacagcaacttgtaggcaggcttaaaactttctttttctgctcatgaaagtacagattttgctatagacaaatcaattgaatataaaactgtaatgtggaataatatttcaggctttaaaaatggagggatgggttaaaaagttctgcaataaatctgcaaatgtggaatctaagggaaatgatcccatctggaaaaccctgctagtggtgctatggctggtttgtggagcagtgcagactgtggagtgaaaaaagaccctgtagtcttgaaagatgacaagctccttaattgatgtccatttcagctggtgctgtgccagcttatgttggcctcggtccagcgttcctgtaatttgggagccaggtgtgaagcatttttgttccatcttgttccccagcatctacagaagcctcacccatcttacttgaggcggcagcacgccataggaaacagatgtacaggtagaggtggaaggaagtgtcacagctgggttacggattttttttttttttaatccttcacactcaagtgagatctgggtttgagagttgggggaaagggtatttcacagcctcggtgtaagatgtcactgtcaagtatcctaattagaccaatactcatttgtgatttttaaaaacatatcttattaccttagagtcatactttgtataggcagagatcttttgtgatttgcctttgcctgacttctgggaacagcaatataaagtgtaataggaagaacatctcaagatggccatcagagttgaacctggtcacttccatagcatcgagggccaggagacataacca

SEQ ID NO: 84767 - DNA, 1055 bp, Homo sapiens
tggtctcgaactcctgacctcaaatgatctgcccacctcagcttcccgaagtgctgggattacaggcgtgaaccacggcacccggcctgagctctatctaatctgagtgcccctgaaattgacatttgttcattattttaaaaaaaaaaaaaaaaaggtaaagaaaacagtaaaagagcagctcagctcagttttctgggtccccaagaaggtaccctaccaatgtggttttcacattttcaggtttttggctggtgaataagattgagcagaaatgcttcttcccctgataacaatacattcaaatgcaggatcaggagcgtgtggattaaaaccagacggtggatgattaatacttttgcttatagaggtagacatggcagcttcctccatttaaatgaaaagaccttttctctgcatttgtatgtgtgcatatgcttacatgcttgtgccctttatgtacaagctgcgtttctgtaccatttccttcctctcttgaagcacccaaaaagtgctagaaggactaagttgtgaagcagaggcgtggagatcagacactatggtaggagtgggatgtgttctcttcttcaggctcactgctttcatagctttctgggtactgctgtaacacacatctttttccatggaacctacttgctccttatggtcatgtaacctcattataagaggcatactttttcatttaatctgctatatctttggaggtggctatcctcatcattttattgttaatgacatgaagagaaactttattttcacatggatactttatgttttttcccttacccactgaaaacatgacagatttcttggttcattcgccgtggctcacgcctataatcccagcactttggaaagctgaggcgggcagatcacctgaggtcaggagcttgagaccagcctgaccaacatggtgaaaccctgtctctactaaaaatacaaaaagtagccgggcatggtggcgcacacctgtaatcccagtaatcccagctgctaggggtgctaaggcaggagaatcacttgaaccagcaagg

SEQ ID NO: 84768 - DNA, 1037 bp, Homo sapiens
attactcccttaaattcttacttgtggtttcttttcttttaaggaattactcaaacatttatgtgtcccactcctgtgactttggttagaaatgcacctgggccaggttctactggtggtgggaggagagcttgctgatggtttagggatttctaattcagcttcttgtcgccattgcaatacccagctggttctaagcatttgaaatacaggttacaaatcagccagcattccctgattgcttagtactagaattttgcagactttgtaatgagtgttctgaggtttttgcctgttttggttttattggtgaccaacacctcctgatgaagatcatttgcagactttactacaaagttaagcctaactttaagctgaaagcatgagagccaaacagtaagatccaaagctagacaggattggttttggcaaaaggaaagtccatgctttctgccttcttccctttggcctgctcagtcatactcatgttgggtggtacttagtaagcatgcttctaattgtggttcccttccacttacctttgtgataggggtaccaaaatctgtttaccctcatctttgctctcttccagaggaacaggagaggtagttgggtcagtgtgccagaaaagcagaagttgagtatgtggagttcatagctgcatgtatgagtgtttgtggggcagggaacttttaatggaaaacatttgtgttgcatcgaaaacagagcgaggcctggttagagtctgtctgctttgtctgtcagtctgttccctaccagcactagtcactgttctcctgggagtctcaggcatattgtggtttcttctgctcttgctagcccctaatcttgccagagtttttgtgtcatgggtggccccgtgtgcagtctggagtaagactgcaaggttggtgactaatggctttgaagaaggtacttcagcccacatacggactttgggaacctttttaggttaacccttaggaggagggagggtctctagcacaaacagtggaagaaacatgctgagatacata

SEQ ID NO: 84769 - DNA, 1053 bp, Homo sapiens
gaggcatgagaattgcttgagcctgggaggtggagttgcagtgagctgaaattgtgccactgtactccagcctgggtgacagagtgagactctgtctcaaaaaataaataaataaaatttttttaaaaaaaacctgcaaaagggccaggcatggtggctcacaccagtaatcccaatattctggaaggccaaagtgggaggagcacttgagaccaggatctctaaaccagcctgggtgacatagtgaggccttgtccctacaaacaagtttaaaaacagccaggtgtggtggcaagcgcctgtagtcccagctactcaggagcctgaggcaggagaactttttaagtgcaggggtttggtgctcattatgattgcgccactgcactgcagcctgggtctcagagcaagaccccgtctgaaaaaaaagaaagaaaaaggaaatttgaaaaatataaacatttcctccagcttctagtgttcattactaggaaatgtaaaacatatctccagtgctcatcagtggcagcaacgtgagcagctttattgctggtcgagattagtctcatgtttggtcctgccttgatgcttattctgcagatacttacgaaacacgtattgccaacacagcctgggagatccagacacataaggcaggtatcttcctagttcgagagacagtttgtgccatatataaagatgtgagtggcaccataagtgaatttgaagagttcttgagttttgttgagctggtaataccccggtgaaggcgtgcttcaagagcactgatttggcattaacgtaatcattgtatctttgaagcagaaaagttttcaccttatatgcctttgagtgcaaatactctctttgttctattcttttcttcagtaatttctgctgtcctgatacattagatctccattctttgtcctatatgtcactttttctgtcatcactttaatctgtttttgcttttcttctgcattctaggaaggtttctcaagtttgtcatcttgatatatttttatagcattgattctactctttactacttct

SEQ ID NO: 84770 - DNA, 1875 bp, Homo sapiens
actactgaactcaagtgatttacctgcctcagtctcccaaagtgctgggattataggtctgcgctaacatgcccagctgtatatactgtttgtaatctgcttttttcctaacatttttaatatattcttatatggaatcatttttatagttacccagaattcttttatattccaagatttctttaaccaatctttgctttattgaaccaagagaatgttcccaatttttttacagttatgaatagtgtatcaatttcttgtagcagaatttgagcatatattccctttggttaaattgctgtaagtagattaaggttctagacattgatatatcaaaaactcatactctttggatgcacttaatggctactacatcttgggaatcagagaacccttctttcccaagaggaatacttactttttgcctttccaacaaaaacgtagagtgaaattctgctcttctagtctcagaatgggaaaataatggggatttgtagtatgtgaggctgaggacagctaacaagttgttttatacatgtggaagatgttgagttagaagagagactggatgacatggcttgggccagaggatccccatacttttctttggtgatcacaaggtggtcttgattccagaggatgctttggggagttcgctattgaagctgtcttttagtgtgggacaggtgctgagtagaagagtcctaacgagcttcagactcttcctacgccccatcttcatcagctctctcagctctagtgtcagataccacgtatgtgttttggctcgaggagaacacagagccagcagaccagccctcagcctatgtagtgatccacaggctacctagggggcagtggcggctcagtgagactaaggtaggtctccacttcaacgactgtgaaataggtatgtcaaacctaacatgtccaaatccaaactcctgaatcctgccccacccgctgcccgccaacctggtcttcctttacccttccccatcttggtaaatggcagccttgatttttgggctgcttgtgtcaaaatgcttggggttattcttggcacttctttgtcacacttccatatctaatccatcagcaggtaatgtcttctttaccttcaaaacacacacagatacaattctgtcttcccactgcaccctggttcagttctctgaaatgccttctgactggttgctctggttccttcccccttctactcttcagtctatttttaaaatatcagtgagatcatgtcatttcttagttcaaaaccttctgatggttgctcctctcacttagaggccaaagttttcacagtggcctacgatgccctccattatgtgaccccaccttcatcccactcccaagctctctgacctcaggtcctcctactgtccttcaacccagtgtgctctagtcacattgacatccttgctgttcctcaaacaaaccaagcgctcatgcctcagggtctttgcagttgctcttttcttaaccggaaacactctgtactcggctgtgtgcctctcgcactcccttctatcaccttggtaaagagagcttccctggccacatcatataatcatataaagtggtactctgctttattattctccatccacggcaggggaaaataacatctcctgagtatctatcatgtatcagtccctgagctaggtacttctgtacagtatttcgttaagttctctaaataagcctgccatgtaagtattattacctccttttttttttttttaagagatgagtctcactttgtcacccaggctggagtaagtggcactatcataactcactgccacctcaaattcctgcgcacaagcaatcctcccgcctctgcgggacctctttctc

SEQ ID NO: 84771 - DNA, 1106 bp, Homo sapiens
agcattgtaggaggaaaacatgcatgactcttgctgtattgtgactagaccctccatggctgtggctggaggaggagaggctggtgctcagttgctgtctgtgtggcatgtacttggctggacagcagtggggaattctgggagcagccacaagcactgggtgtctagagtgtttgagtaagcgtctcaggcacactgtctggaaagatgacaggaccctgcattaggcaactgagtctccaaattctttttcctctctggtgaggattaaaaactccccctaatcaatttcaactttgcataaatccacatacacatacctcagattgctgccttgggcacagttttgtttcctagcatttttggggtatgatttcctggcagatgccagcctagacaacatttgctgcaagtacttccctgctcacaaatactgagaatacttttttttactggtccctctttagagctgctcttttcttaccttatttctcacagtgttgctgtggatgtatggtcgacgctggctgatttctgtaacatactgactgcagtgaatcagtctgaggtgccactgtacaaggacccggatgatgacctcacccttcttatcctggaagaggatcggcttctctcgggctttgtccccttgctggctgcccctcaggacccctgctacgtggagaaaacctcggataaggtcagccccaggccaaacatccctccccattcgcccctcctcttaattctccagacttttttattcttgggaagttttctgtgcaaatggaacatgattaagtcattgagaagggtgttaagggaaaatatcgaccttttagccgctgacatccagctctgtgtcctgaaaaaaaaaagccctctcgacttcctttggtgtgtgtgtgtgcttgctggcatgttgtatatacgatcatttcctcacttgtttaaatagtgcagcttgtgttggcagtgctctcactcagctccaaatggtttgcatcatgcttaaagcaccctcctttctcccccttcctccccgcccccctccgccacaaagctctgcactaggaaaacagccagggctttttcccttctctgag

SEQ ID NO: 84772 - DNA, 1046 bp, Homo sapiens
gtaacctctcctgtgagaaaagcaaaattttaggaacacagaaacccatggcccctctgagagcagggcttctcagttccctggacgtcagctgcctttctacagctatttgcagaactcacctcagcctgaagggttaatctgattccggagtcaatatcccccaaacaaccagccaggagtgtgtgttggtttgtttctgtgaaatgtgtttccccagtcacctgggctggcctgggctgcattgtatcggccagcagctgcactgcactcaaactgacagatacattaaaccttggaattctgaggcaataaaaagtaaattaactcttatttttttcctttcctggtggactaagtgaatgcatgtctgtagggaagcaagtgagccttggttctgagtgcatacttgtaactagtcactgctggtttgtcccaaactcggatctggctttccgactccagccagggctctgccgtcctggtgtgtggtgtgttctgtggggttgggccagtgggtcaccttgcaactgctgatccctgctctctaatcacatcacagctgctgagagactccctggccatcattctgggagccataagcaggctcattggacacagttgcgtattctctggctgctttgtgtctgcttggtgaacagtccaccctaactttagcgggatattgtggactctgggaatttccctaaaatatgcattgaaccagaacaaaccagaaggacctgcatgagtccacagcactctagagggtccatttagaatcaaaagttgtttgagattatttgggaaaccttctgggaagttatttcccaagcatttccaaaagattggcagctgtttacagatcctcatcgccacccgaatttgacttttggctccttggccctggccaaccttgaatccatagggcctaagggctgctgtcgggtgaaggctagaaggtgctcctggttgggatgaggaattaaagcaggaaaaagctaagcttttctccttctacagacaggaaatcctatgtgcaccca

SEQ ID NO: 84773 - DNA, 1692 bp, Homo sapiens
ggggcgttagcactgcagcctggcaccagggggttcctcttcctccaagtgctgagtgtggggcacacgtgatctctcccacggcaggagcccctgtcccctccccacgcctcccgtaggactccttgtgagaggaaggggtgttggcctaaggctccagtctgaccccagcagggtacagcagctgaccccagggagagtactttccagctctgagctgaggttatttgggtccagtgtgtgctaagctaagaagacgtgttggagtggttacagctaaaagtttggagaggcaggaaccgtgagaatccgcaccagggaggccgccgagggctccactcatgccgtggagatgtcaggatcccctaggggctgctctttcccaaacatacagtgctgatgggtttagcacaccatagtgatatgacagaggctatacatatgagggtggctttggagaactgaaatcaaataaggcgccgaccccgaacatattgggggcagtggatggttgaggtgctctgatacttgagaaatcctggaacgaggttactgtgacctattgctggccatagggttccagctgccctgcttagaacatggagaggtttatattcttgcagtagggcaggatgactaagcttcagaatttgatttgcccttttgggcaaaattgatttagggtgagtactctcccaaagtcccaagtcgacttgttggtataaatgagaaagatagaagggattaccttcatctaagtctggtctctttaggggtcacccagcaaacatctcttattcttagaggatggtgtcttgctgctcatatcttaactcctggaatggtggcctttgatacctttgtctcttctttgtatcatgtggcatctggatgacacattgttgctagaaatctccaggagccgcatagaattctccccatctccagcccagcccagggcctcttgagctacctagcactgaggtaccagaatcaaatccttcgcccaatgcaaacagagttggcatgacatcttggctttccaagaggcatgctaagccatttcaagcccgggtattattcttttaactctgccacacttattggattcaagtccatttctgctattagctgctgaattcctgcagttttctccagtggagtgagaagctctccagggcaacagtggtcttatgttagcctctgacccctgcgtggacagttgtaggctaggatataatggcccacagggaaaccgtttgaaaaggcagatattgcatgtcttaggcgtggttctcttgttacagccatttgtctttgtgtctgtaccacatgggtgtcctctttttcagcttctttgtgcctagcttctgtgccatcttggctgtatttccagatctcctcactccaggaaccagaagacccaacttgtttcccatctgtactgcttctctgatcttccatagctctgaaacacaatgcacggcttcttctcactcaactctttccgggtttgttctgcagctgtggagtttgaatgttagtgtttaaacaagctggtattacacaggaaatggccacctccacaggccccagcaggcttgtaacatggggtcattgtacttgatgttaatcaccagtcagcttgttcccccagtaaaatatgaaggagtgtgtgagtgcctcatcctc

SEQ ID NO: 84774 - DNA, 1054 bp, Homo sapiens
cctggcatggcagcgtgtggggaggctgaatgcatgcacatctctcttccattcactcatgccctgtcttctcaccacgtccctcccctcgccccctgtcttctcaccacgtccctgccctcgtccccgtcttctcactacacctcgccctcgtttccgtcttctcaccatgcctctgccctcaccctcatcccctgtcttctcaccatgagcctgccctcgccccctgtctctgtgtgtcagtctggcatctctcagagcatttgtgtatagcagagagcatttgtgtattgggggcgggggcaggtgttggagtctgtgtgtctgtctgggtgtatttacgtagatcagtttatgtgtttgtatacctttttctttttcttttttttaattgtggagatagatgtaacatttgccatcttaactatttctaagttcggtgacataaattacatttacagagtgttgtggaaccccatatggttacttcttttatctttgtctatatctgtgtctgggttgtgtccgactctgtgcttgtctaggtccatttgtctgtgtgtctgtaagtctgtgtgtgtcttagtgtctgtatctgagcgcaaagttctgtgtgtctgcctctgggcgcttgtctaggggtctttccgtgtgcctggtccatgtctgtctgtgtttacttgtccatgtgcatccatccaactgtggccacgtgtgttgttatctgtatgtgttcatgtgggatgtccgtatctatgtctgtatttgtgtctatacctgtttgtgtctgtatatccttgagtatatatatctctgtatgggattcatgtgtccccaagtaggtttctttcagtgtatgtctgtgttttcatgtctctgtgtccacatctatagctgtcttttttttttttttttttttttttttgagatggagtcccgctctgtctcccaggctggagtgcagtggcataatcttggctgcaacctctgtctcctgagttcaagctattctcctacctcagcctcccgagtagctgggattacaggcacctgc

SEQ ID NO: 84775 - DNA, 1050 bp, Homo sapiens
atgaagcatttgcacagtgtcccacagtttgggtttctctggtgtttccttgtgattaaattcaggtcatgcagttttggcaagaactctggtgccatcttggtactgtgctgaaggaaggctggaagggtgggctagaggccagagtagaggcttcagccaagccacaggtgaagcagaagcagttgtgtccaggggcagacccagtacactggttctctctttgtcctacttttcagaatcctcttaggtgctggcgcttgtcctcgcttctgggcctatctttcctgtggacttggtctcccttccctaagagcttgctgccgtcccagcgccccaggcctcactcgggggctacagcagacataggcccagttctcaccctttgcctctgcagctcagctgtcctctcctgaggaccaggatgaccaagacgacatcaaggtgtcttcctttgtcccggacctgaaggagctgctccccagtgtcaaagtctggtcagattggatgctcggctacccggacacctggaatcctcctcccacatccctggatctgccctcgcagtgagttgacctgcccattgcttcagcaccactggcttgggcctgcccgtgttcctacagctcccctcttcatcctgctctgtttctttctgcccacagcctgcctgcctctctatttcttctttatttgaactttttttgaataccttccctatcctctgatgttttaggttattttttcctgttctccaggcctcttccccctcctctcacactctctttttcctctcactctccattttgttatttgttcttgctctcgttccctcatcctcactccatattgtgcatactcaccatctctgcagctgcctctggagtctggatttgtgtggatatgtgtgtgtgagactttgtatcttctcttattagtttttctgtgcatcttgcttttttttttttttttgaaacagggtatcactttgtcacccaggctggagtgcagtggcatgatctcagctcacccaggctggagtgcagtgac

SEQ ID NO: 84776 - DNA, 1032 bp, Homo sapiens
cccaccaaaaagatggctcctttcggtgacctggagccagaaggaagttagttagccaggctgaaaaagtgacgggaagagggtactgggattgggagccaggtttattttttagcgctaggggaaggaatttgtgaaaacaaaagccaacactgattaagtgcttattatgtgccaagcactgttctgcataaaattaactcattccatgaaagtaggttatttgtgtcatgtgtgttttcttaggaggagggacatggaggaagtaaggatgggactaaaggttggtgattcaagaagatcatttttagacgagatcgggcgcgttcagggtggtatggcagtagacagaagatcatttttaaatgtgtatttttccaatcttaactgatgactgtgctcctgttagttatacactagagagactgagttaattaaatctgagttcttgttacgatggctttacattatcagtaggcagctaaaggcagagaccatgcagctccagctcagactgcccttcctgaggtaaccgttcctgggaaagtgatgtagaattgacagaggtgacccttatcatcttatcaaacacatatccatatgccagacctcatggtaagtgcttcacatgcattttctacttggccttatgaccactctgagagagggaatatcactagccctagtcttcagtgaggaaaaggaagctcggtaacgtggccagtgatgtgcatcttgtccgcctggggcgctgagagtttcatttgcctgtccgcagactgcttctcggaggagtgccgctctgtgatccaggaacaagccgcagctctgggcttggccatgttttctctactggtccgccgctgcacctgcttacttaaggagtccgccaaaggtaagcaggaggagtccccagcctggtgggctttccagttgcctggccttgtccagacctcacagtgccatgctgttttctcggtgtcttctccctgtagtctccattcttcctcttacctacatgcccctcttcct

SEQ ID NO: 84777 - DNA, 1040 bp, Homo sapiens
atgctcttgccaggaaactggctgtgtgcaccaagggaactctgatagttccatcgctgccagatttttctgtgaccaaccaaactccatcccactggtactggtttccttcaaatctctccctgatggcaacactggaattgatcagaagcagtggttctgaaccaccatcccttggctcggcttagagggcccaggcaggtgggcctgcctcccatcccctgctcttccctctccgcccctcctgcctcactcccatttcctgcaggaggatgctttgccatcctggagctgtcaggcacagctttgctttggcagcaccgtcgcacacatactggtgggagaggggacgtgtttatcacttttcctggagattatctgtttaagcacttctctgacagttacaataacaagggcagtgtgttgtgtttcccagcagaaggacacttgctgttgaaagatgtatagcactaattagaaatacataacatccggccacatggcagccttctcccggccgctccatttcctgatttcatgcaactttgacgacagttggtttatgttttccatgaatatattctcagaaaaacgagaaagtctccctgttacataggagcaagaagaatatttctgtccgagccggtatttggccataggaataataggagctgtggtcacctgcccacatgtgggaaggagcagaaccaagttcagacctcaggtgactttcttattaagaaatatttccgtctgacttccttagccaaaacccttacccgaaacccttaagcaagtctctgcttttggaaagaaggggaaaggctgtttcacagtgttaatgagttcctcagctcctgtcatgctcctgctacctgacacaaagccagaggaacccaggcgaataccaaggcaaacaatgccttttcctcccccaccccacatcacttgttggcttggcccagcccaacactagggatatatatgggcattcatcagactagggccagtttcctagatctagccccaaagtgggtgga

SEQ ID NO: 84778 - DNA, 1010 bp, Homo sapiens
gagttttactctgttgcccaggctggagtgtagtggcatgatctcagctcactgcaacttttgcctcccaggctgaagcgatcttccttcctaagcctcctgattagctggggttataggcacgtgccactacgtctggctcatttttgtatttttaatagaggtgaggttttgccacgttgcctaggctggccaggaactcctgagcttaagtgattcgcctacctcgcatcccaaagtgttggaattataggcgtgagccaccatgcccagctggaagcattattattaaaaggtatgtcgattccacagcttctaggtcaggagactagctggcaccttagcacatttctagtcaccttcattcattgctgctttctcacttccttccttggcataactgctttatctagcttattattctcctgacctctactttaaaactagatgcaccacagtgggtggggttggatgaagtcattacgttcgcagtttggtttggacattgatcatggattctgaggccttgaggaaccattttgggatgagtttctggagcagagtcaaatgaatgtgcagatctggatattcacaaggtaaccaccaaaaaattgtgccttatcattggtcttatttttcagtactgacccctcaaagtttgtttgatgactctaatctttacattctggaagcttcctgaaaaagctaacttctcagaaggcctccaagaggtcctttttattctaggtacctttctgtctcacctatctcggaattgttttatttttggcgttgtttacaaacactgtcagacttttaaaaatccttagctgggcatggtggcacatgcctgtggtcccagttacttcagaggctgaggtgggaggattgcttgagcctgagaggtcaaggctgtggtgagctatgaccatgccactcaactccagcctgggcaacagagcaagaccccatctcttaaaaaaaatcgttcaggaagccacagaatgaaa

SEQ ID NO: 84779 - DNA, 1061 bp, Homo sapiens
agtgccgaacgtaaagccaactctgtggtttgtcttgtgccactgggccagcagcactgcagtcctgatcgattgatctgcagcaatataaaaccacgaacagcaactgccagacaaaactccatctcaccccatttccctgtccaacctgtctctctgcccagatcccctttctttttcctcgtatgtctgtctcactcttgcttatgtatttcacttttttgggtctatctttttccatctccctgtctctttccataacagttttaataatgttttagttagttccagccttttcgctgaatggatcccattggaaaatgcatttgaaaggaaacagttatacacttcccttcctttgaaactctgttggcaccttttccagtgcagtaaaccatacaacatgtattttcaaagtttccaaacagacacgctggcattaaatttatgaaaaaatattcagctatatggtaactgtgactttcagagatgctgatcagatttgaaattggtactgacttctggagctccagcaggttttcagatctctgtgggaaatataaccaaactggctcttggggagtctgtgatgcttggagccttggcttttgattggcaggttgggcaggaagagttggagcgagagatgtggatgtggggatccccagccacacccagagggaaacagggaaggtcagtgagtcagtgaagaatatggcatagccgtgttgggcacagtaacagaatgtatattccttctatgtgtctatgcatagaaggtaaactactttctgtttattccagccaagactgaaggtcaaagaacgccctttttttttttttttttaattagatggagtctcgctctgtctcccaggctggagtgccctggcacgatctcggctcactgcaagctccacatcccgggttcacgccattctcctgcctcagcctcccgagtagctgagactacaggcgcccaccaccacgcccggctaattttttgtgtttttagtagagacggggtttcaccgtgttagctaggatggtctcgatcccct

SEQ ID NO: 84780 - DNA, 1622 bp, Homo sapiens
gagaggagaaataacatttatcaaagtccaggagacacatggaatttaaccgggaggattttgcatggacaattaagaatgacagtcacattttgcccttactttttgtttaaggatttgactagtttgtttaatatacaccttttattataaatgagtgtgtcagcgttgactgccggtttctagtcagacttctcagcaccagccctgggtgaggggctgactggctcagcatgtgagtaacgtctccagctttgtcatcagtgttctgggaagagatacggggcacagccgagaagccgttgccgtccacctcgccttcactctgcagctcttgtgcaattgcctgctctgttgttgtttgtttttcttcttcgggagcctggattggggtgggggggattgagagtggggtaggtaggaagattgctgtttctttgctggtcagactctccaggctctctgcggagagtccaggcaggatctgtctgacttggattgcagttctctttttctgctgagctggggtgtgggcagcctaggcctgtgtaactcgtgacaggcctcccaaagtgccatgatggcatggatcctcgtggagctgttgagaacaaaaacagggttagtgaccttttgtttctttttgggcatgggttctgagacttatctctgggccttatgttcctgctagtgactctaggtcccccggtcctctccccatcatcccctggctgacaaatggttgaactctcagcttcctgtacttgatccccaaacagtgtagttcagtaaaagtagtaattagggcttttacaaatttattttattagtgaagagagttggtaggtaatgggctgtaattctaacacagccagtttggagattaataaaaaattttaaaagagcagtttttaccagaggcagtgggcccgttatttcaagttctcggctgagccgaaatcagagtggggtgggatccgtggtagactttgttgctgggaggatgcaaagccacgttccttgttgttacagtctgtgcagtgcccatccttgagggtgttttaccctggcattggaaaaaaggaaaccttgttttccaagaactctgctctctctcagcttgataagcatttaaaaataaaagctgcacaattgaaattggcagtgcatcctcattcttttgtctctctgtttatttttttccctcatccctcaacatgtgtgctacagcccatggttattacaccctcaagaatgatggcctggaactcagcaaactcgcaccaacgtctgcccgccctgcattctgttgtttgaagctggctgcggcatcagggcctagcgctgagaggccgggtggatcagcctccacagctccatctgtggcacatttcccttctctgaagctgctgcttggaattttgagcttctccagaatcctgattgtcagctcaatctttcttgttagtttttgtagttaacttaattgatttgtttacctctccattggaggagctcaaaaagaaagtgctttggcactcagcagagcagttctgcctcttgaaaagattcttctgaggtagagttttataatactgacccagagaagaaaaaagatccta

SEQ ID NO: 84781 - DNA, 2071 bp, Homo sapiens
caaagattagtttcttttccagctcctgcccatttacagctcagtcttatggcaaatggtgtcattgggctcacattttttcatttttccaagaggtgtccagtgtatagaatatcacttagagggctaattgggtggggaagaaagatcaaaggagtggagaggaaaggctgcagctgaagtgataggagccatttattgacaaaaagatgtgagttagagatttggaaaagagtactctgttgtttcagctacatcacattatatatctggtgaaccttgctggcccatgaaatcctttccattagtcagggttctctgtgcttttgttcttgactactgctgttcttagtgctattcggtttgcttgtatgtctcagtttccttttcagaaggcagattgtcgtctatttaggaatgcatttactgtaattggagtgttctggcttgtttagtcccctcttcaaatataagactcatatcttgaagcttatgttcagaaaatatgcgcgtgtgatccctttgccccaagtgccaacagcagatgtagcagttgacacgctgcagggaatttccaactgctgggcaggtttctgaaatccggacacgtgctgttcacactttggcttctgaggcaaggatcagtggttgaaagaggggaggagctggcaggggactgcagggagaaagatcttataatgcctgcccagggctttaggctgtgtcagctttctgcatctcttctccagctggagctggcagggtcgaataaatcactgcagagtagttatgagcccagctcaccagggacttctttgaggcacacctgtgacgtcatcctgttatcactgtctgttccacataacctcttttcacctctcccctgagagagggtgatgcccagaactcatgtcagggcaatgagcagaggaaaatgtttcgtaagtattatttttcagatgcctgctagggatacagttgtaggccattgacacattcttcaatattcctcattggaagagaaaacctgtgtttgcaaacatggcctgaataccccttgtggataaaacttctttttaaacttggaaagaaagtcttgaaactcctaagtggtctctttttgtaccccttacctctctcgttccttcccaaacatgcacacacagacacattacatacagagtctgctgtgttcaaaatccttcactgacttcccatttcactcagtgtaaaagccacattatttacaaggccttcatatatggacctcttctcctgccccccccccccccccccgcccccgcattgcctctctctgagctcattcacgactgttctccccatggcttggttactctgcttcagccacactacccttcttgcaagttctctgctaagctggggactctcccacctttggcccttcgcattagctgttttctctgtttggaatgttctgcatccagccatctgtctggtgaatacctcgcctcctataagtctttgcttaatgttacttctgtgagacctgccccaaccatcctatttaacactgctgcattctactccaaacctgcactctttatcttccaattctattgatttattttctaaatactagataattaatgtgtatatgtttattatttattttcctctactattctgcaagaatgtaagctccctgcttataggggtctctggtctgttttatccactgatacattgtgaacatctaaaacagtccctgacctgttgtaacttctcagtaaacatgcgttatatcaagttcaagtcaaagaataatttgaggccaggtgccgtggccgacgtctgtaatcccagctctttgggaggccagtgcaggtggatcacttgagctcaggaattcaagaccagcctggccaacatggcgaaaccctgtctttactaaaaaatacaaaaattagccaggcatggtagtaatcccagctacttgggaggctgaggcaggagactggcgttaacccgggaggtggagcttgcagtgagccgagatcaccccattgcactccagcctgggcaacattgc

SEQ ID NO: 84782 - DNA, 1041 bp, Homo sapiens
ccggtggcagcaagagggcacccaagagacacttcttgcacgtgctattggtattgcctgcttttagggaatatttgggagctgggattaaggtagagcctgactggcattcctttcattatcatttatgcttgctttttttgggtggggggagggagggacagaatcttgctctgtcgcccaggctggagtgcagtggtgcgatctcggctcactgcaacctctgcctcccgggttcaagcagttctcctgcctcagcctcctgagtagctggggtcacaggcgcccaccaccacgcctggctaagttttgtatttttagtagagacgggggtttcaccatgttggccaggctggtctcgaactcctgacttcgtgatccgtccgcctcggcctcccaaattactgggattacaggcatgagccactgcacccagccttatgcttgctttgaatggtgttagtaatcctgaattacagaaggtagagggagtgtcacatgtgggtctccagagggagagagagctagctagctagctacagctgtctgtataggactgatagctttaacttgtaggtgtgggatgtttcatgccattgttgtgatgggaggtgactctagttgagtttggttcgcaaccgaagtgtccttgtcttccagcatacaacaatctcagagacgttcagaaaagcagtatgctcctctgtggtgattcacttctgtcgtgagtctcttacccaagcagaatgtatgaagtgcctaatcctccgcttgtcagaacagttgtacaggaaatccacctttcataaggggttaggcttgagttagctgtgtaaactggccccctcattcctcctcctacatctctggtggtagaaacccttgggctttttctctacaaggatctctgtgggtagatttccgtagggaatcattgccacctgactttcattttcaggatgcctcagtttagagaaaatgaacagagccagcctgagcaaggaattttgtgagaagtagattcaaagtagaagtagattc

SEQ ID NO: 84783 - DNA, 1075 bp, Homo sapiens
tgagccgagattgcaaactatactgcagcctgggcagcagagtgagactccatctcaaaaaataataataataattaagaattaaaagtaaaaaaaaaagaaaatacaggtaaaaggaaggtaagatggtgagtacagagaaagaaatcggttgttccctgatgtgaggccaaggcactttttctaggactcttccatggtgggtcataacgagtaccctctagccaggagagacatggaaaaataaagcccgtacttgagaccctacttttcatgactggtctgctcctgactctcacctcattgtcacctcgatgaggtcactggggccaagaagagtatgggttgaggtgttcagaggctccaagggtgtttcaaggaaaaacggcccaggccacaggatataacactcagtgaggacagagagctctgtggacgtgctgccaagtacccagtgtgcagctgaggtggccatccagaccccgctgtgtgggctgccattgggacaggggcgagcagagtgctcggcagggctggctggtgggaagatgcacttttccatttcccagcacatgagtcatcatctttggtcccctgtgctgtgctgtgcttgcctggacagtggcaataagggggtgttgtggctgagtagcagcatctgtgccgggggtggagaaggaggggggttggggagagggtaaagattgaaatccttcactaatcagcagcagttcgaatcacatttttatgagtaaggaagtgataaatcagcgctgtgtgttcaacccccaagtcccgtcagccagtgcccttctaaaggtttctcccctggccagtctgcattctgtcagagttgccacccaccatcagggccctggctgcctgaaaccaggaagcaagagcctgatgctgccttgccctcccaggtactggggtctgtggtgaattggcagtcactgcaagctacagaacatctgggccatcatttttctttccattccttcttggacatgtccttctgggtgggtggctgcatatgtcagtttccggactctgtggagaaggagcattccag

SEQ ID NO: 84784 - DNA, 1366 bp, Homo sapiens
ttgtttggcataaccctaaggcccatgtgcctggctactctctctagcaccaagcttgaacttgctttttatttctgaagacttcagctgtggtttgtttctgttgccaaagaagctccaggcatgcaccactgtttgggatccagtggccacatttggcaaggagtgatttgaatgacctctccttaggagccctaggtcactggctagatttctgcctccctgcgttacagcctcttcctgtattgggagtggcacttggccagggcattctatttccactggcctgaaaacatacagaccccgatgagcagagccttgtgagagggaggaggacggcaacacacgaagaactgagacagatgactgggggcttctaggtctaggcattcttcaaggggaaatttgggatcgttaggcggaacagtcagtgtgatagtacctcagaagacaatagcagaactatgtctggttacctaaagtaaacgcttgggtaaaatatctttaggccgagtgcagtggctcatgcctgtaatcccagcactttgggaggccgaggcaggtggatcacttgaggtcaggagtttgacaccagcctggccaacatggtgaaatcccgtctctactaaaaatacaaacattagccgggcatggtggcacatgcctgtagtcccagctactcaggaggctgaggcaggagaattgcttgaacctgggaggcagaggttgcagtgagccgagattgggcgaaaaaagcgaaactttgtctcaaaaaaaaaaaaaaatttttttttttttgtttagattcacattacttttttaattgaattaagtttcataccagagagtttagggactgtgaaggtttcaggaaatttgttgagtatttagaaaagccgatggtttcagagagaaactttgatattagcttgaacacagttattgccaggggtgaggaaatagcataccaaagcataataactcatagtgatttatccaaaacttgagttgtttgcatctctggaccctgaaaactcctttatcttgaatttgttcaaaattgcaggataccgggaaggtttgtgaaagtagcaaagaaatgtcctaggcagtagttgtctggtgtgtgtgtgtgtgtgtgtgtgtgtgtgtgtgtgtgtgtgtgtgtgtgtgagacagagtgagagagagactgaaagagagaggtgcctcattgatgggttttctgaatctgcaggatggagacattccctgcagtggctgagaaggtcctcaaggagttccaggtgttactgcagcacagcccctctcccattggaagtacccgcatgctgcagcttatgaccatcaatatgtttgcagtaca

SEQ ID NO: 84785 - DNA, 1108 bp, Homo sapiens
cccatccctagtgcccaccccttagaccctggccaggttattgtgtcactggggactctgttcagtaacaggaaactggggaaagtttaattgttttctcctctccctttttcccatgcagctgaacaaaaggttcatcctcagttttctccatgcccatgggaagctgtttacccggattgggtaagtgtgcaggatgtttattttattttcctacattacaagtcattttggaatttaatattgttagcaactggactgtgtttgtaactgagggcacagggtgtgaattcttagaggcctccaccttctcttctcttcccttcatcttctgtcctactgtgctcatgaaatttggtaaatattactctctatctctcttgtttcttctttctctacctttactaaaacactcctttaaatacaatcttgtcccagcccccaccccagtccctctgggtttctctttcctctgccttccggcttaggtccctagtgagtgcctcagggcagttgtgctaaatccctgggtgcagctgtcagggggtcctccttgggaagaatactgtccactacttttccatcaaaaataagagtaacattttctttctatatccttttgacccatatcctttcctcctatgctcagattcctttgccatattgctgatctcattagataccaagcctcttacggtttcatcatccaccatggatttccatagacatctcagggaaggtagtgtgtgcaaaactaacacttgactgcttaaattcctggaaacagatcgagttttgagtattcctttattccttggatggatccgagttcttcctctctgcataaaactagtgatcctaagcccaacgtaatgcctacacgccagagcagatggatgcctggtgcctctttagtataggatctccctgagtataggagagtgaagaaagtagtaggtggcagtgcccccagaccagtcttccactagaccagttttctactggattctaatattttctgagttggaagttgtattgtgagctaccctttggggtgatttgttttgaattatgaataccccagttattgtcaatgtttccctttcac

SEQ ID NO: 84786 - DNA, 1033 bp, Homo sapiens
ggctggtcttgaactcctgacctcatgatctacccgcctcaacctccaaaagtgctgggactacaggcgtaagccaccatgcctggcctgtatcttttttcttttttctttttttctctgagacagtttcattctgtcccctaggctggggtgcaatggagcaatcatggctcactgcagtctccgcctcccaagttcaagtgattttcctgcctcagcctctctagtagctgggattacaggcacccaccacccggctaatttttgtatttttagtagagacagggtttcaacatgttggccaggctggtcttgaactcctgaccgcagatgatctacctgccttggcttcccaaagtcctaggattacaggcgtgaaccactgcacccggctgtacaagtaacctttatatataaccagtttatgaaagacttaggatataaatagaaccagtttataagggattccttctgattatgaatgaattaaccaatttatgattgacatctataggaagagggataaccaagttaaaataggaagagagagagaatgtgtattcttaactttttatttgaaataacatcctatctgtggaaaagttgtaagaataacacaaaaaactcccacatattcttctcccagattctccagttgcttcatttcaccacttgcttcatcatttgttaggagagaatgttaacaattgagtgtttacaggtcaagcgagcatttagatccgttgcctaagatcccaccgcaggtaaatggcagaggtctttcatgggaaggtccctgtttctcaccatcttcctctactaggaaatctagagatctgcattctggccaggtttcgccactaatgttggtgtagccatgggcaatttattttgcagctgttcctcactcttgtattctagtgtttttgtgttttgttttgttttattttttgagacagagtttcgctctttgttgtccaggctggagtgcaatggtatgatcttggctcactgcaacctctgcctcccgggt

SEQ ID NO: 84787 - DNA, 1087 bp, Homo sapiens
cctactgatttagctcaatttccctcagtctgctggctttaactaggagggataacgaagtaacaaattgctttagtataagaggcagcactaaactgcagtgcaaagttgagaggcattgtttcaaggggtgcgttagttggaagaggtagttttaaaaggcacattttacacttaaattcacatgtctcagatctagccatcttaagtgggacatctgtacaggaacttatgtttaattgaagctaattgagctgtcatccagccctgaacagttctggagtggaggaagtaaagggtgaagagctgttgccatcccggttctacctcagcctcagcgtggctctttggtccaagtaaggggcctaagggttgatttgatttgctacatcttcctacgaggcatttgagtcacgctatttggttttcccgtgcttttttttttttttaatctgtatatcctggaaagaggaatgctgaaagtactaataatgaataactctgtctttactgaatgattattgcattactgatgggtttccacattttttgtaccaggccccccttccctcattttttttttttcttagattccatctcatctctgtgacaggaaaaatgacagtaagggaaacacagtgcctcctggaaccttcataggccttgtcttaggtgtgggagcataaatggccagtgggcaagttggtatgttatttatctttgttcttggactataagctccttggcatcagagaccctatcttgttggtttcctcttatgcccagcataggagcgcagggatgaggatgacgtgtgaacaacatcaccagtgcgcccacatcctcctccgccttgtgatctcattgcttgagagagactgataagtgggctttgattgaatgctgtgaaagtcctggctgttttactaacaggtactcatgaaatttggtctccacctatgttgtctcatatctaagaggatagatcccttttctaaaatgcaagaaagttttgtttttttaaaaatatatggggccaggaccagtgactcatgtctgtaatcccactactttaggagggtgaggc

SEQ ID NO: 84788 - DNA, 1049 bp, Homo sapiens
aaatacttgcaataaagtgttataaatgtaataatagaaatatatacactggacagaggtaaaagagattaactcagggtgaacaggtagagcgacctagaaaggtaatctttgtccttaattttgcaagtcaaagaagtattttaggtagatgtggtcagctgacttttctggcagaaggaacaacatggataaaaacatagcatggttcgaaactgcaaggaatggttgcttctgagattcccagccaagattctgtcattataatgtcttgggccatggtacagatgtccacattggtgctgtctgatcactcagttggaactgaagattcatcacaatgtagatagatttgagcttttgatttggctcaagcttagaagtgaatccttcaaatagttctttctctgctttattttatgtattagcaaaggttgactcactctaaagtcatgccttccatcattctgggaagctttctgagccaagcccagcttggcttaggaataagttatgctttgtgttgtaatcattggcactaagtcctattcttgactttcacacacacagtaggactgcagctcctgatgcgtatgggaaagaggaattgtgataatactcgctatggatttacatttttctgggattttttttcttgataaagatgctaaaaccttattcttgctattgagattttgagtttacttgtgccacaaatctctgagatgctaggtcctaatttgtcaagcaaactatgttaacacatttgacattctcttctgaggaatgtctttggcaggttttcctttagacttctggacagatctataaaactctatggcttttgaaatacttgcaagtgacatatgtcaaaaggttgaataaggcactaatagtgcccttcgtgctcctaggaagctgtcacttgtggtcactgcagaccaggagtgagatcttatgggttgcattcctaaatttctttttgtttgcatgaacagattttttaatctctttccttgtctttacatccgtacactggggatatagca

SEQ ID NO: 84789 - DNA, 1398 bp, Homo sapiens
ctgtgtccagcctaggaagtaatttaatgttgcgtttgttgcttgacacctattttaagaattgagattgatttgtgatttatgaaaggtttgttttgatgttgctggtgttgtgaaaagcacattcctctctatgtgagagatggagtagccatctttggccttaatatccagatgattttgaggtctgtgggaatctgtatggtgtacttgagggacttgttcaaagccaatgtaaagatgtagttttggcatctcatgaataacctgatatcccgacttaagccagaactctggcattagagaattttccagcttgggagagttgactgagaaaagtcctcctttggctccttgccaagttagacaagggagcaatcagctgctgagttccagccaactggaatgtacgtgagggggtactataaatcgtcccttaggatccagcttgtggtctgtgaagagccttccaaataagaatgagacctgtacattggatccttgttcaatctgcagctgctataggaaggagtagtgaggtgatgttactctgggagcagctcactttatatagtaacacactgcctgttatgtggggtaagactgcactaccctttatgtttttcccgtgttgcgtttctcaccaacttcctatattggtttttgtttctgactgttctcttggggagctgtatccatagtttgatcattctgtaaaatccctctttgctcttaaaggtgccagaatttcatctctctaccctcttttcaacatcttagatctgatgtatttgagctaagatagagaatatgaaatcgttgttttcttggctcgtgatccttccccagtctgcgggctgtttgtttgactccagggggaaactccaggttcttcccctcttggaagcctttcactttactcataaatatttagtattgaagtgaactgtgctcttttttttctccctagtatgagtggatagactctctagaccagaaagaatttaaaatactatctgtaccctctgtctttctgatgttttggttcctataaaatgtattaaccacacatttttatttttaagagcttaagtggttttttgagttgtcttccatcttctgatccaaaatttgttgagcatttattatagaaatcactaggcacctctcctgctactgttttttccgtgtcgttcatgcttagaaccatcagagagctatgtaactaggtaacattggttactagtagtactgcttttactgatttgtacttgagtgtgtcatcagcctctatgaagatacataaaaaagagacctagagaaggattgctgtttgtgttgcgtggtgtctttgtggaagcctgtggaagaaatttctgctcttagtagaaaatgggt

SEQ ID NO: 84790 - DNA, 2409 bp, Homo sapiens
gccaggatggtctcgatctccttaccttgtgatccgcccacctcggcctcccgaagtgctgggattataagcgtgagccaccgctcccggcctaatttttgtatttttttaagtagcgatggggttttaccatgttgaccaggctggtttcaaactcctgacctctagtgatctgcccacttcggcctcccaaagtgttgggattacaggcatgagtcactgctccccacccaatattttctttagactcatcatttgtcttttcagtgccccttgcgtagtttgtgcacctgagctgctgctgctgtgaaagctgctgtgtatgagtggtacacatctaattcctccaccctccccgcaaaacaattatagatcagagcatggttttataaggtttccttagacaaggtgacttgctttctgttggaatgagttctaattcctagagttgtatcatgaggctttaggtttatagtttgagagccagtacccattatgaagcttagaaaaagcttttagactggacacagtagcacatgcctataatcccagcattttgggaggctgaggtgggaaattgcatgaacccaggagttggagaccagcctaggcaacataatgagatgccgtctctaataataataaaaatatttcacttaaaaaatacataaataaggctgggtgcagtggctcacgcctgtaatcccagcactttgggaggccaaggcaggcggatcccgaggtcaggagatcgagactaccctggctaacacggtgaaaccccgtctctactaaaaatacaaaaaattagccgggtgtggtggcaggcgcctgtagtcccatctactcgggaggttgaggcaggagaatggtttgaacctgtgaggtggagcttacagtgagccgagatcgcgccacggcactccagcctgggcaacagagcgagactctgtctcaaaaaaaaaaaaaataataataaaaataattaaaaatacataaataagtaaatacattaaaaaagaaagcttttggcctggttctctctggatagcacaagcactgatttaatctataatgataaagaatagttgagtctctgcactagtaggtaagtgctttatctgtgataacccagttatttcattgtctcataattatatcatcatgacagagaaagccagcttaattttttggcctcatggatataaagactccatatcttgctgggaacagtgactcaacgccggtataatcccggcacattgggaggctgaggcaggaggattgcttgaatccaggagttcattcatgactagccttgacaacgtagggataccctgtctctactaaaaaaaaaaaattagccaggtgtggtgggtggtcctagttactcgggagcctgaggtgggagaatactctggtctggaaggttgaggctgcagtgagtcttgactgctccacttcactccagcctgggttacagagtgagaccctgcctcaaaagaaaaagattccgtatctgtaaggtgggcatcagaaaattttttagggtttttgtgagttgacttcatgtctttaattagtcctatgcttttgtaaagtagtttgcaatatgtacctcaggctgtactcttcactctggaagctatttgaaaagtgtgtgaactgcagtttggcagcacgtgatgacagcagttcattagagcctctttctgtgggaagaagcagattggttttctttttcttaggccatgagaaacagcttagtgggatcctcaaagaaggtcagaaccagaaccgggtttttcagatgttgataatgtgaggtgggttgcaaggagcagcccctggtaggcaaggattggggctgctttgtccagatcactgctggactgtaaggctaatgtctttgtggttggtagtgagtgcaagtttctcaaagtacatcagccctacctataaacccttaatgccccaaatgacctcggtcaccaaaccacttcagggctttatttttatcctatccgttttgtttcaatatgtgaggttggtttctttcctctaacagagcagagttctctgggggaagaaacagagtgccagggtgctgctgaggctggttaaacaccaaaaccacactcttcatctttctggggttgagacgtgacataagccatgctgcaaacgccagcttccacactgaagaaacctctctcagtagtcactttgtttattttttgtgtattgtgtttttaggcaaataaaatatagaggagtaaatggtgtaccttcccattctgctgtagacagagatctaacaatgagcacttgcttaaaatctgccatttcccagcttaaggtttttcatcctccccgagagtgttgatgagaactctcaaaactcaccag

SEQ ID NO: 84791 - DNA, 1046 bp, Homo sapiens
gtaacagcagatgtggataggcctggctcctaacatgatcctgtggtgaactggggtagctgtagatgtttggggtgtgtgcgtgtgtatgctttgtgtattcctgtgcagcttgattcaactggatgcagttctctgtgttacctggtgtttcttgtaaacaaaatcacacataaggaaaggcaaagtttgtgttatgcccaaattgttcgtttatgtatttatggcaatgaaacaaattctcattttcaaaatgaacattatagcagaactgggtgattagccttaattggaattgttcctttgacaactcctagagaatttctaatacagactgcttaaatttagatccatgagtaaacagaaagtttggcttcaggtggttgttagtaacagtggtaacatcccaactagtctgttctctgccaagcatttgctttggatctttctctctctgaatggttgcaggaggttagcttgtgggttgttggtttttagtcttgagatgtggtttgggttgaacatccagcctggggagggattgccagcctcaactgcaagtagcatcctattgagattcacatttcaactcttccacctgccagccaggaccctccaaatccacgttgccagggttctgggcatttgttatttagtggctatatcttctgctgttcttcgtctccctttagaaacggggtactgcttgtcaactgggttgttgctgacagtcagggagttaaggatattaaattacagcatcagaaatcattttcacactgaaaagcaagggtctctgatagaactgctgaggattttttagatctgattgttttgttatcagcatcttgaatagaatgtaatacatgtctgtctgctggggaagaaagcatataggattgggagtggttgatagatgatagactgatagacttattttaattttgttttgttttgtgacagagtctcgctctgtctcccaggctggagtgcagcggcgtgatctcagctcactgcagccgccacctcctgagttcaagtgatct

SEQ ID NO: 84792 - DNA, 1081 bp, Homo sapiens
ggtgttgtacaggtgtccctattggtccctgtagtcatgccttacccctccagggttacatctaacactctaccttatgttttaagtattagggctatcaggatgaattgggaaaaagctaatctggaactagcattttcttactgttttttctgttctagttggtacctgaaggcccagcacattgctcccaagaatgggcgcccctataaccagttggctttgctggcagtgtatacggtaagaaatcctgtggacaggggaaaagtgctttgcaggaagtatcttacaatatggagtttgataatatcagttcctggagcttcatttcatctcatcactgtagcccaaagaatatcccctcaaactccttttgttacggttactctcagaattaagttgtcagggattcctcacttcacttaactctgtacttcatctctccacttaccactgcactcaaattcctgagggaatgctcatgctccagctaaacaccattctttgtttctgaccagagctgccactctgaattttgtcttgattctcttccctttctgttgaactaggcaactcattctagacgaaaaataaggcttacttctctcccttaaagttttcacctacctctaagtagtcagatctttgcttcctttccctagaccctgttacttcttttaactttttatctgaggtgcctccttagcagaagcacagtaagcagcaggttgtacctccctaggtctaatcactgtgctctaaatatgtctgtaatggagaagcgggccttgggagctgagacagctcctagggagaaagctcaattcaagggggaaagtggggaccagtggtaggtaccagaggttccatcgtaagaaacaaataagatgctcattagcaaggagaaaattgtctctctctttttttttttttttttttaagagaggcagggtcttgctctgtcacccaggctggagtgcagtgacgcaaactactggcttaggtgatcctcctgcctcagcctcccaagtaactgggactgcaggcacacactgctgcacccggatgacaagtatttttc

SEQ ID NO: 84793 - DNA, 1300 bp, Homo sapiens
tctgtcgcccaggctggagtgcagtggcacgatcttggctcactacaaactctgcctcctgggttcataccattctcctgcctcagcctcccaagtagctgggactacaggcgcctgccaccacacccggctaattttttgtatttttagagagacggagtttcaccatgttagccaggatgatctcgatctcctgacctcgtgatccgcctgcctcggcctcccaaagtgctgggattacaggcatgagccaccgcgcccggccctatttctagtcttagaaataattatgcatcctactttttctttaagaaaaaattatctttaagggatcatggaatcttgaaatggaaaaagactttctagaatgccaagaaatgaacaacatgtaacttgcagtgaagatcttatttcagttgttaaatttaggtgaagacatatggggaaaaactattttcctagacacaactatctttagaatgacattctgctctgcagaatggaaaccagagtgagtagtatacctacctggtcacattttttatttcctgccaggggaggtggttaatttgcaggaatctcaaaacttgagtctagctttttctgtggtgtatttggagctggaagttgcatgtattttattccagagctgaactgctgcagctatatgagcgctgtattctattagatattgagttctctgataatcagaatgtggatcagatcctgtggaagaatgctttctatcaggtgattgagaagttcaggcaacttgtcaaggatccgaatgttgagaacccagaacagattcggaacagacttttggagctcttggatgaggtaaactgtcatctttttgtcctcaggataaaggcttcagcattctgtagttacgatggatttttactacctgaaatactatgttttagaacagaatatcgacaaaaaaactgcccttttcttgggttctgagccttccctacaccagttgcttccttgggaccataaattactggcaattggagttttgaggttgaaagctttctgaatgccttggcctaaaagagagagaatgagaatgtgtatgtatgtgtttgtgtttgtgtggagagagcgtgtgtgtgtgtgtgtgtgtgtgttcatgtgttcatatctttaaaaccatggaggctttgactgtgaatttgccttgttctcaaattggtggccagtgaatattgtgcgtgcctcccttttcataggatgtctgaacatcagcagaactgtgaaagggttgtctgccccggtttttggtggatag

SEQ ID NO: 84794 - DNA, 2322 bp, Homo sapiens
aggctctatagatagagaacagtgtagtgctgaaaaggttagagaggtcttttgttctgacaataatgaggtagtttgggatcttggatttctgaatatgacttggatgacacataaggagatgggtttcccccatttcacttacccaagtgtaggtagccccaacacagttaggtccttagccttgtgaattgttgaacaagtgttgtaaacccagaatttctgcttctacagaaatgtccttctttgcctaccagtattagcatttggatatgtaattcttgctcgactttttttgttacttaaccagaatgacagtctttcccctatcttccttctttattcttatcttctacctttccctcccaaactctttccccgacataacagaaaacatgaaggaattaaaggaggccaggccgcgcaaagataacaggcgtccagatctggaaatctataagcctggcctttctcggctaaggaacaagcccaaaatcaaggaaccccctgggagtgaggaattcaaagatgaaattgttaatgaccgagattgctctgctgttgaaaatggtacacagcccgttaaagatgtctgcaaggaactgaacaaccaagagcagaatggtcctatagacccagaaaataatcggggacaagaatcctttcctaggactgctggacaagaggatcgtagtctaaaaattatcaaaagaacaaagaaacccgacctgcagatctatcagcctggacgacgtttgcagactgttagcaaagaatccgccagtcgggtggaggaggaagaagtcctcaaccaggtagaacaactgagagtagaggaagatgagtgtaggggaaatgttgcgaaggaggaagttgcgaataaaccagacagggctgagatagaaaagagcccaggtggtgggagagtaggggctgcaaaaggagaaaaaggaaagaggatgggaaaaggggagggggtgagggaaacccacgacgacccagcccgcgggaggccgggctccgcaaagcgctactcccgctcagacaaacgaaggaatcgctaccgcacgcgcagcaccagctcagctggcagcaacaacagcgctgagggagctggcctgacggataatggatgtcgccgccgccgacaggataggaccaaggagaggccacgactgaagaagcaagtgtctgtgtcctcaaccgattccttagacgaggacagaattgatgagcctgatggattaggacccaggagaagttcagaaaggaagagacatttagaaagaaactggtctggccgtggggagggtgagcagaaaaacagtgctaaagaatatcgaggcactcttcgtgtcactttcgatgcagaagccatgaacaaagagtctcccatggtgaggtcagccagggatgatatggatagaggaaagcctgacaaaggcttgagcagtgggggcaaaggctctgagaagcaggagtccaaaaacccgaaacaagaacttcggggtcgtggtcgtggcattctgattttgcctgcccataccaccctatctgtcaattcagcaggttctccagagtccgcgcctttgggacctcggcttttgtttggatctggtagtaagggatctcggagttggggccgtggaggcaccacacgccgattgtgggacccaaacaatcctgatcagaaacctgctctaaagactcagacgccccagctacatttcttggacactgatgatgaagtcagccctacatcttggggtgactcacgccaggctcaggcatcttactataagtttcaaaactctgacaacccctattattacccccggacaccaggccctgcctcccagtatccctatacgggctataaccctctacagtacccagtgggccctacgaatggtgtgtacccagggccttactacccaggctacccgactccgtcaggacagtatgtgtgtagccctctacctaccagcaccatgagtcccgaggaggtagagcagcacatgaggaacctgcagcaacaggagctgcacaggcttctccgggtggctgacaaccaggaactgcagctcagcaacctgctctccagggaccgcatcagtccggagggcctggagaagatggcgcaactcaggtatgatgtggtctattctggctggagggaaatggggatcagccggaggtgtatagattgctatggctgaggaaggtagaaactttttagctgagccactgggtattatttccttttcacgttgtaagggaagggcagttggaaacagaacagaagttttatttctagtcttt

SEQ ID NO: 84795 - DNA, 1026 bp, Homo sapiens
cgcgtcggagctgcgcgggatcctggctactctggccccgcaggccgggagcagaggtgagtcgcgccgcccagctcctgggccgggcctgcccgccccgcctccctctcctcctcctctgcctcctccccgctcggccctcggctccggagcccccgccccttcccccagcagtaggcgctggggccgcggcggaccctcgctgccctacctctctcgcgggttagtgcggggtcgggctcggccagtcctggccagctccgggagagcctggcccgaattcctgcctccaccctctttctcgccgcgaaggtgactgttccttttgccccagccctctcagacccgccccggattcccaggcatcgggagacgcggaaaggagtggggtctggtggaggccccgggcgtatcgctctccaggccgccctccgcgggcctgccccggccaccgctttaacgtcggagagaaggaattggggagaaaggtttaagagcctgcgacttcgttgctgaacttttcccccccaagacaggcttccgaaagctgcgccactggagggatccgggacctcagactactcgggtttggccctggcatgtgtgggagcagtttttattagagagaatgctcaatttgcaagttaatttcaagtctccagccacgtcaggaaagtaagaaagattctaagtgtctcacctctcctgcgttaggcaatagagttgtgtagaatggtagctgtgataggtgccttctctaggtttgcggccagtctgtgaaattggtttttgttgattaacataattggattattaaggctattttctcccgctgctctagaaagtagtaggaatagctttccccatccccccgccccccaccaagttacagactgccgagggtgagctattcttgggttaaactgctttatctttgtggatacttcatgaacctaccttttaaacttatgaaaatagtgaagcactatccaaaacctcagtctcttttcttccccttttccttac

SEQ ID NO: 84796 - DNA, 2192 bp, Homo sapiens
gaggctgaggcaggagaactgcttgaacccgggaggcagaggttgcagtcagctgagatcacaccattgcattccagcctgggtgacaggaacgatactcaaactcaaaaaaaaagaaaaaaaaaaagttactgataggactagatcgtatcttttaggtgcattgaggcagcgaaaatttttgagaactggtggtttagagaagtagaagctgccataggtttaagagttgcactaatacagcttttcacaggcctctatcacctctggtttctcaaaatggttttgcttttcattttttaacccttatggcagcggacaaacataaattgcagagattcctgactgctgacatggccctggtggcgacagtctatgcgccaatcacttttcctcctgcatctgtgctgcttttcaagcaaaaaagcaatggtaagttgagccacagagatgaacagaccctgcaggtccttaatagatgaacaccgttttctcttgtttatttaaatttgggagccaaatggtatggagaaggtaatgatggttttcaaaatacagtaagtcttcatttaacattgttaatagaacaatgaaaactccaacttttacgtgaaacagtgtatagccagtcctcaaataactgccttttgttcaacatcctttccttgtaacaactgatgagaaaaagtatggttttgttatacatcatttctcttgaagtacaagttttcaagaacctattgacaaggttaagtgtgggcttacagtttaccaatcttagcctcagattgggctagggcagggatgacaaaccaggctcttgcatgggtctttaaatggactgggcaataaatgaagactttggcctgtaaattcctaaatagcttctttgcttttgtcctttaggaatgcacagcctcattgctacaggccatcttatgtcagtagatccagacagaatggtcatcaagagagttgttctgagtggtcatcctttcaaaatttttactaagatggcagtagtacgttacatgttcttcaacagaggtgggtatgaaggaggaggatgggatctgattgcctttgtggtataaaggttgggtttacattttgtgggtaaatgtttcatcttggtctttaatgtgtttgattctaagaggatgtgctgtggtttaaaccagtggaactgagaacgaagtggggccggagaggacatatcaaggaacctttaggtaaggaaacacgggatttgagaccatgtctgcatttctgcagtgttgctaaatgactgttgggttggaagtcattgctttaaaattttctacttttaatttgaccgacttgttctgatgtctttctaggtacccatggccacatgaaatgcagctttgatgggaagctaaaatctcaagacacagtactgatgaacctgtataaacgagtcttccccaaatggacttatgatccatatgtaccagaaccagtaccctggctgaaaagtgagatttcttcaacagtgcctcaagggggcatggagtaatggattcaaagagattctgtcttaccggtgccagtcagtactccagggatgggaggcacaagttgtgattgggcaaagtttattttctatgtcagcctgtcagtccactgccccattttgcaagacttttttttagccttgacaaaatgtctcagttaagtataaaagtttttccactacttagtccaaaaaaaactattaaatcttaatgaaatagccactctccattaagaatctgataactaagagttgacaatactaggaaacaaaatgtcttcagtatctaaagacactgaattcccaccatttccttttctgtaaattaaacagaaacagactgataagaagctggcctttcagcctgcttcacccaagttatggaggaggttaagtctacatttccaccactgagcacaatacaaatgttctttacttctggggaaacagtttgaaaatgttgagacagcacagcagccactccaacaccagctgtaggttcaatgagtagtttcatcctctcccacaccagctgggttgcacactgttgatatggaagggagtaggaattagtgaaaggggagtctagttggtttacctataaagttcagatgagaatacgtgtccagtttgaattttcttatcactgtgtaca

SEQ ID NO: 84797 - DNA, 2948 bp, Homo sapiens
gagggggagcaagtcatgtcacacggccagcgcagtaacgagagcaaggcaggaggtgctacacactttaaacaactagatctcatgagaactcactcaacaaggagggtggtgctaacccactcatgagaaaacctctcccctaatgcagtcacctcccaccaggctccacctccaacactggggattgtatttcagtatgagattggggcagggagacacatctgaactgtatcaggccattaccaagcatcttttttgtcagtgagaagcttgggtttggttccgatagaacttgttataagctgttcggagtgtcgtcttggtttaagctgttgggttgtttggagagaggatgattggagttcttttcagctagctccttagccattttagcagtgacttgagtctatatagcaccatataaatctgacttaatgtctttaaaaatcttcaatattctagatttcagaaatacagaggccttaagagcttccggacatctccatgggatcctaaggaaaaccttcctcaagattatgctcgaatatttcagtttcagaactttactaacactaggaaaagcatctttaaagaggttgaagaaaaagaggttgaaggagctgaggtatctatcctccttgttcatcttgtatgttgctttcatttgtcaacatgctccctactttattccttctcttggcatgaaaatatgctgcatttggggattaggggagcccctgagtcattgattagaatgatactgggaacaaagaggtatcagctatgttaaatgaaaaagtgtgatctgggtaaatgaagcatcttgaaggatgagggttggctttaaaaattttatctgagagactcaacatatttggagaaagcttcctcgctattgggactttgaaaggtaactccatgattgctttctgctttcttgtggcaggttggctggtatgtcacacttcatgtctctgaagtccccgtctcagtggtcgagtgcttcaggcaaggaacacccttgattgcattttctttactacctcatgaacagaaggtaaattgctgtcttgtgggaaaatggggggttgtgaaactttccagctgcttctgacagtctaaaattctgtttatgtgtgactaaaattttgctcattgggatgcaaaaagtctgcctttatgattaggaattggagaataatagagaagtcaatgatggttttattcatatcgtctgaacctgtctgaagcatctcagtgatgcaatctctgtgtggttctgagacttctccaagtatgtttttcagaccagattttgaataagggttggcagccttaaaaataaaggtttggctgggcgcggcggctcacgcctgtaatcccagcactttttgggaggccaaggtgggtggatcacctgaggtcgggagttcgagaccagcctgaccaacatggaggaaccctgtctctaccaaaaatacaaaattagccaggcgtggtggcacatgcctgtaatcccagctacttgggaggctgaggcagaagaattgcttgaacccagtaggcggaggttgtggtgagccaagattgcaccattgcactccagcctgggcaacaagagcgaaactcttatgtcaaaaaaaaaaaaagtttatgccaaagtgcagatctcttttctcttggtggccagtagttgtgtatgttgtggggtatgtgatagttctttgatcggttttggtaagggctcaagaagaaggggcttgaatgagtgtggttttgagattgtggtgagtgaatgccttgaaggccactgatttttgtgtggcagatgttgagctcttttctgttaggtgcaggaaggtaggttagcattgaagggtgcatgaaagctctgatcagcctgtgtttggcttaaatgccagtcattggtggaggtaaaggatgaacccgtgtttcagcatctacactccaccattaattagcattgtcagttcttagaatgagtctgaatctgctagtttggtttgccttctttcagtttaggcaattgtattcctagactatgaagatttttgtttttcttacttggtccccagatgtcagtattgaatatggtggtgaggcgtgaccctggcaacactgaacctgtgaaagccaaggaagagctcatatttcactgtggattcaggcgcttccgagcctcacctttattctctcagcacactgcaggttagcaatggggaagctgggttcttgtccatcttgtcttttgggaaagtgacttgtggtggaggggtgccaaaatatatggtttcaaaatcttacatctctgggttagaggtattttcagtactctggcttaagagccaatgatgtttttattcaaaatgtctgaacctgtctgaagcatcccagtgatgcaacttctgtgtgatactgaggcttttttgccatgagtatttgttccatagcaggttttgaatagaagttggcagctttataaaaagggtattagggtgggtgcagtggtgcagtggttcacacctgtaatcccaacacttgtggcattagaacggggaattgaagaccaaaaaaggtaagatttaatcttgtttttgtttctgttttttttttttttttttttttttttttgagacggagtctcactctgtcgcccaggctggagtgcagtggcgcgatctaggctcactgcaagctccgcctctcaggtttacttacaccattttcctgcctcagcctcccaagtagctgggactacaggcgcccgccaccatgcccagctaattttttgtatttttagtagagacggggtttcaccgtgttagccaggatggtctctatctcctgacctcgtgagccgcccgcctcagcctcccaaagtgctgggattacaggtgtgagccaccgcgccccctcttgttttt

SEQ ID NO: 84798 - DNA, 1165 bp, Homo sapiens
ctgttgctcaggctggagtgcagtggtgcgatctgggctcactgcaagctctccctcctgggttcacgccattctcctgcctcagcctcctgagtagctgggactacaggcgcccaccaccatgcctggctaatttttttgtatttttagtagagacggggtttcactgtgttagccaggatggtctcaatctcctgacctcatgatccgcctgccttggcctcccaaagtgctgggattacaggcgtgagccaccgcacccggccgtgtatggttagtttcttaggaatgactctgtagttgccaggaatgaggcttttgttttatactttagactgtattagaatttatgttggttgggaatagggatctagtacaattattttactcttagcttattggcctttggggtagagacaggtgtggatttcttctgaaaaaactgtaatcctattctacaggatgagagtagtgaagaagaggaagaatatgaaactatgactattggggagtctgtgcatgatgatctgtatgataagaaagtagatgaagaagctgaggcaaaaatgttggagaaatataaacaagaaagactggaagagatgtttccagatgaagtggacacgccccgtgatgtggctgctcgaattcggttagtcaacaagtctatcaacaaatctaaattcagtcaatacgtttttaaaaacttggctcagagctgtgtcactgtgatgcaaaagaagaaaaacacattttttctgctcctgaagagctaacatttaatatgggaaggcaggacatacatacgggaaatggtcatatgtaattaagttctagactgtggtgcagactcacgttacaggacttgaatgaaggggaaatactaaggttaattagcaaatacttcttcccaaaggagccagtactcaattgaagtatataatgtttggaaattttagggggtttgggtagaatagcagaagtagaagagtgaagaagtagatgattatatctgttctggaggtgagtgactaaagccagtgaattaattttggatattaggaggtaaggctatgtattaggccattctcgcatggctataaagaagtaccagagactgcataatttataaagaaaagagatttaattgggtcatggtcctgca

SEQ ID NO: 84799 - DNA, 1073 bp, Homo sapiens
ctgtcctttgcccagagaaacaaggatatgaagtttgatttcactgtgaaattccttcagggtagttcagtgttgggcttcccagtgatctctgggcttgcaactgagctattaggttgtttgtgaactgcagagggatttttatgtaatgaagcagtaggtcatgaagcgttttctctttcgcttacagcactagctgtccaggggatttctggcctcccactgaagaaacaaatagataccaggaagaagctaagtaaagcagtggagaagcgctttccgcatgacaaactcctcttgttagacactcaacaggaggcagggatgctgcttaggcagttggctaaccagaagcaacagcatcttgcttttcgagatcggcgggcctacctatttgcccatgctgttgattttgttcctagtgaagagaataacttggtgggcaccttgaaaatttcaggctatgttcgagggcagactctgaatgtcaataggttgctgcatatcgttggatatggtgatttccagatgaaacagatagatgcccccggagaccctttccctttaaatcctagaggaattaaaccccaaaaggacccagacatggcaatggaggtaagactgatattcttaattcatgttcatatgaaagttggcacaggaaggaaacttaaattcagagaagatagtctgtacacttaggtgaatgaggagactgctagtctgaagtaaggcaatagtcagttataaataggttgataaatcacatatttatccagcactttctaggtagtctgcactgtgattggctctgagtttatagaacacactcaagatgtggttgctttcctcaagggacttaattgggctggaacaaaatggcatgtgtgaaataaagattgagatagcatatggttagagtgcggaccagcagtggaagttgagaaagtagactagcaagcttcacataagagatcagacttgagctaggtgttgagaaggataaatgtgatttatgagttgaagagggataaaagaatatcctagaagataagagacagaatgaacctagg

SEQ ID NO: 84800 - DNA, 1048 bp, Homo sapiens
tacggaaccgggcaaggtgagagaagtgtcttccacgcgattcccaagcctcgctagggaatcgagggagaagaaaggttgctcagagtgataaagaacatgccgttgcaaacggaagagcaacgtgcccgaatctaggtgacaggaagggcttaggccttttcggcacgaatggagccttccagtcaacatgcttctacgtgatgcagctttatagcgcaaaaaaatgacaatgcaaggggtacaaacagccctgctagaccaacagcccgagcctcgacagtctacatccggcgccttcaagcccccaaccacacactgcgaagtgggaaaagttcccagcgcggcttggcgaacccgctaacacggcgctctcacgagctgctggaaaagaccttcgcgagagggcgcagggagtcccgctccctggagggcccgcccccttggaggggaccggaagcgcttgtcctggcccggaagcagtgctgactccgtacacgcgcgctgcggcatggcggcccaccgccccggcccgctcaagcagcagaataaagctcataaaggcggacggcatcggggtcggggatctgcacagcgggacggcaagggtaaggagataacgtagaaggaataagggctatttggccgttattaactctttttcctcatgcccagactgagcttctgtctcccgtctgggctccacgcgaaaggccctttctaaggtgggcggagaggagtcccttttcttgaccttgtggggccgatcacaccagccccttctaatctgccattcaggccgtctggcactgaaaaccctaagcaagaaggtgagaaaagaactcagcagagtcgaccagaggcatcgcgccagccagctccgaaagcagaagaaggaggcggtgagaggagcgggatttgggagaatgcggcttctctggtgttctaggtggctaatgcctcgaagtggaaaatgagaccgggaggagggtccagggacagagcatagccctagagcacgtgtcgagcgtgcaggtctagcattctt

SEQ ID NO: 84801 - DNA, 1655 bp, Homo sapiens
actgccttgtatccagtgcctggcatactgtaggcactccgtgactgtttggtaaataaatgtgctgattttggagacttcgaggcctggtgtttggaaagcatacattttggaatagtctggacctaattctgtgtgaccttgagtctctatgccgtctccctaatatatatatatataacctcacgcctgtaatcccagcacgttgggaggcctaggtgggtggatcacctgagctcaggagttcgagatcagcctggccaatatagtgaaaccccgtctctactaaaaataccaaaataagccaggggtggtggtgcgtgcctgtaatcccagctacccgggagactgaggcaggagaatcgctggaacctgggaggtggagattgcagtgagccgatattgtgccactgcactccagcctgggcgacagagtgagactccgtctcaaaaaaaaaaaagtttaccttagctgagccgtaattagagtttcagggttggggaagcgtctggactctcataacatcctggaaagtggacaggcgcggtggcttacgcctgtaatcccagcactttgggaggctgaggcgggtagatcacgaggtcaggagttccagaccagcctggccaagatggtgaaaccccatctctactgaaaaaaacaaaaaatacaaaaattagccaggcacagtggtgggcacctgtaatcccagctactcgggaggctgtggcaggagaatcgcttgaacccaggaggtgtggttgcagtgagccaagatcgaaccactgcagtctagcctgggcgacagagcaactctccgtctaaaaaagaaagctgggcatggtggctcacgactgtaatcctagcactttgggaggctgggacgggcggatcacgaggtcaggagatcgagaccatcctggctaacacggtgaaacctctctctacaaaaaattagctgggcgtggtggcgggcgaatgtagtcccagctacttgggaggcaggagaatggcatgaacccgggaggcagagcttgcagtgagcccagatcgtgccactgcactccagcctgggcgacagagcaacactccatctcaaaaaaaaaaaaaaaaaaagtcccggaaatctctagatggttctcatgcgttagccatggcctggctactaggccctaatgtttgttcccacccctccccttggtaaagatgtagttgaagccatcagctttcccgcttgtgggagaagcttcattatgtctttgctgtgaagaggcccaaaaaaggatttcttaggccaggggtgtatcaagtcagcatttaagcccaattctgctctccccaatgaaaagagaaatcttgattctcctgcaaaaggaagcagtctagtgacagagacttgaacagtgtaaacaaaatagaaaagtacttgtgtctacacttgaggtggatatgctgggattatagatatggctcaattttggaggttagtcacagataatgggaaatacttttttttttttttggagacggagtcttgctctgtcgccaggctggagtgcagtggtgcgatctcagctcactgcaacctccagctcctgggttcaagcgatttccctgcctcagcctcccaagtagctgggactacaggcacatg

SEQ ID NO: 84802 - DNA, 1357 bp, Homo sapiens
ccagtctgcagagagcctgactctgaagtggacccccaaccagctcatgaatgggactctgggggactccgagctggaaaagaggtgggggctttgggactcaatcccaggagccagggcagggagtgggtttgacctcaggcagagggatggagaaaccccgcttgctccaggaggccaacctcactctttatttggacgccaagaatagcagggagcggctgcctggagtgattcccaagctctctaggacggagccaagcctggccgtgaagaggtttgtctgagccaagctctcagcggctgagacggacagctgtccatgtgccgagcgggcagcacagatctcaggggtcatggctggctgtgtgcacctcttggctatggtcatcctatcttcaggggagtttcgtggggtggtaggaccaggagacaaggaaggaaggaaggatggcaggtctttggacacagtgacagcagtctggttcctttctagcgtttactgggactatgccctcgtggtgcccttcagccaggtcgtgtgcatccactgccaccagcaaagtaagcctgccttgtcctcggctcgggtgggaagggagaggctgccttctgccagctgtgcactgtgcgtggggcctgtaagactcctcgtcctcctcccatccttgttaatggggctcccaggccatgctgtagcccagccatctgcctcctacccagcctgggggcactggccagcagggtgtgatagccgacgagagggcctcagccgcactctccacgttcacccccagagagcggtggcacgcttgtgctggtgagccaggatggcatccagaggccgccgctgcatttcccacagggaggacacctgctgtcctttctgtcctgtctggagaatgggctgctgcctcggggacagctagagcccccgctgtggacccagcaagggaaggtaactcgggtgggaggctttaggggaagggctgtgtgtggggttctctgcccgcctcccttccttccccacgtggagttcttaggagcggccttgtgtggaaccctggatgagactctgccctatacagcccgaccacctacccctccttccacaggggaaagtgttccccaagctacggaaacgaagcagcattcgctccgtggatatggaggagatgggcacggggcgggccaccgactatgtgttccggatcatctaccccggccacaggcacgagcacagtgagtgtcccgagcttcatcccgggggaggagaggaagacgctctgggaggcggggagcgcagcgtcacccaggagggcagcaggcagggcccactgaccaggccaggttaaca

SEQ ID NO: 84803 - DNA, 1053 bp, Homo sapiens
ctctttgagcagtcactattaactaccaccacctagcggccagccgcgcggcctcggtggacgatgatgaggaagaggaggataaactgcacgcgatgctctcaatgatctgctcgcggaacctcacagctcccaatccgatgaaaggttcttatccctccctctccctgacccacctcatccccaccctccctcccgggcccgcctgccacccaccacaggggttcgaacggcagtgttggcattaggggacttgcacccagggcagttcccttccatcgggggcagatcagggagggcagaaggaggccagacaggtgctggcaagaaaaggggctggcccagggcaggtggctccaggctgtgaggaggaagaggatttgctaataggaaggtctgattatctgattgcctcctgggcaccctgaatggatctctgagcccattcctactccgggggtcaggctggcaaatgccagacagaggtctcttcctttctctctgctgattgggaagaccagcctctgggcctggtgcttctgactcctgacttaacagaaacaggatggaggtaccgggtccttcctggggcaggggcagcagctgtgggtcaggcgaggggttgagggctgccatgcgaagggccccagggctcagtcttcccaggaggcctgagggccccagccggcagggcctggtactttggcatgaaatctagaaatagctgcagcatggtgtccaggaaggggccaggctcagggcctggcaacatgaactcccgccccagatatgcccctggttcactgtgtggttttgagcaagtttctcactatcccggagctccgtctcttcacctgcgccagggatataagacagatgtgttcctgccctcatgagtctcagggtccacgaatggagaggtcacctttgttggaggtgatagcgtagtgccctcagcctctcagggttcctctgcctaccacccatctttcctagcacagagctggcttggtagagagggagcccccctcttttcagcaagcaatcagccag

SEQ ID NO: 84804 - DNA, 1033 bp, Homo sapiens
ggcctcgggcatccagtcaagcctagatgaggggcagagcgtgggcttcgaagaggaggacggcggtggggaggaaggctccagtgggcccggccctgcagctcacactttgagggagccccaggatcccagccaggagaagcctcaggccggagaactggaggccggagaggagcttgcggctgtgtgtgcggctgcctacactgtgcgtacatgctccccaggctgttcccagccgccccagaggccctcctgacatcccagagctggggaagcgctggtggggtggaaggcggggcgccctgactgccctggaagggagttctgagcccatttctcagcatccccacaggactcgctctggtctctgggttccgttttgctgcatttcttggggcgtcacctcctgcccccagcctgggaagggctgcccggtctcatgcctgagggccctccactcttccagatagaattactggacactgtggccttaaacctgcaccgcatagacaaggatgtgcagaggtgtgaccgcaactactggtacttcacgccccccaacctcgagaggctcagagacgtcatgtgcaggtgccttgtggggcggggctcagggtgggaggcgggaccctgccgccagttactctgtgaagatgaggtccggaaggtgccctgctcctctctcctgctcctgaatcacacttggctccccctgcctggaacgcttttttcctgcacacccctcccccgcgcctcttcattcttaggggcctaccagacctccacttcagccacacctcttcaggaagctttccctcatccccgcacccccgccccacataccaagcgtgacggccttggctctccctaagtcggagtgccttgggggggacccgtgggttgttccccgttgtctccctgtggggggtgcacagtacatgccttagggtcgtggaaaggctgacttctgggcggcaggtggctctggaggacgtcttcccagggatcccgagggagggaagaatggggcaca

SEQ ID NO: 84805 - DNA, 1188 bp, Homo sapiens
ctgcaaatctagtgccgaatgactatgtccagattggtgacgatgggtgttgctgtttttcttgtcgtttgtgaacgctgtgatgctgtgtgcccaagtgggcagtcaccacccagcccttccttgggcgtctcccccagagtgctgtcgggaccacatctgtcctcaccctgtgggaccgcctggccctccctccctagcccttccagcctgggacacacacacacacacacacacacacacacgcacgcacacgcacacatcttacctctcatgcgtgttttaccttttgatgttcagagtggctcactggctgggagtccttacctcggggagagggggaggttggttccttggggggccaaagaaggcagggaatgcctggagggtaactggggggccaccatgaccccttctctctccagaaacagctgcttctccccccatcccagggtcccacccccaacccccagaggtggcccttgtttacagtgaggactcggccactgtgtctctgtttcctgaaatataaactgtagcgaccccagactgtagagatttttatgtgtttggatacatctgctgtgtggaaaaaaaaaaaaactacaaaaaccctaattttgtacatactgtatttttactattgaactgtattctagtggctgttcatgctccaagactttagttaccgagacatgaatactatccatgtaataagcacttgcctggaataaaatataaaactgaaataaacctgcactgaaacctgagatggagctgccagcctgcagcatctgggtcattttattgcaaaaggaggctgaggcctgtagggaagcatgtggcaggagcggtgagatcacctgtctcgaccctgtctgcccagcatagtcctcaagcggctctgacccggtgcctccgccgctctgaaaatggcagttctggtcggtctgaaacttttgcaaagcttcgtatttcctcagaccattttacaagcattatcttgtttcatctttcaacagccaagtgaagtaaataagccagacttagccccattttggcagataaggaaacaggattgaggtggcccagtgacttgttgaggccacacggctagctggagacttcgttggagctgcagtcagacctctgaactgggtacagagttcttacccagcatctgccacc

SEQ ID NO: 84806 - DNA, 1169 bp, Homo sapiens
cagggagacaagtgaacggtgaggtggaagcgcaggatcaggttccttagagggtagctcgcggcagaagtgtgcaaagtgaagaggctgctggaggagggatggggcgagaggcggagaagcccctgaggatgaattgtggaggacagggaaggacctgcacacctggttgagcttgcttcagtggtgcctgtcccaagagcccacactccttgggacgctgggcctcactgggcaggggcatggaccacaacaggtgcggtctccagcagcccccgtcaggctgggcccgctggttgccacggacttgcctctgtgggccagctgatagggagaggtttgtgggggctttgggccccaaggctgctgctcagggtgtcctgctgtcccttactctgtgtgccagtccctgaagaggaaggagaaggaatatgagcatgaaatggagcggctggcacgtgagaagattgccacgcagcagcggctggcagagctcaagcacgagctgagccagtggatggacgtactggagattgaccgcgtgctgcggcagacgggccagcccgaggatgaccaggcctccacctccaccgcctctggtgagccccagcccccacgctggccccccagccctcagatgttacacctcaaattccagcctccctggccaggctctttcttgcctgctagaaaagatggccctggccccagccccatcacattcccacgcccccacgagcatctacgcctccagccacttgcttccccgcccttctgacctgctccctgccccatgttccccacagagggtgaggacaacatagacgaggatatggaggaggaccgggcgggcctgggcccacctaagctgagccatcgtccccagccggagctgctgaagtccaccctgccaccccccagcaccacccctgcgcctctgcctccacacccacaccctcacccccactccgtggccctacctcctgcccacctccccgtgcagcagcagcagccacagcagaagacccctctgccagcccctcctcccccaccggctgcccctgcccagacactggtgccagctccagcccatctggtggcgacggctgggggtggctccacggtcatcgcccacacagccaccactcacgcttcagtcatccagactg

SEQ ID NO: 84807 - DNA, 1632 bp, Homo sapiens
agatactacttgcagagggcgccttgcgtaacgtgtgggtttggaaatgaatcggaagaagactcagcagcagccgcagaaggaagctcttgaggagctgggcccggtgaagtaggagccggggtaggcctcactcaggctgtgcagaagggacacccattctggtgctggtcacagaagcaggaacctcaaaggcctgtctacaaaccatttattcatttattcattgaggtgcttttagcgaagtctctgcttctgggcgaatggtggcgagcaagtaaaaaagcctgggtcttgtggcagatgacgaacaagtcattctacagaaggcggccgtatgggcataatagggaccgggcggcgggatctgttctggggagggaggatagctgttcctgaggaaaggacctttgagctgagacctgcaggataagtctgggtggcacggagcaaagtggaggccaagagcccaggggcagcccagtttctccagcaggagggaacaggatgctttttggaaataaaagtgaggcacggtggcttgcacctgagtcccagctacgctactcgggaggccaaggcagtaagagcgcttgagcccagggagttcgaggacagcctgggccacagagtgcgacctccgtctctaagaacaaacacaaacatggtcaggaggctgtcactcagagacaggcagaatcaagagctggtcctggagagaccagtggggctgtgtagactgggagctttggttgtttgctgagagcaggaagctgcaggaagaaggcagtggtccccagccagaatacggagtggcttggaggtggtcaaaggtttgaagacagccacagtaaagtggacagagacaagaaaaataggtaccaaaccgtgcatccaggtagtcacagaaaggaaatgggtttagattgaagcaatgtgggttaaagttagaccctggggaaaccttgcaggggtctgtaggcctgtgaagaactggactaggtgagaagaagaagcttttgacccatgtcactccctggcccagaactatatcctacccacaggtgggttgagttcaggactgctgcttccagcccccagcagcaaggttcaagtgagagctgactcacctagggccccttgttagagcctcagagccaggtgaaaagccacacacaggctgggcgcgatggctcacgcctgtaatcccagcactttgggaggccgaggcaggtggatcacctgaggtcaggagttcaagaccatcctggccaacatggcaaaatcccgtctctactaaaaatacaaaaattagtcctgcctggtggcacatgcctgtagtcccagctactcgggaggctgaggcaggagaatcgcttgaacccgggaggcggaggttgcagtgagccgagatcatgccactgcactccagcctgggtgacagagcgggactctgtctccaaaaaaagaaaagccacacaggtgtgtgtgtaggggcaagggagtttcctactgtcttcctagcagaaaatggggagaaactgttaaagccagaatgagggagggctgtgtgtggcctgggactggcaacagaagtgtcaagctgccaggtttcaggccagtacagagcac

SEQ ID NO: 84808 - DNA, 1024 bp, Homo sapiens
gggcctcttgggtgagggctggggtcaaccggctgcctctgagtcccaggagtcctcctgtctccctcctggtgggacggagggtgacaggagttgtgattatgagcacagatgtgtcctccagggggtgggcgcagcatggcacagggcgaacgtctcccagtctgctttaagacagtgttggggacaaacagcctgtggcaattttgcgggtggcggcgctggtcaggaaggccgtctaatcgagtcctcctccctgagcctcctatctgtctgggtttcaggatcggaaccagagaagtccacaacaaattggagaagaacaggtgtgtgtgtgtgtgtgtgtgtgtgtgcgtgcgtgcgtgcgcgcgcgacccgggccccggcggccctcggccccagcttccccggtcctgcctccccccgtcccagccccgccccaggcaccgctgaccggcgctcgcccctctcttcaggagggcccatctgaaagagtgctttgagaccctgaagcggaacatccccaacgtggatgacaagaagacgtccaatctgagcgtgctgcggacggcgctgcggtacatccaggtatggggcccggaggccggcgtcgcgcagcttcccccgccctccctccgccgcccctcccccggccgcgccccgccccgccctcacgccccggcggctcccccgcgcctccctcccacctccacgcgggcgctgagcacatggcccggctgacgtcagcggggctccctgcccgggagggcgcgcgtgcgcagaggagggcgcggctcccctcccgcgccgctcccgagcccctgcagcctcggcgtccccggggccgtgaggcgcgcgccgtgacgcctggtgcgagtcccgatggcggctcccgttcgcgcgtgttggtgcagccgcgggagggaagggcatggggcggcccggcgcctcctccccggccgcagagcctgggcgggagcccagattccgcccgaatgtctgtagctatctgcggggagggttg

SEQ ID NO: 84809 - DNA, 1263 bp, Homo sapiens
cctggagtctgcagactccaagggcctgggccagccccgtagccagggaaccagaatggtggcgcctgggagaggacgaggcaagcgggagatggaggtgcctccccttcccctgttggcagccagctcctgagtgggccttgccttcctgctgggctttcagcagggatgctgagcgggtggtggggtgcactgccctgctcagcccccattgaagagcccagccccttcttgtttgggagaaatggtcgctgctgtacctcctcctcctcaactgccctctctcacccagaaccaggcaggtgcactttccccggtgcctggctggagtggttgggtatttgtattgtctcaggctgagcggggtgtcactgaggatgtcagaggatgctttaggcctgaaggacaggacatgctggcgctgctgctggtggtggggatgttggggatttggggaaaatgagttataacacgagaagggtcagagagggacgaagtgtgtttgttgaatggtccctgaggaaaacaggcattgggacctagcctcggagtcaagagtgctgggctgtttccacatgtgtgaaatgagggtgatgtccctgtcctgcccatgatgtgacgtggggctcttgtgaggatccagggactgtcagcacttccttgtgagcacggcaagcgtcctccaggggtcaggaggcttgctgtgggacctgcagcgaatcactttgctccctgagcttcactgacttcatctgtgccatgcaggcactgcctgccctctagaaagtgcttggtaaacattgttaaaggccttccacggaagctgggatctgtcagcacacccccccctctggtgtgaagtcttgggtggctgggcctctgcccgcctctcccacctcggccctgtggtcccctgaccctcgctgccctcacccgccttcctcctcaccctgcaggctggcaggtggcctgcagcaccctctgacagctctgctccacctttccagggccgcctgtcctgcccgcagcccggactgtcagcccccgtgactgtcagcccccgtgactgtcctactattccctggtggcggggaacaggtctgcttgatttgttcactgctgtgcccccggcactttcccccgtgcctggctgggctggtaggctatttgtggtgtctctcgctgagcaggggtgtcactgagtactgactgggctagggtcagaggacgagttagggctggagttctggggccccgctgaga

SEQ ID NO: 84810 - DNA, 1017 bp, Homo sapiens
gactgtgggcggaagccttggcccctgggtcactgcagaggggcatgctaaattctttgggggcagcctctgggtggagcccagggaagcatgtgagggggcgcaccctgtctggtggatgtgcagaacattcttttaaagagcctaagcgcagggtgctcctgagggagcaccagccaccaccagtttggtggttctccagtgcacagggagagggttgccgctgggtgggaagggacaggaagctccggtgggctggatctggccaggggcagctcctcttcctcaccacctgtggagctttttcatgctgctccaggtgtaactgggtccttcctggcacctgtgaggtgtaccggcgtggttctgggtgagagagggcaggtgagaaggaggttgctacctcccaggtgagctttgggattgctttaaaatatggggaatgggggttggcttgcactctagggtcccacatgtccttgtgactcagggagggccctgattgttcctctgcctataaagagtggagtccatgtctcaaggccaatgaaaagttaggtctgtgtcagccaaaggaatggaggcagggtctgtgttaggccctgggatccagagccttgtcttggggtaggggaaggggctggggacaactgaggctgtgcccgactgagaagggccctgtcactggaactcagcaggctgcttggccactgcggtctgtgggaagcgggagcgcagggctggttttctcccgggcgtaacctaaggcctccccgcactggagcaggcctgcaccggcctggcatcgccccttcccgaagggctagggagatctggaagaggcccgctggctggcccagcccctgaactccggctgctgggaaaccactgaggcttcccctcccaggacgcttccccctccgcttcctcctcggcctcttccctctgcaggagggcggggctgggagcaggcctggctcacactccagttgttgattggccaaagggcctgaggcc

SEQ ID NO: 84811 - DNA, 1091 bp, Homo sapiens
ggcagccggcctcaaagagctaactctccgattgcacccgagctcccctaaacactcgagcccggaagacgcgggcgggcgggcgggcgacggggggtccctccctctggggagcgcggttccagccggccgcagcggaccccgcccccgcgccccgcccaccgccggtcgccaggcgcggggagggccgggcttccgccctccacgttgttgttcccgatttgggccacgccccccggtctgggctgcgggcgcttcgtgttccccgccctggccccggccccagaggaaagggtggcccatggggtggcacagtccgtatctccacccacatcgaatacgcgtggacaaagactggagttcaggggaaggaaagataaaggcctggttttaaatggaaggtggtgaaaaggaatggagaggccagggcacgactgcgggattccccttacggcatcccaccctgggttcgcccagtggccccatccgcacccgcgaatgtgacctgcagacactggccctttaaaccgaaggctggcggcgcggggtgtccatgtggagctgctccatgccgtgttgtcctgcccgcccattggctcgcggcccggtgacgtcccctaataggatgcgaacgcactgcggggggaggaacggagacaaaacgcggagccggactgccgctccgctccctccgctggttctcttgacagtctccagtcgccggcagctccgcccaggggcggatcccgggggaattgcgacagcccggcgattgcgggatttaggtcgcgagtgggtggagcgtggagacccagggtcaggccagtctctgccattcccaaggtttccctgacccggaatatcctggttggaactctgttaaatcttgaattgttcaccctaccctccctccagcaggacagatttcgtcgtgaacgacccaaacgcaccgccccggcccaacttgtggcttgcagccggggcggggccagcaggaaagcggaaccgcggcgcgcacaccccgctcggacctctccctccctgcccgggccacgtgtgcgcgcgccggatccggggggcggggccagcag

SEQ ID NO: 84812 - DNA, 1113 bp, Homo sapiens
aggaacagccgggcgcggtggctcacgcctgtcatcccagccctttgggaggccaagacaggcagatcacttgaggtcaggagtttgagaccagcctggccaacatggtgaaaccccgtctctactaaaaatacaaaaattagccgggcgtggtggtgcgtgcttgtaatcccagctactccggaggctgaggcaggagaatcacttgaacctgggaggcagaagttgcagtgagccaagatcacaccactgcactccagcctgggcaacagagggagactctatctcaaaaaagaaaaaaagaaaaagaaacttaaggaacacctttttagagattgctggcctttggataattccccaaacctgctaacctttctgctgaaaccaaaaggacttatttctctttctcttgagtgagtacatttgccagcttctatcctggctccacccccttggaacaggaagctggggctaaaatattaaacagccctcctattcattcccctcttctttcatgccctcacatcgccatttataggtatctcccacccccactgtccattcctcaactggggaaagcttggttgatgaggtattgtttttggccattttcaggctcctgtaggcaacaataggtccagaaacagcctcccccaccctttttttttttttttttttttttttttggagacggagtctctctctgtggcccaggctggagtgcagtggtgtcatctcagctcactgcaacctccacctcccgggttcaagtgactctcctgccttaaccacccccagtagctgggattacaggcgcctgccaccacgcccagctaattttcttttttcttcctttttttttttttttttttagtagagacagggtttcaccacaccacgttggccaggattgtctcgaactccggacctcaagtgatccatgcacctcggcctcccaaagtgctgggattacaggcgtgagccaccgctcctggcctgcagcctcccttctaaacccttgtttttgtctaacatcccctggctgctgtccccacatgacccaaataaacagatgatcatgtgaagccagtaaggctgtttgttttaaatagc

SEQ ID NO: 84813 - DNA, 1198 bp, Homo sapiens
taaaggaatccctgacatcgtcatccgtctcctgtgcctttccgctgggtcagcctcctcccaccaagcttctgacccactgtcatccgcagctgccactctagctgcagagctcgactgggctctggtttctcagaagagctcagaggacctggctcctccctctttgcttctgaactgcatttctttccttattactcagtgtccacacccacggtggctgcctggataaaaatctgcccctttctcccgtcacctttcatgccagacaaaagccccagtgagtaatggtgacctacccaggtccagctagcagctctccattcctgagtggcctggggcagaacagggtcctgcgagctcctggatcccaagtctgattccctttccctgtcttcccgcttatctgctaagcttgtttattggggaccactaagcaaagtgaatgattattcctgtctttaacgaggaggggtggagttccctctccatcttcacccacttctgggaggctttcagggactcaacaccccacactgatagcacttccccaggcctggcccagccagccaaagaggaggaccaggccacttctcaacctagctgatgcttggcagctttgtgaccttggatacaccttctcttgggaggtcagaccccatgatcccagctcttccagctatgacatcatgtgaggctgcaatttttttttttttttttttgagacagtatcttgctatgttgcccaggctggccttgaaatcctgggctcaggcgattctcctgtctcagcctcccacgtagctggaacttagggcgtgagccaccgcgcccagcttctggaaaggacatgaatggggaggtggaacttgattggacctgttctgtgagttcaggagaggtcctctgacaactcacttggggtggggaaaggaggtaaagagtcctgtggaaacttttggctgtggggaccccatttcactgatgattgaatgggtccacctctgtcaaaggaattcagagtcccactcatcattcagactgggggaatcaggctcagttgactggcccagccttaaatccactgaatttgtttttatctctacatagaaaaacggaattacagttgcttctcactgtccaatggggattggttcctggagcctccctgaatacctgtccatggatgatgctcaaa

SEQ ID NO: 84814 - DNA, 1034 bp, Homo sapiens
tgaacccgggaggcagaggttgcagtgagccaagatcgtgccactgcactccagcccaggcaacagagtaagactcagtctcaaaaaaaaaaaaaaaaaaaaaaaaaaaaagcagctgggttcagtgttctgttgttgacccttgtttggggttcctctggttggctggctaccatgcatgtcgtgtgttgcttatatcagaaggtgagggttctgtgtggtgtagatgctgtcggttagccggccttgcttctcacaaggggcgtttctggggagaacgctggggtctgtgtgggctcaaggaggatcccgtctccccttatgtttctggtacaggatcagatgtggccgcccagcagttgtgcacataggaggagaaggggccaggtgggaaaagtaagtcaagagccctctggaagaaggagcatttcaaaggtgcagcaggtttatggcgatagagggggtcccctcaggaaagggtcacggcctttttagggaagttggtgcacaggagacttggtttgctgaatgggcactaacctcggtaaaacccagaagaggctgaatagaatgaactgactcctgcctcctgcgggcagcactgatgtgtcgaacctctctagtaatcccgagtacgcggctctcggtatgagtgccagcgcagtatcagaggcccggacggcgcctgccccactgatgatgggcatcacacgtgccccggcgttcctgctctgttctgtgacattcacatgctctgctgtggctcagccaaatgactaaaacagcggttggtgttttaaattcctggttggagcagctaatgctgcctggtggaggctgtgctttgtactccacggactgtgttgtgactacagaacgcccttgcccctcgaggtgccctttgagatgtagcctgtctgccggtctcaatccaagcagaagcgtgggtttccttagggaagaggaagattgtgggtgcttccctcacaggggaactgaaaggagaaggggtagaggaaaagtacagtcggact

SEQ ID NO: 84815 - DNA, 1036 bp, Homo sapiens
acctgggaggtggaggttgcagtgagccgagaatgccactgcactacagcctgggcgacaaagtgggactgtctcaaaaaaaaaaaaaaaaaaaaaaaaaaaggaacccatgagcaggccagctttcagtctggagccgagtgccttctgtgcatttggatgtttccatttccttccctgagaagattttcttaggctacctagtgagagaacattgaaaatatttttaaaggacatctaagcattgttttggtcatgcatatgctttataattgtgtgttgtttcatagcatatacctctggtacaggtgggcaagtttttctttgaagaaatgggttattgactcatatgtcataaccttgagtgttactctcccggtgtccagaggtcacattcatgttgcggggttggtatgaaattaaatcttggtgatgtgaccctacattctcttctggtccctagaatcggcttctggtctcctgataactgaagtggagacagaagttgagcctgttgcccaggcaaactaaagctgcttttgttcttcggaatctgctttgcctccgtcagcctgcttccttccccacacatgctggccgcactgtccccactccagacctctgctgtgtgtcctgggcagggccgcgttttggcagtaccctttcaactcatcctaagcttcgtgtagattactttagtatatattttttataaaacataaagcctttcctctcgatggaaatcaaagcttaccatgtgagcactcgaacttctaagttgtgacaggaataacaaaactgcaaggagtggaaaagatggaaaagcctgtgggaaatccgaggccttttgaaagaagggagctgatgacttcacgaccagctcctggagcccctcctttctgctgaagccgcggcatttccctccgtggccacacgagggcacccttggcccttttatcaaagcgccttcacttccccgtgggaatggagacaagtctgtccacggtgttttcttgaaatacccagttgctaccca

SEQ ID NO: 84816 - DNA, 1102 bp, Homo sapiens
ttttggtagagacggggtttcaccatgtgggccaggatggtcttgaactcctgacctcaagtgatctgcctgcttcggcctcccagagtgctaggattacaagcatgagccaccgcgcccggcaggtgccattggtttttaaagtggaacttgagtccctctagtgggtagggtataattcaccttcccagcttgagatagaatggaagatgccagtcgtgattttcttggaaccagctttgaaatccagtcttctcatcagcgccggtgtcaccctccccagctaaaaggcagtgcttagctcgccgccggcttggtcccgacatcagccacgattcaggagtcctcctcctctgcccacgtgatcttagtggccctgatccttcctcgcatgtcatctcatggctgtggttcaccggctgctttatctcaagcctcagccaatataaactcaaactacaagttgatgatgtttctgccctgcagttctttccagccaagaacacagtgcccccagggtcctcgagttgtcatgaaataaataattgtgcaggtctgctttgggtaccacaggtacacgaaggacgtttagcagttggaggagttacatctgatagccagaacaaaggcagtgcggtgcggctggaaagaacgtgggttcggcgttcagtcctaactgcagttactgtgtgaccttgagctgtgtgacatagcctttctgtatcttcgttttcctggagatgcctaaactatcttgtggggttcttatttttttaattaaaaattttttttttcttaagagacagggtctcaccccgtttcctgggctagattgcggtggcgcaatcagagctccctgcagcctggaagtcttgggctcaaatgatcctccctcctctgctttcagagtagccgggaccacaggcatacaccattgtggctgactagttttaaacgtttttttagagatggaggtcttactatgttgctggggctgatctcaaactcctgggctcaagtgatgctcctgccatggccccccaaagtgctgggattataggcgtgaatgactgcaccttgcagggttgttttaagtgctgga

SEQ ID NO: 84817 - DNA, 1209 bp, Homo sapiens
gttgactgaccattgtatatgggaaagttgggtcaggatgcaggtgaaggagccatatttgagagagggaagttttcattttagtcctgagataactgggtaataagttgtcgattttgtgatttctgacttcctcagaactctgaaagtatccctgatagagttcttgtcaggttggtaaagatgtattttcttattttaatctctagaaatgatgaagcccgtccttacttttggagaaagagtgtcgcaggtcagctttagcataatgagaaacagcaatatcctgactttactggtcagaatttgtgagcaaaatgatcactccttctgtgagaagagatgggaagtgctgcccttttagccatgcttgtaggtgacctttgctgtacagggcgggctggcagggagggccaggttgcagtgagctctccatggtcatggcctttgatgttgggacggggaatggggagtctgattctccacccccatcatcctcccacacaccggcttaatacgcttcttccccagcttaatacgcttattgtaagctccttactgcaaagcgttaggctctcagtagactagaaattatgtttctcatgcaggatgattgagtaataacaatatgactgtcttaatgtcaatatgaatttgtctcatcttgtctgaaacataattgaacaagttcaggttcagacaggtcttagagtccactattcatttctcaagagcaggttcttcaaacacacacacacacacacacacacacacacacacacacacaccctttgttttttatccttccctaacagtttcctagtatagaataaactggttaggttgttgtgtatgtatgcagtgtgaggccgctggttagttcttattagaagacgtcccccagtaatcagaacctgtggtgtctgcatgtgtgcgtgtgcgctgtcagtgtggccaggtacgactggaatgatcagtagcagtcgtcagattccttttagcagaaaaagatcttcaaacctgacttggtgttttttcttttttatcctttttgttgttgttgtttttgagacacagtctccttctgtctccaggctggagtgcagtggcgcaatctcatctcactgcaacctgcacctcctgggttcaagtgattctcctgcctcagcctcccgagtagctggaattacaggcgcggccaccacaccc

SEQ ID NO: 84818 - DNA, 1060 bp, Homo sapiens
gccagtcttcaatagtttctgacctatcaaatagtttttgatgtataaaaatgtcagtttcatacagttttaacctaattggtgattttagaggctcttaaattttgcaacaatcatagtaataattgattcgtggaacaattggcaaagggaaatttgaaaaggaacaggataactacctagtttcaaagaaccaccccttccccctttaggttacttacagttacagagagaagtgtgggagtttacaaagtaaagagtttgctttggagaaagcacaggccacctccctgaccaggtgctcatctcctgatgtgacgcacctggaaggacaagcagcgcctccgtgctcttcacgccagaaatgtgtcatctgaatccaatgacgtggaaacttcagacacacccagttgagggactgtgtaaaatcagctcctcaaaaacattaaggtcatgagagtaaaagaagactgaggaactattccagattgaaggaggctaaagagacatgacaagtacatgaaattcgcaatcctaaggggccttgtatcggggagaatattgggataaacaggtgaaatttaagtgtggactgtattccagataatagtattgaatgagtgttaagttttagcaatttgataattcctctgtggttacaaaaatgaatacacttgtttccgtgggggcgcagcggctcacacctgtaatcccagcactttgggaggccaaggcaggtggatcacctgaggtcaggagttcaagaccagcctgaccaacacagtgaaaccctgtctctagggaaaatacaaaaattagcctgttgtggtggcacatgcctgtaatcccagctactctggaggctgagtcaggagaatcgcctgagcctgggaggtggaggtgcagtgagctgagattgcaccactgcactccagcctgggagacagagtgagcctctgtctgaaaaaaagtctaaaaaaaacaaaaacaaaaacaaaaaacaatacacgcttttaaaatggacatgccaaaatattacagttaatgagacatgttgatg

SEQ ID NO: 84819 - DNA, 1047 bp, Homo sapiens
cgaggtgggcagatcagaaggttaggagttcaagaccagcctggccaatatagtgaaaccctgtctctactaaaaatataaaaatgagctgggtgtggtggtgggtgcctgtagtcccagctactagggaggctgacgcaggagaatcgcttgaacccaggaggcagaggttgcagtgagccgagatcatgccactgcgctccagcctgggtgagagagtaagattccttctccaaaaataaaaatgaaaataaaaataaagattgcaaaggtagtggctcctacaatctgcgaagactgtgtttctgaggatgttccatgcctttaattgattagtgtttactgtaatcatgtatattacatagacaggaaagaggaaaataccgcatgattgtattgctcccattaggatggtcctgtgatagaacaaaacggattcaaatatggcttttgattagaaaacagatgggttcagttctgtcccatgaaccagaataaatttgttgcctcgtcctttcagcagtttaggttcttggaatcagtctcccagtgacagatgtgaggacattgagctgtcaagaacttaatgaagggaaactgagatcactaaccagttgcagaggagggttaaggccattccttttgaaagctaattattttggacaacacacctgtcattaagcaacataaggtactcaaaaagagctatttgtctcgcttgacttctcaccctgccacatgttgttgaaatgatggataatatggtagttcaaaaactaaaagagctttcaatccaaggatttagctttgggacatagggaaggttttatttattattattattgtggtaaatacacgtaacataaaatttaccatctgtattagtccattctcacactgctataaagaaatacctgagactgagtaatttgtaaagaaaagaggcttaattagttcacagttccacaggctgtaccggaagcacggctggggaagtctcaggaaacgtacaatcatggcggaaggtgaaggggaagcaggcacatc

SEQ ID NO: 84820 - DNA, 1053 bp, Homo sapiens
ctttgatgaattttgagttaacttttcatatggtatgaggtaagggtggattaaatatttaaatgtgaaaagcaaaaccgtgaaaatgctaggaaaaaacaagtaaatatttgtttaatctttgggtggatcttctgtacaggagaaagaaagcataaagaaaaagtgacagattgggctttataaaaaggtaaacaattttcatgtttaaccacaaaaatggaaagtaaaagacctgggaagaaatagttgcatgaagtagctgtttgaaataaaatattttagtggctatgattttaaaatcctaaatctagcatactatttggaaagtaaaaattgcaactaaacattctaacttagagatagattacattcaaacttggttcttggggtgtacacatttttcaccagggttttttgttgtttttcagggagtaaactcacgaaatcctcgaagacctccgcctagttctgttaatacaggaggcatcacagagatcatggcagaaggaggtgaattagagtttgttaaaaggatcatccatgacagtctacaacttaaaaaaagattaaggtaagtctgtttttacaacatagagtccatctttacaacacaggaatatttacccgctatgtagttctcttttttttggtggcgggggacagagtcttgctcttgttgccaggctggagtgcagtggcgtgatctcagctcactgcaacctctgcctcctgggttcaagcttttcttgtgcctcagcctcccaagtagctgggattacaggcacctgccacctgtaatttttgtatttctagtagagacaagggggtttcaccattttggccaggctggtctggaactcctagcctcaggtgatctgcctgcctcgacctcccaaagtgctggaattataggcatgaggctctgtgcccggcctcccctgtgtagttctaaaacaaactatgtcactcagagcaaaagtaatcctagtgctcagaagaacaagcagataaagattgcaggctgggcgtggtggctcacacctgtaatcc

SEQ ID NO: 84821 - DNA, 1050 bp, Homo sapiens
tgagcattttaggtgaattagtcatgtattcctcgacctctgcttgtgtgttcttcattttttatacaacacacgaaagaggaggccagcaaggtttcgatcctttaggaagttggatctaattaggaggtaggactaacatacacgaatgactagggaacccagtagccataacatgtatgacatcaggtaccagcttgtgatttctctgccaaaaaatacaaaaattacagaaaatacaaaaaatagccaggcatggtggcatgcacctgtagtcccaggtactcaggaggctgagcagggagaatcgcctgagcccagaaagttgaggctgcagtgaaccgtgatcacaccactgcactgtagcctgggcgacagagtgagaccctgtctgcaaacagaattctgagaagaatggtgttttcatgattattgtaacctttccctctggtgtgtagaatgtgttttgtatttttattttattaggcacgggggcatcttgcatctaccccttacttggagcaaccttgaatggctggtatttcctcgcaacagaagtggatgatatgtgtttcaactatgcaaagaaaaatgtggaacagaataacttatctgatctcataaaaggttagcgccacagaatgaatgcctccaaactttgtgtcttcacctgcctttttagtttaacgcatttcattacctttttctttaatacacagacttcggtaatttaaaaaaatctggcactttgtaattgggtttgctgtcttgataccagaattaactcagaaaatagtaactacagttgatccttatgatttgtggattctttttttgtgaatttgcctatttgcctaaatttatttatttatccattcatttattttagtagattttcttgaataaatgtttctttattcgctataaccccttagaaacatttccagagactttaagtgggggttttttgtttgtttgttgagtttattttttagggcatttttaggttcatagcaaaatgaagtgaaaggttcagagattccctgtata

SEQ ID NO: 84822 - DNA, 1050 bp, Homo sapiens
atctcacagtagcattgtgatattggtattactgtcctcatttcacagcagaggaaacactttcatagaggtaaatgacttgttcaaagtcacacagtgaggagacgacgagacaggaatttgagccgagtcatttaatctctgtgctccatatacggatatgcagtgtttttggtggaggattgtactgattttcataagctgtgactgtgtgaaacactcgtgtatgtgccactgggatgagtgctctgtgtaactgtgtgtgatctccctgggaggttcggatgggtatttggttctgcctgtttgccgtagagcttgtacaacatagtgaatcttactaatcagttttacttccttttctttattcctcagccttaattttaaagaccccgaagcagtcagagctctgacgtgtactctcctaagggaagattttggactttctattgatattccattggagagactaattcccacagttcccttgagactcaactatattcactgggtagaagatctgatcggtcaccaggattctgacaaaagtactctccgaagaggaattgacataggtatatcattttaaattcttttttggctaaacagttttcataagttttgcgagatcaaattctttgtaaacttttctactgggtatttgttgttgtacaaaagaagctggctacagatacaggttgagcatccttaatccgaaaatccgaaatgcttcaaaatctgcaacctttgagcactgatgtgttgctcaaaggcaatgtgcgttggagcgttccagatttgggggttagggatgttcagcctgtaaatatagtgcacatatttcaaaatctgaaaaaaaaattgaaatccaaaacacttctcatcccaagcattttggattagggatcctcagcctgcattaccgttcttttttactacacctggccttttctcccactgatttctcttgagaagggattgtcagtccaaacagggagcaagaggttaagggaagtacaaaatgaaaatgaggctcttatttatatagct

SEQ ID NO: 84823 - DNA, 1974 bp, Homo sapiens
ctgtgttttttttgttgtttttttttttttttttttgagacggagtcttgctctgttgcccaggctggagtgcagtggcgtgttcttggctcactgcaacctctgcctcctggggttcaagcaattctcctgcctcagcgtcctgagttgctgggattataggtgccaaccaccacacctggctaatttttttattttttatttttagtagagacggggtttcaccatgttggccaggctggtctcaaactcctgacctcttgatccacctgcctcagcctcccaaagtgctgggattacaggtgtgagccactgtggccggccttagctgtgagattttatgtaattttcttagctttactgagactgaatcttctcacctgaaaaggagggatgagaggacatcctcatgaaggttagcagttgtgtagaatgactagcattctatggacactgagttcatggtaggtgctcatattgttgttaagcctggtataagtaaggtggcaaggattgctactctgatatcttatttttctcccctgcatgtcactgctttgttataatcatatctgaccattgcaattagattttagtttgtgttttttcacaataatcagttccatagggacagcctacaatttagttcagcactgtcagttcagcttgaatagaatgtgacacttaaccgatttgtttttatttatttatttgtttatttttgagacggagtcttgctctgtcgcccaggctggagtgcagtggcgcaatctcggctcactgcaagctccgcctcccaggttcacgccattctcctacctcagcctcccgagtagctgggactacaggcacccgccaccacgcccggctaattttttgtatttttagtagagacagggtttcaccgtgttagccaggatggtctcgatctcctgacctcgtgatccgtcagccttggcctcctaaagtgctggggttacaggcgtgagccaccgcgcccagccctatttgtttttatttttatttattttaactgattttttttttttttttttttgtgagacggtgtctcgctctgtcgcccaggctggagtgcagtggcgcgatctcggctcactgcaagctctgcctcccaggttcatgccattctcctgcctcagcctccggagtagctggaactacaggctcccaccaccacgcctggctaattttttgtatttttaatagagacggggtttcaccgtgttagccaggatggtctccatctcctgacctcgtgattcacccgccttggcctcccaacgtgctgacattacaggtgtgagccaccgtgcccggccaactgatttgtttttaaaccaaagacctagcatggaagggctttatcatgctgggtagactgtaccatttttagcacctcagtgaccatctaaagactagaaaccaaccttggagtaacactgggaggcttttggcttttgtttttgttgcatcaggttcagcttctacaggattagaatgattgttattttaacaatggattacagaaatgtgtctgttcaaaatccatctgtaatggtaatactgtattcatcagtggtagagcaggagtcattctggggaaatcggccatgagcctgttgacaataggctattttgggaagctgaatgtgttaaacaaacaacaaagactgaaaatgaataaactgctgattttcacgtgagagctaattttagttcctgggcctccctgtgatctctgaaatgagaatgagaaaagatcttgcctgtctgtgttcaggttttttgaatgtcccagagtgctaacgtgacctagattcttaactagtgaagtcgagtgacttgactttgcccaacaaaagtatttttgacactcagactagtgtctggatcttttcagaaaagaaaataaacaacaaagtctaacaatcagctcttcattggtgttcactt

SEQ ID NO: 84824 - DNA, 1054 bp, Homo sapiens
tgaactcctgaatcaggtgatctacttaccttggcctcccaaagtactgggattagaggcatgaggcaccgcacccggcccccattaatggtttttaataaatatgctgattttctttctctctttctctccttaagatggctctgagtaaatcaatgcatgcaagaaatagatacaaggacaaacctcctgactttgcatatctggcatccaaatatccagattttaagcagcatgttcagataaatctgaatggaagagtgaggtaggtaacggatgaaaaatcactgttattcttgtgtgattcaaatggatatgatgtaatagaaagcccacctgagtgttaatcttagacatttgattaaacgtcccatgcgaccttggacaaatcacttaacctctcttggtctcagctttttaatgtataacattagaggaatggaccagatgcttttaagtttccttctggcttaaaaaaaaattctcttgatgtccaaattgttgcttaccctacggaaatcccagagtaacttcagagatttacgattgtgctctttgtgatctaaaacttagtgactggtgaggatctaaacacttttttttttttttttgagacaaagtctcgctctgttgcccaggctagagtacagtggcatgatctcggctcactgcaacctctgcctcccaggttcaagtgattctcctgcctcagcctcctgagtagctgggattacaggcgcccgccaccacactcagccaacgtctgtatttttagtagagacggggtttcaccatgttggtcagactggtctggaactcctgacctcgtgatccgcccaccttggcctcccaaagtgctgggattacaggtgtgagccactgtgcctggcctaaagatattttaataagtgtgtgtttattttgatgtgaggcaggaaaataataaccaggacatcaggactgatttcacagatattattatttaagatgttactaaatttaagaagttgatttatttttatttatttattttgtttttagagataggatcttg

SEQ ID NO: 84825 - DNA, 1029 bp, Homo sapiens
agcgtgagccgccgcgtccggccggatcctcagttctttcgctgtaaacgagagtactcttccccaacccacaggcttatatctcttacaattcagtgagtgagacatcggctgaggacacacctgttgcacaaaaagggctcactgcacgccatcacacccaagtctcgtaccctcatcttcataacctgcccaatcccagtgagtgtgagaggtaagtctgcagcagggcccggaaaacttgtttctttttcttttaaataagttttctcgcgaattcgaacgcatgtcctcctcctgccatacctcaaaggactccgctcgtcaccacgcccccgcgccttctgttaggagcagcaaaccccaggtgtcgcgagggtttcttctttcttcaagatcagccacaggtcgcgcgagagggatgtgtccaatcacgaggctagatggcttcacaagatggcggcgcgctgggagcgtatcatctgcgtttctaggagcttcgctatgcggctgctttaagattctagggttgtacaggcccacgccagacacgacgtctggcaggaacctcggcctcagaggtgggtcacttatatctctcacgcagatttactatcatgggtcacttaacccgtggatcacacgggttcctcattcttgagttttgggctagtgaggtgccgacttcggggtctaggaggggagacctgatgtggctgtgtgtgcgcacgcgggggtgttgagagtggatgagtgggaggagttggcgaatagaatagagactaggactgaagtaggaaagactccccggtgtttaggaggtttagagagatccaaaactgaggcgggaagacaaactgagctgataaaatgagggcatggaaagaacggcagtggcaggactagtgggaaacgtcggatttatgagagaaggcgaagagagaagatgtagattggtgtggaagtgggagggatctgtgcagaaagaatttgaagttctgaaattggaatttagactgttttacaggc

SEQ ID NO: 84826 - DNA, 1088 bp, Homo sapiens
ggcgctgccctcgctcctctcctcccgggcccggctttgggggctgccggcgcctctgcgacccccgccccgcggccctccccaagaagggatcgccctcctccctcggtgacttagcaagaaaagtattcttgggttggaagggcgtggggaccaggtagctctctgatcttggggaaaaggatcggccctgctctccccggccgcggagacgagcaccgcagtccccaccccaccctcagttatcggctcggggaccggctcagccccgcgccgccggggcactcatagggccttccaggcattccgtccccgactggtccttaagatggggttgaccagcggagggtggcccaccgtctccctggcccccggtgcggcggtccagcctcagcacccgccgaggagaggcagcccggcccaccgagcaatccgcagcatccacccaccgaatctggcaggattttctttctgccaccggctcctcggtcgggagttgccttttgatgctgttaacattcagcttcgaggctccctgccattccccttcgtctaatctcatctccctgcccctttgggaaacgcagtgcctctgcatatttaccctctttagcctcccacatgagaaaatgcctttgaggtggtcgacacattttgactctgcacctctaaacgtagcagtagaggggaagaggttttccgtatttagtaggagagagcaaggtaccatagctttatatgttatgctacctttcttcagtgacttagcaagaaactccttgggaagagggcaggaaattttcttttggggtttgggcccaatttatatcagtcttttggttaagaaaatacgcctttgaagaggaggaccagatttgtggtctcgttctcaatgggcgatgtcatgccaaggtcccccctccctctttccttaagtggcagtccggacaaatagagatattactgatattcccatctctcctttaagcacacagtcttggagtttcataaggttttaaaggccaaacaaacaatttgtgccatttttggcaattctgtttttgttgggggggtgggttattttgtgt

SEQ ID NO: 84827 - DNA, 2377 bp, Homo sapiens
tagttctgtatagaactcttaatgagattggaaggaattttttagtacaattttttgttacctgtttttccagataaaatatctctagtgtaaagagattttgagatgtttctgggaaggaaaagtcagaatcataatttatgcttttctagctagaacatccgtgtctttttttttttttttttttttttttgaggggaagtcttgctctgttgcccaggctagagtgcagtggggtgatctcagctcactgcaacctctgccttctgggttcaagcgattctcctgtctcagcctcttgagtagttgggattacaggtgcctgccactacacctggctaatttttgtatttttagtagagatggagtttcaccatgttggtcaggttggtctggaactcctgacctcgtgatccgcccgcctctgcctctcaaagttctggaattacagatgtgagccaccacacccttccctattttctattttttaaaaataatataaatgtttctctctcagttgtatactaagtaacagagagacagaaagtgtgtgtgtgtgtgtgtctgtctgtctgtctgcgtatatgagactttatggcttatattttaagtatccagcaaaaataagaccctcttgtttacatgtggttcatgttattcataatttgtcatctttgtgaataagtcatggatgctatagaaattgtcaacattaagatgaagatgtctggccagacatggtggctcacacttacactcccagaactttgggaggccgaggcgggtggatcacctgaggtcaggagttcaagaccagcatggccaacatggtgaaaccccgtctctactaaaaatacaaaaaaattagccgggcatggtggcgcacacctgtagttccagctactggggagactaaggcaggagaattgcttgaacccgggaggtggaggttgcaatgagccgagatcgcaccattacgctccagcctgggcaacaagagcgaaactccatctcaaaaaataaataaataaataaaaataagatgaagatgtcttaaaaaacccaaagcaaaatattagggcagagtgaattttcaatatcttcccattgagttctaaagcagtgagtcatgcgctcttttgccaaagggacttgaggctcggttggttttaaaccaagctggccatttctgcttgtggtcctaaaatattttttacttgcctctaagtccctgttaacgaaaatatttcattatgacaggtaacttatttttatgtgctttggaaagagggaaatagttaagttttgaagtggaaattctttgccactgtttttattatgtcatctacagtacaactattactttttttttttttttacttagaaagttgttctatttaaaataaaactagtggtatacaatacgagttctgaaaaaaagacagacctaccgttctccagaagatgcttagctgtaaattgaatcctcgtcattgaaggtcaaacattttgagaaatctgtatttcatgaagaaagatgctgtattatgtaagcgtaatagttaactgcagtgaaggctttttggattgttctttgttgctggtttggcatggcactttttggctagtcattgaaatggaaccttagtttaacttctgttacatatgtaatttttaaccttggcatggcagtcatagaatttaattgatatttatgaaatgctttatattcattggtggcaggcatcataagcacttattattttatttcttgttttctttttaaaagatggtggcttcttgttgaaacttacctagataggactaatctgcatttgtcaaggatacttctggaatggtactctctattgtcttttaacattgtcataaacgtttctctagaactttctaaatattgagcttggtactgattttcatttgttcttctgccagctactttttgaggtagattggtatttttatggatgagagaactgaaatccagagaatttcttttcctgtcgaatgttaggttagtgactagaataaggtaaatattgcagtcacagaactcttgggtactgctttgtaaaatcacacattccttctttctataacgattggactccttaatctttgttaaatggtgaaagttggtggtatttattgcctgcatcatttaaattggcatttattaacatatggtcttgtattgttgactgctttgcatgcataaggcttttggcatttgagtagcttctcccaaaaaatgcctaatactgctttacagatagtattaataagtgaataagtactagttgcatttgactgaatggttatgtgaaaggaaatgtgctatcctaaagatctttgtaat

SEQ ID NO: 84828 - DNA, 1304 bp, Homo sapiens
ataattgggccaggcgtggtggcttacacctgcaatcccagcacttcgagaggctgaggtgggtggatcacttgacgtcaggagttcgagaccagcctggctaacatggtgaagccctatctctactaaaaatacacaaattagccgggcctggtggtgcatgcctgtaatcccagctactcgggagactgaggctggagaatcacttgacccaggaggagtattggagtgagccgagatggcggccactgcactccagactgctgagcgacagcaagactctgtctcaaaaaaaaaataattggagtgaacgtgggaggtcattttaggtggagggaacagcaacataaatagtcacagaagcatgagaaactattttatgtatgctggtaatagtttggcagaggggattgtagaatttgaggttggagaggcacgtctgagccagattgatagaatttgtatattgtgtagcttgtaggcaagttggaagtcattaaacaatttcaggtaaaaacaagcattatgagatgatgtatattttggagagattatgcaggtggcaataatgaatgtggattttggaggtcatgtagacttcttcagaaaataatgattagtgcttgaagcaagacagtgacattaaatgttgttgagtggagaaaggtttaggaggtccggttgtgaatgagtagtgtgatggggagaggcaagttgaaacaattcagatttgtagtttgggtgactgagtggaactgagaaacgaggtgttattagccatagcagagaataagaggaggagttgtatagaatattacataaagcagccagataaatgttcctgaaccacaattttcaagtcactttgttgccaaaaacccatcatcagctttttactgtctttaatgaaaatgcaaagaacacaatggcaaaactatggtactgaataggtgtttattgaatcctaaatgggcactcaaagacttctcttacatgtcctggcttttcatcctgtttcttattgccttccatgtctactgtgattcagctttgggaagatattttctgttccttttgctgctttgactccctgccgcgccccccttacttacgcttcaaatctgcctaccaggttttccatttccaggcagtcttttctaattttttccacctggaagaaactttcttttctctgagttcgtaatcttataataagtacctatttttctcttcttctagcgtatataaaatgtattatctgacgtgtcaagtgagttaatgcatttaaagagcctaggaatggt

SEQ ID NO: 84829 - DNA, 1031 bp, Homo sapiens
ttttaccatattttctttatgtttagactacagaaatgggcaattaggttgtttacagctttttactattacagacaatgctgcagtgaacataaggaaggtgtttgctagtgagatgatatgatgtgtttacttgggctgggtgtggtggctcacaactgtaatctcaacactttgggaggccaaagcaggggattgcttgaggccaggaatttggcaccagcctgggcaacatagtgagaccctgtctctacaaaaaacaaattaaccggatgtggtggcatgtgcctgtggtccctagaagtttgaggtcgctgtgagctgtgcttgtgcctctgcactccaacctggacaaccgggtgcgacctcatctctaaaaataaaaaatgatttgtttgtttttgcactgcagaattcacccttaggttaattaaataaaatatttgttctttggtaatatttatgcttcgagctgaataaagagaatggataatattattgcatcaattttagaccataatttcctaaacttcattctgttttcttccgtctcttcaaccattcaaacatatttattcattatctagccaggggttgaatactggcagccttgtatttctctttgcattgatggttaacatttttttgagccaacatttaaaaactagctgttttacataaagtctctattttctggttatcctgaaaaattaggagctctgtcaacaggcagcccacattttcccatgacagcagttaacctaagctgaattacagctgccttcttgaatttttttttccccctgctggagatggggtctcactctggtgctggggctggtctcagactcctgggctcaagtgatccccctgcctcggcctgccaaagttgtgggattgcagggatgagccaccgcgcccggctcccgctgcctgcctttagatgagcatacgctctccagtggaacaagttgctggtcctccttgttggtgtttattatcgcccttgtattgttcatggtggacagata

SEQ ID NO: 84830 - DNA, 1065 bp, Homo sapiens
gtctagtaggatcgagtattcatccattgttcctcaaatattctacatacaaatgcctgctatagccctctgaagctccttcccttccccttccctttcccctttctttccctttcctttccatctctttctctttctttcctcttatttcttccccttaagtttccttatttacatgtcattcctgctctgagacagggagcggactatgtcttgtgactttatataccttatcactattacagttggttatgtgatagaaaccttataaatgtggttctagagatagattttaataattgcaacattagttttccctgtagaaaaaaagaccaatttatacatgagatacaatatttctaaaatagttatcctttgttacttgttcggttagttactcagtaaggtgccagactggcctgctgagtgcaaatgtgaaacaagaaaggagtgatggagttggtgttaaccaattttctgttcacttgacaggtgtgggattatgagactggagattttgaacgaactcttaaaggacatacagactctgtacaggacatttcattcgaccacagcggcaagcttctggcttcctgttctgcagatatgaccattaaactatgggattttcagggctttgaatgcatcagaaccatgcacggtaaggggtagaggatagtgctttaacagtaatttctatcatggtacttcagaaggaatattgtttctaacagtgtacagtgttcctttattcacctcttaattgtcagtattggtggaagagcataccatgtagatagtccagggataagccacagtagttgagagtgctttctattaggaagttttaagtatcttttagtactttacataaaatatttgtatgagtatttcttggtaagaaaaactgccaggtcatttatctgtatttgagttaaaaatggttttgtttgtgttttaatttttgttagttgggaaactgaagtccagagagagtaggtcgagtgaaaacgagcccagattctcttgctcacttaagtgaaatgagctgagcgcacagacccc

SEQ ID NO: 84831 - DNA, 1050 bp, Homo sapiens
gttccagctacccgacaggctgaggcgggaagagctcttgagcccaggagttcaaggctacagtgagctatgattgcaccactgcactttagcctgggtaacagagcaagtccttgcctcacaaaaaaaaaaaaaaaaaaaaaaaaaaatgtttccctagcgttcatatgtaaacattcagactcactgaggtaagtatatgaatatattcaaatgttgataatcgtgatgccttttgtttttaaaccatttgtacaggttgaaatttaatcctaaatggagttgactatttccttgtgggttgttgttttactgatttttttaactttatcgtgtaaatccaggtttcttatccaatttgtataaaatccagtgtatttagaacttgctttgacatagtgaaaccccatggtaaaatcccatggtcaattgatgtttcattgctcttggtggtatattacttcataatatattgctgttatgtgttttaggccatgaccacaatgtttcttcagtagccatcatgcccaatggagatcatatagtgtctgcctcaagggataaaactataaaaatgtgggaagtgcaaactgggtaagtaagtttagttgaaaaggcatcagcggccaggtgcagtggctcacacctgtcatcccagcgctttgggaggccaaggtgggcagatcacctggtcaggaattgaagaccagcctggccaacatgatgaaaccccatctctactaaaaatacaaaaattagccgggtgtggtggcgcacacctgtattcccagctacttgggaggctgagacaggagaatcacttgaacctgggaggtggaggttgcagtgagccgagatcgtgccattgcactctagcctgggcaacaagagtgagactccgtctcaaaaaaaaagaaaaggcatcagcttaaagacatatttataaaaaacaaaattgtgttctggtgttgcagtcacttcgactttaacccggaatgatcattatgacagtcatattaaatatactttaaaactaagtttgatctgtac

SEQ ID NO: 84832 - DNA, 1333 bp, Homo sapiens
gcagtgagccgagatcgcgccactgcactccagcctgggcgacagagcgagactccgtctcaaaaaaaaaaaacaaaaagtaaataatctttgtgctggtatacctctgttaggctgaatttggttgtgcatagaattacacttgatttttgtagtacaaagttactagttttactcagattagtagagcatagcttttttccaatatggctggaaatacttttaagtgtgcatttagttttgaaagattttatttcttatacatattttatcttctagatgttgattttattagctccttaatgatatgtctgttagcttattgttcctactttaattaaccaggattgtacatttattctgtcgacttgcatctctaacttggtaccattctcttcatcccagtacatatttttatatcacttctgggaagtgtcctgatgattgtcattcacagtgtaagttattatttatattgacagctactgtgtgaagacattcacaggacacagagaatgggtacgtatggtacggccaaatcaagatggcactctgatagccagctgttccaatgaccagactgtgcgtgtatgggtcgtagcaacaaaggaatgcaaggctgagctccgagagcatgagcatgtggtagaatgcatttcctgggctccagaaagctcatattcctccatctctgaagcaacaggatctgaggtactgtatatacaaatgtcttcatggttttattgctgatatctgaagtccttagataactttgctaattccctgtttcagggctgttaatgcatttaaaaatctgcatccagcaattctgaatcttgaaattctctactcttcacagcttgctgatgtgtttacattatttaaccagtgatgattattgctgtcagcctatccttgatttgatacgtgatgggtattctcctaaagaattaaaatttatcagaaaaatcagtgttatgagatcatctcaatgtaaaacaaaacctgagggagaggttaaagttttctgtcagaaaaatagccttcattaatgaagataatgattttatttataaatttatggtaaaatgcagttcagtatttattttttaaaattaattccagatgtgatagtataaatgtttttttaaatgaagactaatccatatggcagcctctgatgttcttgatcatttaaaagtactagctgagcctggagttttaacgcatttctttgtgatctttatggttttggtctttattattaatatgttaaaaattacaaggtacagcggcacatggctatagtcctagctactcaggaggctgaggc

SEQ ID NO: 84833 - DNA, 1064 bp, Homo sapiens
agatatatagtgaatgcctgtatatccttcacttagttaccatttgttggttttccttcatgtatgtgtgtatattttgctgaaatcatttgagcgttctttgcagacatcgtaacactttacccccaagtattttagcatgaaccacctaagaacaaggatagtatataaataaccaaaataaaattattcacactcaagaaatttaccattgatagactacatattgagatttgttcttgttatttccataatgccctgcgggacttctttttaaccctcatccaggacccagtcagggatcgtacgttatattcactcctcatgtcttatgagttttcagtttcctttaatctagaatcccctagacttttattttcttctggtcttttgatgtttttggtatgtatagttttatcgtattatgaaatagatgctatttaaacattttgccttttactgagtcaaataacttttttgtttttaaggtgggtcatgataactgggtacgtggagttctgttccattctggggggaagtttattttgagttgtgctgatgacaagaccctacgcgtatgggattacaagaacaagcgatgcatgaagaccctcaatgcgcatgaacactttgttacctccttgggtatgtacgcctcgcgaggtctctgaacattagattttggagtgccagacaaactgtgttttacataatcgtgtggactttgccaggtaagaaatgactgtgctttcagggcagaatagagaagacatgaaaatcttgtggattcctaccatttgttttaaattctcctttcccgttaactctttccatcgttagccttataataaaaacattactttctccactgcacaacattggttttggaaaccacaatttgtgaagaggttacttaccactctgatgggtaatttttctcccctattagtttgtttctcaaacaaaatcttcctcaacctttcccactggcaggtgtatactatcagatactagaaactcagaaaattgtatttgatttgagtaaacatcctcactatcatctg

SEQ ID NO: 84834 - DNA, 4454 bp, Homo sapiens
tgcccggctaattttttttttaattttgtattttgtagagagggggtctcactatgtttgttgtccaggcttacgtgtgagttttaaataaaccatttctttttctttcagatttccacaagacggcaccctatgtcgtcactggcagcgtagatcaaacagtaaaagtgtgggagtgccgttgattgtgtctccttcggcccctcctccctcttttcctctggatgcactctgatgataccatggttaccccattgagctctgtttaaataaatattgtcctttcatgtaaattattctggatgtagattgagcttattaaatgttacacacaaagtattcatgcatggtgaatccaaattgtatactgtaaatttacatacgttgtctagaagtaccatagggtttaaaaacctgggctggcattggtcacaccaggcctaagaaggcagaagttgaatcaattgaactagggcactaaactgaatagttgacagtgtcattttatgttggattattaattcctgtttttctttctgctatctgttggtgcctgacttgatggcctcatttggggaaaagtggtggttattagggctttttctgaaatgtgtatctatgtaacatcacttaagtgtgcttaataaatcttctgtaaggattttagatgataaggctacaattcagaatcttctgaaccatctatgtaatgaatggggattatacattggaatttttgtcatgacacatttgccaaatcagtaggatatatttgttttggcagcctatcacgcagaggctagtggtatatttatgtaagaaaatgactgtaaatctcaagaaaaatctcagcagctaatagcaactcatttatttcattttggtcttaatgctttgtaaacaggtcaaaaaatactgtcatactctaagcttctattttccacactggacatacttctagttgtattctccatactattagactgtgtagtgatgtgacttccaagtagaatttaatctccccattgagtgtgtcatggtacaaatcactattcgtttttggtgttttttagggatgtgcaatgtgcattacataatgacagaaatactgagaaggttctgtgtgcccatttgaaaggagtgggaggaatacagcagtttgtttttcaacatgaatctgatattgatttaaactgtgtttcacttacaagttttaaaaaaatgacagggtttaatggagcgtgcataaaaatgtactgttttcaccttttgtttatatgtaaatgtttgtaagtatatgggcctatctgtaagtggataagtctgtatgtgtgtatcatacacatcaacctccatgtccttagtcctgggtttttgaaaaagtgctaaaacggacaagtagaataaatgttgctgtggaatgccatgctttagaacaaaccctttttgatcttaatgcttctgaaaactaggtctgactctggggatttttttccagccgaaggaaaatcacttccgttatgtccccctctaatttagccgctcgacattttacacaacccggatatgttgtatattttgacccaaagttacaggtaggtttaagagaatttttagccatgacttttggagcactattccattgtcagttattaataaagaattccattgcttagctaaccaacaggttttttttgtttccaagagagttatttgaaaagttaacagaacaatgagataacagtgacagtttaacaaagataaaattctgaactgcgttttattcatttgtgtactatgtgattttttaaatgtcccctttagtatttaatggaaaattggttcctgcaaaagacaaagggtgagagttagcgtcctgtagatacacacagagactaggccgtatattaactagaagcagctttatgtctagcttgtgtctttttgtttgtttgcttgtttgtttttagattcctgagagatgtctctggaagggaaagttttgagaactaatggctatttttgaggacaaaaattacatcttaagctaattccttaaatacatacagtaggtgaattttcaggacaatattgcctcacaaccctgcttacattgaaaagtctttttcccttagctcttctgactggatttttctacaaaaactatggaaaatatctttgttcttgtttgctgctattttctgtcctattttgagaaatataaatacatagaaatggtgcatcttaacatttgtttgtacatgtataaatgtcttgtattttaattcatttttagcatgaattgtttaagggtaagccacaacatctagaaatcactcatagatattgaacaataaaggagaatggtaccgatgcaggaggaagcaagcgtgtcttcccctgcagcacacagcgacttgcgttgacaaaggaggaggaaacgattactctgtaaacaaagttatccttacttgggagattgccacagcctgctgctgagttgagttaccagacatcctccatgtgagaagcagcgaacattgaatctcagggatggcccacaactgggtccacatgtaatgagccctgtttaataacgaaggggtgggggagagcagtccgtctacaacctggaatcagatttgcaaaatttcctgcactgctgtctgacactgtcctgttgatgccctttctgactgtgttctctgttttctctgtctgctgtctaaccctgtgccttgcctgggataaggacaatgatgaggttactggtttggattgtaagtagaggacttttattaattggtttagaggttcactgctgctttgtcactttctcaatcaaattggccacttaagaaataaagagctggtagaattgcatcctcagatgattattgactgtgtgtgtgtgtgaaaacagacattccagtgccacccaaatatatatctgtaacgtgcccaagaaatcctagctgcgctcttgagagtgcatgccatggagactggtttagacaccgcgtggagcctagttgcctgttgtcacggcatcttgcactttaggagactaagaccgtcctggttcgtctgtgtgtggtgtgaccaatggtgtgcccagagcactactctcaaaatcactagtgttagcaagtcgtcccgggctggggagcgttcgccgtagtctttggaagctttggctttagatttaccaagccccgcctccccgctgccagtgccctgctctcccgttcgcctctttctgtttctgtgtgaactttcccggtaatatcactcgttaaataggttttctttaaacttaattaaagaaaaactatttaaaggtaaaggatattttgttgacatcggtggctcgatcatccttaagcaactgaagttaaaattgttgaaggaaaaggcacttaaattggttactttcatgtccagctgtatataagtccagtgtgttcatctagatgacgcaaagaatctcctggtagagaagcgacatgtaaaaaactggtggaaaaaggttttggattttttttccagtggggtggggggagggcaagctggatttacaggtcacggctggactgaatgggcctttttatcttcccactgtatcatggaagtagctgcttgcttgtactgtccatccttcaggcatccctaaagctcactctgaagatgttagagacaaacacaaactcttcgagttaaagttgatcctgacactgacatgaaggcaagccttgatttcgtatgaacgttgctgaagtggtaattgaggaaaacagttccccagattgttaagagttcactgaagatattgacacaattttaaaaaatcagtaaaggaatgtatataatattgctctcgtgttttacagtaagatttgttgctctcagactgtgtaaaacaaaatttattcatgttttctgcatattaaaaaatcttattgtaccaactggtaaactattaaatgcctataaaactagatgtgatttttttttttttttttttttttttttttgtcttcctttgcacaggggaaatgctgatagaaagtggggctgtgtgtagctccagtcacaaagagtgacacgaatcggtgtcagggcagtaaggcctcatgagctgctttccttcagggcagcacccgaactggctttgctgtcccccttcccccgggtggaggagggagtgcctcagcctgagccttgccatggcatgcgtctgcggcacaggcccgctctccccaaccctcccagcagcccgttctgactgtggctatcgctgtggccagagagccaaagccaggatggctggttacaggcccaagactagactcttggggacagagtctagagataaggggccctgccgggcgcggtggctcacgcctgtaatcccagctcttggggaggcagagacgggaggatagcttgagccc

SEQ ID NO: 84835 - DNA, 2021 bp, Homo sapiens
aagcacatcttcaagacgtacttacaggtgccacccgtccgctctgcggctggccatggcctcccagggtggtgtggggcgtcgggaaagagcctgaggtggggctgagggccctcatgactcggatccaacctgcctcgcagggagtcgagctctccggcctctcagccgccatcagccacttcctgaactgcttcctgagctcctacccaaaccccgtggcccacctgcccgccgacgagctggtctccaagaagcggaataagaggaggaaaaaccggcccccgggggctgcagataacacagcctgggctgtcatgaccccccaggagctctggaagaacatctgccaggaggccaagaactactttgacttcgacctcgagtggtgcgtgcggggcaggggcggtggggtgggtgggattgggcagatgaggcggccaccacctgctcccagatggcgtctaaggcctgtggtcataggccagggagtcagagagaagagggagcagctgtggagatcactgggtgctggagggtgagggcagccgggaggctcccgggggccgggtggggcagtgttgggggcccgggctggacagcgttggggagctgggtggggcggtgttgggggggcccggcggtgcttgggctgctcaggccccctgctccctcctcagtgagaccgtggaccaggctgtggagacctacggcctgcagaagataacgctcctgcgggagatctcgctgaaaacagggatccaggtgggcatggctcacagcatccccgctgtgtccccgctgtgtccccgctgcgtccctgctgcaggctcccactcctggccagggccacaggggaagtggctttttcacggtagccgtctgtgcgcaagcgttggtgggttgggaggtgccaacccgctgaacctgggcctgaggcttcctgtggtgggggggctgccccccaggtcctgctgaaggagtacagcttcgacagtcgccacaagcccgcgttcaccgaggaggacgtgctcaacatcttccccgtggtcaagcacgtcaaccccaaggcctcggatgccttccatttcttccagagcgggcaggccaaagtgcagcagggtgtgtggccaggtggggctgggtggaggtgggggttccccatggcccgtcctgaccttgccacccctgggggtgccctgcaggcttcctgaaggagggctgtgagctcatcaatgaggccctgaacctgtttaacaacgtctacggagccatgcacgtggagacctgcgcctgcctgcgcctcctcgcccgcctccactacatcatgggcgactacgcagaggtaccctctgggctgtggcagcaaaggcctggcctcgtgttgggggatggggagtgagggggcccctgacggaggagtgggtggagtccagggagaccccaggaagtcgctggttctgcccaggccacccctggctccacccctctgtaactgtgtcccgagcgggagagctcaggagcaccctgtgctgcggtgaggtcagttctgggaggcgatggcaggggacccccccacagggcgtcagcaaggacgcctcctgagactccgtgagtgggcaggaagcatgccaccgagctcccacgtcctctgtgcccagtgcaggctgtggggttctgggtgccctgcctggccggggctggtggaggctgtggtggggttctgggtgccctgcctggccagggctgtttcagggttagcatgtcttaggatccctactccctgcaaagggactgttttttcttctgtttataaatgggtgggttgtttgtttgtttgtttgtttctgagacagggtcttgctttgtcacccaggctggagtgtagtggcgtgatatcgactccctgcagcctcaacctcctgggctcaagcgattctcccacctcagcctcccgagtagctgggattacaggcgtgagccagcacacccagctaatttttgtatttttagtagagatg

SEQ ID NO: 84836 - DNA, 1136 bp, Homo sapiens
gcgcccacagttgatcacggaacctctcccctccaccaaaagaactgccattaaaatcccatgaaaccacataggggcagtgttgacattgggggccttggaaagtcctcaggccacccctacatgaggctgcctcgggagagcagggcaaggctgtggtgtggaagtcccacagctccaaaagccctgcccagccgacacactggcgcacaaaagcaggcagccttgtggacgcctgaggcctgtgtgtgcttcagaggcatttggcagaaagttctttataaacaaagatccctgctcaccagtaggcagagtgtgtgtgtgtgtgtgtttgtggtgtcaaaaccagaactccagcttatgtgttcacagtggaatttgaaaacggaaacctaaagttgaaaattaaaaccactgtgttagcacctccaaaacctgttttgtgctgggcaggttgttcagggtgcagggccctggtaacgccataccctccctgccttcctgacagagccgtacacggtgcgtgaggcccgcatccacgtgcgccatgtccgagacctgctcaagagcctggacccatccgatgccttcaacggggttgactgcaactccttgtccttcctgagtgtcttcaccgacggcgacctgggaggtgcgggaggcactggggccggggattgggccaaagggcggggagcacggaggtggggggctggagaaggggccgaggggcctgggcctgaggcacccggaccacggccatcaggaggtagggagacagctggccctgggtggccctgtgctgaccaccagcctcgggtccctcagacagcgggaagcggaagaagggcttggagatggaccccatcgactgcacaccacccgagtacatcctgccagggagccgggagcggccactgtgtcccctgcagccccaaaaccgtgactggaaggtaggatcctgggggagggaggaagagggtccctggcggggtggaggccccacaccagaggcctggcccctcagactcggccgctcccgaagcccttgcagtgcctgaaagtactcaccatgagcggatggaacccgcccccggggaaccggaagatgcacggggacctcatgtacctgtttg

SEQ ID NO: 84837 - DNA, 1050 bp, Homo sapiens
gcagcccaggaccacagctcaggagggatggaagaggatggagctggagagggaggggcaagggcactgtgtggggtcagagaagaggagaggaagaggggaactgctgctgggaagctaggtgtgttagggccggaggagaccctcgggcttggcttgaagggtggctttggtgaccctggggagagtggtttgggacatgggttcaggtgcaagccataccacagtgggccagggaacagtggctgggaggggcggctgggtgtggaagtggcctgcaggtgcacggagggcgaggcgcgaccgtgaggctgggactctcgagggcatgcagatgcctttccagaaggcacgtgtccccgtgtggggtcaggcggacagccccgccgaccagcgaggctgcctgattctgacccgttcttgtcacccgcagagctgccatcagtcatgctcttaaacggggactgcccagagagcctgaagaaggaggcggcggcggccgagccacccagggaaaatgggcttgacgaggccggcccgggagatgagaccaccggccaggaagtcattgtcattcaggacacgggcttttctgtgaagatcctcgcccctgggatcgagcccttctccctgcaggtaagatggaggaacgggtgctgggggccaggcctgagcctgctggggagggtgagctggaaagctcagccttgctcgtgctcctaccggccccattttgtggcaggaaactgaggatcccgtgccctccctagagtcactcagctagcgtggtggacgtgggaatcgagcccagggtcaggtcgttgccccattgctagaggacagcaaccagctgggcctgccagccctatgtggggaggggagtgatagtggctgggaagtgttggcatcccaggactccccagcctcttgctctgtgccctcaggcaagtcacctctctctgggccgtgattttaccatctgccagaggggagggtagtattgggttatctccaagggcagagccagcgtggaggtcttgcaagccggtg

SEQ ID NO: 84838 - DNA, 1047 bp, Homo sapiens
cctattccctatcccgtttcaaaggaatgcagctggctcccaaggggcctcctctccccaggacagcatgttttaccctaatccttcctcctaggaaccccgaaggtctccccacccctggatgaaggctgagcgatctcccccgcaggcagctggctggctcaccaggtcccggtgctcacctggtgcagttggcagctgccctcccctcggctctggagtctcaggatggccgtggcagcaaggcagccagctctccagctcagccccagcattgcccgggttccttgttccagcctctgccgctacccttgccctaatgcagccagtcggcccggggctggagctccggctggcttcgggtttcagtggggccaggcctgccatggcagccccaggaagggcacactccccctgcctggcatcccgctcaaggtcggccagaaggacggctgtgggccaggagaacccggtggccccaggaccccagggggagctgctatcagcactcaggcccacctccctatgccccctagagagggggtcactgccggcaaagccgctagggggatcggagaacccagaatttggggtacctggacccctcaagattgagggcctaggagactggctggcaggggcagggcccagcaagggggtcctctcctccgctcccatcccagtgggggtgaacaggaccgcttctgccagctgccgccaacagctggcacagacccgggtccaggccataaggtggctgcctctgcccaccagtcccagacactgagcaccccactgtccctgggccaagggcctggctgggacctctggctcctgctgccccctgcaggtgacctggctgccagccccttcctgggagtcactggttctggtggaagggagggggatgggcccccagcttcccagaggacaactgcacccgtgcccctggcctccaggctccatcaagaagctggcaggctccatcttcccttcccagcagccccggctctgccaggagggaaccaagtctctcccaggggagaa

SEQ ID NO: 84839 - DNA, 1065 bp, Homo sapiens
gagtgctgttggggcacggctctcccgctctgcagaagacctccttttcccctcccctaaagctcacatcctcagaggtgctcctggactatgagaggagggagtattggcccaagggtgtagaggccttggggagtgctgtgactgggatagttctgctcccccccccccgagtagaggctgaggcctggacgaggaggcaggtgcagcctacctgtgggtgctgccgggcccctcgggagggggtgggtgggctgcgctgagtgggagtgggtcagtgggagcgggtccatgggagcgggtcggcgggagcaggtcggtgggagcgggtgggtagcccgcgctcagtgggagtgactcaaaagccatgggcttgggcgtctgacactcctgttttttctttccttttttttttaaacttaatcccaaatgtgatagtaacacctggttttttcttgctctgggttggctcctcttgcctctgtgaccttgggcagctgcttcctagccttctggagcctcagtttcctcaggtgagatgggctggcacggcggtttagggagctgccgtgggctgggcctagcgtgagtcctggctctgtggtaatcagagtgcaggtggttgtcaacacttctctggggtcactgccaggctgccctgccccacccctctctccggagggttagggtgtatttcaggagagggtaggagcagaggggctctgtctaggcctggtccttctcctctggtcattgtgtgagacccagaaccttccatgggggctgtgaagcagcccagggtctgcctgatccctggtcctggaggggaggggatggagtgagagcctggctcccgcccaccctgggtagggtggatgctggggcagcccttactgggcactggcagcatgtcagaggccctgggaaggcgccctggccagctgggcacctcctcccccgccgtgcggccactggcctcttgctgccagctctgttctcccctgggagagacttggttccctcctggcagagccggggctgctgggaagggaagatggagcctgc

SEQ ID NO: 84840 - DNA, 1022 bp, Homo sapiens
ctccctgtttcagcagcattcattgtgggcctgttccttgcaagagattcccagagacaaagccttgccctcaggaagcgtatggcttagtacagaagccaggtgcattcaggcacatgcacacacacacacacacacacacacacacacacaaacacgatgaagacttatggctttgcacggaagccaggtgcgtgcaggcatgcgtgcacacacacacacacacagaacaaagagtgataatatggcagactgtggtgctagctgccacccagattccaacaaattgcctggggaacagagaggcgggagagagtcgttccatcttggtgggggatcagggatggcttcatggtaaaagtcacatcagagcaaggccctgaaggatgggtcaggcttcaagaggcagagatagggtggatatagtaagtgaggggatggcctggctactgggctactggaagagtttgtcatcagagcagcaagagatagaatccaaaagagaagaagatcagcctgcagatgtggactgctaaatgcaggctgatcttctcccctttgggattctcttatgagaagccataaacgccaggacgagcacccagtggggtgcttctagttgccaggcactgtagttgcagatactgagcaaactactttacctttctaagcctgtctcctcatcgataaagtggatacattaatagaatcttcaacgtggggttgttgccaagataaatgagttaatatatgtaaaatgctaagaacagtaccaattacttattattataagtattattatttatgcattgatgccatgtccaagaaaggcttcttgagttcctgctttccgactgccccaggcctctgagtcaggccatgaacaggaataatgactaagaaacataaacctcatattgattatttcttttgagatagagttttgctcttattgcccaggttggagtgcagtggtgcgatctcaactcactgcaacctctgcctcccaggttgaaacgact

SEQ ID NO: 84841 - DNA, 1127 bp, Homo sapiens
taggagcttgcagtctgaggcggaggtggggagtgggcccctgcagactcctcatatggttaggaagcctgtcctctggaccagacacagtcctaggtgctgaggacgcagcagtgggcagcagagaagcaaagccctgtctggctggagcgtccatgcctgatgggtgttattctgcccacatactttgttttttcctttggagctgatattttagaattggaagattccacattgtgaatctgtttttcagtcttgagaaatcagaagctctgggaacactggctggactggccttccctcattacacctcaacttctagctacctgatcagtacagggctggtagcctcctgctcactgcagcccacctacacctggccacacctttgctacctgccccttccctgaaggacgggacgtacggtgtggggagcaggaggctgggggttgggagctctgggtgtaaccctgtgaacacagaggctgggggttgcatcccagtcctgtgcgtcctttgggacttcttggtcttggcagatccattgcgatgagaaaggaggggtcccggcagcctagcggggcgccctgtgggagctgggctgcagaatggccactgtggatttgccttcaagtattcctcctccctccccctcctgaattacctccaaacaaaatgacagaagttatgggaggctgcgcgtcgcagtacagaaactcaggaataacgtgagaagggacagagacagaaacactcgtggatccccgctctgggcctgcacctgcctggtacttatgcttcacttacctcatttcattctctgcatgacactgatgatcattatcttcattcttcatagaggagaaagctgaggttcaaaagggatggcgtctccaatgtcacctagctcgtataacagagctgggattccaatctgtctggtgccaaattctatgctttttctcccaccaccaattatatggtgaccctggctgaggtacttaacacccccgtgctacagtccaatgaagtagattgaagtgcagctcagagagaccaggtgtcctggtcaagactccaaaactctgttttgggtctcctgttaaggagttaagaactctggcacc

SEQ ID NO: 84842 - DNA, 1014 bp, Homo sapiens
ggctaatttttttgtatttttagtaaatacggggttttactatgttggccaggctggtctcaaactcttgacctcgtgatctgcctgcctcgtcctcccaaagtgctgggattacaggcatgagccaccgtgccctgcctgacaatctggtttttgaaagaaatgtttattatattttaaaaatccttgttccttgcagaaaatttggaaaacacagaaaagcacaaggattaaaataaaaatcaccttcagtcccacaagggagactgtagagatattaacgtttaatattttttttgtggtcttttttttctatgcaaaagcacaccctttcacgtaatatacttacatctgcatctacgtctgtttctctgtattgtaacaaaggcgggattatactttaggtacagtacattagtcaagacccttggtggcaagtgacagaggcccatcttgaattagccaaacaaaataagggggtttattggctggggtaacccatctgtggaaagggttgggcctcagaaacagctggatccaggggcattggcagaactcctctctgtctcgtcactgtgtctctttgtgttggcttcattctcttgggccatctgtctccatgatgttggatccatggttgtagatccttgtgggctaaacgtttcattttattttattattactattattcttttgagacagagtttcactcttgtcacccaggctggagtgcagtggtgcgatcttggcttactgcaacctccgcctcctgggttcaagtgattctcctgcctctgcttcccaagtagctggaattccaggcatgcgccgccacacctggctaatttttgtatttttaatagagacgaggtttcaccatgttggccaggctggtcttgaactcctgacctcaggtgatccacccacctcggcctcccacagtgctgggattacaggcatgagccactgcgcccagccaagggctaaacattttaatggctgaatttcccccag

SEQ ID NO: 84843 - DNA, 1028 bp, Homo sapiens
ccgggaggcagaggttgcagtgagctgagatcgcaccatggcactccagcctgggcgacagggcgagactccatctcaaaaaaaaaaaaaagaaagtccctgcttcctgttgggtcctcctccttgccttgagccctctccctccattcagatccatccccactgatgtctcctgctcgtctcttgtccattacttttttcctcctgagccctactgtaatgcttggagagtttggggggctggtgagggcaggatcatctgctgtctgttcatgtctcccaagagaccgcagggtccttcaggctgggtgggtgctgaatatccaatggggaccaggtaggcctgattcctgccctcctggagctcaccgtccagcgggaaggacaggcatcagactgatcgtgacaactgaggggctgggagcagggggctgggagcagggtgccgtggtggcagagagcacggggactgatggatgacatcggaagggagggacattcaggcagagacctggaggatgattaggatacaggaagacgaaggcttgggggggatgggagtgtgggtgagagaagggtctagacagagggagtagtgtgagtgggagggctcatcacaggaacccacaggctgtgtagaccggttggggcaggtgtggagaggaagtgagaggggtgggagatgaggctgggtggggccgttgggacaagggggtgcggagagttgggtttgagccacatggtcatgggagccatggaaggaggacagaataatccacctcacatttatttttcaccttcttcttttttttttttttttattgtggtaaaatacacatcacacacagtgtctcacttgaatcattttaaagtatacggttccgtggcatcaagtcctgttcacagtgttttgggatcctcactaccattctccagaccatgttcatcatccagatggaaactgtatccattagccgtcactcccacccccgcctcccccatcccgaagcaactaccatctactttct

SEQ ID NO: 84844 - DNA, 1022 bp, Homo sapiens
gaaacccaggttacttggtgtgtttagctctcggccccccctttactttctgtcaccaagtcctcttaattttgctcccgaaatgccttatgactctgaccctttcatgtcatttctgtggctgtgagcgcagtggagggcagcgcccctcggccccgtttcggtcttcccctggcccctcccttccagccgctccgttctctctctgctgcttgcagagtcctccagcaaagctctgcaggtcatgggcaccccgcctcgggccccttggcttccttcctttgccctcgagagagggttcagcatgcggcaccttttcccagcgtccgcacagcgccggcactgtttgtactgtgtgtgtgtcacctgtctcaggcccataatgttttccttcaagcggctcaggtgttacaacttcagtggacttgtttcagaaggcacctttacgtcactaccataaaaggaaaatcagggtggcctcccacaaagagggtctctgtcaaagctcagtaagtgactgttacagtgaagaccaccccaggtgccctcgggggcccgcggggaggcaggcgtccactctgggaagccgtgggccatgggatctcctccccagcgggccccttctcctcctcagaggcagtgtagcaccgtggtaaacgccacagaccctggggccaagcctgcgcccaagcctcactctgctcctttccagcaacatgatcttggtccgcttaacctctctgagcctcattttccctgctgtaaaaggggttaatactatttccttcagtggattgtggtattaaataagagagtgtacatggatcacttcacacagtgccctaacccttgaggcctgtttgctggcatttgcccttccccgctactttttttttgagacggggtcttgctctgttgcccaggctggagtgcagtggcgcgatctcggcttactgcaacctccgcctcccgggttcaagcaattctcctgcctcagcctcccgagtagctgggattacagg

SEQ ID NO: 84845 - DNA, 1065 bp, Homo sapiens
ctgggatgggctgtgaccccgaggtcagccctgccaggtaggaacaggtgcgcaacacctgctccttctcaagctacccattcactccacctgttggagccttttgttcctgaatccagtgtcctcttccctcccccacactctgccaggtctgctgggctcatgccctttctcccttccacactggccccagcacaggcatgagggtcatcagtgcccgcatctccatgtctgtccccttggggcttggaattgagccatgtgcatatacccggggcctggcggttcccacatggcagctgggctcccgtgtccctgtctcccagcttagcatccacagtatgtggggcagcgagtgcccagatctgaagatgtccctgcccccgtccacctctgccttctgatcagctttctgccttggcccctcctcctccgtgcccattcttcccgttgatttgagccttggcaacaaggcgaccagccatgtttttgcagcgtaccaggcactgtgctgagtgctttctgggccttcctcataacgccccatgaggcgaggagtagtcacaccgttttacagatgaggaagctgaggcatggagaggtgagataacctgaccacacagtgaatcaggagtggtgctggagtattgattagcaggagtattgattagcgattgcatcccgttcccctctccctgcagcccctggcaacctctcatcaccgttctgtctgtggatttgcctgttctgtggatttcatggaactggaatcacacagcatgtggccttttgtgcctggctcctgtcactcggcaccgtgcttcctaggtgcatccgtgttgtagcatgcatcagttcttcattccttttctttctattgtctttatagtcataagctatcagtttgtttttatttttattttattttattttattttgagacggagtctcactctgtcacccaggctggagtgcagtggagcgatctcggctcactgcaagctccgccttccgggagcttccgctattctcctgcctcagcctctcgagtagctgggactacag

SEQ ID NO: 84846 - DNA, 1014 bp, Homo sapiens
aagctcccaggcatcatttgggaaatccttctggtcagaagctgccatgtgctccgacttgagagtctgcctcgcttcctagagaccggccccaggagcttatccagtgtccagtagagaccggccccaggagcttatccagcatccagggggaaaaggcaggggagaggggctcagctcagggagtgttggatgctgcgcccttttgaccgggactcagggccttgaacaataatcatatgtgccctggtgccatgagcgtggacaccttgtgcctgatggggaaaaatagacagcatgactgtgtgtatgagcgtccagtgaccggtgatgttaaaaccagctctgtcctcctctggactgtgtgtttctggagagccagggctgctgtccatcaaggtgcctgcgagccatctccagaggccctctgctaagcccagagtcgccctatagcatctggtgggggcttgttttacttcccctccctgcgtgcttttccttgctgggctcctagccttacaggggagcagctgtcattctcaccatgggcccgaagaggacctgagggtgatgccctcctgcttgatcattcttcctttcccccatcatggctcttaaaggccaggcccattgaggaggagctgtggctgcttgggagagggccaggtggaggaggcggtgagcctgtgctggacccagctctgttgtgcacacaggcaggtgagtgtctggcagagcagccagactggagcctacggtggtaatgtccaaggccgtacatagaaggaggctggcagctctagctgagaggtagcaggagctggtgcctgcttttgtgtgtgtgtgagagtgtgtgcacacacctaggagctatctcagccctgctggtttcttgagccagttacagcctggatcaggcgggagagtcccccctctccagccatcaaaacttacatcaacaaggtccaggaagaaagaaagaggaagggagatggggagcaggagacagggatt

SEQ ID NO: 84847 - DNA, 1051 bp, Homo sapiens
ggattactggcgtgagccacccaacccagcctgcattgtatgttaaactgtgtccgagagcccagtcactcttggaggagagaagggaaggcgcaggcaggtcctcactcacctcttttggcctcttcacaggaagcaggagctggccaacagctcggatgcgaccctcccagaccggccgctctcccctcctctcacggcacctcccaccatgaaggtaagaggcttcgattcaggaaggcagggaggggagagtgtggggaagttgtgaggccttgctgtggctttggctccaggcccagcagcgtccgtcgcagtggggctgtggagtgtcctgacacctcggaggaggtgatgttcagttaagcaccagtgcgggggaagcatgacaagagactcagggtgtctgtgtcaaggggcggtgaggacattggggttgaaatggggttggcaggactcttggtaattggtagtggagtttgggaacaaggggcccagccaggaggaagccgggggatagaaggcagctgcccagaaggactgcctggggctgggctgtggccctcctgggacttgaagggcatttgcatgctggtctgccggcctctggctggcccttctgagctgggcctgttcacggcagtccccatggaagggttggctggaggttcgggtcggggtggcagttattttcttatcagcacttccttcgtgagcctttttcctggggagaccacagtccaggctgctaggcccaggaccttctcactcctggacgggagccgagggagcagtgcccttctgccaccatgaccttcccccatcacttttcagtccgacgcctcggcaggatggccacacaggcctgagctggtcctcagaggagacttttggctcagccagtgtttctgcataggctggcatgcacgctctccctccctccctccctgcctccctccttccttcacactctgtggagtgagtgaggactagtgctgaagaagtcacctgcctcctgagtcatctgaggggacatctaggccagctcctc

SEQ ID NO: 84848 - DNA, 1075 bp, Homo sapiens
taagaagtctttgcttaccccagctcacaaagatttccttccatgtattcttttagaagctttatttttatttattttttttgagacagagtctcgctctgtcaccaggctggagtgcagtggcgtgatctcggctcactgcaacctctgcttcctgagttcaagcgattctcctgcctcagcttttcgaatagctggaactacaggtgcctgccaccacacctggctgatttttttgtatttttactagaaacggggtttcaccacgttggccaggatggtctcagtctcctgatctcgtgatccgcccgcctcagcctctcccaaagtgctgggattacaggcatgagccactgcgcccggctagaagctttattgttttagctctaggtctaggataaacttgttttaatttaattatgtatggcagtatgttggggtctaggttcatttattgccatatggatactctgttgttccagtactgtatgttgagaagactttcctttccttgctgaactgctttggtgccttagtcaaaactctgccaggcatgtaagtgtacacgtgtgtttgtttattgtctctccaaccatggtgtttctctgcatcagggatggaaaatacgtgccatccgtgccgtcagtccaccgtttggctcccgtggcagatactggtaattgatcatggcactctttcccaagagcttagacgtggtctcagaatcctgttcaacaaagcaccgtaggcagccactggcagtcatttggagttgtcatttgagataaatcacttctggcatctctgattgaaattgtcacaagaggttatttgctgaaggtcccacagctggtgagtggcagagccaggatgtgggctcaggtttgtctgtgtgggtctgaagcctgtgctgtcttccccacctctacagactgctctgcgtgaatcatttcaacaggtcgcttcatctccgtgacctccagtctcttcacttgcataatagggacggtggccaccgggaggagtgggtgtgggcagtaatgaggtcatccacagaatcgctagtggagcatct

SEQ ID NO: 84849 - DNA, 1039 bp, Homo sapiens
atccttgtcttctggtaatgtttttagtttgctgttgatgtagccttgtcccctccgtgtgtcctggattggggtgggcgggaataacgaggcgattgcaaggactcattgagcgacctgtgtgccaggctctgtacacgctggcccgtgtggtcctgccacagctctgtgagttagcggtcatgttttcagccccatgcaaaggcgcaagcactcagacagcgtggttctgtgaacatgagtgtgtggtgcctcccaggagcagggattttagcgaggctgctgacacataaacacacccccacctccagaagcagaggagaggagcccagggccagggcaggtagctcagcaaggacccagcatgctgcaggtggggccagtgagagtcacttctccagcgagggtcagagaggagagaggcaagagtgttgcaggggcgagggtctcatgagctggggtgcggcaagagggaaggaacaggtggatgcctgtctgcaggagaagctgtgcctgtgtgtagagctgctgtggaccagggggaggcagggagggcacagggtggtgatgagatggagagaaggggtcctggactcgggtgcaacaagagggaaggaagaggtggctgcctgtctgcaggagaagccgtgtccatgtgtagagctgctgtggaccagggggaggcagggagggcacagggtggtgatgagatggagagaaggggtcctggactcgggtgcaacaagagggaaggaacaggtggctgcctgtctgcaggagaagctgtgcctgtgtgtagagctgctgtggaccagggggaggcagggagggcacagggtggtgagatggagagagggggtcctggactcacacgagtgccatcttttcccgtcgcttcttctgctttgccgcctgggcagtgggctggcacccgaaccggcaagtaggggcattgggaaagatccctcaagatttcccaagcctaaattactccttgtggttcttgttcacgtctgcccctgctacctgggacctcctc

SEQ ID NO: 84850 - DNA, 1052 bp, Homo sapiens
cccagctaatttttgttatttttagtagagacagggtttcactatgttggccaggctggtctcgaactcctgggctcatgtggtctgcccgcctcagcctcctaaagtgctgggattacaggtgtgagccaccactgcaccagacccctcatttattgatataatggcttttggatagtttgaggtatggtcttccagatcattttctatgaatttatatgcatacattatatacagtatctttttttttttaagagatggagcctcactgtgtcacccagggtagggtacagtgtcatgatcatagctcactgcagccttgaactcctgggctctagcaaccctccttgcctcagcctcctgtgtagctaggattacaggtgtgaaccaccgtgtctggctgtttttataaaattgagattatattcaatgtattgtctctgatttcctccacccctcaacttaatatatcttggagagtgtcatatgtaagcaacatgaatctgttgctgtctttttgaatgattgtatagtttttttgaacagctttattgagatataatttacgtatcataaagtcacccatttaaagtgtacaatttggccgggtacgatggctcacgcttgtcatcccagcacttcgggaggccaaggtgggcagatcacctgaggtcaggagttcaagaccagcctggccaacatggtgaaaccctgtctctaccaaaaatacaaaaattagctgggcatgggggcgcatgcctgtaatcccagctactccggaggctgaggcaggagaatcgcttgaacccaggaggtggaagttgcagtgagctgacatcgcgccattgcactccagcctgggtgaaaagagcgaaactccatttcaaaaaataaaaaataaaataaagtgtacaattcagtggtttttggtggtattcacggagctgtgtaaccaccatcataatcagttttagaacctttttattgctttgaaacgaaatccgtaccttttagctatcaccttccaatcccccatccccctcagcttaagc

SEQ ID NO: 84851 - DNA, 1189 bp, Homo sapiens
atgtgttctcacacctcaagaagtctctgtttccatctaaatcacgcaaatctctccgtcctcattcaggcagatcctctgagtgcttgtactgcatagtgtctgcgagcctctgattgcttaaaagtgacaaagttaaatttaaaagaatagattctgcccttcagatttaccaggttcttgatgtactgagggcagattccggaaatctgtagcctgaggccgctttgcagagtctcacgtgacgggaggctgcctcagagcccctgggtcttgttagcatgcagattccagggcctcagtctgatccagcaggtctggggagctgtgtttttcgcccgtgttccccgagccagggagtgacccactggctcaggacacctcccagctcccctgggtggaggtgccagggttcctccttgctgtcttgccccagatagtgtgaactggtgagggccgccccatgggaatgagaatgtggactcggtatcttgtggttaagaacttgcccttcagagtcaagacagctgtgcgtttgaaccctggatctgtcccttactcatcgtgtcatcctgggcagtgacttaaccccccgaccattggttttcccatctgtgaaatggggatgatgttctctcccggatacagctgtggtcaggactgaaggagatagtgggtattaagcccctggcacggtgcctggcgcctcctgaggatccggccgtcggtacctgttaatgtcgttgtcattgtcatcagtagcatccttctcttccttgttgctgtggggcttctcctggtgaaggaggtggtttagggggaacatacctggaaggtttcttcctccttcctgctcacactcagtttctttttttaggatcatctaaacttttactgtaccggcagcagcctggggaacttgatcctgtccgtcaagtgcgaggaagcagaggggatcgagtacctccgggtcatccttaggtagggctgttgcgctgcttgaggccacttctcttccaggcagggctctcatcggtggtgtgggggctgggatgggactcagaaataccagactgaccagtctggtctgggtgcactggctgacggggacaggcctgctggaatcctggggctgtgtctgaagttgcctagcagggagacccacgcgctccaccagttagctgacagt

SEQ ID NO: 84852 - DNA, 1035 bp, Homo sapiens
tgtttatgtacctgatgctgctgtggaggaaaaagccaagaagataatttttttttttttttttaagaacctaggcagattgttgttttgcaaacctgcagctgggggacatttaatatgaacatttgttgcatcaaagccctatgctggtctctgggtataaatgagcctcacctaactctcgtgtttgctgttcactgtgctgtgcatgctgggggatacggtgactaagacccctccctgagtgcacagtccagctcaaggccaggatcaaaataatggcaatactactactctcaggctggatgtgaatcttgcaagagaagtgcaggtcccacagcacacgctgcattgtttttctagtgggagatgtagtttgcctggaagcagctgctcttccacagtctggcctcatgacctggggcaagtaggacatgtggctagagttgtgacgccttcatggcatgctatagatcagggattggcaaacttttttgggtaaagggccagatagtaaatatttttagacttcatgggccttggagtctctgtgacagcctctcagctttgccttggtggtgcagaagtagcaatagacaatagataaatgagttggcctgtctgcgttccaataaaactttatcgataaacacaggcagcaggccagacttggcccatgggctgcagtttgttgactccttctagagtgcggtgtttcccagccttcagacattcacagaccatatccaggatctgtatcatagcatttgttgcaccctatgccactgttaagatctttatcacaatattttaacgaaatattttctttaaaaagttttgttttaaacttacatacatttattttttatttttatttttatttttttgagacggagttttgctcttgttgcccaagctggagtgcaaaggtgtgatctcggctcattgcaacctccgcctcccgggttcaagcaattctgcctcagctccctcgagcagctgggattacaggcaggcaccaccacgcccagctaa

SEQ ID NO: 84853 - DNA, 1063 bp, Homo sapiens
ctgagtaaatattaagtttctcttcctgagaaatggaaagatgcgcgtggagtaagtgaggcaatttgtgtgaaagtgcccagcacagtgcttggtgtaaaacaggtgctcagtgaatgagaaactcagtgtgaagggactgagcattgggcctgcatgcagtgggtgcttaacaaaggaacaaatgcatagacaggcacctagccaggactcgacatacaggagcgggtttttgtgtgtgtgtgaggagggctgtcactctctcacccaggctggagtgcagtggtgcgatcatagctcaccgcggccttgaacttcaggacagggttaacatttgatatcatgcatgaacagcccaacatggttccagggacacaccaggtgcttggtggccgagatcacacccagaagcacctggccctgcttgggatatggagttatggttgggatcctccttccatcccacctacgccaagctgggtgagcagtgctgtcatgatctgccacctcatcactctcattcacaccttcaagaccccctgacacgtctcctcctccaggaagccctctcaggttgctttccagccctgtaattttgcccttgcctctgtctccagagctgtcagggatttcatgcacagcagctgacttagcccttgctggctggtggctttgttagttttctcaggtggcttcacctgtgtttgtatttctcccagatcaatgacaggctctaccagggcaagaccccgccttgccttttaaatattcttgccaagtcctgagtcagggatctgcatgctgtagaggtcagtaagatgctcgctagcctctacctaacgacttggccatcttccccattttttttttcctttttggtggcttctaaagattgaaagaaggttgggcacagtggcttatgcctatcatcccagcactttgggaggctgaggcgggctggtcaggagtttaagaccagcctggccaacatggtgaaacctcgtctctaccaaaaaatacagaaattagtgggtgtagtgtcacgcgtctgtaatcccagcta

SEQ ID NO: 84854 - DNA, 1014 bp, Homo sapiens
cccagggagaagggcagggggagtagagcaggaggccgagcacgcagccttcatcttagctgcagcatttgtgagcacgaagctcagctcagcagtaggtccacaccgttgctgggccgggctgggcagaatgtcagcctccaggccaggtgtctggagctcacaaggagcaggcacatctctgctctcagagccagcttctccatccccaccctcttcccttctaggaccggaccagggctgccctcctggacaaccttcacgatgagctccacgcccacacacaggccatgctgggactgggcccagaggaggacaagtttgagaatggaggccacggggggttcctggagtcttttaaggtatgagcgtcagagtgactgatggttgctgtggggttgggattggggaagaaaggaagtggtccaaggtccatgggatactgatcccagagcccaagggccagctggaggggtgacaggaaacgtatgggtatcctaggtgtttgcaaagggcagggccgttaggaagtgtgtgaggctggagcagccagcagttttctcagcagcctccccatccttcctctatctgggtcatctcctccgggcccagaagtctgttaagcagggacaggtaaagaggtagcagtaggagaggagctggagcaagccaggaacatcggcgctttcacctgcctcctcctgggttggggagcccagggcagaatggcaggagcgaggaccacagcccttacgggtcttcgtagctgctgtgggtgccacagtgattcttcctagccagccggccgagcattggaagacctggctgggcaggggccatggaactataggcaagtccctttggactttgccaagggaaaaaaactaactagaaggagctgctaaaggaagcagtgagctccctgtccctggaagtattcaagtggagctcggacggcccccgagctggcgtgtggtagaggtttttcatcttatgcttgctgagtgcttgttg

SEQ ID NO: 84855 - DNA, 1039 bp, Homo sapiens
ttggagcagagttggcatctgtcttgcatttgccccgctagagggacagaagacccggtgctgactcctcacacttacccagcctgccgcctcctcacacttaccttgctgactccggcggctgcaccaggactaattgaggagccagtgtcctccctgacaccagcctctgagtttttcttttcttttcttttctttttttttttttttttttttggtgggagccttgaaaattcgtggtttctaatcatccttcagtcatccaccagttgaattgtattttcaacctggaccagtttttaatatacagggacccttttatctggagcccagggttctgggtttggatcctggctctatctcttacctgctatgtgggcttgggcaataatttacccttcagaactttttctgtccaatgcctgtcctctctgcatctcagaattgtagagattcaatagatcttgtatgtgaagctcatgagaccagatactgttacacaggagttactatttcccacatggaatcctttctgggaaagagacagggaggaatacaatcacgtgtcactcaacgacgggaaatacgtcctgagaaatgacgggaatacgtcctacgacacacgtcggctatagagcccgtggctgccagcacagacctggatggtctagcctaggacacacgtcggctatagagcgtgtggctgccagcacagacctggatggtctagcctaggacacacgttggctatagggcgcgtggctgccagcacagacctggatggtcgagcctaggacacacgtcggctatagagcctgtggctgccaggttacaaagctgtgcagcaggttcctttactgaatattgtaggtaattgtaacacaaagacaggcatttgtatactaaacatctaaatatggaaaaggtacagtaaaaatatagtattagaatcttaataggaccagtgtcatctatgcagtctgttgactgcagtgtcattgtgtggtgctggactggattgcagaatataaatgattag

SEQ ID NO: 84856 - DNA, 1088 bp, Homo sapiens
gctgggcttctggaggcactggcaaggtcaaactgcatttctttaagaacagttgcaggatctggctcgcctctgtgggaagccggcattacaggtgcttggtggatgggccgtgtcacattgccatctggggtcctttggggtttccaggttgtcaccatgctgtcccatttgggaatcccatacctgcctgtccccactgcgctggctgacccttgctgcctgctgcctcttgggagggctttgtccctgcctctgagctggtgggcaggatggctgggtggcccccagagaagcacagacctgagatggggtctccatgcccggtttgctgttggaatgatctgaacaggaccccaaatgcctcttccctctggtcatgcctcactatctctaggagctccatcctgtggcttccagagtgtgcacttccagcccacccgggcagtgctgagagggaggaggagaacaaggatggcccagcctcccctccctcccctagaccacggggcgggcagctcgggttcctggagggctgtttcccccacgctgtccctacatctgctctgatctaaaatgtctttccttttatgctgcgcccagtcttggggctcaaagatttgcccaaacctcattggccctcgtgactaggctcatctagatggtgctcacgctggtgtttgaggcatttccactgtgatctccacgaggggatgttttccgggacacatctctggctctgggaactgcctgactcactgaagaaactacttttcaggcactgtagggtcacccatatgcctccagctcagttgacgcttaaaaacaggtgcagaaaagctcgcgatggaaggtcttaatgagagtgtctgtctatgccaatcatgtaaaatgacgtttcttgaaaaagattcagtggttcagctttgtcagcatcatctcaacacaagcctgctggctctttttagcatctcatccaaccatgtcatcgtccagatgagaaatcttagcccaggtgaggggagtaacttgcttgaggtcacacagctggctgttggcaaagctgggattagaaccctcaacccagg

SEQ ID NO: 84857 - DNA, 1063 bp, Homo sapiens
agaggtcaccagtagactgccctctggatctcttaattcacatcctagagacagcttgtgattcagctcatcttttaagtaaggccactgaaatcctggcttaggtttgggttaggcctcttacctctgaaccagttagctgaggtttggtgggtgctgggaggtcttaatggttgttgttgactttttactttcctctggaagaggaatgggcaggcagacattctgaagtatacgtggtacatgctggttatatacatttacattttgggggcacattttaaaaattaataggatcttatatagctagaatttaaaaatatctctgatgtagcaatacttgtattgttaatttcatctagtgtgctcccatagactttaatatacttctaaatctgtattttgtttaaagaaaacaaaatatataaaagatatatttgaagaaatttaagtgtgaagttcatatatttccaatttttgtgtataaaaatcataaattcacatggatatgcacaactgggcatttatctggtcatactccaccatttaaaaaacattccgtcatttaaaatatttttataagtagcatgaatgttgaccttgaaaaattgagctactccataaggaaatgtgtgtcctcctgaagtacttcaagctcggaccagggttactatttgtcagaaatagtagttttcctgtattgggtaagagataggactgcatcagtgttgtttttttttgttttttaaatttttatttttattgatcattcttgggtgtttctcacagagggggatttggcagggtcataggacaatagtggagggaaggtcagcagataaacaagtgaacaaaggtctctggttttcctaggcagaggaccctgcggccttccgcagtgtttgtgtccctgggtacttgagattagggagtggtgatgactcttaacgagcatgctgccttcaagcatctgtttaacaaagcacatcttgcactgcccttaatccatttaaccctgagtggacacagcacatgtttgagagagcacagggttggggggtaa

SEQ ID NO: 84858 - DNA, 1039 bp, Homo sapiens
cccttaaattcccgaaacctaactgtgggtccatgtgggtgtccacttctgttttacagactgaggagctcgggttttcctgtccacctgctcccagacatcgccgagcctggcagtgtggcgggcagaacttcccacatgtggtttgaaatcccaaaggggacgcaggtgggagtggccttgggtgatttacaggcctctgtctattcctgcatggcccagaggacagatgcaggtaagtttttcttttgttctgtcctcagacttacactgtcgcctgcctcataagcaccagctctgtgcgagtctgcagggcacacagagcttagcagtcttggcatcctgctggagatcattattctgtaaagatgaaaagcacccttgtccttgcaggtaaaatcctctattgagggagcttacaggccagcagggcaagttctgtccctgagcaccaaccatctgtgctgaccacctctggggctgggtgagagaaacggctctttctagctttctggtttctatgtgactccgggcccaagaaaacagatgagctgatgagggttttggttactgtgttggaagtgatgtcagatctgattagaagtgcaggataggctgggcgcggtggctcacgcctgtaatcccagcactttgggaggccgaggcaggcggatcacgaggtcaggagttcaagaccagcctggccaagatggtgaaaccctgtctctactaaaaataccaaaattagccaggtgtggtggtgggtgcctgtaatcccagctactcaggaggctgaggcagagaatcgcttgaacccgggaggcggaggtttcagtgagctgagatcacatcactgcactccagcctgacgacagagcgagactccatctcaaaacaaaacaaaacggccgggcgcagtggctcatgcctgtaatcccagcactttgggaggccaaggcaggtggatcacgaggtcaggagatcgagaccatcctggctaacacggtgaaaccccatctgtattaaaaaaaaaaataga

SEQ ID NO: 84859 - DNA, 1022 bp, Homo sapiens
tctcccgtcagatgcctctcccagctttccaagtccggactgctccctcctcattccctgcctgagccctctcctccttcagtcaaatgctggccctcacacaaggccccactcagacccgactctctgggaagcctttcccaccggagcagggagccacggtcctgggcctccagatgcctcatttgtcattcacacccaccttgctttcttctctgttctcaccctaccctgaagggacagacacctggtctcctgattaagacaggaaggcctacgggagcacgatttccacctggctacccatcagggtggagcacctagcatttcctaagcctaactgcttgagagttgaaggccagatgtgaaatccagagggttggttgagatctcactgtccagcttctcagcagtaattagactcttgtcctccacaggccaccattaaatgcaaccctggtgatcacttttgaaatcacatttcgttccaaaaatattactatccttgagctccccgatgaagtaagtaaccaatcttaacggatgggtagggaaatgctaggtaacagaacacatttgaattaagagctggtggaaacaggtctcctaggcggcccctgttccatcaacctagaaatctgtgattttggctttgttggtgtcttttggggatgagtatcacatgccattagatggaattaagaaggtgatagtgaggaacctgaggcaaaaatggttctgggaatgtaaacgttcttaccgggagtggtggctcacgcctgtaatcccagcactctgggaggccaaggtgagcgggtcacctgaggtaggaagttcgagaccagcctgatcaacatggtgaaaccccatctctactaaagtaaatacaaaaattagccagtcgtggtggcatgcacctgtaatccaagccacttgggaggctgaggcaggaggatcacttgaacccaggaggcggaggttggggtgagcctagatggccccactacactccagcctgggtg

SEQ ID NO: 84860 - DNA, 1070 bp, Homo sapiens
attacaggtgtgagccactggcccggccattgattgattgagacagagtctcactttgtagcccaggctggagtgcaatggcgcaatctcagctcaccgcaacctccacctcccaagtttaatcaattatcctgccccagcctcccgagtagctgggattacaggcacacaccaccacacccggctaatttttgtgtttttagtagagatggggtttcaccatgtttgccaggctggtcttgaactcctggcctcaggcgatccgcccacctcggcctcccaaagtgctgggattacaggagccaccacgcctggccaaagtgtcctctttttaaaatcaaaaaagataccaaacaagccttggctgtaggagtccttgaacctgaagcacaaacagatccagcaaatccatggtgtcagtcagggtagcagtgaccctcggggccagcggaggctggaggaagcaagcaggggttccgaggacttgggaatgtttcatttcttcatctgggagctggatgcattcagtctgtagacatttcatcaagctgtgatgtgtgtacttctctacctatatgtcatagttcagtttttaaaaaagtcttcaacagtgagaggctgggcaccgtgggattacatctgtaatcccagcactttgggaggccgaggtgggcggatcacctgaggtcaggagttcaagaccagcctggccaacatggtgaaaccccgtctctactaaaaatacaaaaattagccaggtggtagtggtgtgcgcctataatcccagctactcaggaggctgaggcaggagaatcacttgaacccgggaggcagaggtggcagtgagctgagatcacgccactgcactccagcctgggtgacagaatgagaccctgtctcaaaaaaaaagaaaagaaaagaaaagtctttaacaatgagagtcaaaccattggtgtgagatggcattgatgggcaccaacctaccttttcaggctcctgcctcactggcccttccccacccaactctcaccactcccctctactacccgtgatgctggaagcctctggtt

SEQ ID NO: 84861 - DNA, 1028 bp, Homo sapiens
agtccatctctactaaaaattcaaaaattagctgggcatggtggcgcacacctgtaatcccaggtactcgggactcaggagcctaaggcaggagaaccgcttgaactcgggaggcagaggttgcagtgagccgagatcactccactacactccagcctgggtgacagagcgagactccgtctcaaaaaaaaaaaaaaaaaggaaagtctcactcaggccaggcgcggtggctcacatctataatcccagcactttgggaggctgaggcgggtagattgcttgagctcaggagttcgagaccagcctgggcagcatggcgaacaggaggttcaagttggctggtgggcgcagcgtctctccttttgcttagtaagctcttggaaggtgaggctgcgggtggtgcgtccctccgttccctagcgtgttgcatagagctagatgccagcggggtcctcggtaactgtacgtggcatcggattgaacctcagtcttcctaacaggttgtggtgcctcctggagtgacaaactcctcttttcaagtgacatctcaaaatgttggacaacttactgtttatctacatggaaatcactccaatcagaccgggtaggctggcctcagggtgtgcgggcctcacgtgacaagaagggggccgtgctgggcacgtgggagtctccttcagaagcccagcctcagctcatcccggtccccaaactcctttccagcccgaggatacgctttcttgtgatccgcagcagcgccattagcatcataaaccaggtgattggctggatctactttgtggcctggtccatctccttctaccctcaggtgatcatgaattggaggcggaaaaggtaaccccctgggccgtatgtgcaggctctctcggggcccctaggagcagggcgttccagcaaggctgccgatagcgcagcctccaacgtcccctctacccttctgtctgcctaccctttccagaaagttgtcccagtgcgaaggctcggagagcctgggtcggattcccgtg

SEQ ID NO: 84862 - DNA, 1046 bp, Homo sapiens
ccgggagctggggggggcttccgaggaggggaaggtttggggaagtgggccccagtccctgagggtgggagggattggggccaagaaaccggggatggaggagcccaggttggagacgtttggaactgctggaggggcagcagcaagtacggaagagggtgagccgggacacagacagggactgactagaggctcactgggaggccaccagagaggccaggacctgcctcacggggggaaggaaaggtcacagcagtcagaggacccacagggctctgcagcatgggaggacgtggggcacaggcagtcagactggggcgcatccccgcagacccgcccccccaaccagacccaggaagccccggccaggcctgtggggggcgttaaccccgctctacagacggggaaaccaaggctaggagaactgtcacttgcccaagacagcaggctccggtgatggagccaggattccaaaccagaagtcccactcccaccagtccctaagcacatgaagtccaggctgagtttggggacagccttgcctggaggtgagaagaagaatcatagctacagggaaactagcacagggccttggccccagggatgtggaggagacggggaaggccgcatcggccccgcctctgctggagctgtgaggtgtggggggtgcggggcctttgcttgctgtacatgcagatgagacgcctacccccaggaccacccaaactgttccttggctgaggcctgtcatagcccaaaggtcaccgtgtccttggagccaaggccccagtgggaggaatgagaaccgcttttgtttggaggggcagtcacgaggcgcatgaggcagccgcccagccctcaccgccctccgtctgtctgtccgtctgtctggcccaggcctacatgaacttttactacaaaagcactgagggctggagcattggcaacgtgctcctggacttcaccgggggcagcttcagcctcctgcagatgttcctccagtcctacaacaacggtgagtcagccagcgggctgctggccaccct

SEQ ID NO: 84863 - DNA, 1433 bp, Homo sapiens
gcgcgtgcgcagaaaagcgggcagagggcggagcgtgtccggggcgcccacggcgcaggcgcggagggcggggcgggatctgggcgcgtgcgcagcccgagacctcccggcagtcttccgagcaagatggcgccgcgggcatttcttccactgcccgtctgagggaacgctaagtagtgtgtccggcgccgtgttccaggtaactgggccaccgtggccggggaacgcagacgcgccaccacctcccggccggcccggaccctcaatctcctcggcgtctttggaagatccgaggcccaggactggtgccaggtctcggaagctccagggggagggggcggcgtgaacccaactcaccgagctccgggcgccacttgtaacttggttttctccgcagctccgcgttgttccgcgagaaagcgagaggccgagcccgggctggtgcgatggccgcggtggtggccaagcgggaagggccgccgttcatcagcgaggcggccgtgcggggcaacgccgccgtcctggattattgccggacctcggtgtcagcgctgtcgggggccacggccggcatcctcggcctcaccggcctctacggcttcatcttctacctgctcgcctccgtcctgctctccctgctcctcattctcaaggcgggaaggaggtggaacaaatatttcaaatcacggagacctctctttacaggaggcctcatcgggggcctcttcacctacgtcctgttctggacgttcctctacggcatggtgcacgtctactgaaatgggggcccgggggacttttttaaaaaaccagatcgggaggactgtggccagcaattaacaccatgtagacttccttagttcttaagtggttgaattcgctgcttgttctgtaacgttataaataatttatatctgaagacggagagcctgtaatattcttcagattaaatgaagcgtgagacactttgtggagttctttcctgctgtaacgcttaggctgccactgatgcaaaatcgccgagatttgactcctggagagcaaggaatgggccatagccttgtgttaagtccttgtatttacacataggccattcagaaacgggccctaagggcctacataaggaaagaacttattaacatcctaagaagcagtaacagttaatatgtattaagagctccctgggccgggcacggtggctcatgtctgtaatcccagcactttgggaggccgaggtgggcggatcacctgaggtcaggagttcaagaccaacctggccaacatggcaaaactccgtctctactaaaaatataaatattagccgggtgtggtggcgcgcgcctgcaatgccaggtactcgggaggctgaggaaagagaatcgcttgaaccctggaggcagaggttgcagcgagccgagatcgtgccactgcat

SEQ ID NO: 84864 - DNA, 2219 bp, Homo sapiens
ccactaaccactactttcaggtatatatggtgtcattttagttccatttcatttagtgacagtcctttccataagaaaaaataaagtcaagctgtattttttagaatatgtctagggaagattaaacattgtttggacatttaggctgggcacagtggctcacgcctgtaatcctagcactttgggagtccgacggcaggcagatcacctgaggtcaggagtttgagacaagcctggccaacatggcgaaaccccatctctactaaaaataagatgcaaaaattagccaggcgtggtggtgggcacctgtaatcccagctacttgggtggctgaggtaggagaatcgcttgaaccctggaggtggaggttgcagtgagccaagatcataccactgcactccagcctgggtgacagcaagattccatctcaaaaaaaacacaaaaattgtttggacattgaagttgaactttgggcaggtttagggtgtaaacacctccatgtgttaatccatgatcctttcttgtcaggagggttattttagaataaaacgcatttgtggccgagcacggtggctcatgcctgtaatcccagcactttgggaggccgaggtgggcagatcacctgaggtcaggagttcgagaccagcctgaccaacatggagaaaccccatctctactaaaaatacaaaattagccgggtgtggtggcacaggcctgtaatcccagctactaggaaggctgaggcaggagaatctcttgaacctgggaggcagaggttgcggtgagccgagatcatgccattgcactccggcctgggcaacaagagcgaaactccctctcaaaaaaaaaagaataaaatgcatttgtttaattgaggaataaatattgcattagaatgacggtaattgcctgagtgtagtggctcctgctgtgatctcagcactttgggaggccaaggcttgagcccaggagatcaagaccagcctgggcaacatagtgagatgcccatctctacaaaaaaacatttaattagccagatgtggtggcatgtgcctgtagtcccagctactcaggaggctgaggtgggaggatcaggatcacctgggcccgggaggttgaggccacagtaagccacgattttgccactacactccaacctaggcaacagcgagaccctgtctaaaaaaaaaagaaattacagtaatgaaaatgatggtgctcattggatttatggttaactggggaaaccagcatcacctaacttcagaaatacttaaatcatggtgagtactatgaagaggacatagcagacctagcccaagttggggtatatggaggtcaaggaagtcttctctgaggaaataacattacatctgaaacccaaaagttgaataacataggcaagtgtggggaaggagttaccttcaggaaagcgcatgtttccaggccattgggcaggaaggaatgtgactgtatttagagagtgagagaagaggccacagggtagacccagaccagatcatggagggcagtaatgggtgtggggacatgcgcctgtagtccagctactcaggaggctggaatgggaagatcaagatcacttgagcccaggaggttgaggctgcagtgagctcccatttgccctggccttgatcctcagagcaaatgggggaagcctttggaagtttttagtctgaagtgacgtaatcacatttggattttttttaaaaaaagaatctgttttagattggaaggggatctgagagcttgaatccaagtccccttttgacagatcatagatagcccatggccagtcatggaaatggatctgggacccagacctgttaaattccgtttcggcttcaggaacacatgcacacgacgccaaggagaagctgaggccatagcgttgccccccatctcagtgagccctttctctgcccccactgaagatcctcagtggtttgcccacctcagtcctctcagaacctcctctgagtgggaaggaaaggttcattcctggtgtaagggagaagcagagggagtcctcagcctggtgggagaggagaaaaaaggaagagggataagcgagctgatgtacttaaccatttccctattgttgggcagtaagtttgaaatgttcactactataaaaaatactgcaatgaatgtctgcgtttatattgttttgagaaaattaataagttcctacagcagag

SEQ ID NO: 84865 - DNA, 1023 bp, Homo sapiens
caaccaaaggctctgcaaatgaccggcctgatttttttaaagacgaccagctcttcattgtgctggaatttgagtttggagggattgacttagagcaaatgcgaaccaagttgtcttccttggctactgcaaagagcattctacaccagctcacagcctccctcgcagtggcagaggcatcactgcgctttgagcaccgagacttacactgggggaacgtgctcttaaagaaaaccagcctcaaaaaactccactacaccctcaatgggaagagcagcactatccccagctgtgggttgcaagtgagcatcattgactacaccctgtcgcgcttggaacgggatgggattgtggttttctgtgacgtttccatggatgaggacctgtttaccggtgacggtgactaccagtttgacatctacaggctcatgaagaaggagaataacaaccgctggggtgaatatcacccttatagtaatgtgctctggttacattacctgacagacaagatgctgaaacaaatgaccttcaagactaaatgtaacactcctgccatgaagcaaattaagagaaaaatccaggagttccacaggacaatgctgaacttcagctctgccactgacttgctctgccagcacagtctgtttaagtaagctaaatgtatcttactgccccgaaatgagaggagactggtcttgaagcctctggtgctgtttcaacctccatccccacaggagggtggaactcccattctcacaggtttccagtcagcttttcaaacaagaattttgtttccaaatggaaactgaaatatttgttgaaatgtttaaatttgctgataacaaatgttctgaaagaagtaaactagccgggcacagtggcgtgcgcctgtagtcccagctactcgggaggctgaggcaggaggatcgcttgagcccaagagttcatatctagcctggtcaacatagcaagacccctgtctctatttttttaaataaataaactacatgtgaaaacaaacgt

SEQ ID NO: 84866 - DNA, 1038 bp, Homo sapiens
ggagaagaagggaagctagtaagcaacttatagggggcagtgtaagaaatgtcacatgttacatcgctcacacagagaagcagaatttatcaattttcaaagggaaaatgtctctgtctactgacaaggttttaatttttgcttttttttttttttgagatggagtctcactctgtctcccaggctggagtgcagtggcaggatctcggctcactgcaagctccgcctcccgggctcacaccattctcctgcctcagcctcccaagtagctgggactacaggcgcccgccaccacgcccggagaattttttgtatttttagtagagacggggtttcaccgtgttagccaggatggtctcgatctgctgaccttgtgatccacccgcctcggcctcccaaagtgctgggattacaggtgtgagccaccgcacctggccaatttttgcttatttttcctcaaagggaggaaaactgacaggttgctttaagagctgagtgattgagagtccttctgaacaggacttcgggaatttactcctaatcttttcccatggttaacttgtcttcactctgtttctagaactctggtttttatacttgagactctgtagtcactgtggaaagaggtgtgactgataaagaactgcctttaaatacctgagtcctcgtcagcttcttcactgctacaacctggagacctcgtaatttggttgggacgcaaatttgcaactggtattctgctccaaagaggttctccccatgtacctgcaaattaaaatcagagtaggaaatcaaagctggtattgctttgccatctacagctttacaataataagtacttacatggaagaggaattctttgtggtgagaaagcccctggcctgtgttcacgtacattatggatggtctgcaattgacaggacatgcgtcagcccttgaggagtctttctcccttttttggagacagggtctcactctgttgcccaggctagagcacagtggaacaatcatggctcagtgtagcctcaacctcccagg

SEQ ID NO: 84867 - DNA, 1029 bp, Homo sapiens
gctaccgccaggtgggctttacggacccctgtgtgtctcatgactagaggcagtgacgcttggataaatacatactggatggatgcaggatgagtccgcattctagaagtgtgcagaggtacagaagtggccctgctccctgtccagcacccagtcatcagctttccctggcttcccgaggcaccctgacgttcacactccaaacacaaagtcttctctcaggaatctcgagtgagctgcagtctgggttctagccctgccctagcagggatctgctcagtgactgggctgctctcttcctgctttaggccaatgcgggggagaggagaccactgtgactctccccagtgcccttggagcgcagaatgaagtgaggggaggaggagggtcacgagccctggagcgctgggaagacaggctgtaggccgcaggccccgatcctgcctgggacgaggttcaacagaagtaggatggtttcatcatgacctggcaggaaaaccaccagacctggaattttgcttttacaactgtttaacttctgtttcatacaggatggaaaccggtgaattgtaatctcacataaccgagcaagatctagtagtcataagcactttgtcagagcaaagcagacaaggcaaagtgttggaaatgtcatcggatcttcacagaaccttagccaagcagcctttcaatgcgagaaacaaaataacatggatttttatctagtaatgaagtcaacaccattgtccaccctgggttaacacattcacatctcaaagcgaatggggctgcagacactcgtgttagagagccttggaatgtcctgcctttttacgtttaattaaaattaaataaaatatacaaaattcagttcatcagttgttctagtggcattttaagggtttagtaccatatgtggctcatgagtaccatcctggacagcgtcgacctagagcagttccatccccgcgcagagttctgtttgacggcgccactctgcacttccagcagcctggggagcaggggtgc

SEQ ID NO: 84868 - DNA, 1548 bp, Homo sapiens
aaatacattttgtacagatggggtttcgttatgttgcccaggccgtctagcactcctggcctcaagtgatcctcctgccttgacctcccaaagtgccgagattacaggcatgagccaccacgcctggctctcattgtggttttgatttgtatttccctaatgactaatgatgtcgggcaccttttcacatgcttcaggatgaactttcttaaatatatatctgattctgttattcctctgcttgaacgttttccaaagcttcactattgccccgagaataaattccacactcctgatcgcatgagcccagtaattcaaggctgtggtgagctatgatcaagccactgcactccagcctgggcagcagagcaagacctgtctcaaaaaatacatacatacataaattccaccctttttgatagcatgttatgaggctcaccaaggtctatcctctggcagtatccctggcctgttctccccatctcccctgccctctgctcaccagttccctaaatgtatcttgatctcactagccctacagactgtgcacagagctgtttctacctccagtgacatgcttccgcccaggcttctccccctcccgcctcaatcttcccctcaccaacttaaggtcttaggggcccttctaggaggcagtccccaacttccagagccagggtataggctacttctatgtgtcccatggtactgccacagaagagtctcagctctctccaggattcagttctaaggtcagtgcctaagataaaaatggagtgtaattaaaattcctcttagaaatctaaggaaggtgccctattgaagaccaacatcttgaggtcccatgtagtcatttcttgcccatgtgggaacacattactgtttggttgagtaccaggtgaagtgattggcctgcagttagggctgtgttgtgcaaaaatcacttgttttggggtgttagaaccacatttaggcgagaagatcacttttggggagcttgggaactgaggcaggccgcaggtgcagcagaggcatgagcttgcccgggcccgccctcttgtctatgctcatggagtgaaggaggggccagcggaatggcccaaacaactgatttgtttttctttttttaaatctttttcagacaaataccattgtgtttaagcgaaatgtgtgtataatgccaaatcactgtaccccacaaccctgcacacctctacactggactgtaatttcttgttcctagtttgtcttgctagactgtaagctccgtgagagcagggaccgtgtctgcttgttgagtgggctttcccctgtgcctgccagcatgcctggcatctagcaggtcttctgtaaagatgggatgagtttgtaaaccctccagcctcaggagtggctccatcctctgaggctctggggccctctggcaggctagtcatttttctgccatgtacgtacaatgctttattttcatgttgtattttcctttctagccagtaagcaagctcctaatgagcaagtttctttgtggtgttatctctgtatcctttc

SEQ ID NO: 84869 - DNA, 3137 bp, Homo sapiens
agatatacgccagcggttaggaaaaagaccacattctccggaaaaggcttttagtagtaaccccgtcgttcggagagagccctcttctgatgtgcatagtaggctaggtgttcccaggcaggatagtaaaggcctctacgccgatactcgggagaagaaatcaggttggtaacacttaaaacggatgggaatggggattcagtgagagcagaggacagtgggtgtattggagaaatactttcttagcagaaggcaagaaacagcccacgccaaatataagtgattattccttttccattatagttatcgtcagcatcagcatcagcatcatcccaacagttaggaacgcttagaaaatagaaaaaaatagcacactcctggctctttctgtttggcacaaatctttttagtttcatgtgagctattctggtctttgcccacatacaaatcctagttttttcatacagcattttatcgtagttgtttgccacattttataatctttataaataaaacttttaggccaggcatagcggctcaacacctgtaatcccagcaatttgggaggccgagacggggggatcacttgaggtcaggagttcgagaccagcctaaccaacatggtgaaaccctgtctctactaaaaacacaaaaatgagccgggcgtggtggtgggcgcctgcaccactgcacttcagcctgggcaacagcaagaccttgtctcaaaaacaaaaacaaaaacaactttgaattgccttataatgtggccgtctacaaaattctaaacacgtatttctctattgttaaattttcataaaatatatttcaaaaattaatggaagggatctgggagtggcctacttctggcagaatggattggcacacagggtggtgtctcagcagggaagggcaggagtaggaggaaacggcctctcaggtgattctgatgtgtctggtgacagggagggacctgacctgtccccccacggtgagaatcccgtgctgggtccagacccttccgtttgcgggcaggggctgcggcccgggaaatgagattttgcctgcccaaggctgcactgtggtggcaggctccacagactgctggcgtttcctgcacagcaggtgttggcagtgctgctgccccctcagtgctaccctggttcttagcgctgactgcgaaagtgaaatgccatctcatccaaacaggtaatttatggactcgcctaggatctgcacccaagaccaaagaaaagaatacgaagaaagtggatcacagggcgcctggcgctgaggaagacgactctgagctgcaaagggcatggggggctctgattaaggagaaagagcagtctcgccaaaagaagagccggttagataacttaccatctctccagattgaagttagtcgggaaagcagctctggttcagaggcagagtcctgatgcccctggggcctatggcagctgccctaaagcctgacattcttgcacagggtggggcgcgcagtaggaacctcccccgcaggagctggcgccctctcgctcctgctcacacagtcaccctccgctcttgctacttcggcaagacatcttaagaatgtgacacattttcaagggcatctctatctttcgctgcagagttgtagttctgggccctcgattcctttcccaccaccccacaggctttaccctttgagaaaaaggcagccctccagattttgtagacatttttcttaatatttttaacattgtgtcttttaaaagaaatgttttacacagttcatccaaagagcagagaactgaacttctcactattgccttggccctgacagctgttaccagcacccttttcccaagaaaagtcaattcccaggtgcttattggacatccttcgagggggaagaggagggaagcggccagctcacccttccgggaccctagtgtggggcgaatctcacggacctgacctcagaggtgcaccagtgccgcccaggtagataagagctgcagcattgactgtgcttccgttcttccctcggggattgctcatggcatgggcctcttacgtgctgtcagcttgatgtgaagatcaagttcagtgctgtgggatttttaggaacaaaaaactgtgacgtctggatttggggttgatttttgtgctggggtgggattatgggtcaatgttgaagaatttttaagtctgtattatgtttaaaacatgaatgatttgaaagtttaaatttttaatttttatatgtggaaattcttcctgttggctaaaggggaagctcaagtggtgtcgtcttttgtgctgttaaatatatattctattctttggaagaaggcagagagaggagtcttattatttttaaatgctcctagttgtatagtctgtctgttgtacatagagttcagcttgttttttggctccagtaggaaaaaaaatccatccatctgagatggggtcctgttgtttattatcactctagaagttatacattgatatttattctttctgtccccacgttgtggcacctgaagacatcttcaaaattggcagaaaagataatagttataaaaattttagttcatttatttttaaactcctttcagattattttaccattaggaggaggtagattgtttcgtcttcctgtctgatttttgttttgtagtatttaattttgtattcctctgcagttttaagaaacagtgtttttcttcggtttgctggaacatgggcgttagagatggtaataaaccgtggtcctttttgcgatgtcacgactcttcacctgcctgggctgttgtgcacacagtgcagcctggatcctgtcgatctttacttgtggcggagctaatggtcacattgatagttgattacactgtggcacgaattaatgcagaacactgttattaataaaggaagtaaagggctgcaagatttgagagctgcaacaaaaactgtattgtcccatattttgttgattaaccttgctttttctccctccctttagagagattagaggatataaccatgatatatttcagcttcttattaggattctaggaaagagatggttctggtttctctgccagttgagacttaagacatctgagatttctcagcttttcttt

SEQ ID NO: 84870 - DNA, 1060 bp, Homo sapiens
acttgaaaccaggagtttgagaccagcctgggcaacatagtgagaccttgtcgttacaaaaaattaaaaaattagccagaccaggcatgatggcacatacctgtggtcccagctacttgggaggctgagattgcctgagcctggaaggtcaaggctgcagtgagccaagattgtgccactgtattccaacctgggcgacagagcaagactttgtctcaaaataataataataatacacatactttactgttacacagttacacttttccaatttgagttactttaaaatattttcatcatatactttttatatccatattaaggaaattaaaaagcaaattgcccctatttctagtaccctgtatgatgactgagttcatcttacatttttcccatttgttttcataataaatagtataactcttgggaacatgtactttatattctacttctttcgtttattgtatttttccattttcattattcatggtgcttatgttctataaagtcactgtgaacactgaagtagcaaatactgaatcgtacatagcctctggccacatcatttttgtcagttgatcaatatgtaaccttgttttacatatgtttctctcttttttttttttttgagacagagtcttgctctgttgcccaggctggagtgcagtggcgcgatctcggctcactgcaacctccgcctcccgggttcacgccattctcctacctcagcctcccgagtagctgggactacaagcgcacaccaccatgcccggctaatttttgttgtattttttagtagagacagggtattagcatgttagccaggatggtctcgatttcctgacctcgtgatctgcccacctcggcctcccaaagtgctgggattacaggcgtgagccaccgcgctgggcccatatgtttctctttaagacaccttatttaagacacattgttgattcgttaacattgagttcacagccagtagccctataactcatgcctgaatgccttacctgatatggtatttttccacaaggcacatcacagcccccttgcatct

SEQ ID NO: 84871 - DNA, 1039 bp, Homo sapiens
aagtctttttgattcctgggtacctgtaatgacctaaagctcttttatgccttttggaaccttgtatcttgtattgtttatttttgttttctccattaagtcatctggctccaaacagcagttttaacctcattcgtctctgtattttgctttatcccctctacactgcattgctgtagtgggcactcagagtgtgaatgttggtagtggatttttactttttgttggcaaattgcgctgatctgattccagctatggaaaacattaaaaaaaaaattcaacattgtctttacactcacaggaaatcctaggtaactattgtcattaatttttagatgacaaaaaggaacttggagcagccagaagaagtcagtattacatgaaatatgggaatccaaattatggaggcatgaaaggaattcttagcaattcatggtgagtccaaaaccttcaaatgcaatagtatttgagtttttcttaatccttcagttggtattccgtggtgaaatgtctaaaccctgtgtaaactggaaggaaaacaagagggaagaattcaagattcttagatgtggtaaatgatggggaatgctgaattgtagttacatttaaaatatctgtgttagtacctaacattgtgtcaacgtgtagttgaaatgaattagcgagcccagacatggtggctcacgcctgtaatcccagcactttgggaggccgaggccagcagatcacctgaggtcaggagttcgagaccagcctggccaacatggtgaaaccccgtctctactaaaaatacaaaaattagccatgcatggtggtgggcgcctgtaatcccacctactcgggaggctgaggcaggagaattgcttgaacccaagaggcaaaggttgcagtgagctgagatggtgccattgcacttcagcctgggagagagattgagactccatcacaaaaaaaaaagaaaagagaaagaaatagtggatttcaaggtccttcctatcagtttttgattgtgtgcttattttggcattcttgcaggaag

SEQ ID NO: 84872 - DNA, 1037 bp, Homo sapiens
ttaagttagtgtggatatagcgattcaccttgaaatcttagaatagtgcttatgcttctacaaaaaaagaaaatagttttattgagaaatactttgaagtgttatctaattagtaaaatgaagaaacagcaagtaatggcatacttcctaatggattatgtactgttgttaaaaatattaacatgcattcatttaaaaaatatttactgagtacctattatataccatattctaagtgctagggatatagcttcaagcaaaacaaagtcctggccctctcggagcctgcattctagtggggagtgcagaggatacactgatgcacagatatctcatactgtgtcaggtggcaatgagtgttgtgaaaagagtaggggatagagaatgatggagactgttcttttagacaaggtgggcaggggaaatctctgagttagaaattctacagcggaactagtgctataatgcttgtaagtattaaaggtagaatgcttttcttaatggtagctttactactgaagaaatatcaaaaggactttaatttttatattaaaaatactcttctttcttaagttggatacgttgtctcaggtagaagaggagtctttgttaagaaacgatcttcgtccagctaacaaacttgctaaaggaaataggttattcatgagatttgctacaaaaggtaaatgtaatatttggtattgttttatattttcaatcaaaatgatttattatggagtgacatccttcttttttgaatagaagttagatcaagtaatctcaaagttcccttcaaactataatattctgcgcttatgaaataattgcttgccacctgagttggaatttctgactttaaaagtgaatattaactatttgtatatttctgtgacttctggctaaagttattttctgttgaaactggtttgcctcatatattttcagccagttaccatctgaattatgaaaactttcaaatgaaactttatttattacagcaacgtcctcctgaacattgccagtgtaccattcggttc

SEQ ID NO: 84873 - DNA, 1021 bp, Homo sapiens
atttatttttaacttttcatttcttttgagacaaagtctcaccctgttacccaggctggagtgcagtggtgtgaccttggcatactgcagcctcaatatcctaggctcaatccattctcccacctcggcctcccaagtagctgggactaccggctcatgccaccatgacttttgtatttttttgtagagacagggtgtcactatgttgcccaggatgatctcactccaagcgagtctcctgccttggcctcccaaagtactggggttataggtgtgagtcaccatgcctggtctatatttctcttcattagttggtttgtatatttactgatgataatctgttgctagatgaggctgtagtgatgaatgcgatgcagaatctgctctcaagaagcttaccatttccatgctgtgtaatgtcttattttacattttattttaggtaatgtagtttggctggatgaaatgacagccacacgagcacttatcaatatgagctccctgcctgcacaggataagatcagaagcagggatgccagtgaggacaagtcagctgagaaaaggaaaaaaggtaacaacacaaaggagggaactggggtctgaaagtcctcttctttacacagtcctgtttctgagcagagctctatatagcatctcatcaccaagtgtttctgaactaatctatgatgcttgagatcatcaggaaataggagaaaatactggacttttaaaattatatgagatagttcatcttgtatctcattatatgaaatattttatcttgtttcatcttgtccttcacattccattttagacaagcaggaagacagttcagatgatgatgaagctgaagaaggagaggttgaagatgagaactcaagtgatgtagaggttagtaataggggaaagatagatgtaaagttattgtaaaaaattgctcactgtctttttaacttaagccttaaagacttagttacgttttttctctagctttcaccattagaccttctgagggtgcacc

SEQ ID NO: 84874 - DNA, 1101 bp, Homo sapiens
ctttgcccatttttattttgggttgtctttttcttcttaattgacttgtagcatctctttagtttcatgctttgacatagtcacgggcagcatctcttctctttcagaattgtctccactactgcgcgtttctctttaacatacatttaaaaattttagaagcagctggctaacttcaacaaatactcctgttgagcttgatagtgctctgattgctacagattaatgtggggagaggtatcgtgtattttatcaacaccctttgtttaatctttctgagcctgataggcctgttctgaattaatgctgtcgttgagtgataaaaattaagatagtttaccttactgttatgtctcgtgctcttttgaaataattatagtttctctcagcatgtttctttctaaactcgtgttgtctgaactattaggaaggagtgtggatgggatgtgcagttgcggacaggaaaattctatcatcttttctgtgtcttgtctttctagcaatccccaaggtgagactggagacaatctatatttgcggagtagatgagatgagcacccaagatgtcttttcctattttaaagaatatcctccagctcacatcgaatggttggatgatacctcctgtaagtacacccgagtttcctgtgaatatgcttttgttgatgatttttcaagagttcttgccatcagagatggtgaatggttctggcccatactacttgtttatgccgaacttctgctgttagtccaggagagaaaaaattgtcgagcagtgaaacgcagcatgcccttgccagtctgccagctcataccccatagtgtcccacgtcagctgagaggtggtggccagggctctaggaggtgggttactggcctctgaatctgccgtagttgattgaggcctctttaacactcaccttttcccaacaaaggagaggatccaactgcgtagacttggggctgcattttcagagccttggactttgtcattactgccttctgtactgttactcagagggctgactctgcctgtgtctctgacctagagatagaccagaatagacactggacagagtgtcattctgaatagacagaatg

SEQ ID NO: 84875 - DNA, 1843 bp, Homo sapiens
ataacgtgtgttaagtgcttactatgtgccagtcgctctgctgtgtcattaactgatcctttcaacagccctgtgaggagaaggtgttgattatttccgtttcactggggagaaaatgaaggtgctgaggggttgggaaacttgctcatagtcccacagctatgtaagtagcaaggctgaggttcaaagactgatctgactgaaacgtgtgttcctaactgctctgccagcattcagacagtttgggctgtggcacactggactgtcctgcatcaagagtgactcgctacatttgaacgattcagtgtcaaaaaggttcagtctctttatgcccaagattcaaactctcatggttggaagagacctcagaggtcatctaggttaaccttgtgcccaaccctgcaggccttttggcaaacttcctactggtcttttggcggctgcctgaatgtttcttaagtgacagtgtgagaactatttatgagacaggcaactttatttttgggtacttacttgtgttgagcattgccttctagtaatttctgtccgtcagttactgtgtgactgtgaagtcctttcatacagtagcccttcgggtgctggaagcacaggcttgctgcccattcgctcaactttgcttcatgtgtcgcaactttctggtctcccttctctaaacgctttgccgtttctgaatgttctttctgaggtgagatatgggttccagttatggttggattcacagagagaacggcaggactgttcctcaccgttgtctctgtctcagccatttcagtgttgcactcatcctatatgcagccaaagcacttaggtcttttccccaggaattgtgcccatcagaacagtctttctcatcatgtacttgaggcacttttttaaaaaaattacttttaaatgtagtcctattaaattacatcttgttgatttcaaacctctgctttcagtctgctgagtgcattttcatcgtaactctacctttcagctcctagctctactcctcagcttcttgctctccattgtgtacacgtggcttctgtttcttcatccagtggttggtgaagggtgggcagtgtcttccagtatcataagtcttattctattaccataaggcccacagttccttttactgtcatgaggaactggattacgtggcttaatgaacttgaaatagagcaccgtctatgtattctctgaatttcttgatctggtaatcctatcaaaaaagaaatgaggttagtgtggctttcttcttttttttttttgtttcatccacagtcttggagcttgcttcttatggaactgttgtcatttcctgtgggaaagatttggttatttatttatttattttttagagatggggtctcactgtgttgcccagggtggtcttgaacttctggattcaagtgatcctcccgccttagcttcccaaagtactgggattacaggcatgagccacaacgcctggctaattttgtatttttagtagagatgaggtttctccatgttggtcaggctggtcttgaactcccaacctcaggtgatctgcccgcctcggccttccaaagtgttgggattacaggcgtgagccaccgcgcctagcctgctgtcagcatttttgatgagcctgttcactctggactctaatcttttcttcattagctcttttacaaacagttcatgctcaccaaagaaaatttgtaacatagaacaggaagaaaagttgcccacggtctaccatccaaaccccgtcattgtcaacagtctgtgtgtttccttctaatctcttatggcagtgaacttttgtttttctcctttgcagtcacac

SEQ ID NO: 84876 - DNA, 1027 bp, Homo sapiens
tctccagcaaacctttttgcttttttgtgcctccatttctgcacctggaaaattgggatgttgaaattgtttagttgtaatttgttggcataattgataataacaaatgaagtgtcatataactttataaactttaaaggactattcattcagtcagcagatactcactgagttcctactatgtcccaggcacagtgataggctgtgttatgtcggagatggttgcaaattacagcgatattaacatatccccccagtcattgagtgtgaatatccaggtctctgccagactgattcaaggtgtagtgttgcttatttcttcttttttagttcaggtttgtcactgatgcatcatgatgcatgtgtgatttaactcgccttctccatattttactactttcactttttctgtactttctaggaagcaattgaaaagaaagagcagcgagccaagcgcttccattttcgatcggaagtaaatcttgcccaaagaaatgtagccttggaccgagacatgatgaagaaaggtacagggtgttttgtgggaaatttgtccacatttccccagagagtgccttttccctgccatcacctcatgcttctggccttgccttgcgtgtccactccttatccaagcactcttgtgagaagggacctgtgaagtctccatttctgaggtcacctgtttaaagttcagatgctgtcagctggctcagatgttagagctgggaaataagagattgtcttttctgaggaggcccagaaaaagttaccagttagtggcagagctgagattcgaacctgtgcttctaaggacccttactcattttctccttttatcgtagaggtgttaacttttctttgcctttaaacgtagtgaaagtgtatcacagtgagaccttcttttcggggagttagagcaattttgagattggtggggaaaagccattaacacttttgttgataatctgaatctattggccaggtgtggtggctcatgcctgtaatcccagcactttgggaggcc

SEQ ID NO: 84877 - DNA, 1056 bp, Homo sapiens
tagagctgaggctggagaagacaccagggctgactttgaccgagggccatggacgcgacaggcctgtggccctgcgcatgctgaaataactggaacccagcctctcctcctacaccggcctacccatctgggcccaagagctgcactcacactcctacaacgaaggacaaactgtccaggtcggagggatcacgagacacagaacctggaggggtgtgcacgctggcaggtggcctctgcggcaattgcctcaccctgaggacatcagcagtcagcctgctcagagcgggggtgctggagcgcgtgcagacacagctcttccggagcagccttcaccttctctctgggatcagtgtccggctggccgacgtggcatttgctgaccgaatgctcatagaggttgacccccacagggtcacgcaggactcggacactgccctggaaacatggatggacaagggcttttggccacaggtgtgggtgtcctgttggaggagggcttgtttggagaagggaggctggctgggggagaaacccggatcccgctgcatctccgcgcctgtgggtgcatgtcgcgtgctcatctgttgcacacagctcactcgtatgtcctgcactggtacatgcatctgtaatacagtttctacgtctatttaaggctaggagccgaatgtgccccattgtcagtgggtccacgtttctccccggctcctctgggctaaggcagtgtggcccgaagcttaaaaagttactcggtactgtttttaagaacacttttatagagttagtggaaggcaagttaagagccaatcactgatccccaagtgtttcttgagcatctggtctggggggaccactttgatcggacccacccttggaaagctcaggggtaggcccaggtgggatgctcaccctgtcactgagggttttggttggcatcgttgtttttgaatgtagcacaagcgatgagcaaactctataagagtgttttaaaaattaacttcccaggaagtgagttaaaaacaataaaagccctttcttgagttaaaaagaaaa

SEQ ID NO: 84878 - DNA, 1034 bp, Homo sapiens
gcggcagaaccgatgtgaattcattcaggtcatagggacagacttgagtttgggtgttggcaatcccggtagagggaacagccagggcaaaggcatggaggtgggacccacagcgctgtggctaccttacctggtagccagcctgacacccaggagtgaagccttctctgccttcttttctcaggttcccaacaaggctacgcagaagaacccccttgactgaagcaatggaggggggtccagctgtctgctgccaggatcctcgggcagagctggtagaacgggtggcagccatcgatgtgactcacttggaggaggcagatggtggcccagagcctactagaaacggtgtggaccccccaccacgggccagagctgcctctgtgatccctggcagtacttcaagactgctcccagcccggcctagcctctcagccaggaagctttccctacaggagcggccagcaggaagctatctggaggcgcaggctgggccttatgccacggggcctgccagccacatctccccccgggcctggcggaggcccaccatcgagtcccaccacgtggccatctcagatgcagaggttggtggggcagaacgaggggttgttcatgagcccctcagtagtctgcaatgaagactctttcctgcccctgtctgtgccacacggctatctagctttggtttgcataccctcagagctggggagatcactacctaacaatatagcttcttcccaaccaggggagctccagctgagccaaaggctgccttccctaagtcctgctattcccactcccagcccaggcctaggaaataggtctctccctggtcccctatgtagtcttcttagagatgtgaagatagatgctatgtcccccttcccccctaactcttctccagcttgcacccctcgcctctaattctgcctcttagagtctgctgtgactcagaagcggccggcctgcctccagcctctgggcttctgctggagttcttgccatttaggtctgaaagtgaactcaggttc

SEQ ID NO: 84879 - DNA, 1038 bp, Homo sapiens
cccccactctcccccaaaaagagagggtgagactaacaccaggaggtgggcgagcggcattgaacagatctggggagctggccccagaaagcacctccacctccacctccttgagatgttgacggtggtccctgtgaagtttggcttggaaaggtggtgcctggctgctggaggacagacacaggctgggtacctgcggctccatctgaggggtggggtggaggcaccccgaggaatgtgctcactggaagcccagacagccctgcccagcgctactgcagtccctggggcctcctaaagccagacggggcgggggtgagagagggaccctttgcgctcccaagccagctgggtggccttttagggaagtttttctgaagcctgatgcttgtggcttccccgtgatttatgtcatttacgagggatgtgtcctggggagaattctggatcctgggtcagccctgggggctgggggcggtcctctcaccccacctcctggctctgcccaggtgtggctgagcagttgtcaggggaggcgtgggggctgggctgtggtggttgtattggggacagatctgggaggttacaggcgggcttagactttactctgaggacagtgaggaaccatgaaatggggtgttgggactggatttcggcttttgcttgatgctaggggcagaagtatgatgggacggtaagactggggctgggggcagggcggcaggccttgaggccttgaggcctggttggggaaggcagtgggagagatgagctctcgcaatttgggtgaaatcaggcctgggtgtgtgtgatgggcaagagaagcaaggatgagcctggtgtctgaaccttacgataatgggtggtgattccccaaaatgaaaaccaggagagtatgtactggagggtttgggggtgctgatggaacagtggagtgaaggaggcgtgggggacgttgcggggatggatcctggatgcagcttggggggtccggtggggctggggtagactgaggtctggactaagggaggccttggg

SEQ ID NO: 84880 - DNA, 1059 bp, Homo sapiens
cagggaggaagccaggggggctcctggttcttgtgctgtctggggctgtcgccggagtggcaaatacagagagtgggagaggtggcctgaggggtccccggggaacaaggttcagcaggcagctggacatctgggcttggggctcagcaaagggccccagggagagcaggtgggagggtggaagcgggcccagacagcagaaaccggtgaaggaggctgacaggaagtggacagagatgcaggcggagggcagggacggtgtgtggcgatcaatgccagtgtggggggctgaatgtcagtgtcagacaccaccccgaccccagggcggccaggctgggaagggctcacgggccggtgcaaaggaggttacacggaactccagcaaaggcagctgcaggggcaaggagtgagtgaggctggggatgcgggctggaggctgcctgcccctcactccctatcccctgggtccttgccaggccaagggtgtgtatgagaaggtgggagaggccacggagacagctctgacttgcctggtggagaagatgaacgtgttcgacaccgacctgcaggctctgtcccgggtggagcgagctggcgcctgtaacacggtgagcagggctgggggctcaggcctccggctgcatggctggggcttctgggacatctggagaaggcagacaggacactgaagtttttgttttgtttcgttttgtttttttttttttttgagacggagtctcattctgtcgcccaggctttagtacaatggtgcaatcctggctcactgcaacctctgcctcccgggttcaagtgattctcgtgcctcgacctcccggcgcgtgccaccacacccggctaatttttgcattttttagtagagacagggtttcaccatgttgtccgggctagtctgaaactcctgacctcaggtaatctgcctgccttggcctcccagagtgctgggattacaggcgtgagccaccgctcctggctgacggtgaagtaagacttggagaaaagaggggagaaggctgcgtgtgggcaaaggtttggagttgg

SEQ ID NO: 84881 - DNA, 1054 bp, Homo sapiens
aaaaccacctcttatataaatattatctttctggagcagaaatcctttttcaaaaaaattagttgctatatttagttgagctgtgggaggaactggggagataaatattatttaatatcccccattagtgacttggcagggaggttgtgctttgctgcaggagagctgggcagcatgggctgcctctgaccctggggtgggctgggggcgagggccggcgcaggcaggtctgcggtcccactgcctcttttgtgctgctatagcctccagcttgggaatcctgattcctgagggaaactggagacgcagcccttggcctgtccctggaatcacacaaatactgcttctgtacgaccctagccaggtctgtcttcattctgatatcatgtcttcattggtccagcggaggaggaactgactgggagggagggagccccagccttccccacctgttatttggttagatgagatccttggggtgccctggccagcgcacacctgtgtgaactgatggggaaggctgtgggcttggcgtggtgtgtaggtccacagagggtggatgtgtgttggggtgtgatgggaaaagttggggagggatattgctgggctcccctggatcctctgggcattgatagtattaataataaaagctgatgttcactgagcacttactatgtgccaggttctagtctcagcatttttcatctattatctcatttcttccccaaaacaactccataagggaaggactgttgtcatccccattttatacagcaggaaacggaggcacccagaggttaaaccacttgcccgaggtcacatagtaggtggtggagctggcactggttacctgctcctctctgggcctcagtttccccatctgtacaagacagtcacaagttctgcaggatgcagaaccctggtgtgggcgtctgtgctaggagtttgggtcagccggcagcagctttttcagctttgcctccagccttcttgggtccctagagggctcttctctcagatcactgattggggctgggggcattccagggctcta

SEQ ID NO: 84882 - DNA, 1177 bp, Homo sapiens
tctccctgacacgtctccctgccaaccccctcttcctccctctgccacctccaccctcttgctgcccagaccctgaaggcctgacgggcctggcctcgcctccagggcatctcagtgccctcctggccctgttttctctactccctctggtccccagcactggctgttcgtttcctgtgagtgccttgcccttccccacctgcatctttgcactgttttccccagagagttttcccagacctctgcagacagccttctgagcctccgccctgggactgcccctctgggcagtgatgattcctacctacatttggagctttcatgtgctcttaatagcattttttttctctctccactctgcaggcctgtgggggaggggaacacatctggttcccctcctccgtccccacatcctcagtgctcagctgagggtcttatcagcactcactgaatgagggagtggctcccgacattggcgacaactctttttccctctacaggctctgcagaacattgctgccatcagcctggccatcaactacccaaacaaggccacccgcctctggaatgtggagtgttagcccttggtggggcgtgcatgggactagttcatctgccacagggattttagagcagacatctaacctcattcaggaaaactcctgtagcgccagtgcccagctctccttgagctgaccactccagttaggatgccaagcagccacgtctccaagagctcccgtgcgtaggctggacacaagcacaggctgtagcatggtgaaaataagccaagcagtgcagaatgcctcagaaagggtgggcagggggcccttaagaaggttcagagaccagccttctccagaggctgtcactgcaggagccgtgggcctgggaagacttggaagcggcctctctcaactggtttctgtctccgtggagctggaactgcctgcacttgccttcagagggaggcacagtccacccagatccacctttccagcaagacccccagtggctgcccagcctgggagcacctctttgcttttcacaccaaaccaaaactggcgagagcccctcctagccaccagtgatccccaagcatccagtacagaaccaggcatcgagctagctccctgcacggccgcaccctcccagagaactccttgaggagaacaag

SEQ ID NO: 84883 - DNA, 1028 bp, Homo sapiens
gattgcttattttgtcaggcctagagccaatgggggagaaactgcccgggatcagcccttgacaacagtgagttttggaaaataaaacgatgggttatttctgcttccttctctttttttcctcccctcagcacaatagactgattgaatgtgggagctgaaagggcctttcagagttctttagcttccctctcctttcacacatgaggaaactggcttgaggaggggtcccggcctggtcacccaagggcaggtggaggcaaaggtgaccccggcaccgggcacctggctcccgccagggttctgagcaaggcagtgccacgcggtgctgggcggcgtgagtagcgtccgcccatgagaggcttctgctttcgcaagcaggtgtcccaggtggtctgggagagctgcactgcgcatctggcgctgtcactcacagcccctgctctctctctgcaggagcttggcgtgctgcaggattacctgctggccctaaccacggacgaccaccttctccgctgtgcggcacaggtactctctccaccccaacagagctggcccccaggctggggcgccaccatctcaccattgccagggcagagaaggtctgtacattgcgtctgagtaggacagaatccacccggagcttacacagagcttgttccagttcagtcacttcctcctggtgctcagagagcatgcacgagccccatttatcagagtcattcactctaaactgtggggtcagaagaatttgtgtctttaaaaccaaaacaaccgatgccttaaatttagtttggctgattcttgaagtttccgtggagttagatttcacatatttttagatgtgagttgcttctctggtagcggaactcctcttctgacagctgtttggtctcaggacgcttcacacttttcactgactgaggagctcagaaagcttttggatatgtctattatgcatatatccatatgtgccattagaaacgagattttcaatttaaaaattaagcaaaagtgtaaacctttat

SEQ ID NO: 84884 - DNA, 1548 bp, Homo sapiens
aggtgtgaatgcagcaaaggtagggtcactgtatcctctcccaaggattgggctagtgaggaactcaggggccctgagcgcgatttccagctgaaccagaaagctttgtcgccatcttcccagtttccaagtgcagaaatcttgaggcacattcggtagctcctttttgatcctgtccctcacccaccttcacacacacacacgcagtccatgaggaagttcatttggcctctcagccttgctttgtccatctgagaacaccaccagacctcgaggtcttttcccggccttgcagccctgcaggtgctggcaggcttgctctagcatatctatctttcggaagggacagagggagccaccctgcctctactaggcccttgcataggcgtgtcctcccacagttcttgccacctagagctcccaaccctgcacctcactccaggcatcgattacattgtgtggtcattatttatccataggccaatccacctgcttggctggggactccttcaaggaccaggaccctttatgattggttcagttagttctttcagaccacctctaagtagcatcattctgaaaggactgcagtgtcctgattgacaccaagagcctggtcaagtgagaggtggctggtggagttggttttgggtggtggagtcacagaggctcgtcctaggtctaagatgatgccagcacctttgggtggagcttgggttgaagtaaactgtcccttcttcctgatgccacttgcaggccctgaccttatctgtctgcttcccaccagatcctgcagaaagtgctccagggctgccgagaggacatgctggggaccatggccctggctgcatgccagttcatggaggagccaggaatggaggtgcaagtgagggagtcgaaacacccgtataacaacaacaccaacttcgaggtaagcctggggccggcaggccccataagagcgactgagccgcagagacctcgtcagcccctccgtgctcagcccctccatgctcagcccctctgtggctctctcccgctggacagcagagacctgtccaggaaagtgcttccttgaacaaactgcagtctgcctccctgaggccagggattctgtacaagcaagtcttctcttctccggacttttcttgttttaatagaagaaaatgggccacctagccctggaggagagctttactttccctgcggcaggctcctcagagtgagtccttggcttcacagtgagacagtgagtctgaatgtggtccaggttggaccctcactcttcagctgccacctcatgacctgcccccaccgtggatactacagcccctttttaaaatttcccagaactgaatcagagtctcatcttttccatccttaactttgtgcctgggcagggaggtaggcattttgatgaggcaggaatggggcagcctccgttattctcattgacttaaggccatgtagtccctttagcacttttttttgagacggagtctcactctgtcgcccaggctgcagtgcagtggtgtgatctcggctcac

SEQ ID NO: 84885 - DNA, 1064 bp, Homo sapiens
agtaagaatgcaaattgtcccactcagttgcttgatggataggtagccattactatttttgtgtttacctgcaagctggctttattggctaagactgagcccgagagatttatgtttctgcagtccctactttagtaaggcatgttactatagaagaaatagctgctggaagcatgaactgtacttttgtgcctttctttttctgcctgatgtcacccttcagtgaaggactaccagctggtccagaagggaggaggacaagagtgtggtgactctcgggcccagctgagccagtactcccagcactttgcctttatcgccagtcaccttctgcaaagcagcatggacagccattgtcccgaggcagtagaagcaacttgggtcctgtccctggccctgaaaggattgtataaaacactaaaggtaatggggagcttctccagttggcagtggatctggctataatttgacatctgcatggggattaactaggaggaaatgccatctgatttcgatggatggtaaaccataggatcttgattatttttagaaacgcgtgggccttacacacagataacttcaaagaggaaatacaattttcctgatggcttctctgtctttccattgtttcaaggaatctgatactactacttcatgggaacacaactttgtcagacgagaagaaaaattgaaaagtttcttactttcctctctaaatgacaattcctgtgcttcatcatagaagatgaagggaagaatagagggagctagcctcctaggggatgagcaacaggtttgacagttggagtggaaggaggtagacaagttgaaaagctgggcgatggccaggcacagtggctcacagcagtaatcctggcactttgggaggccaaggcaggtggattgcctgagctcaggagttcaagaccagcctgggcaacatggcaaaactccatctctactaaaaatacagaaaattagccaggtgtggtggtacgtgcctgtaatcccagctactcgggaggctgaggcatgagaatcacttgaacccgggaggcagaggt

SEQ ID NO: 84886 - DNA, 1046 bp, Homo sapiens
tggtggcatatgccttttgtctcagctacttgggaggctgaggcaggaggatcacttgagcccaggagttagaggctgcatgcagtgagctgtgatcatactgctgcactccagtctgggtaacagagagagactcttgtctcttaaaacaaaaggaaaaagatgtgttcagtataattgtttatttaattcttccagggaacaagaattacagaataaaactttctactgtattttatttcttgatcatttcttgagtttttccagttttagaagtaaaatatagaaaaattacatagtggaaaaaaacaaaggaaaatagaatcatccttaatcctaacactcagaagtaactgatttttttaatatttctccaagaaagaaagaaatagctattagcatttttatttccacctattcttttctctttgcctattctaaacacatctatgctggatatttattatttgctacagaattaagtttacaaattgtgaatgtttttccataattaaatgttcctgaatggcctcgtgttatatgccagaaatggttcatatcctattttcagcttactataaacagattagtcatttccaaggtaccttgtaactgaagttgttccacagagcagcagtatttcaggacttggtggtttagcttaatctgtggtatgtgtttacaaagtatcacaattacattctggtatgtgggtaaactttctctaagttttaatagtatccatggttttttttaaccttttctttctcatttcaaagattctcaatatattaaggcaaaaatagaactgtcatatgtcttcttctctttctagagttaggaagtaacatggtagtacctcaggcaaaaatggcattagtcctaagctccccactgtggaaacctgtcttcaggcatcaggtttgtccagagttggaattagaagcaagctggcccactcacccacaccggaatagtaaggaggtatttactcttccgttttctttctatttagactggaaactgcctgcaagtatttattactt

SEQ ID NO: 84887 - DNA, 1771 bp, Homo sapiens
tgatctgtgtgaagatgggaatgtcaggtttgtcttcgagcctgcctgctggtttgtgcagggctgtcaaggccatctgcctggagcactgatagagaaacagtctgctgcatgtggctaggtgtctagtgatagaacctttctttcccctggctcatttgttatcatagctggatgttgagacctggcaacaggaacagcctgtggtgttacatacgtggacgaaggaatctgcccacaactatgaaaataattgccatgaggtatccgtctttgttagcccaggggcaacctattttgaagtggaattcgatgacaggtgtgaaactgaaaaaaggtaagacttctatattctttcacccccaagcgctaataggtcagcaatgagagaaggaagctaatagaggttatgccttcacaggtatgattatctggaatttaccgacgctagaggtcggaaaacacgctatgacacaaaagttggcactgataaatggcccaaggtgagtgatagtcccagaaagaggtacctacttctgcaccaatgcttttccttttgtcagccttcagggggcagtagaggtaaggtctttgaagggaggcatttatgttacacgtttgtgaaaggaaggatttatatcagagtttgaccagctatagtctgtcacctgttttgtaaacaaatttttttggaacacagccatgcctgtttatcatttatagctgctttggcactgcagtggcagagttgagtagttgcagcagacagcgttgtctagagtaaatgaagagccttcatccttagcaagaagtgctggtgggtctaggaggatggcccagaccatgtgatggaagccaagagtctgcctcacagttagagctgcttgagctcttgggctggaggtttagtactgcctcagactgttgaccttctctccatggtcagtggtcttggcaggagcagaggcatggaaatgtgaccactggctgagtcggtagtggacagatggtcaccccaggtgtagaaagctgagcagcagtattctgccaactctccttcttcatggggtgtggctgtgaatggtctgtttccgtcacccctttgtacatttctccgttagtcattttggacatgtggaaatagagatcaattttaaactgagatgtttctcgtcatgaagagcatgctgatttctgaagcactcctcctctaatctgtctgaccacatgatttctgtttgtctctagaaagtgaccttcaaggccggtcctcggttgcagttcctctttcactctgacagcagtcacaacgaatggggctacaaattcactgtcactgcctgtgggctgcccgatgttgccgtgtcttgggggctggatttacagctcctcgtctcccggctgatgggacgcctggcttcccagtgcatggcgctcaagtctgtgcgccgtaagtgcacatccctgtgctttcccttcttacaaccacggtgaagtgcaagatgcgcgcttgccctcttgtaggtcgtttccacgtaatggcagggggttaataatacgccttttcagtttcctttaaaccgaaagaataaagtgtccactcaataccattgtcacgaagctttttgccttagactttggaacatagcaggaaggctgccatgggttctctgtctatggaggataacagcttttttttttggcaacattgtcatttttttgcaagtaggtgtaggtatagtccaaccaaaaggcaggagtatagaataag

SEQ ID NO: 84888 - DNA, 1084 bp, Homo sapiens
gaggtcttcgagatttttgcctgtttcaactaccagagaagctaaatgggcctacaggcttcattactagaagtattgactcttgaaggaggaagggaactaatatccttagcgactgcctgcaagtcagactatacctggtatggatgccagacttagagggctgtctgtttaaaatgtgctcagaatcaagtagcaaggatgctgaaagggcctggggccgtcctgtgaagacatgtgaagacacaaggaacgtttagccaggactttgaagctagcagtcgtgagatgaggtgtatttcatattggtggccaaggtgatttattcatcagccttctacctcagggtctcatccaggactggaggatttgtgagtctgtgctaatggaagcacatgtggacagacagcggcacagccccagctgggtccacagcctgtattcctgacccaaactcctcccatcccatggaaatgacactgaaacctttctgcgctctgttttggaatcttttaaaatagtataaaaatctttctcctgaagccaggtgtcatgactaatttgtatcctttcagtgacaaggatccaggcggccttcttcttttacctgagaagaacgacctggccaagatgaacatcagtgaagtcctggcggtcatggacactctcgtctctgttgctgctcgagaggtatccagtggctgcctccctgttttctttgtctcatgcttgtgggggcacgtgatgtggcagtctcttgtgcccccctttgcctctttgcagtatgaatgtactttgttgtggttttttctgttgttgttgttgttttgagatagggtcttgctctgtcacccgggctggggtgcagtggcacaatcacagctcactgcagcttccccatcccaggcccaagcagtcctcccacctcagtctcccaagtagctgggacacaggcacacgccaccacgcccagctaatttttaaattatttgtagagatggagtctctcttatgttgcccaggctggtcttgaactcctggaatcaagaaatcctcccactttggcctcccaaagtgttgggat

SEQ ID NO: 84889 - DNA, 1033 bp, Homo sapiens
tccttaaagcatcatgtgaggggaaatggcaggggaatgtgttgaggcatttccagaaaagcagggggctcaaatgcatgttgtagaagcactggtcaggatcatgttgtgtgtagtatggactggaggagagcaagtctggaggcagctgggctgggaggaggttgtcacttattgcctaggaagccagtgggtgactcctactagagcagcagcagcagtgcagagatgtggaccaagagaccactaggagggagaagcgacaggacctggtgattgactgaatgtggagcaggagagggaaaaaagcctcatcggcagtgaatcctggcttttggcttgagcaggtggggaaattggtagtgcctttcttactctggggaaaaacaggtttgtggggaagatgatgagctcagattttgttctgttgaatttgaagttctgagaaacctttgaggtgttcggtagccaatggataatcggtagccaatggataaacaggtcaggagccaggaagagaagtttgtgctgaaggtacagatatgagaggcatttaaacgataatttaaaatgtagaaataggccaagtgtggtggctcatgcatgtaatcccagcattttggtaggccaagataggtggattttgagcccaggggattgagaccagcctgagcaacatagtgagacccccatctctaaaaaaaaaagaaaaacataaaaattagctggccatggtatcacgcgcctgtagtcccagctacttggaagactgaggcgggaggatcccttgagccccggaggttgaggctgcagtgaactgtcttcacgccactgcactcctgcctgggtgacagagtgagatcctgcctcaaaaataaataaataaaatgtagaagtggaagagatcattctgcaagagtgtgtgaactgggaagagaagagaacttaggtcaacatgagacacaccaggctttaaggggcaacaaggaaaactcagccagacaagcagcaggaaagccagggcctcatgaag

SEQ ID NO: 84890 - DNA, 1542 bp, Homo sapiens
gaggtcaaaccagtccctgagccatctagacagtttttaacgtttcagtataatgtgtttaaattaaaagcaaagaagtgtaattcagtgtgatacatttttagtgcttcaagcataaaccctcaactctctggtcaagccagctcattacccaaggcttcttaatagcagaggcttattacagtagcgtattggtattatttaatatttaaagattaaagattatagaagtgaggctttcattccctggctctctggattgatttaatttttccttaggttaccttaaggattttgaaaaatatttcggataaacctgtagaaagcatatggcaggttaatgttacttgtgttgatcacttacatggggtttgagctacctggattttttcatgtttttaagaagtgaaaagtttttgctctttgcttatagctgctgttctaccccagaggtagaactgactcttctggcttttgctctcgcaagaggaagtgttgccaaagtcatgagctctctatgcaccatcactgaccatctggacacgcagtatgatgcctcatccctcatcttgtccatggcgtcagtcagacagaacctgctcctcaaatatggtaaatatggtaaaacatgggggtgatagaaatgtcaacagtggacaaatcgtaaaaccattcttcgccatatgacctcctggtatcttctcatctttttgggttgttatagttacaccatgattcctggatgaacgtatcctctgagtatcagaccttactaggattggcagggagaagggggatttaggttcatttatgtgatggcagtatcaccagaagaggacacttgattgtccacaaggctatactcccatgatctgcttgcaaaattactcaggtctggtggccatttgaacacagccatctttggtgaagtactgaagtgtctcattgtgtaggccaagagggttggagtagttcttacctgttggagggaggaaactagccaagatacggtgcaaagggatctttgtcttagaatgcattcctctgcattcccgtgatagctgctctgaaggatttggacacctgtctgccactgctttccccccttgggcctagcagtaattcatatgagcacttttctaccaaaccaggatggggccttataatccttctcaacatgggagcccataaagtcactcccaaaagactgcagtgcagcacttctacttgtgagtgcagccttcctggactccacaatatgtggtgttgggtctcatcctgttggcagtattccagtgacatttctacccttttatttattttgagagagagtgtcttgctgtgttgcacagattggagtgcagtggcatgatcacggctcactgcagccttgacctcccaggctcaagtgatcctcctgtgtcactctcccgagtacctgggaccacaggtgcatgccagcatacctggttaatttttaaaaattttttgtagagattgggtctcactatgttgcccaagctggtcttgaactcctaggct

SEQ ID NO: 84891 - DNA, 1034 bp, Homo sapiens
ctagaccagcctggccaacatggtgaaactccgtctctaccaaatacaaaaattagccgggcgtggtggcgcatgcctgtaatcccagctacttgggaggctgaggcaggagaatcacttgaacccaggaggcggaggttgcagtgagctgagattgtgccactgcactcctccagcctgggtgaacagagcaagactccatctcaaaaaaaaaaaaaaaaaaagccgtaattttaacccacccctcattcttggacatttagattgtttccaattttataccattataaccttgctttaaacatagcattttggaaataatcacaattctgtgattgctttctgggcttatttcgttcagggagccggaatgcttcatgttttatctcatttcttctaatgctttcctgggccaaaagaagtgttctttgctcaaaggaactgaggcctagggaggtagagtctttgtgtctcacccctagcaaataagtagttaggcctgtgggttagaagcttcctgtcttatattgtgatcttttctctaagttgtgtcctttttaaattcttaccttctctcctctgacccaaataagaaattgtgacatctcttaaaagtgagtcatgtctgtgtcatctgtttggatttgattattaaaaataaattctcacaattgcttgtaagccagccactgttctataacttaatccaaatttcagaatcctaggaagaattctagaaatgttcttaccatgtattcagacaggcttgttttaaaatgttctttgtgtagttttttcaagactcctaagttcctaagaagttttgttgtaaagacttaaatcacccttaattttacatattattcttatgatttcttagatttgtcaaagctttttgacaaatttattatatactagttccattgcacatgctatttatttctgtcatcaaagtgtaccttcagaattttcttttcaaaatgtctattactattttgcttttagttgggagcccagcatttgcctaaagaagt

SEQ ID NO: 84892 - DNA, 1136 bp, Homo sapiens
cccttttatcatattcattaactattgatgaatcaatagaatctattaaaaatagcaaaaatggcctggcacagtggcttatgccgataaatccagcagtctgggaggccaaggcaggaggattgcttgaccccaggagtttgagaccagtctgggtaacatagtgagactttgtttctacaaaaaaataaaaaactagctgagcatgtcccagccactcaggaggctgaggtgggaggaccgcttgaacctaggaggtcaaggctgcagtgagctgtgatcacgctactgcactctagcctgggtggtagatgaagaccctgtctcaaaaagaaaaaaaaaaaagatagcaaaaatgtcagtatttttatagccttggttatatagaatttttattagcaatacacagcaggagttgtgtgggaagttggaggtgcagggagtgcttgatttgtggaagttttggtggaagtgggacttgagtgctaccttgagattcagagggagtgagtctcacttctagagttgataggagttcacctggacaaaaggagcggaaagcagcttttatagatggaggaaagtaatggagctaagaggttttaagcatttggtcttcagatggtaaggaacccgaggggttatctggtcaaaggaaggggaagggagttgtggtgaagaacatgaaccctgaagccttggatgcaaacactagctgtgtgacctcaggcaaggtacctgacctctctgtacaactataagacggggaggttaatagtactgttactgttatgaggaataaatgacattatagtatataaaatgctctgctcggtgcctggcatttaacgagtgcccaaatattgattcatagtttccaagtctgtgtgtcgttcccaactgaatgaatgatagctgtgctaatctcctcagaccttgagtcttacaaatatcattattttctcagtatgctataatgtgaacaatttgggaagtagctattatctggtagtgtagcgttcccaccgcagggcctcagggaagatgaggctctgctctgtgccacctccttcttcccccacctgctccacttttttttttgagatggagtctcgctctgtcgcccaggctggact

SEQ ID NO: 84893 - DNA, 1021 bp, Homo sapiens
gggagagaaaacattgagttatatttggcagtctttgattcacatagctaggtcatacagttctgtgagtgaggcttagccaaggtttaaaaacctgattgtgataatctcacagtggccaccgtctctcatgataatcttgtgatggctgctctgtctgtaagaactagtaagttaggactagccaaagaagataagatttagccatgcatttgattctgtgctttaagaatgtctatccttagacttgaataagtatatacttttgtgcatacttacacagttaattctgcgttgttaatctacgtctaagcttttgagaatatactgctgtattttactgcaagatgaagggcttgtgaagtaatgtctttatagtagcaactaaaatgacaagttgtttccgtcattcgtttttataagagctaacatggtaaaacagatagccacgggtgcgcatggtttattataatgctgagagtttccaagtgttacatgtttcttctttggcttcccaacttacgctgccattggtgtccacgcagctgtcttgctttcacattcctgtgacctcagttatttgaggaggtgttataaagaagttcttggagttggaccatggaccaaagtctgaaacattatcattttatagtacaacacaccttttctcatggtaggtgtggtccagggagaaggtgcgcatggtttattataatgctgagagtttccaagtgttacatgtttcttctttggcttcctaacttagctgccattggtgtccacgcagctgtcttgctttcacattcctgtgacctcagttacttgaggaggtgttataaagaagttcttggagttggaccatggaccaaagtctgaaacattatcattttatagtacaacacaccttttctcatggtaggtgtggtccagggagaagggactctctcagtttgctcacaaggagcaatatttaattaactgccatgtagaggggaaatagaattaaaattaagttcttatt

SEQ ID NO: 84894 - DNA, 1046 bp, Homo sapiens
aagcagttctcctgcctcagcctcctgggtagctgggattacaggcatgcaccaccacgcccagcaaatttttgtatttttagtagagacagggtttcaccatgttggcctggctggtctcgaacccctgacctcaagtgatctgcccgcctcagcctcccaaagtgctgggattacaggtgtgagccgctgcgcctggcgctaagctgttctgagtactgcgcctcactagtagagagagccatcatagacaagtaaacagattgaacaactccacataggaccatgcatcaaactgtgatgtaatacgtttgggagctttggctcctttagagcacatgctcaggagtggcttcttggagaaaatgaccgttaagctgagaccggcaggtgagtgggaggcagccacaccgagacctgaggagagtgtgctgggtcagggaagagcggtgcgaaggtggggagtggggaagcacagccaagacacagaaaggaagccagtgtgctggagccccccgtgaacgaggggggacgtagcttgtaagaggctgaagaagcaaatcagttaaatggttacagggccttagaggccttgataagaaatttgcatttttgtctgctttaagaagccattgaagggttttaatcaggcatcggagagccatggtaggattcatgtttttaaaagatcccctagttgttttatggacagagaactctaggagggcatgagctgaccagagagcagttaggaggccactgccacagtccgtggtttggaggagggtgatggcagtgggaatggaaaggagtgaacagaatcaggatctgttcagaggtaggactgacgaggttttctgatggatccgatcagacagcaaggaagggagtatgatgtggatgtagaggaggaggagtcaggctcctaatgcaggtcacaggctagaggcaacacggatttgggaaagtcagggagggcgttggacttgggagacgagctgaatctcagatgcgctgaacatacgcgccactagaatcgaaggtaa

SEQ ID NO: 84895 - DNA, 1655 bp, Homo sapiens
ctttgactggacctcagctcacacgaatctccaaggaaaaactctacagagcatcttttagagcaagagattcatacaggccaagtgatgagagggggagtcaccaaggcttcagccccaagggcatctccagcctcaggccggcaggtcctatgtccttgacacaaatgcttcttgctgaaatcctccctagtgatgctgcgagtgctgttggtcccagttctgtgtagcttgccctgccccatgaagggccaccagccaagggccctggccacgtgtgcgccaccttactttggaagtctctggcttgtgtgctggatgaggctgccagaacttgttgggcgttcatcgctgttagtacatatattaaccgtgaggtgttaaacttttcttttgaaggtttggccagtttctaaaaaatgcacatttaaagagaagcatctaccacggctttaaaacaaaacaactctgagatgaacaatatgtgttatactcagagattaacaatctcaatcatacatactgattctttcagacatttaataaccactacatttttttgcattaatgaagtttgactatatgtgtaaagggactaaatatttttgcaacagcctgttctttgttcattcttttctggatagtgtgtcctctgtattgcggtagatttatacattctgttgcctaaatatgtgtgtaaaatgagctgataaactggagtactacttaaaaaaaagtctgtgatttataagatgtatatgctttctatgtgaatataagcttgtgcacaatgtttaaaagaaaaacaatgaattagaagagatcccccgtcccccagtctgacatatttcatacagaatgtttaaaagaaaaactctgctagtcttggcaaacatttggccatgtgaggcatgtggtcagtttccattttctattacctggaaagggccataaggaagcaggcagggcttaggtagcttggttacctaagttagaaagtaagagaatcatgattcggatatgaattgaagtggttggtacatggatacctgttctttaaaaggaatgtgggagatgagtcaagggtgaggccgattgttctgcccatgccctaccataccaatttcaataacaatcttgcctgtcattgcactcagaatcttaagatcatgtttcaaatatgttgattcaaacttgcttctaagcctgagtccagggatagcaatggtactgaccagctatggactgggagaacattgagtcctgttttccattggcttcagggcgcatccatgtggatataggaaaagcctctttccacagacttaggaagccccccgaccacgcggacgctcgctgggctgcactcagcaggctgcttgagtgggagctgactccaacatgccctgccctggctgggactaggcatgcttccagcccttcccgtgctctccctgctgtcaacacttgcgtacaaacctgcctagctgttgtaagttttcatcagtagcttaagtactagtagcaaaaacttaaattcattcagaaagttgccacttctgaatgagtagagcaggaaaagtaaactttactgaaacataatttgctgcaacagtcaacattgttatgctgaatgtgctctcaactgccctttg

SEQ ID NO: 84896 - DNA, 1018 bp, Homo sapiens
agcaggttggcctggccagagcatgggttcccacgggctccacggggtggaagaactttctggagcgtgttcctaatactgatttttcttctccatgtgtacacaactcgtaggtttagatttagttacattgggtgaaaagagctttgtcctttgtggagaaaccagtgtttcatgccagaggaaggcaactgagaccacagtagatgattccctctgtgttgaatccctcccccacctgcgcgacctcagctctcttgcagcccaagctctacgtgggaaagactgtgtcttggaaacggcagctgctctagaattctttggctcgtggccacatcctttattggaagatgctacaggttgtccacagttctctccagagcctcggggcccccgtatgtctgtggggactttgtgaacagatttcctgccagcggtctgttctgcccttggctgtcctccgccctccgtctgtggctgccgggctgggccgggtgggaagtagccctgcgcgtgcttttgttttccagtgctgctcctggcatacatgaaagggaacgccaacttgtgccgcgccatcgtccggtcgggggctcgcctcggggtgaataacaaccagggagtcaacatcttcaactaccaggtcgccaccaagcagctcctgttccgactgctgggtgagtggcccgctctctgctctcacagtgcaagcacagtcgtagtgttgggatcgccatgtattgtattggtgatctttcaatctcatgatgccttaggatcggaaccgctcgtttcctggcagtagctgggaccatttctctgaataagggaaggacttttgagcgtgttgggaaggtcactgtgaacagtctcttttcaaagcactctgccttgtgcatttcccacaccccacaaccttctagaaatgccaaagctccaggcaggccacccttcctgtgtgtcctggccacttacctgcacacctgtcctcttgagactgactcagatcctccagaac

SEQ ID NO: 84897 - DNA, 1069 bp, Homo sapiens
tcagcagggcaggccatcagcctctgtgggtgtcagaagacaagcaggctcggcccccataagggggatcttgattgtggcagagagactgactgttcatgtaatgaacttcaacagcttcttgcgggagccaaagtgaacgaattaaccaagcatcgccagactgccctccatcttgctgcccagcaggacctgcccaccatctgctcagtcctcctagagaatggcgtggactttgctgccgtggatgagaatggaaacaatggtaactcccagtcattctttagtggcttgaacgatccctccattctaggggtgggggtgcagtgcacccttgggtctgctccccactggggaggttggcttttacaggagcaaagctgtgacaggaagtgctctgggtagagcatccaacctgcgactgcccaggccttgggcagcctccccatctgagtgggagccctggaagcccacactgcctccttgggaaactgttaaatctcacctttgggtaactgctgaagcagaaggcacagcacagagcaatcatgagattgcatttgtgatgcatccttgagggcggtgaagaccagaaaggatggctctgtgcgtggccagtcgctgctgtggccgggtcccatttacagagaggtctgtgagggtgaggaggagtggaggtttttctgcatgtgcttctgggcttgcatagtaagaggatttacttcccagctcttcatcttgctgtcatgcacggccggctcaacaacatccgggttctcctgacagagtgcacagtggacgccgaagcctttaatctcaggtgagcgcgttgggcccgagtaggccccgcggcgcctggcctgctgctcagagctgctggttgctggtgcctcccatcagccccagggaggagctgcaaaaccggccgctggggcacctcaccagcttcgggtactttattttggtacttttggtaccggtatttttgttttaataaaaaatgcttcttaaaaggtttggccgggcgcagtggctcgcgcctgtaatcccagcacttcgggagtccgag

SEQ ID NO: 84898 - DNA, 1044 bp, Homo sapiens
cttggctctccagccagcacctagagtactggcgcatttatcagtggcattcatgaaggtgagatggaacttgggacccgcgtgaagtgagatcctcgcatgggtggagatgattgcttggtgtcttaggcttccgtaaccaccgtcttcagcattttcacaagtgtgactggattgcgtaggtggtgacctcacgtttgctcaggtggtgtgaaatggcctctcccgtttcttctctccagtgtgaaactggactgctgatgaaagcgctttgtggatccgctgcttatgagactggcacgtgccgtgtgtgacgtgtgggcctgtgaagcggcgtgccgtgtgtgtggcactggggtcgccctcgctgccgcctccacactcatgctaagacggctctgggaactacaggagacggtgtgctttgatttcattgagctctgttggctttccatcagcggagcaaagcccgggccctgctgttggctccctcccgcattgtgtatagagcgtagctcagtaagaggaaactttctccacgtttctcaaccctttgtttgactgctcgggtcaggccggcagtgcagctggggcatcaggatgctgggtgcttgttttagccaaagcaaagagactcccaaggcttgtctccattttccctctccatgagtttcctgatatcttggtgcttgcgtttccctatccttcagattgtctttttcttggttttccacatccagttcctactacaggaggctgccacagtggctcccttctcctgaccacgtgggtgtggccacgcacacctggttctgtgcacagatgtgtagagtgggtctgtgggtgggttgggggatggcgtttcatgttcattcttgggagggggtttcctaagactgagggaaggtctccatcgtgacctctccagtggtcagttcagcttgcagatgaagctcaggaggtactctgaaaagggaactaatattttgctttgcacttgttgctgtaggtggataacaagggccggaatttccttcatgtggc

SEQ ID NO: 84899 - DNA, 1050 bp, Homo sapiens
tgggatgggcgcgcaccaccacgcccggttaatttttgtgtttttagcagagagggggtttcgtcacgttggccaggctggtcgtggactcctgacctgaggtgatccacctgcctcggcctcccaaagtgctgggattagaggcatgagccaccgcatccggctggttctcaggctttaaatgtatgcatatcccctgggaagtttctaacaattctgatgcccgggttgcccacccccaagaccagtcacagaagaatctatgggagtggaaccccgactctggtatttgaggccagggaccaaggacagcagacccggccacagcagacgctgttggattggatgaggctcctgctttacatttgtaatcagcatgcctatacgccaggtccaagcgtggcgttttttaaaatgtccccattcctttcagtggctgtgacgtgaacagtcccagacaaccaggcgccaatggagaaggagaggaagaggctagagatgggcagacccctttgcatttggcagcctcttgggggctggaagagacagtacagtgtcttctggagtttggtgccaacgtgaacgcacaggtgtgtcgtttctcttttccggggagagaggtgtagccccagcatgagggaagcctcctcctatggcagaggaccttgcacagtccccagttccaggcgctgctgcttcatgaacacacgacctccctagcagcgttcatgatttcaggctgactgtgcttctctgtgcctttgtccttactacaacaggaggaagatttgtttcagctctttctctttgcctcctattcccccttagttacagatttcctctgagagtttagtcccaaatcgcatactgtatttaggaaaatgtcccagtagctcacttgagcacccctgagttacgccctttgatgcttttcaacattcgagcctgtgcagatttatatataaggccctatagccagataaggagtggtggcttagagcggagactcactgcagatgtgaaacacatgtttgtgctggtcctacggtc

SEQ ID NO: 84900 - DNA, 1077 bp, Homo sapiens
aggacggggagacagccctccagctggccatcagaaaccagcttccactcgtagttgatgccatatgcacccgaggagctgacatgtctgtgccagatgagaaggggaaccccccgctgtggcttgcattggcaaacaatctggaggacatcgcatccactctggtgagacaggcacaacgttagcctctgtttacagatggggatatgttgtgtcagagatggatctgctgcctgcgtagctgtcacaggagcaagatctgtcaagtaacatagtgggacaaggacaagcagttgaaagcatgttaaagaaacttgcagttcaacatggtcttggctgaccttttgtttttaggtcatctttaccaagaaaactaccaagaagcaagagaatggcggcgtttcctcaggagccttctcctggggttggttgatttgctatggggtgtcctcattatcaccatagtgataatttcctcaatcttaggtttatctcccttgtttgcaagacaggccccaaaagtggaggcaaacctgcacattctcattcagctctccgaagggcctgcagtgtgatatgaaggcgttgtgcacctggaggttttacctagttgttgagattacctgttaattgcaggtgtgtgttactgaggacccgttggtgcatgtgtacacagacactttctgttttctgtcccttctagaactcagctctaaaggacacaaattaaacataacttgtttatacttcccaagtctgtcccacaggacctagtgcacgaacttgcacacagcaaattttaattagtgtttgtaaaataatgagtgatacagattaaagtaattatcaatttattatcaaccgtatcttatctgaaagtggatttaatgctatacatagagctcagacttggtaataaaactgtttgcctttgctcagcagtgtttgtgaataacctatgtttttctgcaggtcagacatggctgtgatgccacatgctggggtccgggacctggtgggtgccttcagacgctcctgcacagagccattgatgaaaacaacgagcccaccgcctgc

SEQ ID NO: 84901 - DNA, 1053 bp, Homo sapiens
ctgtgtccacatacagagagtacctatgtggacttaaatgatacctactgtctggcgtgggcttactgtctggcgtggacctactgtctggcgtggacctactgtctggcgtggacctactgtctggcgtgggcctactgtctggcgtgggcctactgtctggcgtgggcctactgtctggtgtgggcctactctctggcgtgggcctactctctggcgtgggcctactgtctggcgtgggcctactgtctggtgtgggcctactgtctggcgtgggcttgccagtcatagggtggcagggaagagcagggtgttgtgcagcgtgaccgcattttgatgcaaacagaagaatcagcaatgcccattttcttttaggaaactgtttactacagcgggcagctggagcaggaaacgaggcagcagctcttttcctggcaaccaacggtgcccatgtcaaccacagaaacaagtgggtaagtgtgacagggcagccggagaaaatggtgttgatctatggaagaaatggcagtggtggatatgtaggaaaaaggggaataggtggtttttttcagtttttaatcagaataatacatgcatatggttaaaaagccagagtgaaacagattattttgtgtttcttcaaatattggttgattgattcattcagcagccatttcctaagcgtttgtgtaggaaacagtgcttgttcaggttatcagaccccgaactagatgctatggactttaatagaggttagcaaacgcgtgcacaaacctaccgcgatagcatttgattcttgataacacttcacatttgcttgggttttcctctgtggattgtcacgtatgagtctatgtcgcacgctaacaaggtggaatgtgcggtgttatgaataaaagtgttacctttggggttggacgttaccgagtttaccagctttcccatttcctccctatgcagtcttcttctttttttttttttttttcttgagacacagttttgctcttgttgcccagggtggagtgcaatggggcaatctcggctcaccacaac

SEQ ID NO: 84902 - DNA, 1061 bp, Homo sapiens
cgcccaggctggagtgcggtgggactatctcggctcactgcaacctctgcctcctgggttcaagtgattctcctgcctcagcctcctgagtagctgagattacaggcatgtgccaccaggcctggctagtttttatatttttagtagagacagggtttcaccatgttggccaggcttgtctcgaactcctgagctcaaattatccacccaactcagcctcccaaagtgctgggatgacaggcaatgagccaccgtgcccggctgtcacagttctttatcttgttttcagtcctggtgtttggtttatttagaatttcaaatagtatagctgttgacatgagagagtttgttcatttttggaaatggattttaaaagctgagaaacactgttttagggctaaaaccatttagagagaaaaaaaaactcatttttttctttccaaggtttttatttagaaaagagtaacagtgctaaggaaaatatttctaagccaagaacaaacatatttaaagcattaggaataaaactgaagtatttaaggggcattttctaataggacttaaaatgttttcaaaatggtcatccagccaagtggttttcagccaggcacaatcctgcctttattgcctgagaacatttgtcaacatctgtagacatttcttttttttttttctttgagacagagtcttgttctgtcgcccaggctggagtgcagtggcacgatcttggctcactgcaacctctgcctcgtgggttcaagcaattcctgtgtctcagcctcccgagtagctgggattacaggtgtgcaccaccaagcctggctaatttttgtatttttagtagagacaggttttcaccatgtcggccgggctgatctcaaactgctggcatcaagtaatccgcctgcctcggcctccaaaagtgctgggatgactgctgtgagccaccacactggccaacatctacagacatttctaattgtctttaagttcagaggatgctgccgaacattgtacagtgtgcagaacagaccccacaacaaagaatttatcctgtccaa

SEQ ID NO: 84903 - DNA, 1033 bp, Homo sapiens
aataatggtcacatataagcagatccgttttcaggttttgatactgggtcatggttttagaagccttgtagaaatgtgggatttcttgcgggtggtgattctgcctgggattctggttgcgtcttgccgtgagtcatcctgaacaggcctgtcctgaactgacccctcttcttttggatcccgcaggactcctttacatgtgtccatcatggccgggaatgaatatgtgttcagtcagctgctgcagtgcaaacagtacgtagggagacacgcacaagtgagaaggcggttgtgaggggggattgtgagtgaaaaatcattctttttaaacatctttagtgttgcatatattaagaagttaaagtgagctaaaaaaaaatgtgtcattgaaaaagggtaaagagaaagaaccaggttgttgtcagtatagagtgtctcaaaaagattgtatgtgctgttgacactgcttctgcttttcagactagatttagaactcaaagaccacgagggcagcacggctctgtggctggcagtgcagcatatcacagtgtcttctgaccagtctgtgaaccccttcgaagatgtccccgtggtaaatgggacttcatttgatgagaacagctttgcagccagactcatccagcgcggcagccacacagacgcacctgacacggcgacaggtaaagcacgtgcctcccgaaggggcgacgctggggtctgcaggcgccaggaaatggcatgtaaatgccttcaccccaaatttagaaactgaacggcatactatgaggataattattttgtacttaattttatatacagtaaaagcctgggttgtcatttttaaaaatcctgtgcttcaaacaattgagcagacatcaagtccctgaaactgaaacttccatttatttaatgcggcgactcgcagactctttggactcaagaattcctttgaccgtcttaaaaattgtaccccagagagcttttctttaggtgggttataacttcagtatttaccatattagactacactttg

SEQ ID NO: 84904 - DNA, 1113 bp, Homo sapiens
taatccccaggctggagtgcaatgatgtggtctcagctcaccgcaacctccaccccctgggttcaagcgaatctcgtgcctcagcctcccaagtagctgggattacaggcgtgcaccaccacgcccggctagttttgtatttgtagtagagacggggtttttccctgttggtcaggctggtctccaactcccgaccccaggtgatccgcccacctcggcctcccaaagtgttgggacgacaggcatgagccactgcgcctggcccagcctagtattcttaaacagtgaaaggatactgaggtgaggaggcaggacaagtggtaacaggtaaccaaaaattgagcagagccttttgaattcgtctgtaactccatgatctcaatgagtttccacttacagatgccccaagaggttccttcagacacatctagttatcgctctcctttgtctgcagtcattttctgctccctcttgaagaagcactggccagaatactttgccctgacactgtttcttctattatttcttttcaaggagatctctttgctgccactttcctcattaagaatggggcctttgtcaacgctgctacactgggtgcccaggagacaccactgcaccttgtggccttgtacagttcaaagaaacactcagcagatgtgatgtctgagatggcgcagattgcagaggcccttctgcaggctggtgccaaccccaacatgcaggacagcaaggggaggtaagctggggagcagacactgtgcccttagcactgttctcagaagatatcttacagtagcatgtaattggcatacggggagttcatgttctttagtttggcattattcagtcttattttcattaaagtcacagacatcgatgtgtagtagtagtgtcactactaaaaccagaggcatttggggaaaacatttctatcctgggtaactgaagtcttcgaggttttttttgtgtgttgtttgtttgtttttaattgtgtcagcatctcactctgtcacccaggctggagcgcagtggtatgatcttggctcactgcagcctctacctcctgagcacaggtgatcctctcacctcagcctcctgagtaggtgagac

SEQ ID NO: 84905 - DNA, 1068 bp, Homo sapiens
gatctgagcaagaagatgagtcttcactttataaaaacagttcttcctgaacttttttaccttaataaccaacatcagttgatgggtttcttttttctttctttctttctttttttttttttttttgttgttgttgttgagacggagtttcgctcctgtcacccaggctggagtgcaatggctcggtctcggctcactgcaacctctgcctcccaggttcaagcgattctcctgcctcagcctcctgagtagctgggattacaggcacctgccaccacgcccggctaattttgtatttttagtagagactgggtttctccatgttggtcaggctggtcttgaactcccaaccttaggtgatccgcccgcctcagcctcccagagtgctgggattaaagacgtgagccactgcgcctggccgatgagtttcttcagtagattgttcctgttatttttagtaaatttgaaaatgatgccaccaactggagcagcatgaaatatggtttgtattaattgaataatgaaggttactggctgaataaaaccatcaagaagctgcattgaaagaaatattatatatggatttttttagtgtgaagttttttgttaggaatatttttatatggacggattgtaatagtcaatagtcatgcctcatttacctggcagtgtcagtgaatgaggtgatgaagtaactgaaacttttaagcaccagcttttattttaactgtttctgatgatttgaaatctttctaaaatgtgttaaccattttcttattgacagaaaccttataaacggtgattgtgacattttctgttccctccctttgttctgctcttctgatatcagttgtccttttcctttatgtaccctctgggctttcttttaatgtaaaactttattaattttctatttctagtaatttctaaatagcttctttgtgtggggtgaatatatatatatatatatatgtgtatgattataagtaaaaagaactttatatttggatcttattaataaagtaaatctgatccaaagtctataattcttctaagaggacttaagga

SEQ ID NO: 84906 - DNA, 1055 bp, Homo sapiens
gctgggattagaggcgtgagccaccgcgtcctcccagaacattttaatcttaatgaattaacttgtcaaaggaaaaaaaaaatactaggtttttgtttgtttttttccatagtcttactaattcatgagtcccaaatggatctgggctgattttgctttgcaatggtcattttagacagagtgaaatctgtatagaggtagagttccagtgagaaatgaaagctttccaaagtgtcaaagcgttagttttgtggagggatggttgacttgattgaagtgcattgccatggccacttttttttacttacacgtagacatcaaagagagaatctacttgtttcgttccatcttaatcatctatattttccccttttgatgatgcattgttatactattattgtctgtgctacatttttgccattcacaaattgctcctagttggtggaatgtagttacatcaagatgtggtcctgtgccagctttgtcctttttgggccaaggttttaatacaagtatccttataagccatgtgctggagtgctgagcttgctggctggtagagaggaaaattttgctcatcactgggtaggaaatccttcgagtatgtcagtgtcaagagcagatgcatcttcctcaagcaccgttatgtgctgtgcaaagccagcgggtgcttagcactgagtgtgattcagtggggaaatctccaccacgtagggaatgattctttcccacactgtttcgtgtctgagatgtttattttggaaacagataccctgttactaaaaaaaaaaaatctgagaattttgtttctttcctcccagggagttaattcttatgtttgatgataaatcatctttgagttattaaatattttggtgattgcttagatacaagaattgccaagaattagtgatacatttttgatgtttattttcagatgatttaaccttccactctgagtttattaattgcttgcaagtatgtggattacagcgtgggtataataaacttgattttgctaactttagagtgttgcatattacggtagacagagc

SEQ ID NO: 84907 - DNA, 1028 bp, Homo sapiens
tggctgtcagccgagggccattcccaccttctagagccctccacacattccttagctcatagcccccggcttttgtcttaaaagccagcagtggtgggtcaggtgcttctcatgtcacatctctctgacttactcttctggttccctttttcactttgaaggacttgtgtggttagatagatcgggccctctgtggttagatagatcgggccctctgtggttagatagatcgggccctctgtggttagacgggtcgggccctctgtggttagatgggtcgggccctctgtggttagataggtcgggcctcctggataatctgggatactgtccccatcacaaggtccttaatcacatcctcaaagtgccttttgccatgtaacgtggtatgtttataggttctggggattaggacatgtccgtctttggggggggtgataattctgcccaccatatgaccttgaaagaaatgtaatggctcttgacagatgggagcgaagtatgttttatcccgggtgtccagtgtatggggagacattaaactgctgggaagaatgaaataggaacgccactgcctttcatgaaaacattagctgttcaccgtaaaactctctgagcctctgcctggcactcgtgccccacagcactctgtccacattttcctggtggcctttaatcgtctcccacattgtttatgttggctatgtggtccccattaattctgtactccctgaaaacatgtaccctgaggaagcctgatagaagtttgtgaataaagttgaatttggggagtaagcagtgttggagcacttaaatttgacatttgtataagagatgatatttaagggtcaaggtgggagaaattaaaataggtcgtattctctactcactgggcgctaatttacaaacttgtttgtgtagctccctgggaagctgaatgaagcggatcataacggagatctggcattagatctagccctctcacgacgactggagagtattgccaccacgctggttagtcacaaagc

SEQ ID NO: 84908 - DNA, 1015 bp, Homo sapiens
atcaacattcaaccaggtttcaaaagtcctgtctttcatacgttctgtggtctttctcccatcagtcctcaccagccccacagcctctaccaaatggctcaccatcaactgctacagcttgctctctgacttcctttcttcccaatccatcctctacactgcagtcatttcgccatgcctcacacaattcctgttctgtcgctaccgtggctgattcctttcggtagtatcgctccatgagtctcagaataaaatccaaatgctgaaccaatgcccttaataatctggcccttaacatactcttccaacttcacatcccactaattccttccacctagaacagtgacctctcctcaatctcatgtccccatgtccaaaggagggccatttttcaaagctcagttcaagcaatgtctcctgcaacaagactttccctgattatccaaaatacattccccattacttccttaaaaaatctctccctgagttttcaaagtaactcctaagcattttttacccttcaccttaaaatatagtttctcatatacaatttcttttatctcccctcctagacttcagaactccctgtgaataagctttagttctggctattcgtatttaactatcaattacttctccctctatacccattccatggttatctcctcctcccgacagtaccttaccagatggagttcaataaataccacaggttcaacaggagattctggggacatagcaatttctcatttggttcagcaaggctgtaaatcatgatagtatctcaaattgcctacagcaaatcaccttgccagtgacagaatcctgtgtatctcagcacaattcagtagctttactttgacataaccactaatggataaattttatttctcagtaaaaataattcacaaggagaaagctaacagctacagctggtgacagtagtcaccaggaaagggagagaaaagaaaagaatggtataaaaggaacagtccttaagaggtctctggactat

SEQ ID NO: 84909 - DNA, 1057 bp, Homo sapiens
cagattaatagaacacttgcaccattgccagaagtgctttggatagtcctgttccagaaaatgcttcattagtggaggctggtagaaataaggaaagaaggaactttgctgtttccactttttttttttttttttgagttggagtctggctctgtctcccaggctggagtgcagtggtgcgatctcggctcactgcaagctcccctcccaggttcacaccattctcctatctcagcctcccgagtagctgggactacaggcgcccgccaccaagcctggctaattttttgtatttttggtagagatgaggtttcaccgtgttagcaaggatggtcttgatctcctgacctcgtgatccgcccgcctcggcctcccaaagtgctgggattacaggcgtgagccaccgcgcccggccctacttctgaaatttatctgtttattgttttacttattgaacaaatgtcccaggtcattgataattatatatagtccagagacctcttaaggactgttccttttataccattcttttcttttctctccctttcctggtgactactgtcaccagctgtagctgttagctttctccttgtgaattatttttactgagaaataaaatttatccattagtggttatgtcaaagtaaagctactgaattgtgctgagatacacaggattctgtcactggcaaggtgatttgctgtaggcaatttgagatactatcatgatttacagccttgctgaaccaaatgagaaattgctatgtccccagaatctcctgttgaacctgtggtatttattgaactccatctggtaaggtactgtcgggaggaggagataaccatggaatgggtatagagggagaagtaattgatagttaaatacgaatagccagaactaaagcttattcacagggagttctgaagtctaggaggggagataaaagaaattgtatatgagaaactatattttaaggtgaagggtaaaaaatgcttaggagttactttgaaaactcagggagagattttttaaggaagtaatggggaatgtattttg

SEQ ID NO: 84910 - DNA, 1056 bp, Homo sapiens
ttcatagtgaagtagcactaggagatgagaaaagtccaggacaggccgggcgtggtggctcacgcctgtaatcccagcactttgggaggccgaggagggtgaatcacctgaagtctagagctcaagaccagcctggccaacatggtgaaaccccgtctctactaaaaatacagaaattagccgggcgtggtggtgcatgcctgtaatcccagctactcgggaggctggggcagtagaatcgcttgaacccgggaggcagaggttgcagtgagccaagattgtgccactgcactccagcctgggcaacagagtgagactctgtctcaaaaaaaaaaaaaaaaagtccaggacagagccacggaatagagtggctgaagtggaagtgagaaggcaggaaaattagatgttgggatttagaggtaggaaaggaaaggagcatcaggagctaaaatctttggtgaatgtggggaggactatacgattagttaagacaattgcaaaatggagggctaaacagtaacatagctgaatagcatgagacctttcttgttttttgttttttttttttttcagagatggagtctctgttggccaggttggtcttgaactcctagtctcaagcagtcctcccaccccaacctcgcaaagtactgaaattacaagcatgagccaccatgcccggcccagcatgagacctttcaaaaaagacttttactcaagggagaatcaaaagaatgcatcaatagttcaggattgcagggaaagtggtggccttggaggacagccaggagtaagagacaaaaggttggaaggaaggatctgaattagctatacctggtggtgcaggcttttagttgtcgctacttgggaggctgaggctgaggctggagaattgcttgagtccaggagtttgggactgcagtgagctctatcctgccgctgcactgcagcctgggtgacagagcaagactctgtctctaaaattaaataagaaaaagaaaagaaatttaaaaagaagaatctgagaacagaataagagtgtcagaaacgaaaagg

SEQ ID NO: 84911 - DNA, 3359 bp, Homo sapiens
gggtttgaagggagctatagtgagttagatagaatttagcaagttgggaagtgtggcaatcttaagttgtttctctgaacatcctcaaatgtttgtaaatttccaaatcacttggcttttaaatcttctcttatggattctagatttaatataagttgaaagacatttgaagtattgaaaaatctaaattagcgctgtccagtagaacgttctgtgatgataaggatacagctgtgctgttcagcttgccagtcactagccacatgtgactactgagcacgtgaaatgtgcttagcatgactcaggaactaaattgtaaattgtacttaatggcaattaatttacatttaaaattaaatatacccacgtggctgtgagctaccataatagatagaaacaaagtgagctcagaatgaaattaaggatttgttgtcaaataaatctaatatggataaaacctacttacagttaattcttttgtaattgatgaattgactatataatgttgtttttgttgttgtaggtctccaattgagaaacatggcactgtttttcctgcactctacccacctattgctggacttctgttgtacaagttggcaaacactggctggaactgggctgcaataaaacatgccagttatcaatgctgacaagagcctaacaagtgccaacttacagatgattacgcattttgaattctaatgaactgttttaaccttcaggaagaattgtaaagacctgtacatagcacaacatgatccggataatatatatactgttcatgtacatccacaaatacaccttgtaccaaataatgctttcttgtagtagaataagaatcgtgtaaattctaagagattttagcaggttttctttcctattcattgtttcttatcagtttaaaaggattcctttaagcatgtcagatgaaaagcaattaggattaaaagtttccatttaatttcccttaaacccttgaggcttcattaaactcttttcacttactaaacttttgtatcttctttgttttgacacactcccctttgcttttatctcttacctgccagaatgttctcaaatgatttagttcaaatactgaaatacttaatgagcaattacttgatttttaatgatgacttcgaaggagtcatcactaggtgctttgtcctttttgtattctagttgcacccacctcttggattggatatagcaataacatttattggccgttgtgagctcttgatcccagtcattacccctgagaactaaaaatagatggttcttaattcaacttactgaaaatttccccaaacaatagcaaatctgacttttccctcttcagttgcctggtattaaggttggataaatgaagcatgcacagctacaggctttctacttaacttctgggtttgctattacaaatcctatttactctcatacccttctccttagtccttcatatttctctgcctctattcttctatactgcagatttttctcacctattgtacaaagaaattgcgatgtatattttcatgtaatttgattttggaattctgtcaccttatgtagtgagttcttccaaaatataattttttttcaataattgtcaagttgttggcttttattgtattgaatgaaggctataatactgagtgccagagaagtggtttaggaaaatctcaggttgattccttatgcaaatgaacttttaatacttgaaaatcacatggccatggcagtatatgtatttggttctatctagattcttctgtgaatctaaaagcattacaggggtaaatgctttgctatttgacgtatagatcccgtcactaacaatagtacacttggatgtgattaatgtttgagcttcaatatatttcatatcatacagttttctaaaacaacttcagcaaatggtaaaatgaacatgtgcagtgttaaaggcaggccttaggctccttcatgtttgttgtgaggttgtgtgtgggaagtagtctttggcttataagggatagaacttgagacagtagcagatgggacatggtgtttgattgtgagaatcagtgagaattcgtgcatctctgctctgtggggtttggagaaatgctttggcagaagagtgaaagaactcctgccaagagcccagacctctacaaacgttgtatgtccttttttaagcagaaataaaatggttgaggatgtagtcacagtagagagtgatttttttctaagtccctgtcctctactctgaagcgttataaaaacctgtaaacattatacaaacccacaaaccttatagaaactcgtaagtgtgttgtgactggaaattgattcattagaacccagttttctttaagaactttgtgacttggttttttttttccttttccaaagactgtaaaaatagttgccccaaaatgtcagcactgcacaccctccagggacttggaatacaatcctttttacttttttttttttttttttaagaaactgggtctctctgtcacccaggctggagtgcagtggcaacgatcatagctaactgcagctttgacctcctgggctcaagtgatcctcctgcctcagcctcctgagtagctaggactacaggtgtatgccaccatgcctggctaatacaaaaaaattcttttaagagatgggatccctcccttttaaaatcagaacttgttcacatggtggttgcttgtggcaaaacggagttcaaattttgctctcctattgctataattctgctagcaatctgttgaggtgaaacttgggatctgactcttcagcaagcagcaaatgacctagtaactcagggacaactatttttgaactttaagtgccactttaatgcagttagtttgataaaaccatgtgggttttttttttagggctagctctacgggagtggaagtgagagccaggcatgagtgcgtctccacatgcttttccacctgccctgagtgtgttacatactgaaacaggcctacatagatgttacaacttcccttcctctgtcggagatgtcatctgtgcctttctcagtgttcatctgataatgtaaatttaaatgcctctacatttgatacgaaacccacattcaggtgacactgaacgaggtggcttttgtcccaccagtgcctcatcagtgtgaggcgattcctctctgctttaggaaaatgatttttccccctaaacttgtgccaaccatcaacaacatctccatagatcttatggattgtagaactgttggctgtttcctaaatttattccaagttctcgtagaggcatatagatttcagtctgtgcttgtatgggatagatgatctgagtggctttctggcctc

SEQ ID NO: 84912 - DNA, 1676 bp, Homo sapiens
agatttctgcctgtatatcctggtagtgtcttgaaaaagtatgtctaactgctttctaccttttcaactctataatgtttctgaagtgtacaaatcaccaagggattacattcaaaattaaaataaatatttgagattataaaggggagtttgcatgaaatcacttgatactgcttttttaatctacagaaagaatggagggaagatagaaatggagaatttaaaagaaaagttgcccgctgtgtaagaaaaagccaagagactgcttttgagtgacatttatttagcagctagtaacttcacttatttcagggtaagtttattttaaatatcatacttttgtttttttgtaagtatcctattagtttttggaaattgtgtgatttgggtatttgaattacattttttcattgacttcattttttaatggtattatcctgtagtctcgttctcaaaactactgtataatctgcttgcttttctcctaagacacccagctgtttttgactagatattctgcattcatatggttagtatgctggtctgtttcttttcactgatggtaaagtttctaatgataaggttgttatttcagtttagtttctttgtttgactttttgatctagcatcctgatcacttgggcactaatgtatcttcatatactgtattatgtagggtataggcaagactattagtcatctacctattcctttaaggttggtcttctggccaggcgtggtggctcatgcctgtaatcccagcactttgggaagccgaggcgggtggaacacctgagatcaggggtttgagactagcctggacaacatggtgaaacctcccctctactaaaaatacaaaaattagccaggcctggtggcgtgtgcctgtaatcccagctactcaggaggttgagggaggagaatcgcttgaacctgggagacggaggttgcagtgagccaagattgcaccgtggcactacagcctggacaacagagcaagactctatctcagaaaaaaacaaaaaacaaacaaacaaaaagttggtcttctatctccttggtctttacagatagggccagtagttaaaaacttcccttttattgtataacatctgtccacagttttatgttaggtctagaaaggagtcaaagatggaaggcacccatccaccttagaagaggaaataatatagattaattgctcacatgtgggttatttggtctcttcttttaaaattaaatattgaaatgatagaaactgaagtgaagactatcctttcagggatcatttctatagtttgttactatagaagttttctgaaggtgtagagcaccaaaggatacaacattgagctggtttcaaattcagctgctttgattcagcaagctgcaacagttaaaaacatagcagaaaattgttattgaatatctatgtctctgaaaacggaatagttctgcaagttggtgaataaagtctaagagttgtccagctacagaaacaagatgccagatgattcgtaagacctattcgtgatatttaaattactcaataaaagacctattgatttgtgggggttgagggagaaaccgaaatacactgtctgaaaaatcacaatccatggcacatcttgagtctacctattttaagaaaatgaacattaccattatcttctgtc

SEQ ID NO: 84913 - DNA, 1048 bp, Homo sapiens
aggaatagtctctgggcctttgactattaccaatttaagtcggtaagttagtggggaaactaggaggccattacatagaaactcagttgctagtttttggaaaaatatgctttctgcaaatgaagaacacatccaatagttgctatttattcatttattatattatacttaagacatgtaaatgttaggcaccatctacgtgctagatatcttcatgttttacataaatgaaaaagatagcttgtattcctattgggtttgtcagatggatcctgtgtatgtagtacaatctatactatagtcttcttaaaaagtcaacacattgcattttggacattaacttctgcgtatgtgtcatgtttgataaaggtactgtgtgaatcaggatcacatttgtaattgatatttcatgtataaccaaattagtaatatatgaaacaagcctcttcttgaattttgcagttgataaaaatggtgatgtgtgcatttctattcttcatgagcctggggaagataagtatggttatgaaaagccagaggaacgctggctccctatccacactgtggaaaccatcatgattagtgtcatttctatgctggcagaccctaatggagactcacctgctaatgttgatgctgcggtaaggtggtcacacgtcttcccttcccttcactttcccttgtaataaaacctgaactatagttagtatgtatgtaagtatgcatgaatgtatgcatgcgtgtgtgtgtgtgtgtgtgtgtgtatctcttcccatagttcttatttttgacaaaataaatatatttatttacgtatttattttattttttttgagacagggtctctctgtcacctaggctggagtgcagtggcacaatcataggtcactgcaacctcaaactcctgggcccaagtggtcctccagccttggcttcccaaattgttccgattacatgtgtgagccaccatgcctgaccaaaagtgcatatttattgtatacaacatgttgttttgaaatatggatatgttgtggaatggctaatttga

SEQ ID NO: 84914 - DNA, 1048 bp, Homo sapiens
tttacatcatgacgcagtgcatacatatgtatatatagattagtgaataaaacacatacatagattatataactgaaactacttgtgataaactctgttttctatttttgttaacaaaaaaactttgatagtgactcattaaattgcttttgcagccctgtttgaaaaactagtccatgtaatcagtatatcctaagacccattttggcactaacttacacagagcaacaggatcagtagataaagacttaactctttttggtgtaatgcactcttcacaacagctattccagtctctattccctcaagccctcatgcttcttcctttcaatagataacctcatcagttgtgaaaagtaaggcgctatggtgggccttacttcatttctacatttcttcgaatatctcttttaaagcgcttgttttgtacagtttccccatctagttactatcttcaactgttaaattttttgtataaattgtcctgtttattatgcttaagtactttactaccctgttctttaaccctttacagctttttttcctattgctttttactaaaaaaattgtattatcaaggtcactgactttatactctgagtcctgtggcatttcctaattattcagaaatgtttggtgttaatgatctgtctctttttttaaacttaatctgcaccttccccatgtcttatgatcagaaaaagcaataaaaattcatacttgcttgtgaacagttcaagctatattaaaaagagcagagagtaaaagatctcgtaacactaactattgttagttaactattgttatgtattgatgtcctgtttctggacatttttctatgtgtatacaaacacacccccaatttttcacttgttctttcctttcttttcttttttcttttcccaggctggagtgcagtgcagtggtgcaatcacagctctctgaagcctcaacttcttgggctgaagggatccttcccccctcagcctctcaagtagctagaattacaggcatgagccactgtgtccggcctcccactttttcttta

SEQ ID NO: 84915 - DNA, 1016 bp, Homo sapiens
agacaacaatgtagtggtgtgaaagagcagtagaagaagagaaatagagtttaaaaatatttcatgtcgtacatttctagatgcaaagaccacagtcttcttttctgctctgagtgtttgcagactaacttaaatttactagtatgtattgttttgtaagatgcatctgctggcttggtgcgttggctcacgcctgtaatcccagcactttgggaggctgaggcgtgtggatcacctgtggtcaggagttcaagaccagcctggccaacatggtgaaaccctgtctctactaaaaatacaaaaattagctgggcatggtggcgggcgcctgtagtcccagctgctcaggaggctgaggcaggagaatcgcttgaatccgggaggtggaggttgcagtgagccaaaattacgctactgcactccagcctggtgacagagcgagactccgtctcaaaaaagaaaacaaaaccgtctctggtctttggtgtacatttttaaaagtgttggctgttgaattgagatgtgaatcacagcaatatttctggcagctctgctggagtgtgtatatgctgctgagaatactggtggtcacttctggactgtgccttcctgagatcactagcctttgctcaggaaagagagagcatattcctagggcaggacctgagaaaggcaaaggaaggtacaggggaatgaagaaaggtttgttagaagtaagccttttagaatgctaccaagaaccatgtacttcatagaatgcttaaaaaatatttgttgtcggccgggcgtagtggctcacgaggccgaggtgggcaggatcacctgaggtcgagagttggagaccagcctgaccaacatggagaaaccctgtctctactaaaaatacaaaaaatttagccaggtgaggtggcatatgcctgtaatcccagctactcgggaggctgaggcaggagaatcgcttgaatccaggaggcagaggttgcagtgagccgggatcgtgtcacccactccagcct

SEQ ID NO: 84916 - DNA, 1010 bp, Homo sapiens
cttgtttcccaccctgtcatcctttctccatgccacagcactctctttagaggaggagaacctcacgatgctgcagccattctgtatgctccaggtgttactcttaagctgctcctctgtcccagaagctgtggctctcagagggtcgacatatacagacaagacatatggggcccctgctctccttgtgctcagagatggatgggcacacaggagcacccactgtagaagcaggtccccaagactacagggacaagtcaaataggtgtacaaatgttagtataaatgaaagttattaagcgcagtacattccaatgaaaaggtatgattagacactctgaaagtataccctgaagacagcagcataagaattgccaacatgatttgatttccagggctccctctcaatgagaatctctgggggacgggcctggatatctgcattttaacaagcttccttaaaagaccactgtagggccacttagaatgacaagagcctggctggataccagtagaagttgatcttctggatagtttgctttacccagggctttcttacagtataggcatgaaaatgttttggccatcaagtagcattttgcctggcaaggtatatctatttaatggtttaaaacttacataaaacatgtacgctcaagttctgtaatttatctactggatgcaaattatgtgcttaaatgtattgattaaacttttctttttccacagaactcaacaaaaatccagtggaaggcttttctgcaggtttaatagatgacaatgatctctaccgatgggaagtccttattattggccctccagatacactttagtaagtataatggaactgacatcttcaaaatggagctcttttaatacactgaattaaaaactattttggcaggctgggcacggtggctcacacctgtaatcccagcactttgggaggccaaggcgggccgatcatgaggtcaggagttcgagaccagcctggccaatgtagtgaaacc

SEQ ID NO: 84917 - DNA, 1046 bp, Homo sapiens
gctgttctctcagcccagtctccttagtaagatctaataatttttcctttgggagatgactttctctaaactttggaggtcagcaataaattgaaagggactagtttcttatctgattaattcattttcattttgatgaattcgtatgccttcttaggttcttccttaaaatccttaattaaaggagttttgtcttcatcatcatcctgcatcagaaacggcatcagtaattgatatttaatctcataggttgtgatgagtccttacttttgttttacaggttgctcttaagtattgttgggttttcagagtatatcagcaaaggctttagcttaacatcgctcaattttttaaatataaaagcaatgttagcctgacacgttttctttttaaatttcttaccaaagcacaagatggcattctttaagaaaggtctatttttgtcagttataaatttgctttccaatatttctcctttattaatagttttctgcaattcattgggggaaagtttgttgcagtctcgctatcagcagaagctaatttatttatcagtgatatttaatgttatgcatttatgtactgttcttaaacctctcaaacaattcagggcttgctttgcaactgagctgctcaccaaattctcctgtttctctcctttcacctccatcacttcggagatatgaaatgcacattgctgttgccacagtgctcggtggttccatgctgctggtggttatacatttttgtatgaagtattaccgtaactgttagacatcaacattgccttccatttgtatttctgttgcatagaaacagtcttatgtgtgatacaggggatatacttaaagtcaggggctcagcttttggttcccttgcctttaaataaatgcattacttccaattttttctttcagtgtttgtactttcctaggcctcttacataggttcacctgtattttcccaggacaccccattttcttagaagccatttttacttaatgtggagaagatcatgtacaagatgcctttcagtagaagttata

SEQ ID NO: 84918 - DNA, 2182 bp, Homo sapiens
tcttcttttaaaatgatggctgagatacacacattctttacattacttttgatgtgaacgaaggtcatttcagtagacttgcacatttagagtatgccagcaacttactcaatattgcgataggtggaatttacggtctggcgtctgaattgtagcttatcctcaaccatcaaaattcctacccaaatttcttgtgttccaaacttaagaattgttgtgtttcattgccaataacatggctttttcctaaagtgatacatatttttaagtaattcatttcttgggcaaatatttactgccagagactgtcacaggtcctggggctatatcagtaaataaacaaaaacccttgttcttatagagcttgctttgtagttagggtaggggagagaagaattaatagaaagtgtagagtgctgtgtggaaactagaacagggaaagaggataaaataaggagtgtgtaagggggtggggtttcattaaaaatagggtgacagtggaccgaggaactcaggtgaatgagtgaatcatgcagaggttaggtgaggcaagcacaagggccctgaaatggggctgacctgaacgctggagggaggtggcagagcggttagctgaaggttggagagagatgctggttaaagcccctgaacgctggagggaggtggcacagcacttagctgaaggttggagagagatgctggttaaagcccctgcggtggcagagcggttagctgaaggttggagagagatgctggttaattctgaaggaccctataggccatcacacaggccattgctctgagtgagaatgggaagctgttggtatagtgacatgatgtgactcacatttttccaggattacttctgcctgctgggttgagagtagatacaatagggaaggtattttccatagtaccccagcacatgcatttttattaaacatttgtggctgaaatgaaagcttcaccaacaataaccctattttattttttgtttctgttaggaaaaatgagtgctggttatgttccactagatctatttcatgactgtgtgacttacggttgaaaaacactgccaaatagaatatagcctctgacttagtggacaagaagtaaaattgaggtttgtgtatgaaagcaaagtgaacacaatgtaaaataaaaaaagaataaaaacttaaaaatcaacattatgtatatgtatatatacttagctttaaaaaacccaaataatcaaataccagtgattcaagaggcctaatagtgaacaatgcattcagtgaaggataatgaagaattccccagaggcaactgctttttaaaaccttttaggttcagatctcctgggggcttaactccatgcttctaaataatatatttatagtgtttatgttttggtttatcaactttagacattctctgttgacttcttgctatgacagatgttttcagtcccacttctcactactgatctccctcgtacgacggtcactgaactggcgcctctctggggttctgcccagaagattagccttcctccttcgctgcagctcctctgtgagtattctgctctctgctccctccactctgcttactcagttcacgttcttccatccgttttcatctttcagagccatgggcaatccacctggtctttttaatatactttaaattaaaaagttattttttaatttctttagaaaaatttatttaacttcttaggagggaagaggagataagcacatgtgcccgcactgacaccttgaactagaagacacgattaggccaaagctttttgttgtcaaaagtgtgtagtgtatgtgttttaagagttagatatattcagaatatcttatcttttaaaaattgtaaatatttccccatgtcctgaaatattcttgtaaagtattttaaatagatgcatagcattccttcatatgctgctactatcatattccccacatcttgacttctgggttttcaaattatagttgtaaaccacttaaattataattagtgcttctgtggattttccttatgaaaacatttatacataatccttgattatttctcttcggataaatttctggtcatttcttagttaaggaaaataaatatttttgaggttcttcataaatattactgattgccttctagaaaggctttgctaatttgtatttcc

SEQ ID NO: 84919 - DNA, 2514 bp, Homo sapiens
ttttttgagatggagtctcactcttttcatccaggctggagtccagtgtcatgattttggctcactgcaacctccgcctcctgggttaaagcaattcttctgcctcagcctcccttgtagctgggactacacctcaggtgacccacccacctgggcctcccaaagtgctgggattacaggcgtgagctaccgcgcctggcctggacttgttattaatataaacttttagagcctttaagccataggatcatgtaaaaattaccttatgttggtactttgaatttaaagtgctggcagatcacacataatcttcaaattgaattctacatttaacaaatatttgagtgcctacttttgtaaacatagcagtacattaaagaacaggacatgaaagttttgctggtacaaagttttgcagttattgtgggaagacagatggtaaactagataattaaattaaaaatgtggtgtattaggtagtgataagtgccctggagagaaaataaagcggggaaagggaatgaaaagttgagggtggagtactgatgtcttgaagagctttccaggccaagagaagaacagtacaggggcgctgcagtgggagagaggcctggcaatgtcagaggagcagcaaagggtgtggaggggaggctgtgtgattttttacaggtaaggatttaggcttttactcagagtgaggtacccgtgaggtttttcagcactggagtgatatgacctgatttacattttaatgagatcattcttggcttgctatgctgagaatatagactgcacggagagtcagatgagacatgatgctagcttggacctgtattggagccgagaacaaagtggtttaattcttgggtgtatttcctaaatagagctgttggaatttgctggtggaatagaattcttttctttttctttgaggcaggatctcgatttgttgcccagcaggagttcagtggcacaaacatggctcaccacagcctcgaacccctgggctcaagcctcagcttccccagtagctgggaccataggcatgcaccactgcgcctgactaatgtttaacattttttgtagaaatggggtctcactttgttgtccagcctggcctcctaaaatgctgggattacaggtatgagctactgcgcctggcctagaaggaacacaatatttgaagggtagagtgtgtgagagaatgtgtcaaggatgatttcagggtttttggcctgaacatctgaaaggatggagttgacattaactgaaatggaaaagaaagacgcaggacaaggagagataatcaggggcttggttttgaatatgctacttttgatttgtctattagacactgaagtagagaagtcacataggcagcttactatatttgatctggaattcagtgaggaggtttagcttagagatataaagtgggaaattgttagcatatggattgcatataaactatgaagttggatgggctcaataagggagtaactgtagataggtgaagaagattgaggactaagtcttgggacacactggcattaagaagccagataagtaaccagaagctagtgaaggagtgtgagcggcgtcagtgaggtgtcagaggaggcaaaccagaatgctgtggcctttaagccaagtgaagaaagcttcaagggaagagagatcagctgtgtcaaaaaagagtttgggtaagataaggactgatgagtgaccactagaggtgaatggtactttgagaaaggcagttgcactggacggattggtatgagcctgagagaatggaaggagagcagcaagtggagataaggaatgaagacaactcttaaagttgtaccgtgaaggggtgttgagaaatggtgcagtaactggagggcttgtgggcttcatttgtgtatgtgtctgcatgcgtgtgtgtgtaaagttggagaattgctagtggcatgcttgatgctgatgggattgaatttagtagagagaagaaccgatgacacaggagagggtaggaatttctggagcagtgtctttgaggacatctgagtgggaagaatgagatcagatctaattactggccagtttggaagccttattaggagcaagggcagttgatccagagtaacatgagagaaggtagagaagtaaatacatcggcagagattcaggttagacgatatgtctgggtaaaatggggaacattttcatacttatctcatgatttttgtgagtattaagtttaatactttataaagggatgattacagaacatagtacccagtaagcgttgactgaaattgttaagtttgtaatatttataaagttacaatgtgatttgcatgaccagcttctttcagtgtgtgactaatactctgaaaatactggcttttcatttgagccagatggctcagtcagtaatttctagttatgccatctttttttttttttttttttgtaaagacactgggcaccaaaggtgctactcacacagaatatcaacttaaaact

SEQ ID NO: 84920 - DNA, 1487 bp, Homo sapiens
acccaggaggcagaggttgcagtgagccgagatcgcgccactgcactccagcctgggcaacagcgcgagactctgtctcaaaaaaaaaaaaaaaaaaaaagaagaagaaaatgtaagctgtatagatgagactgcagtaactcatctactgtgaaggaccatacaaaacaagtgtattagctatctaatacatatttaggattatttcggtataagtctggataaggagcaacaaagggtgtggaggggagtctgtgtggtttttacaggtaaggatttaggcttttagtctgagtgaggcattcatggttattgttggttagtactaacatttgatgtttatttaattagtgtaaaaggctttcagaaggtagaaagtatgagttaaaattggtcttcagattactggttgtaaatcagactgtattttaaggttagtcatttttataaagaggaagttgtttagcaattctgaatcctatattgttgcaatatcaatagcagatgctagaatcctattagtaatcccaaggtaaaatgaattctaaaagtgcaatcttgaattattcaacacttggtatccaaattatatgaaatataatcatccattttatgattttgaatagaactgtaggttgttttcttaaataagagttgttcttcctccgccttctcattttgagtccctggaatctgttctatttttacttggggatctacatactaaagctgtctctgatttcatgctctgaagatcaacaagagaccttcccttgtaagatgagaattgtgtagtaggtgactattagaagagtaaacaagtcttaagtctgtaaacattttttcagtaaatgcaatggagtaccagatatctctcgttactatgactaaagaaagttcaatggtaaattcagtagctgtttatttgccttgataagtaattgctagaagtaatagtaattgtttttatagtgttaccgaaggtttatttactgtatgtgtgatttttaaagttttaaagggatcaatgaaagttatgtatagggaatatttgtaagttactggaaataagccaggaattgaatttttaaaagtgcctttcagagtaaattatattttcattttctttatagaatgaaagtggaacaatattgtttaaaattcaaattgagcatcatttgtacttttcaggccattagaatctgctcgaggcttgtgtgggaaagattatttgattatttattagattacctttggctaaacattgcagagaaaagttgttgacaccttttcccctcaaacaaagtaataaccccctgaatctaaaataaaagttggaaaaaagtcatgaaaactaagttgctcatgaggggcttggacttccttgtatttctggctgcccatttggtgctgtcactctgcttgtcccttctgggcttcttgctttaatgtgacatcatatcagacttttagttctgaattaatgt

SEQ ID NO: 84921 - DNA, 2357 bp, Homo sapiens
ggcttgggctggcagccgggcgtcgaccttcccaaaatggcggcggacgggacaactgcgctcaaggggcggggttccgccgccgggggcggggcgggaggccgaggggtcgggctagcgggcgggacgcttcccaagtcggcagtctcagcgcgcctgcgccgagcggccctgcgcgcagtgaggcagtggcgggggaaggcaccggtggggccgacgggcgggttgaaggagggaagcgggcgagcgaagtcccagtgcgcgccgcggcagcccgggcaccctccccttccgggcgtgagtcgctgtgaaaagagctgaagcgagcggactcgcaccggcagcgaggcgccgctcccgccgcctcagcccggccttcctcggctccggcgctccggtcgcggggcccgggttcctcggcacaccccgctccagccgcccccagagcctgtccccagcccttcggaagccccggcgccagcccgggccctcggcagggaggatgacggagctgcagtcggcactgctactgcgaagacagctggcaggtgagcaggcgggcggcggggcgccgggcccggccgcgatcgcggacagccgcagcccagtccctcttctcctcccgggccagcggccgtactgccgaaggggcccgggcctgcgagggtggggacctcgaggctccggtcccggccgggcccagccgttctcgcccggctcttggagggcactgggggcggggacgcgacccagctccggcccagggactgggcctggcgcccggggggtcggagaggaggaggtcccctcccccaccgttctgtaggacgttgcgggggaggggctgtgtgcgggtccccaggccggggccgccagcttggaggggcgggtcccgggttcaggtgctgccggggccgccggaccttcggggccggctggagcgtccggacccagtgcggctgcgagtccccggctcggtgtctgagggcgggcggaagggaccggccctggcgggataggtgaggcgcacaaaacttctccccgggcggcgctgggtccgcggagttggggccgacaacaaaagcgctggcctcggcggcctccacgcgggcgcgagggtgccggagaccctggcggagtgcggatcgccgcctcgcctgcctccgcctggcacgggctccggctgcgccgcccggctgggggagggtaggagcgggccgcggggagagccgctcgctggccggctccgggctttgtgctcgccgcgattccggctgctgcgcaggcctgcaaaccccggagctgcgcccgcaggctctggcccggggcggcggccgggtcggcctccccgaggagcctgcggcccccctcccccattgtcccggcctccggccgtttgcggcttccaggttgactttttagggggttggctcctactctgctaggactgtgtgcgcggagcatgcgcagtggagacgtccgtgtgcggagtggaaggggggaggcgggttggtggcttcacaatgcagccccacgtgctgccagatttaaagagaaatgaaccagcacttacccctgctgtacaacacccggcgtgtgtcattctcagttcaagcgatcttccccctacccactctaaaaccagtagcctctagccctcagcagaagccaaagactggagtgatgaaatctgtttttgaaatacatttactaagagtttgaggtgttcgttaaatcacctttatggcttcttaaggaaaaggttgtcaggggttcttacagattgtataattgggtttattattagaccatgagcaagcaggtttggacaagtattaaagttctagatgctcagggggagttagcttgcagtaaatggagaagttctaatgatactacaggatactcataaaaattatgtgctggaaaagcactgaggccgggcgcgctggctcacgcctgtaatcccagcacttcgggaggccgaggctggcggatcaccttaggacaggagttcagggccagcctggccaaagtggtgaaacccccgtcactactaaaaatacaaaaaattattcgggcgtggcggagggcgcctgtaatcccagctactcaggaggctgaggcgggagaattgcttgaacgcgggaggcatcgttgcagtgagctgagatcgcgccattgctttccagcctgggcaacagagcgagactctgttcaaaaaaaagaagggccgggcgcggtggctcacacctgtaatcccagcactttgggaggccgaggcgggcggatcacgaggtcaggagatcgagaccatcctggctaacacggggaaaccctttctctactaaaaatcc

SEQ ID NO: 84922 - DNA, 1041 bp, Homo sapiens
gcctccaaagtctgtgtccttcatagtgcactgatccagaaacagcggggcacaccccaggcactagtaaatcccttaatgcttattgactgagggaggggaccatcacttctggctggtgggagctgatgggggctggtggggcctgacctcacagggaggctggggcccaggcagatggaggccccatcaaagctgtccctgtaccagccagctggggctgggggccccctgccagccctgcttctgccactgtcttggttggttctgggaggtgctccttggctgtgttttggggacacagctgcccccccctcaccccctgcaccctgcagcctggcgcatctctagagctggttgtctcatccagaaatgacattgcgtcttggccgccaaagccagctggagaaactcttctttaggcctgccctgggggttggggctgaggggcagaaaggcgggcagggccagagtgcatccctcctctggcgctgggaagctgctgggtctggcatggtacccaccgatgctgagcctctgcggccagaactctaaccctcagaggtgatgccatcccgcccccaccccttggctctgtctgtgcctccgtagaatgctcggatgttctgacctgagattcaggctccagttcttccttcccaacaactgtcagtcacaaagcccttgacctctcccaggcctaccctcctctccgtcctctctgcccttccctggctcatgccttgctgtctttctccagaactgttctagaagccaccttcctggtctccgtgtcttcctgctcacccactacagtctgttcttctgttcttcacacactgccagagtgagctagctagcttgcttgctttttctttcttttcttttcttttctttccctccctccctctctcccttcctctccctctctctctccctccctccctttctttcttctttctttctttctttccattttctttttcttctttctttccttcctccctccctcccttctttcttctttctttctttccattt

SEQ ID NO: 84923 - DNA, 1051 bp, Homo sapiens
gaacctgctaattacggcctctcctccgccccatgagaaccccctgagggcagcaggcctcagagcgggtgaggagggccaggctcctgtgcttgctcttcttaccgagcgttgcttcaattggatgaaattgaggtagcccagaaacctcttctaaatccttccttgcacctccttgcgcagatgggaacacagccatccagagaacaaagacacttacccaaggtcacacggggggcggagcagggccacaccagccagagcggcatcctctccagtcccaggagccccaggtggaggtaggggcatgacccttgcttctggcctgggaacgcagaggctctgctggcttaggcaagagccctttgggtagatgaatttcagtttaattgagccaaggcagtttgagctcccctagggcacatggctcctgctcctatggtccctagcagccacccactctgcattctgagcccactcctagctgcaaggtcaggagaaggagggagtccctcagacgggggtctcacgccccctctaactagctctgcttcctggtgccagagccacctctgccacccaggctgccattcttacctctgtgaaatggaagcagagctgagggtgtaggtggcagcattttgctcctggaaccaggccccacaagagggaggtggccctggccttgtttatgggtggtgaatgactatttgggaactgagatccttccccaacttctgtggggtacctgttctcttctcaagacctattttctttccctttgatccagcctggggcagcctgggcacttggagttgggtggagtgggggctgttgaggaaaggcagagccttgccctgggggagtccttttctgccaaagaagctgagactggtatccatggcaactgctcactaacacaaacccagaaggagcgatgagcatagggacccagctgggaacacaagccgagagggacttgggggcttccccagagcagctgagctgggtgcaggaggagggggtgccaggctggggctcactctcctat

SEQ ID NO: 84924 - DNA, 1053 bp, Homo sapiens
tgtgggtcacgataaggctgtggccaccttatccctggcccctggtggtcttgggagtccctgggccaggacagggctggggaggctgagctggggaaggagtagccgtgcaaagcccccagattgctcaggcagagcctggttccagtaaagctggccccaaatgatagactagaaccacaggccagaggcccggcagcccggccccgcccactcttggcatagagacacagcagggaggagggggacactctgagctccagggtggtgtctctctagggctagcggggtctgcgggcaggactcgtgggtggggaggggtgtttctctaaggggccaaggctctgggctgggggcctcatcctcatggtctctgcagagactgatcagtaagctgctctgccattaatgacccagatttgcagggtggcttgggagtaggggaccagcagatgtagaacaaacccagttgagattcagaaatgaacccagcagggatgtcttgggattctgggccacttctgaaatgggcaacctgaggcccagctgctcctgaagatcacagcctcctgcgggcagacgggggcaggatcttgccctggggaagcctgggggtgagtaggagtgagtgtgcctgagtccagagcactggctcagggactgccttggcccagtccctaggctggtggggtgccagcggggccgggctgtgggttcccagccttagccatccagcgccaggtcagcagagccaggctctcaggcccctgtaattaccggggtgggagctgcagccaagcgggagcaggggtaagactcccagcgtgagccagcactgaggcctccacatggggacctgggtccctctgagagggactggtgaagggcatcagggcccatcctttcagattgctaggccctgtctttccaggcatctgcccccattttggataaaagaaaaccaaggtgggaatgccccattgttctcaggtcatagctggggctgtgtcctgtcccactagttaattacaaatgataacatttatgacattt

SEQ ID NO: 84925 - DNA, 1050 bp, Homo sapiens
tcagcgggggccgggcccgggcactgctctggcacatcgtgtcgtgggggccagctgaccggaggtgctgggcagggacctcgtcagccccagggggagatgggagagcccaggggtggggagaggagagagagaggagtaaagaggaaaggagaaagaagtcagaaagtaagaggaaggggaggggccccagctttgaaaaccactaagtccagagacaaacccaagtctggatccaccagacacccccgtggcctcccacagctccaggctgaccctggcactgggcctcagggctggaccccagcaaccagtgggtgcactgagtgcatgggaggtctgtaccctccccgccccaccccagggcagggctcacggtggctatcacggtccctgcttcccggcggtgcagcagggcctcccctcccccccactcactgctgctcagccctggcgcggtcgctgacgaagaagagcgcagtggcgaggaagaacatgccgcccaggaccacgacgaaagggcagagcatgagcgcgtagcccaggctcaggaactcccagagcggggagtccttagtgctctggcggatcaggtctgagatctgcgaggatttgggggtggatgtcagggcagagccctcctgcagtcccccagcctgccctggccagccccaccccggggctactcacaaagccaatgaggtaggggctcccggcgtcccccagcaggtgggaggtgaagctctgcaaggccacggcagtggcgcgccgcgtggggatgaccacgtactgcggaacaggcgggcaggtcagcggccagaggagaaaggctcacgcgcttggccctggccccgggccgtggcacttctgaagcccccacaccctcagactcactcctgccctacgtcttgacacctctctcccctgggccctgccctcctccccacagtcccctctactgcccaccccaccagcctggctgcttctctcctgccagtcacccttctcctccctgagcccctcccacccacacacagctgcagtcaccct

SEQ ID NO: 84926 - DNA, 1041 bp, Homo sapiens
gacttgggcgcccagcttcatttgccaggttgcgtccaatatccccaaggtccgaggcccagctgagcagtggtccctgcataccaggccctcgcgtgagcctcaaagccgggactgccgccctgaggcctgggccacctgctctccgtatggtccagggtctgttgagtcttcaaagctgcagatcgtgctttgcccagcaagttgtgtgggaaagtccagccccctggcccttcgttccagggagggcagggacttgcccaagatcacataagctggtggcaggccaggctctccccggacacccacttggggctgtcttcttccttggccccaggggccctgcggcccaaacctagggctgggaacctgtccaaccgtgtggctccaacacacacatccttccagggtaactgaggacacagcctcttcttgatgccagggccactcagcaggcctgggccagagagggtgggtgcctagccgtggatcacacagaaagctttggggcagcccagccggtcccggacgctgtaggacacctcccagacgaggtgggagtgtgggttcttcattgtcccaatggcacctggggaaaggggtgtcaggtcagcagtggggcttagtggggcctgtgccaaggctgccctccctccttcccttttcttgctgtttggagacgcaagccttctcctggacctgcagctgtgaccctgggtctcgtgctgctgggaagctataactcccagagggaagggccaaggagtcaggccctggtacatccaggaggatttgggagaacagaagtccggacagagtgaggagttcctggccagtcctggccctgatctatgcgaggccccacccagcccttgaaaggaaggaaaggggagctaatttactggaaggagcagcctgctgtcccacccatggctccatcagtaaattctggcaacatcttcagagacaaagcccagagttggtgggatgtgctggggtaggaggtgactctggaggaaaagtgctccctgttgcctaacc

SEQ ID NO: 84927 - DNA, 2237 bp, Homo sapiens
ggggctgggaacaccctcacgctgctgcacacacacacacgctgcacacacgctgctgcacacgcacactgcacacgcatgctgctgcacacacatgcactcaagcgcattctcagatgtgggagctgtaggaccctcacaggaccctcgcaggagcctcgcaggaccctcgcaggacccaggggcctcgcaggaccctcataggaccctcacgggaccctcataggggcctcacagaacctaggggcctcagaggaccctcagaatccaggtggaggtagcagtcgcggtggcggtggctgctgccctcgatgggcaccttctaaccttgctcacttcccttcaggcgccccaagttggagaagaaggatgccaaggagatccccagtgccacccagagccccatcagtaagaagcggaagaaaaagggattcttgccagagacgaagaagcgcaagaaacgcaagtcagaggatggcacgccagcggaggatggcacacctgcagccaccggcgggagccagccccccagcatgggcaggaagaagaggaacaggacaaaggctaaggtcccagcccaggcaaacgggacgccaaccaccaagagtccagcccctggcgcccccacccggagccccagcacccctgccaaatccccaaaactgcagaagaaaaaccagaagccgtcccaggtgaatggagctcccgggtcccccacggaacctgcaggccaaaagcagcatcagaaggctcttcccaaaaagggggtcttgggcaaatcaccactgtccgcgctggcacggaaaaaggcaaggctgtctttggtcatcaggagtcccagcctgcttcagagtggggccaagaagaaagcacaggtgaggaaggcagggaagccctgagcacaggtacgggcccccctcagcccctgcctccatctgcctgagacgcctattttttttttttttttttaaaccatgattttaatacgcaagctgtttctaaggcgctgccactggggagggtggctgttgccgcctgcccgggcatcctgctctggcaagcacagcctgagccattcctgcaggggtcccagggtgcagagacctccccacccccggttctgggctgggaccctggctccagggccatgtccagggctctggtgtttgcctgggttggtgcaggttgatgtgctggctgcaggcaggtgtgaccatctctcgtgcctgccacctctttgcccccaggcttttttgctgtgagggagccaccagggggtgatttaaataggtttatttcttcatttacaagaggaatatatttggcttctctcttaagactctgagattcacaatcagcagctctaaaaaataaaggagcagtttggcttccggaaggaagaggaggcaacactcggacctggttcttgtacaacaagaaaacatcgctggggccccgctgaggctggagtgggggtggaggctggtctttggaggatgccacccccaccccatcctcttgtcaggccctcggggtaccccagagcttggtgggtgagtattccacctgcttacacaccactgaagccacagccagccagtaactaaggggcaagaagagcattgtccaagctggctcttggggggtcccccattggccacaaggcctcaccccccaccccacccccgcaccagaaccaccttgattgcagcagaagtgcagggagtgggtgacgcagggggctaagctcccccaaagcgggttggggctggtgtgaagttggcagctgcatcctggtgtgtgcatggatgggaggtgggtgatcgaaggcctggcccccccctggggtcacttggtggaatgccagcagccagtgtttgggtaggggccgcctctcccggggcctcagcctcagctctggggcaggaagctttgtggatagctgcttcctccagcagccggagccctggctactgccccatggattctgggaatggtctcctgggccctgcccctggaaaaggctcagctcagcctcggggaaggagtggggtcctggcttggggggtggtggcagggagagaagccctgcagagttgggctggtgtgcacctgccagagaccttgagcctgggggcacaggtggtgtacagctgcagccagggccttcacccctggtgatgccagcttgtcagaacagtccccatctgggacctccaggctgggagccaacccga

SEQ ID NO: 84928 - DNA, 1850 bp, Homo sapiens
ccagctctcgtcctcaccacccacaggcaccacctgtgccgtgcccggcgctactgccacgacttgggtgagcgcgcaggggccctgcacgcccaggtggagcggttggtgcagcaggctggccgccagcccgactcccccaccgccctctaccacttcaacgcctctctctacctgctccgggtcttgaagggcaacactgctgagggctgcgtgcatgagacacaggagaagcagaaagctggcactgaccccagccacatgcccacgggcccgcaggtgagcagggcctggcccaggagcagccccaggcatttcacagccagggagtggaggccgggacttccccagggcccaaccctcagccttctgatgaaggtaggccaggctctgctcccatcccagggacccctctcctggcctcacccagctcgctctcccctggcctaggctgccagctgcttggacttgaacctggtgacccgggtgtactcgacagcactgagctccttcctgaccaagcgcaacagccccctcacagttcccatgttcctcagcctcttctcccggcacccggtgagtgttggggcctgccctgcttcctcatggtccctgctcagcccagcctgcacctcacagcccttgtcactccccaccaggtgctctgtcagagcctgctccccatcctggtccagcatatcacgggcccggtgcggccccgtcatcaggtgagagacttcccagctcccagcccagggcctgtctgaattaacccgcttaaccctcttctgactggatattgtgaggccccagagcgctgtcctggtgagcacgggcacagctgtccctgccccactggcttggctgtgggtacatggtctctgaagggggtggccgtgccctggcccctgccacacagtgaacacacaggagctgagggggcagggccagcctcactcccgcagccactgctgcccatctggccacacacaggatgcccctggtagtgtctgctctggtgccagggctgttgggggcaggctggaggaagatggcactaagccaataatgggcaggaattgtcccaacctgaggtcccacctctatccagctgggaggccttggtgtccccacctgcacacaaaggcacaggagcaggtagtcacagagcccagagcagcaggcagcctcacacgctgcccacagcagtgcccagcgggcccccgagccctcatgcatccctgagccgtgagcacccaacgtgccaaggctcctgccacccacctttgcccacccacaggcctgcctgctgctccagaagaccctgtccatgcgggaggtgaggtcgtgctttgaggaccccgagtggaagcagctgatgggccaggtcctagcaaaggtcaccgaggtaacagccggggggcgccctttccccaccccctcagaatcagttctccgggagaccgatctctgggaaagaagtgaggattggagcctgagtccagagtcgggagaactggggttgtcccaggagacggtccctgcctctgggctttacttccggctgggaaacagaaaggctttgagcagctctccggagtgcctcagcctggccacccttccctagaacttgcgcgtgctgggggaggcgcagaccaaggcgcagcatcagcaggcactgtcctccctggagctgctcaacgttctcttcaggacctgcaaacatgaggtgaggcgggggcccagtccgcggtcgtgttcgggttcctcttgggggccttggggcctcccggccagcagtgccatgcccgggctggactgcagggatgggggtcatgtggggaaacttc

SEQ ID NO: 84929 - DNA, 2165 bp, Homo sapiens
cgcctgcaatcccagctacttgggaggctgaggcaggagaatggcttgaacctgggaggcagaagttgtggtgagccgagatcagaccactgtactccagcctgggcaatagagcgagactccatctcaaaagccctcagctcttggggtgtccagctggggtcttctgttctggattgtgggggtgactggccagggcgggccagtggctgggtgttggaggcttcttgatgccactgctgccatttggccagccccttgcctggtttagaagggctggggacagggcctggccccagtgtgtgtcctaccctgcccgcagtcccctgcagagagctgtgacctgctgggtgacatccagacctgcatcaggaaaagtctgggagagaagccccgccggagccgcaccaagaccatcggtgggtccttggtcacgagagggactagagtggtggggtggggccagcggtcccctatccgggctcaacccctccctcttgcagacccccaggaacccccgtgggtagaggtgctggtggagatcttgctggccctgttggcccagcccagccacctcatgcgccaggtggcccggagcgtgtttggccacatctgctcccacctgaccccgcgtgccctgcagctaattctggatgtgagttgggacctttgggagtggaatgtgggctggggctcactgagcagcgagctgcaccaggggtgccgcttcagcctccagcctccctgccgggagcctgcggccggtgggaggggtctcaacgaggccttggcctggcctggccgcctctcctaggctccgttttcttctgggaaatggaggtctttggtcaaggctgagtggggcctggagaggagggcgggggctgcaaatgggtcagtggctggcacccctccccaggtgctgaaccccgagaccagtgaggatgagaatgaccgtgtggtggtgacggacgattctgatgagcggcggctgaagggtgcagaggtgttgccagcatgggccgggcgggggcggtggggagtgggacgatcggggaggtgtgtgacgcgcctgcctctaccacacaggacaagagcgaggaaggtgaggacaacagaagctcagagagtgaagaggagagcgagggggaggagagcgaggaggaggagcgcgacggggacgtggatcagggcttccgggaacagctgatgaccgtgctgcaggctgggaaggcgctggtgagtgggggaggtggaggggggggcggccggggagggctcgggtgtccccatgttgtgtgcctgcccgaggcctggctgaccgctgggcctctgtccctcagggtggagaggacagtgagaacgaggaggagctgggggatgaggccatgatggccctggaccagagcctcgccagcctctttgccgagcagaagctgcgtatccaggcccggcgagacgagaagaacaagctgcagaaggagaaggctctgcggcgcgacttccagatccgggtgagcctgggggcgggccgcacccacccccgcctccctgtgcgcccacccccgcctccctgtgcgcccacccccgtgttgctgacctgccctcctggctgcaggtgctggacctggtggaggtgctagtgaccaagcagcccgagaatgccctggtcctggagctgctggagccgctgctgagcatcatccggcgcagcctgcgcagcagcagctccaaacaggagcaggaccttctgcacaagacggcgcgcatcttcacgtgagcacgggggtgcagggcgggcaggtgtggccggcagcccccaggcgcaggagagccagagctctaggcttgctgtctgcacaggaaggagagagccaagcttccagcctgggcccctagctcgcaggctcactgctcagccctagaggcacacgtcacttagtgattcccacagtccttgcttcatccccgcgttctcccgacacagtgccaacagtgccctggagctggggtccatccctgcccttgacagtctcaagtggggctgtgccaacagtgccctggagctggggtccatccctgcccttgacagtctcaagtggggctgtgctggggtggagggggacagtgggtgcacctgtggcaggggacacccaacccagtcc

SEQ ID NO: 84930 - DNA, 1257 bp, Homo sapiens
ggtgctcacgtcaccctcaacatgcacggttgcaagagggggctgtcccatgttcgcaggagcagtgacctgacttggccatgaccacacagcctcccatctgttggttccttgagaggggcactgactctctctagctcgggttaacccgcgttcagctggggatccagagcagagaaacggccccttcccatcctagcccagcccagccccctccagccttgcccgtcaggcccccgaggactgtacccagggcagaagggcggctcctcctcctcctggccttgtaccctcggtggtaccatccaaggaggggagcctgtaaaaaccaatggcagtgaatggctatggccactctcccaccctccccaggttttgtttgttccactcgttctttgtcacaaagaagcccacatcccagatccctgagacaaagcacccgttctccttccctttggaaaaccaggcccgagaggctgtcagcagtgccttcttcaggtgagtcttgggcagcccaggagaggtccgaaggtgggaaggccttgagggcgcctgctccctccaggtcccctaagctgggaacaacggcagaggcccccggagttctagtaggtcctggagaggcgggagaccgagccctggggagggcggagggaggcggctacattgactcatctggtctgctgaccccaagccccatcccttgcccagtctgttgcagaccctcagcacgcagttcaagcaggcaccgggccagacccagggtgggcagccctggacctaccacctggtgcagttcgcagacctcctgttgaatcacagccacaacgtgaccaccgtgacacccttcactgcgcagcagcgccaggcctgggaccggtgagcacgtgggatttccagggggtgggcaggacgctgcagtctgactggtgcaggggcctgggaatcgcctgtctccccgcaggatgctgcagactctgaaggagctggaggcccactccgcagaggccagggctgctgccttccagcaccttctgctcctcgtgggcatccacctcctcaaggtactggggcctgggagggaggggctgtgagcctggggttctatggcacaatgggccccctaccgagaggcttttgagggctgtgcgggtttccaggaaaggttctgggggagttaagttgggaggtttttgaagccaactttgtcacaggtggaaacatccctccggccacttagcggcaccagctggtgtc

SEQ ID NO: 84931 - DNA, 1437 bp, Homo sapiens
accgcaaagagttgctaaaaatgctaagctgccgcccaaaaaggcggagcgcgggtgctggcactgagtaagcgcgtgagaggtggttgtttttggtcccgaagatgacacggctaggaattggcagcgtgggctttgaacccaggtcagtctcgcctcctaactaccactctgccctgcgttgagccaggaaaacaggccatccccatccagcaaggcggaaagaggggccttctggggccggaggtgctgaagctggggcagtcagacccacagaggccttgacgccagacaaaagcactggggtgactggactgttgcaagttcaggcacagcctagctgtgtacaacaggagattgccggggctcgatttaacctgtagtgggcacaagcctggtgggctgttgcccgcctgcccccgggctgttgggctgttgggctgttgcccgcctgcccccttggctgttgggttgttaaccgcctgcccccctgggctggtgggctcagcgccatgcctaactcttgcagctcccaaagcagttcaagtttgccccagagatggacgattacgtgggcaccttcctagaggggtgccaggatgaccctgagcggcagctggccgtgctagtggccttctcatctgtcaccaaccaaggcctccctgtcacgcctactttctggcgggtcgtgcggttcctgagccctccggccctgcagggctatgtggcctggctgcgggccatgtttctccagccagacctggactccttggttgacttcagcaccaacaaccagaagaaagcccaggattcatcgctccacatgtgagtggaccttgggggaggacacctaatttaggagttaacttcctaggcctgcagagccccgcgacccaagcccgccctccacagcgtcctggctctaaaccatgagaggagcgagggggaagagccttagctctcatatgaggcctcagtttacttgtgtgtccccacactggcgatcgggatggggagatcttggagtgttgtctctgagatcaggcaaaggaatgtcctgtttttgctggttcttttttttttttttttttttttttgacagagtctcactctctgtggcctaagctggagtgcagtggcgtgtgatctcagctcattgcaacttctgcctcccgggttcaagcaatcaagtgattctctgcctcagcctctccagtagctgggactacaggcacccgccaccacacccagctaatttttgtatttttaatggagatggggtttcaccgtgttggtcaggctggtctcgaactcctgacctcgagtgattggccagccttggcctcccaaagtgctgggattacaggtgtgagccactgggcccagcctgtttctgccagttataagtggctcacatgacctcgcctcctgccccgc

SEQ ID NO: 84932 - DNA, 1233 bp, Homo sapiens
gatgactctgatacctcaccaggtggccccgtgtcaggagcaggtagaacaggatccaccaggctcaccccgcagaggaagtcacgatttcttctccctccatccttaggtctcgaaggccacattgcaggagatcctgccggaggtcctcaaagccgacttgaatataatactcagctcccctgaacagctagagctcttcctcctggcccagcagaaggtgccctccaagctcaagaagctggtgggatccgtgaacctattctcagatgagaatgtccccaggtgtgatggaggtgggcggatttgccctccctggggccaagggactgcatctggccaggcccagatttgtcgtttggcctgggggtgtcccggctgctcttgtcaccctggcccttgcctgtgaggcaagtgttccctgagtcccttgccctccgcaggctggtgaatgtgctgaagatggccgcctcctctgtgaagaaggaccgcaagctgcccgccattgctctggacctgctccgcctggcactcaaggaagacaagttcccacggttctggaaggaggtggtggaacaagggctgctgaagatgcagttctggccagccaggtgcgggcgacgcgtgtcctctctcggcccccttccctgtccgtgaagtgggctaggccactagtcctgaggttcccaccaggggcaccaagggctctgaccaggctctgtcctgcaccccctttagctacctgtgtttccgcctgctgggcgcggccctgcccctgctgaccaaggagcagctgcacctggtgatgcagggagacgtgatccgccattacggggagcacgtgtgcactgctaaggtgggtaatgcccgtgcagctcgacactgccagaaaggctagacgtggagctctccctgccaaaaaggggagcagggcacctcgggggcttggctagagctatgggtgtcccctccgtctgggtagtgagctgcctgaacccctttccctcggacaaattttttttttttgagatgaagttttgctcttgtcgcccaggctggagcgcagtggtgagatcttggctcactgcaacctccgcctcccaggttcaagcgattctcctgcctcagcctcctgagtagctgggattacaggcgcccaataccacgcccagctaatttttgtatttttggtagagacgggattttgccatgttggccaggctggtctcgaac

SEQ ID NO: 84933 - DNA, 2555 bp, Homo sapiens
ataattatgatctttttaaatgcatttggctccgtgttcctccacgagagcagaggctttgttccaaccgcctagcacggcacgccagcaggagcccagtaattgttgaatggctcaatgttcggagcgcaggggccgctctgggacgagtcggatcgaagtgctacacctaggtttgtttccgagatgggcccttagaaatgcccccctggggctccaaaggggcagatgccacagccgccagggcggagcgggtgtgagcagaaggctgggaaagatgggacgccgctaggcgagggacttccgctcagagctacggcggaaatgccgctcttttaactctgggccggtctctcttggttcccccgcccctccgggttcttccgcctccgagccgacacaaaccggtgcgcatgcgccgtgccctgacctggaagcggctggggccggagcacacgtgtttcgtgtttcggtgagtgtggcggagatggagagccgggatcccgcccagccgatgtcgcctggagaagcgacgcagagtggcgcccggcctgccgaccgctatggcctattgaagcacagtcgcgagttcttggacttcttctgggacattgcgaagcctgagcaggagacgcgacttgcggccacggagaagctgctggagtatctgcgtggcaggccgaaggtggagtggcggggtctggggcagaggctgcgcatatcccggcaaggaagcggcggcgggcccagggagttgagactgggggcacgtggtcgcgaacctggatgccagggtgcgcgggggcgtgcaccttgttgtcaccattgaacacgagggtgtgcttggttccgcaggggtccgagatgaaatatgccctgaagcgtctaatcacgggactcggggtcgggcgagaaacagcccggccctgctacagtttggccctggcacaggtgaggtggtgctcctggcagggtcccagccatccaggtcaaaatggtggggtatgaggagggcgggtgtggtgtctcagctgtggcggaggggcagcccgagagagaggtcgggagtggcagagcagactggaggccaacctgagggaggcctcttcatgaaagtggagaaggtgtgagcaaggcctggccaggttttctatttggtgcttgggttgcccggcctcttaggtacactttctgggagcagtgagcgctgggtgggctcccttaggcctgcagaggcattcagctgattggagtagaccactctctgaggcgccttgacaaggggcagagcaataaagacccaggcctgcaggatcagcctgaggggagctcagaccacgtgcggagagaagacccagtggctgagcatttcagactagtaatctaggggccatagaaggtacatagaaggtgggactagggacctgaggcttcttgggagaagttgaagggggaagggaggttaaggtttgtgaagacgtagttgggccactctcctgaaccctcttcctcctgccacacaactcctggcagctgttacagtcttttgaagacctccccttgtgcagcatcctgcagcagatacaagaaaaatatgacctgcatcaggtgaagaaggtgagagtggggccagggaggtcagcagccccaggggtgggaggcttggggaatggggagttccagggcccctcatgcctgtgcctggaatccttttctaggcaatgctgagacctgctctctttgcaaacctgtttggagtgctcgccctctttcagtcaggtcggctggtgaaggtaagagctttggagggactgggggaatgtaggctggcttgggatgggtgggggacagtcgtgtgccctgctcataccctctgtccctctgtggggaccaggaccaggaggcactgatgaagtcggtgaagctgctgcaggccctggcccagtaccaaaaccacttgcaggagcagccccggaaggccctggtggacatcctctccgaggtatgagctccccagctgtgcgggcccaggcaacactttgttacagagacatcaagggggctcggatgagaatctggaacagcactgttccatagaaatacaaagatgtataatttgaagcgtttcagtgactttgttgaaaaggtaaaaagaaacaggtgtcatttagtaacatttagtgacatttgactttatctggtatatctaaaatattatttcagtgtgcattggtataaaaaagtgttgagatatcttacactctttttgtcaggtgtctccaaaatccagtgtgtatgttacacttaggcacacccctgttcagattagccacctttcaggcgctcagcagccctgtgtggctgtggctaccgtattgggcagtgcagctctggaactgtgcctggcacgtggcaagtatataaaacgtttgccattgttatcctggtcaaggctggccccttgtgggcctccactgccctacttgggaaggtagcaccctaggcccttttgtcaccgaagagaaaggcaggggtagcaggtctccaggccaggg

SEQ ID NO: 84934 - DNA, 1019 bp, Homo sapiens
agaggagttgggctttgcccggcctgtaagaagttcttaaacatgtcatggtagcagaacccgggagtgtcccagtgctccgtgtgaaatgtctggaaatgtggatacacttaagtctgtcttatgaacatgacactctacgtgaccatggtctaaaatcaccactgtgagctcacacgtgcctcatcaactgtgtcatcggttgtttctgaggttttatttgaacatgcatttgctatttgtctgctcatagcagcagctgtccaaattaaaaaaaaaaatgtcaggttcacatatacatgtagatgtgtgtgtacacacaaagagagagagagagagagagagagagagggaattctctccagtcgtgatttttgtcaatggagattagccattgttcactggcaccaagctagtccactaggttaggagttggtggatgaagctcaggatgagggtcttctttgtgtctggcaagccctcttcggggtggatggaaggtggagggtggctggaggtgggtaacttgattgtgatggtccaaggagaaaggaaaggtctgagctgggccgtgggccttggtgtgtagaggggctgccttggacagggtttcagagggggaatgagcagatggggtagtctcagaggggagctctgacttgggggactgctgggtcacagatctggggtgagatgctgggttccacccgggtcgtgctgaacatgaggggactatgggaactccaggtgaagctgtcccagagcaggtggattcatggatctggtgctccacacagtgagcaagcctggagattagggagctctctgggcagaagcaaagagtctgaaggaattaaaaaccagaccggggaactgccagggagtgaggaggacctgagtgcactctcagcaaaccagagaaggagccctcctggaagaagaggctggggtcagtgaagatgcgtcggcctgttggggagtgaagatggagacccaggcacccaggggcatgagcagca

SEQ ID NO: 84935 - DNA, 1063 bp, Homo sapiens
gggaaaatggtttcaccctcagcctttccccccagagccccgcctggacctgtggaacctgtcagacgagagcagggtgggtgagggggcacggagaccccagagcctggtgactgtgggggccggggttccagctggactggctggttctcctccccctgccgacatggtctacacggccgcagcgtggctctaggggcacccgttctgctctgcgtgctgggagacgccctgtgcttttcttgcgtttctgagagtgggcctggcctctcctcctcccactcttgaatcaagagctcaggggtcgcctcctctccaaggctggctcttcccaggctctgggtcctgtctgctgtgagctccccagtggtcccgctctgcagatgctcccctcacctttctcaccctatgaatgtggtcttgcctcttccttctggaaaaacccctcagaccctttcccctggcttcgctcagggctaaagttactgcgctgtcttcatttctctgggacccctctgctaggccatctcctgtcccccaaccccctgtcccccgccccacgcttctgatcacccatgacctcttcttttgctgaacccaatggatgcctggttggatttcctcttcaccttttcctcaaccccaggctgcctttggacgcacctggcttttttttttttttttttttttttttttttttttttttttttttttgagacagagtctcgctctgttgctcaggctggagtgcagtggtgcaatcttggctcactgcaacctccatctcctgggtttaagcgattctcatgcctcagcctcctgagtagctgggattacaggcacccaccaccatgcctggctaattgttgtatttttagtagagatggggtttcaccacgttggccaggctggtcttgaactcgtgacctcaagtgatccacccgcctcggcctcccaaagtgctaggatgacaggcgtgagccaccgcgcctggccccgtgcctggcttcttgactcccttccttcctggccttggctttctcaccattcttcaggggctcct

SEQ ID NO: 84936 - DNA, 1035 bp, Homo sapiens
cactgtactccagcctgggtggcagagtgagacgccatctctaaaaaaaaaaaaaaagtggtcctcatgggcttgttgggttaaaggagcctcaccccaggcctcacctgccttcctcattcctttcccagcccaaccaccaaccacctggccccggccccagccccggccctggcccaccaccccggcccctgagcctggccagggaaagaatcagagccagagggtcttgtaacctgcacttggtattgtaagtctcgctttgacctgagatagctgcccctctctggggcagcaactctctctccgagggcagaatcgagactggctctgagctccttagcctgagtttttggaatatcggtatcagccctgttatgttgccttggatgacgcgcttggactcagccccctggggtcacaagaactccttgtatactttaaaagcctttctgtcttggctgcttggggttagctgtcatcctaattgcagaaacagctctggacgagcgtgttgtgcaactggatccagacgatggtgtggtggagccaaggggaatgggtggtgcagggagcgggcagctcatgaggatggggcccagctgccgaagcccagacgtggcaaccgtcaatcagactgtcagaggacacagggtcagggtatcggggtggataccccagcacccaccccagcggcaaggtcactccagcacccactccagcggcgaggtcacccccacacccaccccagggtgaggcgacactgtcttgcaggattcttccttgtctaagtccagtgatgcccgcttatgccctggtcaccttggtcaccctctgccctagaccaggctaggctgtggcagggagagggatgccccgggccatggggtggtggccccatgccccagcctgcagggaacacagctccccttggcagccagaaccagagcgattccgggctgtgcttccccagcacgaggtttgagttcagggagcttctagactccaaacagatgtttcttctattcccagctt

SEQ ID NO: 84937 - DNA, 1049 bp, Homo sapiens
acaccattagagcagagacattgttggtttgtctgttgctgcatccccagttccaaattcctgttatgtagaaggggctcagtaacgaatgaatgaatgaaccaatgaacaaacgaatgtctaattgtggttcctcctcagttctttgagctgaacgtgggagataagcaaaccatcacctgcagtaggataagctctgcaagaacccggggaggctccctctccagcggggtggatgtgcattgctggagcagattgagaaactgagttctgatgggagcttagctgctcgggttcctctcacaccgtctgttgcagcctgctcccttttgactgaatgcaacaaaaaagaatgggctggggtggtagggcacccctagcatggcacaccctccccccacttcaccccttgcaagccaaggagactttgaggggcagttctcagggcacagatcctagggagcccacagggtgccattcttaggactttgtcactgtggggtctcatggatcctcagtcccggggcctgggtcacttccacttctagtctttgacctgtctgggtccagtgcaaatctgttttcaaatactggatgagtgacctccctacaaactgcccagtggatttccctaaatagcaacttatctgtagaccccctggacaagggttgtgtgttaggccttcttttctccatgtggttcctggcaaaagactcggcataaagagatatttgtgcacacgaagtcaaggaaatgctcccgcatgggatccagagctcaagaggtttcttctcgttttcagtcctttgcaaagacccttggtctgccttatctcatgctgttctaatgtttcccaacacttgaactaagtgttgccccagatttcttcacctttcggacatctaactccctgaagtctcccatgtctttggtttctcagcctctcctgtgaaacatggtgctgaagccacacttttgggtcttgaacactaagaacctgcactcatttacactctgaccagttcagttcctgccaaccagccctgct

SEQ ID NO: 84938 - DNA, 1088 bp, Homo sapiens
gtctcttgtttccaagagactcccagtatttctggtgctcacacttgccctttcttctttcctcaggtctcctctttctgctcagaagcactggtgacctgtgctgctctgacccacccccgggttcctcccctgcagcccatgggccccacctgccccacacctgctccagttccccctcctgaggccccatcgcccttcagggccccaccgttccatcctccgggccccatgccctcagtgggctccatgccctcagcaggccccatgccttcagcaggccccatgccctcagcaggccctgtgccctcggcacgccctggacctcccaccacagccaaccacctaggcctttctgtcccaggcctagtgtctgtccctccccggcttcttcctggccctgagaaccaccgggcaggctcaaatgaggaccccatccttgcccctagtgggactcccccacctactatacccccagatgaaacttttggggggagagtgcccagaccagcctttgtccactatgacaaggaggaggcatctgatgtggagatctccttggaaagtgactctgatgacagcgtggtgatcgtgcccgaggggcttccccccctgccacccccaccaccctcaggtgccacaccaccccctatagcccccactgggccaccaacagcctcccctcctgtgccagcgaaggaggagcctgaagaacttcctgcagccccagggcctctcccgccacccccacctccgccgccgcctgttcctggtcctgtgacgctccctccaccccagttggtccctgaagggactcctggtgggggaggacccccagccctggaagaggatttgacagttattaatatcaacagcagtgatgaagaggaggaggaagaggaagaagaggaagaagaagaagaggaagaagaggaagaggaggaagactttgaggaagaggaagaggatgaagaggaatattttgaagaggaagaagaggaggaagaagagtttgaggaagaatttgaggaagaagaaggtgagttagaggaagaagaagaagaggaggatgaggaggaggaagaaga

SEQ ID NO: 84939 - DNA, 1222 bp, Homo sapiens
tacatatgtaaatggtcattccctgtttctgtctctctctggctctcactttcttcctccactctttatctctgccccttttttctccagagcttgcatggagatggtcccctgcggctgctgctgctgccctctatccaccttgaggccttggacctgctgtctgcactcatcctcgcgtgagtgggattgggctggctgtggtgaagggatagggcgtgccagaaacgagggtcaccattccttctctgccccaggtgtggaagccggctcttgcgctttgggatcctgatcggccgcctgcttccccaggtcctcaattcctggagcatcggtagagattccctctctccaggccaggagaggccttacaggtgaccatccaggaaggcaggaagggaataaagaggagaggggggtgagggggtgcaggtgggctggggcttctggcatgttgaccccccattcataactgccatctttgctcatgacacagcacggttcggaccaaggtgtatgcgatattagagctgtgggtgcaggtttgtggggcctcggcgggaatgcttcagggaggagcctctggagaggccctgctcacccacctgctcagcgacatctccccgccagctgatgcccttaaggtgaggaggcctcagctccgccttaggactcatcctgtgccctttgaccaagtgtgcctgctcaggaaacactgtctgctgtggctgtcttgccttgttgtttgcctgtggatgtgatttatgttttctctgcctccagctgcgtagcccgcgggggagccctgatgggagtttgcagactgggaagcctagcgcccccaagaagctaaagctggatgtgggggaagctatggccccgccaagccaccggaaaggggatagcaatgccaacagcgacgtgtgtgcggctgcactcagaggtgggtgaggcctgtgccctggaccactggggctcaaacgggaccccatcctttcccctagtgggactcccctacctactatacccttaggtgaaacttttgtggggagagtgcctagaccagccttcgtccactgcgataagtgatcccccaaacagcaggtgaaggggaaggtgcctgtgaaatgcagagccaggcggaagcccgcagagaggccaggaggaggcacccaagcagccgccctgttgccagggctgcaggcggcctcgggtcctgcgg

SEQ ID NO: 84940 - DNA, 1321 bp, Homo sapiens
gttggagtgtggagactgttttttagtactatgtccttttggcttgagggaaaaattttgcaaaaactgtcaaggaggaagcccagctgtctctgggacagggccaggcccttttcgctcccaagcaggaagccgaggaccagagctggcgttgaggagtcttttaccatgaaagcatgtccgtgcccggtgttgatgccccatagagggctttgcttcttgtgtctacaggaaaaagagacctgggcttagagtctgctgctgggaacggatgggatgtacatctctggctctcagagctggctcactggcctcttccttttttcctccacatccagggcaagctggcctcattttttctgtctagggtggatgccttgagccctcagctccaacaggtaaagggcagggagggagagggagagcccggggatctgagcctggattgtctcttgctgctcctcctctagcttttctgtcctgccttcatatgcccatctgtgtccttcggcctcattgtcccatctcaggtttccctcagagctctctctgatctccatctcttttgggtgtcagtggggctgggggttctgtggctgggctggattcccatctgaccaggtttctgtcctttctcccgcagttggcctgtgagtgttattcccggctgccctctttaggggctggcttttcccaaggcctgaagcacaccgagagctgggagcaggagctacacagtctgctggcctcactgcacaccctgctgggggccctgtacgagggagcagagactggtagggaccagggctgctagttagtggaacaatagtgaggaagcgtggcaggaaggaacaggaggggagcccagagacatggggcagttggtttttggggaaaatgggttagaatacaggcaggtcgtccaccagaaatgacagaggaggggatggaagaaagacagtgtacagggtagttgtgcttctgccagctcctgtgcagaatgaaggccctggggtggagatgctgctgtcctcagaagatggtgatgcccatgtccttctccagcttcggcagaggttttcgggactggcccgctgcctagggctcatgctcaggtgtgtgtgggtattggagggagcggaggcgtggagcaggagggattgatgagggagtgtcgccttcatcaggagaaaggagatgaaggtgggtgtgggagttatgccagggagcctgctctgaaggtctccctgctctgattctctttagctctgagtttggagctcccgtgtccgtccctgtgcaggaaatcctggatttcatc

SEQ ID NO: 84941 - DNA, 2135 bp, Homo sapiens
tgatccacccaccttggccttccaaagtgctgggattacaggtgtgagctaccaagcccagccctttttttgttcttttttttttaagacatggtttcattttgtcacctgggctagaatatagtggtgtgatcatggctgactgcagccttgacctctggtgctcacatcagtaccccccaccgcacccaccaatagctgggactacaggcgtgtaccaccaccccccgctaattaaaacatttttttttgtacagatgggttcttgctatattgtccaggctggtctcgaacttctgggctcaagcagtcctcccaccttggcctcccaaagtgttgggattacaggcaggtgctaccgtgcctggcctggcatcttttactagggggaagagtcttcagtgtttagatggcagttgaagctgaggatgaggtgatcaaaatgagcccttttacggactggattttaaagcacaccacacttaatggtcaggtagaggaagatgaactgactaaggagactgagacaggccaacagaaagaagaagataaccgggattgcgggctgggggggccaagcgaagactacttgagggacgagggaggagttatttccgtgtgtgcctcctgaggtgggacaagacgcagactgagaattgttgatcagattagcggcacgggtggtaagaccatagtgagagtggttttgctggagcagtggacactgaagccagactggcacgggataagaagcgaatgggagaagggaaatggaaggagagaagatgggaaatcttttcgagatgctgggctctaacgatgagggagagaaattgggtgattactgggatttggcaagtgaagtatgggctcaagaaaagacttttttggtggctcacccctgtaatcccagcactttgggaggccaaggcaggcagataacgaggtcaggaattcaagaccagtctggccaacatggtgaaaccccatctctactaaaaatacaaaaattaactgggcatggtggcatgtgcctgtaatcccagctaggagggaggctgaggcaggagaatcgcttgaaccaggacctgggaggcggaggttgcagtgagccaagatcacaccactgcactccagcctgggctacagaaggaaactccatctcaaaataaataaataaaataaaaaagacaagatttttttaagatgggagagacttgagctgtataaatgtcagtgggaagagtcatgtggtggggactggttagaaattcaagggagataaagcgagtgacagtgtaaggttctgagaggaagggaggaagatagtattgaaagcacagcggagggactgtctttgggtaggaagagggcaggagagggtgggtaggatgaagatgaaatttcgaagtttgggagtgggaagcgaaggctgttttattaggttggtgcaaaagtaattgctgtttttatagttacttgtaattatctctgggcttcagttttttctgtgaagttatgggcaaggttaaacagaggtgacagtggtgggagaagtagcgatttggaaattggaggagaaaactttagtagcagcgttaaccagagaaatgtggtaggattactggacagggatgagggcctgtgtcgttggtaggcctgcctgtttttgcttcataagtattttctttttttgacacatggcctcgtctcgtctagcaggagatatatgctggatgtttttccttagatacatattaattttctaaggaagtccttttaaattcaaattgttttttctccatgggttccagggtgggtttgagccagttagcaacaacctcgaagagatggcacagtcttgttatggttgaggcttatttttcagtctgaaaagtgctcttctccctttctagcagggaacattagtatgatatcatcggaaaatctttccagggctgcggtgagccaagattgcgctactgcactccagcctggatgacagagtgagaccctgtctcaaaaaaaaaaaaaaaaaaaaaaaaaaaggctgggcactgtggctcacgcctgtaatcctagcactttggagtctgaagtgggtggatcacttgactcccagagttcaagaccag

SEQ ID NO: 84942 - DNA, 1027 bp, Homo sapiens
ctcagcctcccaggtagccgggattacaggtgcctgccaccccgcccggctaatgtttgtatttttagtagagatagggtttcgccatgttggccaggctggtctcaaactcctgacctcaggtgatctgactgcctcggcctccctaagtgctaagactacaggtgtgagccactgtgcctggcctagacgccctttatttctttctcttgtctgattgctctggctaggacttccagtactatgttgaatagaagtggtgaaagtgggcatccttgtcttgttccagttctcaaggggaatgctttcaacttttccctgttcagtataaggttggttgtgcgtttttcatactttgttgctcttttaacgttttaatttttttcccctacttttacatcctttgataacatctccacttagttatttaacaagcattttctgagcacatatagcaggcagtgtaccaagctctggagagacagtgagatgtacatggaccctgctttcatggtactcagagtctagcgctttttctatgaagtaaatgtttacaaataggaaatgtttatgctttgtgaaccacatatagtttctattgtatattgtttattttccaatcctttaaaatgtaaaagccattcttagtttgtgggccatgcaaaaacaggcacccatagaccatcatttactgattcctgttctagttgaagatactttttttttttttttttttttttgagatggagtcttgctgtgttgcctaggctggagtgcagtggcgtgactgcctcagcctcccaagtagctgggactacaggctcccgccaccacacttggctaattttttgtatttttcgtagagatggggtttcaccatgttagtcaggatgatctcgatctcctgacctcatgatctgcccaccttggcctcccagagtgctcggattacaggtgtgagccaccacacccagcgaagatactttaattgaataattatataaatgaatgtgaagtgataaactga

SEQ ID NO: 84943 - DNA, 1373 bp, Homo sapiens
tattaattttattcagctctgtattccttcacgtaacctcatgcatagtgtatgtgttggaagaaggaacgatgcacgccgttagggagacgcgggtgccgtgagaggaggctggccatttggggcatggagaggttacctggggggctgatgaggaaacatctttcgtgggcttccagaatgtgagagaaggggagaactggaaggaggattcttgttgactcggtctgtgttggcatttttacagctgtaaggaagccaggaatagggggaggaggatttgtttgagggtgaaggaaggataatggatgagttcagtgtccattcagcaagcatttatggatgtctcctattaggtgctgcccagacatatagaggtgaagcagacccatctttgaagtctggtagtgggattagttgggctgtcctgtgtttggcactacttgggtggggcatggagggaaggatcaggcaaaatataacttgaggaaaggccgagaaacagcctttcccacaggaaaaaaggggaaaagctcaaggcttctagtgggatggccttttggcctcagaggagatgtgacttcagaaaggcttcataggtgctgggacagagaagggcttgaagaatcttctgcatttttaacatcccgtttgtgactcgcttccctgttttctttcctccagaacctttcagctcttggggcattggtgagtctcagtaatgcacgtctcagttccatcaaaactcggtaagtctttggcccttttttttctccaggggcgtgttcccttaggaagtgggcatatgtacatctttgctttcattgtcaccgtccccaggattcaagacctctctctattcccaagagtgtggagagttacattccttttgtgagctcacttgatttgaaccctaccttttccagctcccagatgtcctattccaccctgggattacctctgctcccttctttctttgcttcttccacctcattccaagtatttcaggagttggaaaccacagtggatctggggatgaagtcttgctgtagcctagtgagaataaaagagcagtcactttctctgaagtctagcctccgcccacttaacatgactctcttctttctttgaaggtttgagggcctgtgtctgctgtccctgctggtaggggagagccccacagagctattccagcagcactgtgtgtcttggcttcggagcattcagcaggtgttacaggtgaggtttcagctgctgccctacttcctcctcctcccccatcttattccccatcttggatgtggcatgttcttttcaacttggacatgtagttctggggacagaataattggaaacaattccctgatagcaga

SEQ ID NO: 84944 - DNA, 1019 bp, Homo sapiens
agtgacctcctctgtggtgtaagaggaggctttcctccccgcttccaggagcccaggccccgtgcgggggaggagtagggttggggtgtgtgaggaatgacccctcctgcccctactctgatcccaggaactctgtgcggctggtgatccgaaaggtgcagttcgccccggagaaacccggcccccagccttcagccgaaaccacacgccacttcctcatgtctgaccggtccctgcacctcgaggcttccctggacaaggaggtggggcgtgagagggtgacacggatgccacggtgcagtttagaccctgggggaggggcgaagccacacatcaagaggacatttgtaaaggaggttgccttggctgggtgtggacagttgccgtgggcttgggtttgaggggagggggccagaacaatgtgtctgtgtttggggacacactgatgatgggaacagtgaaaaccagttccaattcacatgaccccctccccccaaaagctgtactaccatggggagcccctcaatgtaaatgtccacgtcaccaacaactccaccaagaccgtcaagaagatcaaagtctctggtaggaggtggggtttggaagggggtcttcggggagggcgttactgcacaggtggctcctggtgtgatctcagcccaggccatttcccagtgcgggagacccaccagggctcaaagaatttaggttgttccataatgatacggggagcctcggtgtttactgcttcagtggggagcatgggggggccacgccacggggtctggagttgtggtgtggtggtggcttgtgctccatccagagctgcctgaccccgtcccaccccacagtgagacagtacgccgacatctgcctcttcagcaccgcccagtacaagtgtcctgtggctcaactcgaacaagagtgagtatcgggagagacccatgttccaatctaggggagaagagcaggatcaggagaatgtgaggtggaggaagaattcttcctgagccatctcc

SEQ ID NO: 84945 - DNA, 1228 bp, Homo sapiens
ttgtagcatcaaatcaagatgccttagccttgtgaggctgcctcttgctgccttttctttgtcccttcctgtaaatacctctggtcccactgctgttcgaacgcctctgtcccagaggcctagcttcggggagggcagggagtgggaggctgggacaagagtcagaagccctcacctcacaaccctctttcccaccaccaagctatgccacagatgatgacattgtgtttgaggactttgcccggcttcggctgaaggggatgaaggatgacgactatgatgatcaactctgctaggaagcggggtgggaagaagggaggggatggggttgggagaggtgagggcaggattaagatccccactgtcaatgggggattgtcccagcccctcttcccttcccctcacctggaagcttcttcaaccaatcccttcacactctctcccccatccccccaagatacacactggaccctctcttgctgaatgtgggcattaattttttgactgcagctctgcttctccagccccgccgtgggtggcaagctgtgttcatacctaaattttctggaaggggacagtgaaaagaggagtgacaggagggaaagggggagacaaaactcctactctcaacctcacaccaacacctcccattatcactctctctgcccccattccttcaagaggagaccctttggggacaaggccgtttctttgtttctgagcataaagaagaaaataaatcttttactaagcatgagtgtgtgttttctctgtagtgtttagagagtgtatggtgtgcttatccatgattctgttagcttgtgggggaggacccagtctctcttctgcacccaaaagccacctgacacggaggctatcagcaaatgtttattggatgactgtgctgtggctgtgttccagggtaaacatcaaaacttgacttagtccaaactcaagggtgaggcttgataaggccacaaagtgaacttagtcatttctagaggtcacagtaactaaactaactcgcctgcacacagatgctcacgggagctagccagggcaggcccttccctgttgcggccgacgcacatgaccacctgtgacctgttgtgaccgagtcgcgttcatttccactgctccttatggctgctcgagccatctgctcctgtggctcagcggtgccacaaccgcaggcctcaccagacaagccacgtgacgtctctggagt

SEQ ID NO: 84946 - DNA, 1034 bp, Homo sapiens
cctcactgggtaacatcacatgtgcctagcagaagatgtgtaaataatgctagaactacagaactttgtcactggaaacttggcctgacctccaggccacgaggtcccaaatccttatatcctgagaagagggacaggattgagaaggttctgaaatcgtcgcagggaccactaccattactaatttttacggtgtgccagatactctgcattactttatctaatcctcaacaactctaggaagtagttattgtcacccccattttacagacaagattaacataagttaaatgatttatttacccagctaccagatggcctaacaaattcaaactcagggaagaaatgagacgagacctgatgcctggttggagttagggtaaaggagatggtgctccattgatagtctgtcttgtaggtggccacagggcagccccatgagggctccagctactcttcgaggaaggactgtcagatggctctgaagcgagtggactatgcccgcctcaagctcagtgatgtggctcgaacctgtgagcagatgctggagaactaggccagggagatggacccagagctgagagggagaccatcacctgtgccatgggacagaacctgggaacatgtagggtggggagtatgagcaccaacataccctgctggtcaaagtaccctaggacaaaggggcaaatggtgggcatggaaaaactgaagcccgagcctgcccacagctatgctttggcctctccagcagggtgctcctgctctgcactccagaaacaccctgacaggctcagagaggagatggaaactgacatacccaacccacttcctcaaacacttcatgctgctgccccagccttcccgcagacttggcctaatgaaaatacatacttcttcattcggagagacaaaacaagaactagagttttaatgataataaaagcaataataataaaagcaataacaataaaaacaagatcagactctcactggggtaggcaagggactgaggaggtgaaaccaacccgtat

SEQ ID NO: 84947 - DNA, 1403 bp, Homo sapiens
gggacgcctggctccgggcgggattatggatgttgtcgggggcgtgatgatgtgtgggttgagcctggcgctctgaccctgggtccaccgagaggctgtcatggggctgtggattggatgccagggaacagcggagtggggaccctgggcctgggaatgggtgccgaccacctccgtcccgcgcaggcaatggcaacgagggcagcgtcactggaagttgttattgtggtaaaagaatttcttccgactccccgccatcggttcagttcatgaatcgtctccggaaacacctgagagcttaccatcggtgtctatactacacgaggtaattttacctgcctctgcgagggcagcgcctgggcggcccctccttgcaggtgcctccaggaccctctctggtccagcctgaactccttcccggctcaccgagccccatctccgggttccgtttgctctcattccccgaaacttcatgactccgtctcacctactggggagtttcccagtcccaggagaaagggctctttcttggtggcaacttcacgcctctggaatgaggaaggagccggggaaggaaagaaggcgccgcagctaagcccaggtctctcctccgcaggttccagctcctttcctggagcgtgtgtgggggcaacaaggacccatgggttcaggaattgatgagctgtcttgatctcaaaggtgagacttttccactgctcttcaggctctgcctccagggcttagcagcttccacctgacagttttctttacctgagccttttcccctggggccgcacattcctagaaccttcttctgatcctgtccaaagtacttagactcgagtccctgtttgccaaacggggtgatcattcaccatcaccttcatgagttttgccaattcattctaccacgtgtgctattgtctacttattaatatttttcttgaaatcaaagtactattttattttatttttttgagatggagtctcactctgtcacccaggctggagtgcagtggcacgatcttggctcactgcaacctctgcctcccaggttcaagagattctcctgcctcagcctcctgagtagctgggattacaggcgcgcaccaccaagcctggctaatttttgtatttttagtagagacagggtttcaccatgttggccaggctggtctcgaactcctggccttgtgatccacccgcctcggcctccaaaagtgctaggattacaggcgtgagccaccacacctggcctatttttcttttccaatattttattatgaaaatttacacatatacaaaagttgaaagaatggcacactgaatatccagtgcctccacctagattctacaattttatttatatatgtatattttacatatttacataaacatatatt

SEQ ID NO: 84948 - DNA, 1045 bp, Homo sapiens
gtggggggcagaagggcaggacccaaccaggaggtcactggaggggtcagggctgaaaagcagggccccctcagccctcaccctctgcagggtaaaatgctgctcgtcgctttcggggggcaggccatcacctacaaactgcagctccagggccacatgggggagcaggaccaaaagctcctgaaggacagaaagaaagaaagatctggggtctaccctgtgcccacccccataccaaaatgcccaaccttcaggcctggggtgacttacccaaaacaccatgacaaggtcaaactccttcccggcctccaccacgtggatcttcagtgactgtttgttttggatgttgagctcagggactgggtgaaaaaccagcgctttaaggatgtggtccactctcactcccccatcctgctccaccccccactccgctctccttacaggactggggcaccaggtgggtgatgacgtagtacacggtcagcgggtaggtgagaagcacggctatgggggagtccaagctgaggccccgccatgtgtagtaatcctgccatgagcctggcaggagagggttgctagaggacctggccctggacccccaccccctctagtctaacaaacctcttcttcacagccacccaggctctggttctccagtccctggccctacccctagcttccacagggcccctccagctcaccaaaaacaccccggggtggatgtgggggcacaggaggcatcagggcagtcccgtctccctggagaagctggtaggggtctcctgagaggatgaaagaaggaggggcctggggtcagggagacccccacctgacccatctctttcttccttccaaaggggctgtattccctgagacagccgcagtaagaggaatgggggtttgcatagggatggggtttctgggtggagttggtaggggtgattccattgagggctgggaaaggcctgaaatggccctggtgctgttggtaggggtcagtgtgtatgtggagggatcatctgggacccagacaacttcttcccag

SEQ ID NO: 84949 - DNA, 2885 bp, Homo sapiens
tttgttttgtttttgcttttgttttgagacagtcttgctctgtcgctcaggctggagtgcagtggcgtgatctcggctcactgtaacctccgcctcccaggctcaagcgattctcctgcctcagcctccccagtagccgggattacaggcgcgccccaccacgcccggctaatttttgtattttttagtagagaaggagtttcaccatgttggccaggctggtcttgaactcctaacctcatgatccgcccgcctcagcctcccaaagtgccgaacggtttttgggttttttttggttttttggggggggggttttgctgactttcttgttttgtttgttgcttgccacgctgccatcaagtgctcactgtcgcaaaagaaccgtccccatgcagtactgtacttttcttttcccttctgccgtcaacctcggagtagcttcgctcccagaaggcctcaaagcgcgaccaaagagcgtgacagagcgctttacgacagttgctttgaggcagtaccggaggagaaagatggcggctaccttactagctgctcggggagccgggccagcaccggcttgggggccggaggcgttcactccagactgggaaagccgagaagtttccactggggtgaggaaggaatcggggttcataggacgtgcacaaggcctgacgcgatgggaagataaagcctgagtggggttgagagatctggcaggggtggagaggaggtggaatgtgttgtgctccaggaatggggagaggtaccccgaagatggtggagtggtgcggtagcttcgtagtgggaggtggagggtgggctgaagtttgaaattctgaaatcctgcgaggctagtgaggatcttgggcttaagtacgggatgagtcttttgagatttgagggttggcattctggtattctgcggggtgctgaggcccctataagatttgaaaatggttcagcgacggacagattttgtatttttggaactaggtagagagatcattgaggtttgtgtctgctggagaatgtagacttactcctttttcccttttcccagaccactatcatggccgtgcagtttgacgggggcgtggttctgggggcggactccagaacaaccactgggtgagctcaggacagatttgtgaaaggtcttcccatcttccttttcctttcctgcctgccagcccaccctgcctgcctccacagaccactgtgggaagagaggtttcttctctctctggagataaagatttgtcccaacttttgttactttcagttcccctcactcgttagtggaatccttacaaaagtctgttctccagcccgcttcagtttggatgagaataagcaatactggaggccaggcacggtggctcacgcctgtaatcccagtactttgggaggccgaggcgggtggatcacctgaggtcaggagttcgagaccagcctggccaacatggcgaaaccccgtctctactaaaaaatacaaaaattagccgtgcgtggcggtgcgtgcctgcagtcccagctacttgggaggctagggctagagaatcgcttggacccaggaggtggatgttgcagtgagcagagatcgcgtcactgtactccagcctgggcaacagagcgagactccatctcaaagaaaaaggaaaaaaaggcaatactggacatcctatccctgagccctaagagagtgggtagtgatgggatggaggtggaagacaggtgggctcctttcctcactattctgccatcctgcaggtcctacatcgccaatcgagtgactgacaagctgacacctattcacgaccgcattttctgctgtcgctcaggctcagctgctgatacccaggcagtagctgatgctgtcacctaccagctcggtttccacaggtgcttgtgggcaggggaggggcaagtatctgaagggagttggaagctgaggagctaaatagcctgacttctaggtcttgaaactttctctgtgacttccctgaccctctagcattgaactgaatgagcctccactggtccacacagcagccagcctctttaaggagatgtgttaccgataccgggaagacctgatggcgggaatcatcatcgcaggctgggaccctcaagaaggagggcaggtcagatccccacccgaccagagcacacttgagccaggacttttatcctctccccagccattttctttttctttccagtctctacctcacttattcttactattaacgtgcctcagaccaatagcagaatggacaggtgaatgtacgtgtgttggagggaggatacgactggtgactcctctccttctatctggcaggtgtactcagtgcctatggggggtatgatggtaaggcagtcctttgccattggaggctccgggagctcctacatctatggctatgttgatgctacctaccgggaaggcatgaccaaggaagagtgtctgcaattcactgccaatggtgagagcttaggcttctgggcctatgagcttcaaccccaactacccaagccaggccagcattcctcattccttgcagtgatcccggcatctgaatctgaacccagctttcttcttttatccacagctctcgctttggccatggagcgggatggctccagtggaggagtgatccgcctggcagccattgcagagtcaggggtagagcggcaagtacttttgggagaccagatacccaaattcgccgttgccactttaccacccgcctgaatcctgggattctagtatgcaataagagatgccctgtactgatgcaaaatttaataaagtttgtcacagagaatctttgtactttggggttcttttttttttgacttcaagtccgaatttgtctggccca

SEQ ID NO: 84950 - DNA, 1410 bp, Homo sapiens
actacaaggcacagtacctgccatggagggggcatgtgtggtgttgatggacaggaagaaggatgcatggatgatgcagggtggctgggcaggtggatggatagaggacagaaagggtgatggatggaaggatatgagttggaaaggtggagggctaggagggtaggcaggtagatggatgaatgatagacggtacataaagggatgagtaaatgcttgggaagatggatggatggatgatgaagggtgggtggatagatgtgtggatgggtgagtgggtgagcacacagatgacatttagtctaagtctgtggcaagcagcaaagcagggcatatgtggcagagcctctaggatctccagacaagctggagggacacacgtggaaaaggtttgggagtgtggaaaggggctactctgggagaggcactaggatctgattccccaactcaccaccaggaggagggtgtccgtgtgtctattctgctgtttaaagaagtggaattggccttgggcatcaacagtggctatagcaagagggcgctgatgctgctgcaccccaacataaaggtgactctcggcctcagagaccctcccacatgacagcccttctccccacactgtcccagcccccagcgctcccgctccctgatggtctcatctttccatctttcctctctccctcccagtacctcctgttttccttcacctaaacccaccctcatgaaccctccatgcctgctccaggtgatgcgtcacccagaccaagtgacgttgtgggcccatcatgagaagctcctggtggtggaccaagtggtagcattcctggggggactggaccttgcctatggccgctgggatgacctgcactaccgactgactgaccttggagactcctctgaatcagctgcctcccaggtaatccccctgaggccttcctgagcacccccaaactcagataagctcaatcaacaccatttcccagctccagccttaccccctcagtcattccaggccctgccaacctcagggttcctcagactttctgggactccaagaacccactttgaaagtgctgtaactggccgggagccatggcttatgcctgtaatcccagcactttgggaggccaaggcgggtggatcacctgaggtctggagttcgagaccagcctgaccgacatggtgaaaccctgtctctactaaaaatgcaaaaaattagctgggcatggtggcagttgcctgtcattgaagctactcgggaggctgaggcaggagaatcacttgaacccaggaggcggaggttgcagtgagccgagattgtgccattgtactccaccctgggcaacagagcgagactctgtctcaaaaaaaaaaaaaaaagtgctgtcacccacccagtcctttccccat

SEQ ID NO: 84951 - DNA, 1590 bp, Homo sapiens
ggcccagggggaggacgagcctctttagaggctttgtttgagcccttcgggctgtctccttctggcactgcttggctcagaaaagtaggaacagaaagttctcccttctcagaggccctttctcaccatcacctgctgactccctccgtccaggtccctttggccccaattgcctcaaaccctggcctggaagccctcagtctcagggggactgggaagagggaaggacaaaaggatggtggccctgaaattcctgctccctgctagctttcctcatccctgcttttaagaagtaagataataataatggtcattaacttttattgggcacacgctctgatgccaggaaccatctgaagcatttgatgggcatttcttcacttaaaatgtgagtaccaaccccagaggaaggtactcgggcaccctcattttgcacatgagggtacagacgcagtttctcggtgggtttgaaatcgggaacatgtctttgaaaagccatctgcgctctgacttccatgttctctcacttctttttttttttttttttttgagacggagtctcactctgtcgcccaggctggagtgcagtggcgcaatctcagctcactgcaagctctgcctcccaggttcacgccattctcctgcctcagcctcccaagtagctgggactacaggcgcccgcaaccacgcccagctaattttttgtatttttagtagagacggggtttcaccgtgttagccagcatggtctcgatctcctgacctcgtgatccacctgcctcggcctcccaaagtgctgggattacaggcgtgagccaccgtgcccggccactcacttcttccaacttttcccgtagaacattcactctgaaccaatccaggaaaagggcagccagccaccagggttcctgccacgtgccctcctgatatgctggtcttcactcccatatcttgactggataccactttacccccctctagctctgtaatccttttctaaagtcttgacacagtattcttctgtctcctgcccctaggaccctgctgggatctttgagcttgtggaggtggtcggcaatggaacctacggacaggtgtacaaggtgagacgaatggtgtggaagtatgacctccacatctgcagggcagtcttgggaggagtggaaggaagtagattcctggtctgcaggtctgaagggggctatgggagatgctagagtctagggccctggaaaggtagagtgggggagaggaaagagcacccagaaggaggtactgttgatgcctctctctacctgagtgcagagccagtcccggacatggtgggaacaggccagcagccaggcagggtggcctgcagcagtgagagcaggtggaagggcatacggccttgtgtgtcagaactctcctgggattcagagagagctaaggccagagatgtgggtttggcctctccccagaccacaaagagacccaggactttgaggtagtgggacctaatgggtggccttctgcagaggggatgtggcctctgctcccacagctggcctgctggggccagagctcaggcttttggcttttgagctgcct

SEQ ID NO: 84952 - DNA, 1050 bp, Homo sapiens
taggtctctgagagtgtgggctctgggaaggaaggtccctggacaaggccatccccaccttcatgccctctgtgctcaggcttggatctcaccagagaagagattctggggggcagagggcggtgactggtgttgggatatgaagacaggagggacgtcaaggtggcttgtggatgaatgatccaccctcttcctcctgcacccatcccttctgaggggaccctcccagtgtgagccaccactgtttccaggtctaagaagttcattgacttcattgacacatgtctcatcaagacttacctgagccgcccacccacggagcagctactgaagtttcccttcatccgggaccagcccacggagcggcaggtccgcatccagcttaaggaccacattgaccgatcccggaagaagcggggtgagaaaggtcagtgggcaggctggagggggcaggtactaggggacactccagcctggctcctctctgccagccctgctcgctcctggcaccccttcctgctcccctccttggccccagctctccctgtccaaggagatcgttctcaaacttgcaacccccaaggggttttccctcctttccctcccagtctgaatcagccttccaaaggaggaccggcctttcgcatccttacaaaaactccatgctaagcacatgtgtgtgcgagcacaagcacaggctctgccacacctcagctgccctgggacccagtcccggtcctgtccaggcccacacctgagacccgctgtcctcccattgcccccaggaagtgggtggggcccctcatgcttgcccagccagagagacctggttatccccacccaaggtttccctagcccacggcgggtctggggcgctgggtgagataactgcagtggcctccccctgcagaggagacagaatatgagtacagcggcagcgaggaggaagatgacagccatggagaggaaggagagccaaggtaggcctggcaggtggagtgggggttggggcggtcatcgctgagtggggggactacagtggtgcttggc

SEQ ID NO: 84953 - DNA, 1356 bp, Homo sapiens
ccatcccttgttcaggcatcagtgaccttcttccaccctgccgtccagtctcctccaaaccggacagctcccctgtgctctcccctgggaataaagccaagcccgacgaccaccgctcacggccaggccggcccgcagtgagtcacctggtggcaggcatggcctgcctcatcctggtttggggcttagcctcagggtgctgggtgtcaggggtggggtctccgctgatctaccgagaagggctgtggggatggagggactggtgcttctcatggtgctaacctttcctaacctctctcctaacctctctcctaacctctcttctggctctttcttcccctgcggcccctcccagagctataagcgagcaattggtgaggttagtgagatgggcctgcttgtgggagcccctcctgtcgccctgctggggtgtcccggcaccctttgtctacctccacccaggcccagcttctccctgcccctcacgtggctcctccctgcaggactttgtgttgctgaaagagcggactctggacgaggcccctcggcctcccaagaaggccatggactactcgtcgtccagcgaggaggtggaaagcagtgaggacgacgaggaggaaggcgaaggcgggccagcagaggggagcagagatacccctgggggccggtacggcatcgggagtggggccctcccactccaaggcacagggagggaggggaagtggcagtggggaagaggtggggctttggggcaagtctgagggagagcggctcccttctctagagagtggggtgagggtgcaggttcctgtctctctcccgctgccctgtgtgttgtggggtggcctcttcaagtgcctgtctgcccctgtgccagcctgccctgtgtgccatgcagggaagcacctcacggtggagcaggggctacaccgtgagggtggagcaggttgtgttttgaatagagacaaaagcctgggctctggctgccatctgctgcctttggcacttctgtggccacgggcaggacctggaggggccccaccttcctctctcacagcagcgatggggatacagacagcgtcagcaccatggtggtccacgacgtcgaggagatcaccgggacccagcccccatacgggggcggcaccatggtggtccagcgcgtgagtgagcctctgctccctcccctgtacctgtgtgtgccctcctcagccccacgccaaccctgccctctgtcctgtagacccctgaagaggagcggaacctgctgcatgctgacagcaatgggtacacaaacctgcctgacgtggtccagcccagccactcacccaccgagaacagcaaaggccaaagccc

SEQ ID NO: 84954 - DNA, 1063 bp, Homo sapiens
gcagtcagccactaccactgccctgcgctcccttcagattccgaggacttcccagctggcccccagggggcgagtggtgcaccctctcccctaacatcccagcctgcctttcctccgggtgaggggcactgtgagtctcctcctgcagtctctgtgtctccctcaactcttctgccaccccttcttcccttctttccctctcccagttgagacacccccccaacctcagcccttggtgacttcttctcctgccccacccaggtgttttttgcctcagtccgctctgggggcagcagccaagtttacttcatgactctgaaccgtaactgcatcatgaactggtgacggggccctgggctggggctgtcccacactggacccagctctccccctgcagccaggcttcccgggccgcccctctttcccctccctgggcttttgcttttactggtttgatttcactggagcctgctgggaacgtgacctctgacccctgatgctttcgtgatcacgtgaccatcctcttccccaacatgtcctcttcccaaaactgtgcctgtccccagcttctggggagggacacagcttccccttcccaggaattgagtgggcctagcccctccccccttttctccatttgagaggagagtgcttggggcttgaaccccttaccccactgctgctgactgggcagggccctggacccctttatttgcacgtcaggggagccggctccccccttgaatgtaccagaccctggggggggtcactgggccctagatttttggggggtcaccagccactccaggggcagggaccatttcttcattttctgaaagcactttaatgattccccttcccccaaactccagggaatggaggggggaccccgccagccaaaacattccccccattcccgacccccctctcctcttctagcccatgcccttccccggtggagggagggagcagggagccctcactctccacgccccttgcttgcatctgtatatagtgtgagcagcaagtaacccttctccctccccccccacccctcctcaat

SEQ ID NO: 84955 - DNA, 1077 bp, Homo sapiens
gcaacagcctccttgctggtctcccaacttcccaattccctttcttctctttattctccactggagtggtctttcagaactgcacatttgctcatatccttccactgcttgaaatccaccaatgggccaggcacagtggctcacacctgtaatcctagcagtttgggaggccgaggcgggtggatcacctgaggtcaggggtttgagaccagcctggccaacatggtgaaaacccatctctactaaatatacaaaaaattagccagacgtggtggccggcacctgtaatcccagctactagggaggctgaggcaggagaacagcttgagccccagggggcataggttgcagtgagctgagatcacaccccctcactccagcctgggcgaaagagcgaaattctgtctctaaataaataaataaattcaccaatggctcctcatagatctcaggagaaagtctaaagttcccaacatggcctgcagggtcctgcaaggtctcccctttgcctgcctgtccagccccatctgttcccactctgcccttactcttgatcattctctcctgtgcctgaactttttcttcaacccttatccccttctgcctaacttttacttatttggcaagttccagctcagaattccttcctctggaaagccttttctgacttccgaagaccaggttaaatgtctattacagaaagtcagacaccatgccctgcctgttggtccactgccccttctgtgatgagaatgtggccctgcactgttccccagtaggagctccatgcagccgcctgagcctgcccctatctgcttccagctggtgaccggacaagggatagacacttaagccagatgcagttaatccatagatttgccatttatataatttgcccgctgcaaaggtattggaaaatgtggggaagacgaggtagtatagaaagtgaggtgggagtttgtctggagagaagccatgaaattgaataaggaccccgagcccagaggctgttgatttttttttttctttttgaccctcacccaggctggagcgcggcggcgccatctccgctcactg

SEQ ID NO: 84956 - DNA, 1747 bp, Homo sapiens
agtcggggtggagaaaagggtcatttctggagctctccaaatgcccttggagcaccccacggagctttggtggctgatcaagttcagggatggtttttttggtggattctaagagtgatacgggttttgtggtagttaaaaatgtgctttttggagtgatcaggcttgtggcagacaccaggatggtcgggcttgtggcgatggtcgggattggggtgggctccggggtggtcgggctgggggcgggctctgaggtgggctctggggtggtcgggctgggggcgggctctgaggtgggctccggggtggtcgggctgggggcgggctctgaggtgggctctggggtggtcgggcttggagtgggctccagggtggtcatgtttggggcgggctccgggacgggctctgaggtggtcgggcttggggttggttcagtagtggattttggagttttggagaatgtgatggattccatgtgaagtgtgaaatttggggtccatctaggtgggaatgtggtctgctccttagtggattcttgtgttggatgcaaggaggagggcatttggctgtctagagaagcagtggaccatgagtagaatagaccccagggggttgtatgggctttggtggggaacttgaccacagtccttgtggcacgcaccttatcgccctcagtgtcctcttctgggtagtaatcatataggtctgtgtcaccttcatcaccaagggtggggcacccctttcctgggtatttgtagacgggaaacttgtctgaattgtcacactgcacactggccacgttagaggtcatggccttgacgtccacaccttgcttccatacgtagacattttcagcattgtcctgcagccagcgacgaaaatagaggatctcacagttgcataaccaggggttcccgtggagaaaagcaaaaggcaggaggtgggacccaaaaaagccctttggtattgtatacagcgagttctcttggaggagaagggtgtcgagattctccagcccattcaggagcccagcggggagctcagtcaagttgttgttagccagactgagcttctccagcttgggtgtgggcgtcaggagccctgggggcagggtcttcagctcattgcctttcaggtagagctcttggagttcgccaagaccacgcagggcaccaagaggcagcgaggtcagccggttgaaggagacgtccaggacggtgagagcaggcagtgtctgccctagcaagggcaggctttgcagctgattgtgggatagatccagggtccccagcactggcagcgtcccatcgacctggagcttggtgagctcgcacctatctaggttcagctgagtgaggcgagtgtaaggcatcagggttgccagggagaaggtgtacaggaggttctcactcaggtggaggatggttgtgtctttcggcaggtctggaggcagcgctgtcagattcctcttgtcacagttcacttctaggtggctggccactttggagacctcacagatggggtgggggtgtaaggggcttggcagcaggagcagcaagaggaggagaggcatgaggacctgtgggcaagggagccttgagtggatccccctgcatcccctggaagcatccccccaggccccagcccccttccccctgcagcttcgcttccagaaacagcatccacacctcctgtcctccctactcccatctcccacccttgcctgcagaacttaaaactactagct

SEQ ID NO: 84957 - DNA, 1040 bp, Homo sapiens
tgactgcttctgcagcctaaagagggaggaaataaagagacttagagaggaagtcagaccactgtgggctggaggcagtgcaggtggaaggccagggcttaagtgggtgggcactggaagcttgaggaaaggggaatgctggccagagacctgatctgggtccttggctggggagagtgagaaccttgtccatttctttagaagatgtgtggttcccaggccagccttcaaggagccttaaaacctcttggggcacaagagagtttgggaaggtcaaactgaggagtgcttgccaggctaggggacaggcaggcagcaggtgggagctgtccctttggcagagcctcatcagcagaagaggtggagctcagcatcctggcgcccctgctgctgcctctgtgtacactgtcctgcgccttggtggctattgtgagatgcctgaagcctagaccttgtccttaaggagttcctggtccagaagacaagattatacaggagcagttgggaaactgagtgtagcaatagtgttgcagggtaacttggagcacctggcctcgcctgggagtagtgacttgcagactgagtggttagactggctggggatggggcaaggatagcacacctggctggactgagggcaaaggcttagagtaaaacactgttggggagcaggtgatctataggcttgtgatagttggagcacagactgtgaggtatctcccttgagatgaagctggactgtcagatggggtcagtgcttggcactccctgactgccaagctcaggagttggtcctccacctggggagagattcggtcagactttcaggtttgggagatcttcaggaccatctggagggggatgggggtctccatagtcccattctctgggccccaagccttggattgggctggagacaaggcaggagaggaagccacaccagtgtgtttagagaatggcaggatttatgagaaaagaaatggggttccatttgcctgtgtcccagcctgagagcaggaaacccaagactattcagtcac

SEQ ID NO: 84958 - DNA, 1151 bp, Homo sapiens
ggacgggagaggtggtgagcactctcgcgagatttgaaggagcggcggaggccagagggaggagaggtttgtaaactaggaggctccgggtttccgggcacttttattaggtcgtcttctgggccaccagtgccccttccatctccacaggcagtccctccatcgctaacctttttttaaccggccttttaggaccggaagtccttcatctcaagcatccaatgctgaaagcggcctgattttctctaccggaagcccttttccagaggctgggaacacggcccacctagcaggaagtcccacctccttgagctccgccacccttcccgaagtttttctgtcacctgtgttaggctccgtcccctttccgcgttttatccccgtaccagaaaaggatacatttagtgcctcccacccagctccactaaacgggttggatatctcattctttgagttggtgttccttccccggcgcccccatgtagctgggaagtgggacctgggggtggttggacccctgggatcctaaaggaggggcagggagggcgcagaactccgcttctgctccttgctaccaggacgcgcggcctcctcagcctctttcctcccgctgccatgcaccctgcagccttcccgcttcctgtggttgtggccgctgtgctgtggggagcggccccgacccgggggctcattcgagcggtgagtctgagggacggatggggaaagggcgctgaaaggaagggttgcaggctgaaggggaacatcgccttttttgtccgcagacctcggaccacaatgccagcatggactttgcagaccttccagctctgtttggggctaccttgagccaggagggcctccaggtgattttctttcttttcttttcctccttccctcccttccttccttttctgtcttttttctttttttagtatttcgcaagatcctccatcctaggctggggttggggaggtttgtcctgggtgaaactggaggtaggaaaatgaagttaggaactgagcacgtctagtgtagaacccagaatctagagggagaagacagagtgtccacccctggaactccgaggttatcagggagactgaaagtggacgaagacagaaggcaggatcaacggtccttatcaggaaggt

SEQ ID NO: 84959 - DNA, 1016 bp, Homo sapiens
cgtgcaccatcacgcccagctaatttttgccattttagtagagatagggtttctccatgttggccaggctggtcttgaactgggattacagatgtgagccaccgcgcccggcctcttcaattttctaattacccatctcacaaacaactcgactgctactaaggcccaactgagttcttgctatgtggcagtctttgggatgaaatactaccaaaattgcgtatctactttgatcttcacaataaccctaggaaaacttctaatatcccattttacagtaaaacaaactaaggctcagagagattaacttgcccaaagtcatataagcaataactagcacctgagaccttcctgataaggaccgttgatcctgccttctgtcttcgtccactttcagtctccctgataacctcggagttccaggggtggacactctgtcttctccctctagattctgggttctacactagacgtgctcagttcctaacttcattttcctacctccagtttcacccaggacaaacctccccaaccccagcctaggatggaggatcttgcgaaatactaaaaaaagaaaaaagacagaaaaggaaggaagggagggaaggaggaaaagaaaagaaagaaaatcacctggaggccctcctggctcaaggtagccccaaacagagctggaaggtctgcaaagtccatgctggcattgtggtccgaggtctgcggacaaaaaaggcgatgttccccttcagcctgcaacccttcctttcagcgccctttccccatccgtccctcagactcaccgctcgaatgagcccccgggtcggggccgctccccacagcacagcggccacaaccacaggaagcgggaaggctgcagggtgcatggcagcgggaggaaagaggctgaggaggccgcgcgtcctggtagcaaggagcagaagcggagttctgcgccctccctgcccctcctttaggatcccaggggtccaaccacccccaggtcccacttcccagctaca

SEQ ID NO: 84960 - DNA, 1048 bp, Homo sapiens
ggtggaggttgcagtgagccgagatcgcgccactgcactccagcctgggtgacaaaacgagactccatctcaaaaaaaagaaaaacaaaaagaaaactgaagggaggggagtgtgtctgtatgagtatgtgctggagaggggactgtgaaacagaacttgagagaaagtgacatgggtggtttgagaattgaattacaattggaatattagaaggcaaaaataattgcattagcttgcagtatagggtacagattagcccatctgggacagcgagagggatgatgggagagtttggtgaagggatgttttatgtcattgccttttcaagaggctaagagaaggttgtgatggtgggatgctcactcagaccccaggaaggaggaggaagtgaggatagaggatgtgcagcatgtgggctggtgtgtttggtggcccctgtagagagcagaatctagaaaggagaaatctcactgttgtttgcttccatccttcaggggttccttgtggaggctcacccagacaatgcctgcagccccattgccccaccacccccagccccggtcaatgggtcagtctttattgcgctgcttcgaagattcgactgcaactttgacctcaaggttgctgaatgaggaaggggagctgggcagctgagggtaaaaaaaaggcaccaggaatgaagacaggtaaggcccatgatggctccttgtcctctgccttgtctccctaggtcctaaatgcccagaaggctggatatggtgccgctgtagtacacaatgtgaattccaatgaacttctgaacatggtgtggaatagtggtaaggctgggggaatctatacagctgggctttcagtaggacccagagatggtgggaaggctgaaggcctcaggaaaagaagccaatcctttaggtggggtggggccaaagtgcaagatgccagggttcccagaggatttgagtagaaggttgtgagtccccagagtaacaccttgatccctgcagaggaaatccagcagcagatctggatcccgtctgtatttattgg

SEQ ID NO: 84961 - DNA, 1050 bp, Homo sapiens
catgtgcctccttcccattcttccttcagcaagcagttccatgccaacctggagcccaggcctcctcattacccgaaccattcagcctcctgtccttccttccctgcctctttgactttcttcccattcctgtccccacctatgggctttgtccagagccagttactttgtccctctttttttctccctttgcctttctcgccctgctgagactggtcatccttttcccagggctcgggtgcttctggttccagacaataccttccccttgggctattacctcatccctttcacagggattgtgggactgctggttttggccatgggagcagtaatggtgagtagctgagggaacatgatgggaagcactgaggcctgtgaggccagactggatctggagttgggagatgggagtggcttgtcctagattgtctagttttgttcctaagccttgtccatccacccccgcttcccccagatagctcgttgtatccagcaccggaaacggctccagcggaatcgacttaccaaagagcaactgaaacagattcctacacatgactatcagaagggtgagggggttaggggagaagagggcttttcccacagtttacctggttctgaaggactttgagcccagaagatagggtatacaaagatggcagtggccgggcacagtggctcacgtaatcccaagtgcctctaatcccagtactttgggaggccaaggtgggcaggtcacttgagcccaggagtttgagaccagcctgggtgacatgataaaacagaaaagtcccagcactttaggaggctgaggcaagtggatcccttgaccccgggagttcaggccagcctgggcaatgtggtgagaccccatctctataaaaaaataaaattagctgggcatggtggtgtgcacttgtagtcccagctaattgggagactgagacaggagaatcacttgaaccaggaaggcggaggttgtcgggggctgagattgcaccactgtgctccagcctgggcgacagagggagtccctttctcaaaaaa

SEQ ID NO: 84962 - DNA, 1754 bp, Homo sapiens
gcataaatacaacgaagacgggagaggagatggaaagcaaagatgattaagtgaaataattgtgggaaacaatagagggatagactttgcttataggggatgtggacagagcagaaaaatgggaggaatggggaggattcagttagagaaggaagaaaccggtaccaaggggctggggctttaggccctggggcctccagtgcccgtataaggctgtggcagaagccctgcccatttccgttccttccactccctatctccaccctcacacctccccaaaaacccacttcccttcttacctctgcttctctttgcttgtcccttctagccctaaattcttccatgttctgccctgaccttatcctgcctacctgtcttatctcttccactggctttgtaggtgaggggaaatttttgcaaggctttaaaagccttagccctgggtcattgtggctcagtgaaggactagattattttctttctgtcccaggagaccagtatgatgtctgtgccatttgcctggatgaatatgaggatggggacaagctgcgggtactcccctgtgctcatggtgaggccctcactgcctgcccatgcccctctgccaccagcagccaccaggtgcttcaccttgttcctctctgcagcctaccacagccgctgcgtggacccctggctcactcagacccggaagacctgccccatttgcaagcagcctgttcatcggggtcctggggacgaagaccaagaggaagaaactcaagggcaagaggagggtgatgaaggggagccaagggaccaccctgcctcagaaaggaccccacttttgggttctagccccactcttcccacctcctttggttccttagccccagctccccttgtttttcctgggccttcaacagatcccccactgtcccctccctcttcccctgttatcctggtctaataaccccccacacatacacctctggtgacctatttgcacagaccgtcgtcttccctccagtcttctgagggataggggacattccatcccaagcttctcccttacccacacctatccttttgaggggctttggggtggagctggggcaagcagagggactgggtcttcacttcttgggctaataaaattgtttctttgtggactaaggaagggtaagatcattctcacacaggtgaacttaaccctttggtggaatcacccctttagccataaggagcaagggaatgctgagagacactaacctatagtcatggggacagccccagccggcatttgctatgactcagaagggggagccccacccacaaggatgactcaactagccctgccttgcctgcaggcctgcacccattctctggtccagatggctctattccatcatccaccaatttgaccagcacactgaggacttaggcctggaaatgccactgtggaggggcagggccacctggccagaagctcaaattcctgcaccttgtagtacctcaacctccctgctcccaagccacgataaaggaggcaagtcacagtgcctatcccccattctgacacccaagctcaaatcacacagcaccttgttagtagaatcttttttattcagaaaaaaaaaaccccaaaaaacaaaagttttccaaccacacacgggagggatatgggtagggggaggtgtctgtccatccagccctggcccccagcccatgtggttttggcagcaataaggggtatggggtaatggcccaaaaaa

SEQ ID NO: 84963 - DNA, 5387 bp, Homo sapiens
tgtgggattcggcgtggacgccagggatgcgcgccgcgctcgggaggagagagaaaaccaaccccctttccgcccgggccgcgctcggtgaccccttgcccctagcccaggctccggaagccgcccagccctcggcggcgggtcggaggaggcggtttcaccgcggccgccgcacggccgtcccgcccgtcccgccctccccaggtggctgtgagcgcacatctgactgcgaagaaacccaaagggcccgaagtgggactttccccttcttgaaaaagttgccactcttgcaacttgagtattcttccgcctcgaaaaatagccccgcctgttaagccccgcgggtgtccgcgctctgtgacctctgcagacacaggccaaggggcacggccggtgatccagacattgcctgcctggggcgggcggggctgggatgtggggtgaggccctgggctagagccgatccagagaagggacaatcctctagactgagaatgggccctggtgaacccaacctgcacgacccgagaagacgctggggacagaagtggccccggtgggtgccttcagctatgagagcgactagaggatttggccaaactcttctttgctttcttattacttgaataagtaaaatcaagggtggtgaggcggcagcgcgcacggcttcgcccccgccccttccgccaggcgggagacacgtccccagcccgccttcctttcccgcagggtccacacgggtcgggccgggcgcgctcccgtgcagccggctccggccccgaccgccccatgcactcccggccccggcgcaggcgcaggcgcgggcacacgcgccgccgcccgccggtccttcccttcggcggaggtgggggaaggaggagtcatcccgtttaaccctgggctccccgaactctccttaatttgctaaatttgcagcttgctaattcctcctgctttctccttccttccttcttctggctcactccctgccccgataccaaagtctggtttatattcagtgcaaattggagcaaaccctacccttcacctctctcccgccaccccccatccttctgcattgctttccatcgaactctgcaaattttgcaatagggggagggatttttaaaattgcatttgcaaagttcggtgtctgggctggcgagtgggggagggagggaatggggagtaggccccgcccctaccgtcctttgcaaataaaaatctagcggggcggggggggggaggagcaggaagtggcggtgcgagggctgctgcacagcgagcggagccgcggtccggacggcagcgcgtgccccgagctctccgcctccccccgcccgccagccgaggcagctcgagcccagtccgcggccccagcagcagcgccgagagcagccccagtagcagcgccatggccgggtggaacgcctacatcgacaacctcatggcggacgggacctgtcaggacgcggccatcgtgggctacaaggactcgccctccgtctgggccgccgtccccgggaaaacgttcgtcaacatcacggtactgcgaggcctgcgcggtccggggcactgctccggtttggaccctgagggagggacttgggtgggggcgggcgcggtctagggcgcgcagcgagaggccctgactgggtgcttgccctggaagcggcgcgaatggcggctgcacgtgagtgggtccctcagttgcccgtaggtcctatgccccaggcggcggcgcccatcccgcccgctaccccgctttccgcgacggggcgttacatccggggcacagggcggggaggggcgcggcgcccggtgcggcggcccacttccgcctctcccagggcggggcggggacgcgcctcagtttttactggggattgggattgagaggggacccggggatccttggacccccagctccccgtccggctgccagcccgcgtccctctaccattgtttctcctggtgcggaagggagccccaggcgcgtggtcttggtcccttgcccaccctctgtgggcttctggcccctcctaactccgttagagagggcgaggccaccacacgcccccccagctcagcacgttggattcaacattcctgcgaggccaatcccggaagtcccctcgccctcccttcccgccatccggcggggcctggagcaggggaactttgtgagaagttctgagacagcataagcgaaagtatattggtttactaccgctgctcccaccaccatctccctgtccacactgcccggaagtggggagggggagcggaagttcaaaaggggggggaagggggtttccgggcgggaggggaccggatgtgggggcttggggtgaaagggggaggggggaaaggttcccggggtacctagacccgagagctggcctgccgggtctggcccctgtccaccttcaaaagttttccaactttcccggaaagcccccaggggtctgcttcctcatctcagagcagagatacctggagctaaactctaggttacttggagacccaggcgtccgggccctaacagctcctgcagaacctttgaccaaataagggcaaagttgcttctcttgcctcgcccgcccccctcccttcccctctccgcttctgcttttcctgaaggagagttctgagcatccaaaggctcctcacttacctcactgactccctttatttcctgggtttactttccccattaacactgacatctaaatctctagaggagtatgtcatcccttcctccctggttccatattctaagtttcagaatcatgatctttttctgcactaacgtcccacagtcctcagagtttctcacagttcattgatgtgtactgagtatataatttatacttagcccccacggcggggtggttctcagaagtggaagacaggtgggtctttggagaacacggtgggaatcttggtgcactgactaacttgatgggcgcttggttcctcttccagccagctgaggtgggtgtcctggttggcaaagaccggtcaagtttttacgtgaatgggctgacacttgggggccagaaatgttcggtgatccgggactcactgctgcaggatggggaatttagcatggatcttcgtaccaagagcaccggtggggcccccaccttcaatgtcactgtcaccaagactgacaagagtgagttcctgagtcttacccttcctttagctccaagatctctaatgtaccgccttctggtaatcttgagggtgcttttttgtgtgattccccaacatgaagggagtcagaccagtattgtgttccttgtctgctggatgctggaacacgggatagtccctccattctgtctcagttcctcatcttgtaattcgaagttgctgaactgcattacctcttaaattacttactgccttgagctcggattagaaactgttttctaggagtataggtagattgttggggtcttgaatcatcgagttcatcgtttgagttcttttgttagaacctggaggtggcatgcacatccacagccctttctagcctgaacacatgaatcaacagtctatgagcctttgacccctaagtttttagtctgttcctctccagcgtttaagcttgattttcctcttttgaaaagccttattgtttcagggtgactgacagcctgcctgtgtgtggtgggggggcgggttgggagagatgaggttgggttacagcccccagggctggacagctgctgaacagctggcagggggtggaattgtgacacctggatcctagcctcctttctctttcctcctcctccagcgctagtcctgctgatgggcaaagaaggtgtccacggtggtttgatcaacaagaaatgttatgaaatggcctcccaccttcggcgttcccagtactgacctcgtctgtcccttccccttcaccgctccccacagctttgcacccctttcctccccatacacacacaaaccattttattttttgggccattaccccataccccttattgctgccaaaaccacatgggctgggggccagggctggatggacagacacctccccctacccatatccctcccgtgtgtggttggaaaacttttgttttttggggttttttttttctgaataaaaaagattctactaacaaggtgctgtgtgatttgagcttgggtgtcagaatgggggataggcactgtgacttgcctcctttatcgtggcttgggagcagggaggttgaggtactacaaggtgcaggaatttgagcttctggccaggtggccctgcccctccacagtggcatttccaggcctaagtcctcagtgtgctggtcaaattggtggatgatggaatagagccatctggaccagagaatgggtgcaggcctgcaggcaaggcagggctagttgagtcatccttgtgggtggggctcccccttctgagtcatagcaaatgccggctggggctgtccccatgactataggttagtgtctctcagcattcccttgctccttatggctaaaggggtgattccaccaaagggttaagttcacctgtgtgagaatgatcttacccttccttagtccacaaagaaacaattttattagcccaagaagtgaagacccagtccctctgcttgccccagctccaccccaaagcccctcaaaaggataggtgtgggtaagggagaagcttgggatggaatgtcccctatccctcagaagactggagggaagacgacggtctgtgcaaataggtcaccagaggtgtatgtgtggggggttattagaccaggataacaggggaagagggaggggacagtgggggatctgttgaaggcccaggaaaaacaaggggagctggggctaaggaaccaaaggaggtgggaagagtggggctagaacccaaaagtggggtcctttctgaggcagggtggtcccttggctccccttcatcaccctcctcttgcccttgagtttcttcctcttggtcttcgtccccaggaccccgatgaacaggctgcttgcaaatggggcaggtcttccgggtctgagtgagccaggggtccacgcagcggctgtggtaggctgcagagaggaacaaggtgaagcacctggtggctgctggtggcagaggggcatgggcaggcagtgagggcctcaccatgagcacaggggagtacccgcagcttgtccccatcctcatattcatccaggcaaatggcacagacatcatactggtctcctgggacagaaagaaaataatctagtccttcactgagccacaatgacccagggctaaggcttttaaagccttgcaaaaatttcccctcacctacaaagccagtggaagagataagacaggtaggcaggataaggtc

SEQ ID NO: 84964 - DNA, 1018 bp, Homo sapiens
ccaggtatctgggactacaggcgagcgccaccatgcccggctccattggcaactctgcagcttcattttaccatatagcatctgcttcccctacctcctttggaaatgtgaacacctctgttgttctagaaccacccagcttcctctgtgagtccctcacctcctctttgtcctagcaggttacatatctatttgcctcccctccccgcccccatctcgccacctcctgttttccccagctcagcccagaaaccagcatcccctagctcccacaaagaagcacacagctgtcttggttggcaccagtgtttatttcaggaagcaggtctggaagacctgggtctgtccagtggagtcctggagcctccagcttctcacttggccttcgggttacggaacttgcgtccagcaaagattgccttgtccccaagagcctcctcgatcctagaatgcaggcaaggttagggctgctgaacttccaacctaacagcctccagcaccccaatgcccaggcccactgttcccgctgtacctcatgagttggttgtatttggccagacgctccgagcggcagggggcgccagtcttgatctgatgagggaagaagaatttggagggttaggtgaggctggaaaggaggggttggacctggccccaagggagcattaacctcaaaggcaggaggccagggaccccaagaaaacttggtgagacactcagtagagagaagctacaagtacctgtcctgtgcagagccccaccacaaggtcagcaatgaatgtgtcctcagtctccccagagcggtggctcaccatcaccccccagccattagactgagccagtttgcacctgagtggagaggacatttgatgtggccttctagaacctcctcagtgggaaagcaggggttgggtggggcctctcccttctgttttgggtagcaagcactctgcagggagggcagtgactaagttctttgggaagtaggagaggaaaagacttatcttgatttcgggct

SEQ ID NO: 84965 - DNA, 1369 bp, Homo sapiens
ccaccaccacacccggctaatttttgtatttttagtagagatggggtttcaccatgttgaccaggctggtctcgaactcctgaccccaggagatctgtctgcctcggcctcccaaagtgctgggatataggcgtgagccaccatgcctggtctattattcttaatctcttactgtgcctaatttataaattaaactttatcataggcatgtatgtatagaaaaagacatagtatgtataggggtcagtactatccacaatttcaggcatccactgagggtcttggaatgaacccctgtggataagggggactattagatagaataaacatcaataaatgcttgatgaataaacgctaatcctaccttcccagcctgacacctcccagtggacaccacacttcacttgaagccttagaaacctttcccacccatgcttccagccctggcttcatgttgccatttctcacccccagaacaggccgcccgcctgaagaaactacaagagcaagagaaacaacagaaagtggagtttcgtaaaagggtgagaacaactggagtgatcaaaggcagactcaggaaggacttccaataagttaaaattggaaggttgaggactcagttttgctgaaaatgtcttgagagaggtgacgcatggaagccagtggcttggaggctggggagggtgctggggaggcgtagaagggcccaggctcagctagggagaggggtacttgggtggagccattgtctcatatctgcttcctttcccctctcccaagatggagaaggaggtgtcagatttcattcaagacagtgggcagatcaagaaaaagtttcagccaatgaacaagatcgagaggagcatactgtgagtgtccctgggctgggggaggaaggaaatgggtggctagcggggcatgaaagggccagcggggggctcctccagaggagggcactaggcccgctcctggctcaagatgctctttcccctctgccatcccatcccagacatgatgtggtggaagtggctggcctgacatccttctcctttggggaagatgatgactgtcgctatgtcatgatcttcaaaaaggtaaagggcctgaattcctcattctctcctctcccctttgtagccttatcccccctccccgaccaaggaatgaaatgaaacatttgtatggactctgaccccatcattctgctcttcttcaggagtttgcaccctcagatgaagagctagactcttaccgtcgtggagaggaatgggacccccagaaggctgaggagaagcggaagctgaaggtgagctatgctttgcagcccttggggtccagaagcccaccacctgggaggggtgggggtttg

SEQ ID NO: 84966 - DNA, 1064 bp, Homo sapiens
tccatcttttgtttctttcaccagaggctcctttctcaccaagaagcaggaccaggcagcccggaagatcatgagattcctgcggcgctgccgacacaggtactcatcccttctccccctgggcttttgcgttgccacccgtcgtgatccgccagtctcctctgactcctatctttctctctgcaggatgagggaactgaagcagaaccaggagctggaagggcttccccagccgggactggccacatgacctggccaccgcctttctcaccaccctgggggcgcctcgtgcagtcttaacagggagagggctttctggggcagggggagcccctgtcggcagctttcctgttcacctttgttggagccctctgtaggcctcctccctcctccccacgccttgctcccacacccctctcctcgtccctcctggtcgtgccccgtctcttttggtcctggctccagaaaacccgcgccccacatacctgcatcttccgctgtgacctccggagccctgcctgcccctgctccccagctcctcctgcctgcacccgactcggccccctcctgacttgccttatttatttgttcgacgcgtctctgaatgtatccgcctcggttcccaccactgccttcgctgcgcacgcccctcgtgtttcagggctgaccgtgtccccacccgactccgcatgtttgcgtctgtttcctccctctctggccctgtcttaccccatcacccgactctggccactgacctcagggccgaaggggaggtggtgtacataggaacgcgttgcggagtccgccccgtcccccgaggggaggggtcttgtacatactgtaacatacagagtatagtgaagaatctatttaaggcgccgcggggagggctgcacggccgggcttgtggttctctagcgcggcgggggcctcctgccggctccacgggcactttctacttgtgcatgggcttggtttatacgaattgccattaaacatcgctgcaccagccagcctccggcctctgtctgcgggggcggggcggggcctaggccagctggagg

SEQ ID NO: 84967 - DNA, 1046 bp, Homo sapiens
ggcatcgcatgccttcggcccccccaggaaccctaggcagggaatggcagtgaggcatgatgatcaagaggatgagtaagggggaatggcgtggatgcagtgggtgggcacagagggctggggctgggccctacttgttgcgggcaggcagggtggccgaagtccggtggggagggccgggcctgcggcggtaggagcggtagtgctgctggatgagcacagccgctcggcggctctgctgaaatcgcttctgttcatagtagcttcggaacttgctctggatcaggatggccgcctgggtcatcttcttatagagtgcaaactgcaggggtggggaggagggacaggggctgaaatagagggacggagacccaaagccctgaggctcacccaagttaggctgatgcaagactctctgtaacccacacactcaaggaaagactgaatcatcacagacctcacactcagagctcatgcctaataccttaagtgcaatccaggtcagcttgtggagagagaaggggagttagggctctggcaacattctggaatggttaggcgtgggtgtgggttggtgggttgctggttacacttttgagggagaagggtctcacctgcttgtacttccggtaacagcgctggattacagctgctgctacctcctgctgctccttcagccgccggccctgaagggagagaagtctcaccacctcatgacccacataatggcatatctgacttgtcccttcaactttcctggggttcccctgaccctttaccccatccaaggcctgtctgcacgactactcatcctccaaaagccctgggagcccagtctcccctgactggagattgtgtaattcatcctgagacccctgcccctgaccttgtactttcggaaggccgtctggatgactcgggcagcctcatacagttcccgctgctcgtgatctgatagtgtcagcagggcaaaatcactttccatcttgccactggtggatgcagagagaaactctgcccaggagggtgctgaagggacagccagg

SEQ ID NO: 84968 - DNA, 1099 bp, Homo sapiens
gacttatattttggggaactttcatatcctgacttacaacactttgacttcttgacctccttaagctagtgtccttgactgcctcttcccaccggccctgtacagcttgcctcctagtgcctttacttctgatgttcctgctttgcccactttttccctcattgggctctgctgtctctctcccaaaccctccaggagtgtggagactggaagcttggacttagagcaggaggttgacccgctcaacgtggatcatttctcttgcacccctctggtgaggatgacggattcctgagcgcatatggggcagggagcaatgggaacagcccttgaaaaggaagatcctgaggaatgcagggagtggggtgggctggggcctgaagacctgactacctggaggaagagcccctggcctcacctccacctccgtctccgcctgtcccgcccccttcctcagatgtgggcttgtgccctgggacacctggaagctgctgtgctccttttccgttggaaccgacaggcactgagcattcccgactctctgggccgtctgccattgtctgtggctcattcccggggtcatgtgcgccttgcccgctgccttgaggaactacagagacaggagccttcggtggagcccccatttgccctatcgccaccctcctccagcccagacactggtgagggtggccctaatcttttggagagagggatgtaggtaggaggataggccaggacaaagccaaagggtgtgggaaacgagtaagagaggagacaaaccacagaggcagggatgggagataacagaagcaagaacagacggggaccgagaacaggatggggaaggcaggagacttgagcgagggatggccgtggctccggctgccctcactctcttccctccccacacaggtctgagcagcgtctcctcgccctcggagctgtcggatggcaccttttccgtcacgtcagcctattctagtgccccagatggcagtcccccccctgcacctctgccagcctctgagatgactatggaggacatggccccaggccagctttcctctggtgtcccagaagcccccctactcctcatgga

SEQ ID NO: 84969 - DNA, 2117 bp, Homo sapiens
aggctggagtgcaatggcacaatcttggctcactgcaacctccgcctcccgggttcaaacgattctcctgcctcagcctcctgagtagctgggattacaggtgaccgccaccacgcccggctaatttttgtatttttagtagagatggggtttcaccatgttggccaggatggtctcaaacttctgacctcaggtgattgcctgcctcggcctcccaaagtgctgggattacaggtgtgagccaccgtgcccagccgccaatctctttttttatgtagagtgaagctgctttcctgtttccagagtcctcagcaacttaaccttttttctgttcctctcccttccatgtgttagcatggtttctggagtctcctaggacctcattcccttcctgactgttttcaggggtagggaattggggctgtgcagcctggagaagaaaagaaacatcagggatgtgattgcagactttgagtagctgaaagactgtcttcagcagtggagaagttctgttttatgctgcctttgagaggaaaaggaggaagtacagtgggggtgaattagcccaagaacagaacttccttctggtgacagctctgtggtagctttgggggaggccctgaattcccagctactggcagattcaggtagagaccaggcaaccacttggcaggaatgttggggagagatagactcactgacctcaccccactgggtcctgtctatccctggacccccagactctagcacaggacctgccatatagtagataccctgtaagggtctgaataaatgaatgagtgaggggatgaacgcccaactccagtcacatggtctctgacttctgtctgcagggtggggtcaaggtgctcatcacaggtccttggaccgaagccgccgagcattactcctgtgtctttgatcacatcgcagtgccagcctcacttgtccagcctggtgtcttacgctgctactgtcccggtatgaggattgggaaccgtagggggagggactgacatgtgggcagttaggacagatcaggacctccaggcttccagaaagcactgggaacaaatgggttgttttgagagcacaaggacttcatccagtcctgaggttgagccccaagctctcccagcaggcagaagagcccagacttaggtgtcagaagatcgaggttctggtccaagaagtctactccttagctaaccagtgacctcagatgagtctgatccttcctgaggtccttggcctcctctcctgtaaggttaggcattgaccaaagggatttctaatgtctgtccaggctttctggcttagagccagagtctccaactccaatccagggggaatgagaaagaagaaatgtgggtttcctctaaccagtcttgggactgaaggacattggcttttagaactgtgctgtccagtatggtagccattagccacatgtgcctattaattaaagttaaagaatacttaaaattcacttccccagtctcactgaccatgtttcaagtgttcagtagccacacatggctcgtgttaccctattggatagtgacgatatagaacattcttgtcactgcagaaatgttctattggacagcactggtctagacttcattgccaaggttcatctctgcccttttgccaccagctttgcccttaccctacactcaaaaatcagccttactaggggacctcaaggaccaccaaagtgacaggttggcagctttgctgtctacgagtgtgttctcccccagtctctacagcagcatccagcatgtgtgtaaggaaaggggatgagaccagagaatctggggactgggagaaaaagtctcagcacctggtcttaggatcagggcctgctggttccatgcttatggccactggacactgttcatgagcggctagctcccctttcctccatctcagtaacagggtcataacttccagactctgatccggggatcaagaggattttccaacatcaaattgttcataactagtctcttgaccctcagtttccaaaccttcttgctgaataacaaatatcttcaactacagggtctagaatccaagggatctctggcccatagtacgtattaagttct

SEQ ID NO: 84970 - DNA, 1046 bp, Homo sapiens
atcttcccgagcctgccctcctccacccttagctgggctctagcccgacctgggcttggtggcattgtccacctcagtcccctcccagttactcttcccttctcactcactttgggtcggctgacattgctttggccactctccacttcccatttccctccgtgactcaactatccaggccgtaggccatgcctcccttccagaacactgatgcccaggcccctcactgctcttgtgtttccctcagggatcccagcaatgatgctctcagcacaggtttctcttccccaaatcattgcccctcatctcagatgcattcttgctctgccctctggtttctagatagtcccgtatctcaaatctggtcctcactataaggccccagccccactgctcatctatgactcagggtggctgggattcaaaaggggtggggaataggtgggggcgagggtgggggaagggttgaagaggaactggtggaaagattgggattcctgcaaagggactgaacagaggaagagttggggagcagactagccctccccccaccccagcctgtctcctggcagtgtctctatggctgctacgttcactcttccatcgtccccacattccatcggcgctgctactggctgctccaggtaaggacggaagagcccagggagccaccctcttcctgactctttgagggacacgggtctgaaagaaggaagtgaaaggatggctgagttctgagtgaggaaaggagcctgggaagaagagaaaggggcttggggatggagagagtcagaaattgggggcgaggttaggagggtgcccaggaagaaagtgaggattaggaagccaagcccctggacctcaggaccccatggctctgtgtgtccccttatactctcagaaccctgacatcgtccttgtgcactacctgaacgtcccagccctggaggactgtggaaagggctgcagccccatcttttgttccatcagcagcgaccgtcgagagtggctgaagtggtcccgggaggagttgttgggacagctga

SEQ ID NO: 84971 - DNA, 1030 bp, Homo sapiens
ggctcactgcaacccccgcctcctggattcaagtgattcccctgcctcagcctcccaagtagctgggattacaggcatgtgcctccacgcccggctaatttttgtttgttttttttttgagatggagtctcgctctgtcgcccaggctggagtgcagtggcgcgatctcggctcactgcaagctctgcctcccaggtttacgccattctcctgcctcagcctccggagtagctgggactacaggcacgccaccacacctggctaatttttgtatttttagtagagatggggtttcactatgttggccaggctggtctcgaactctagacctagtgatccgcccatctcggcctcctacagtgctaggattacaggcatgagccaccacgcccggctggaacctttgttattaaccaccactgatactggctctttctggaggaggcacagtccttgtgttacacattttctgtattctgcatacttactgccttgtatgtagttggttgttgatatttatcaatttgatgtcagaagaggactgtcagtaaaacgatgcgtgtatgtgtgtatgtgtgattgttgtaagtgctatagagcgtttaggaaggtccagtgtggtcagcagggcttcatggagcatctgaaaaggggtttggtttatagaatggctatgatttccagatatggagaggtgtgcacatggtacctgccttgtagggcactaacatgcaggaggtaactattcaaagcatgttcaggaaggaatcaatggatccatctggcaggaattgtaggagcaatatgggtaaatagtgggaacagtgaaagtttgatcccttgttgggaagaaccttggagtcaggctaaagaatctgaaactcctgccaggcacagtggctcacgcctgtaatcccagcactttgggaggctgaggcgggtggatcacgaggtcgggagatcaagaccatcctagctaacacagtgaaaccccgtctctactaaaaatacaaaaaattagccgggcgtg

SEQ ID NO: 84972 - DNA, 1702 bp, Homo sapiens
ctttagctgccctctgaggaaggaaggactagggtcggaggattatggaacagagacctggctctgaggccattggtgatgggagatagaggttgactgcaagctggacaaccctctggggtgggagggtcttcgcccctatcagaggcaacgagcctcagtgagtagagcagggctttggcatcagtgagccttgggttcgagcgccagttttacgacttactactgttttacttggtttcataataatttgtgagtatagttctcctgcaggcttgtgtaccaccagcagagtgttaactgtagaaacgccaattgggataacggagttaaccataattgtccctggctgtccagcatagcaacctggcacacgggcttgggagtcagaactcctggggtttgcaccctggctggctgaacggtagcctgtgatcttgggcaagtggggacctctctgaggttgttttcccatctgtgaaatgggaataacccctccctcaaggctgtagcaagggttaaatggggtcacttgggactgggcctggcctgtggctggacactttaggtgtgccctgaacaggagcttctctgtatttccctgtgtccccctccagctctgtgaggacctcttctctcgcgttagtgagaaccagagtgctcagctatcctactctgtggaggtaagcccgggtcttggtggcagggctgagaggggtccagactgctgagggctgtcgctggaatcagacagcctgggatctaatcctggctctgctggttactgactgtgactttggggcagtgattctgtccttcagcttcgtatgttcatctgggagacgctgttgatcggacacacctcctggcttgttgggcaggtcgctgagctagcatctgcagaatgcttcgcactgtgtattagctgcagtcacctggatcgtgtccagtggagtcagattaagttgcgttgtcattgtttttgctagttttgttacttctcatttgcttctcccactcaggtgagctatatggagatctactgtgagcgggtacgagacctcttgaaccccaagagtcggggttctctgcgggtccgggagcaccccatcctgggcccgtacgtgcaggacctgtccaaattggctgtgacctcctacgcagacattgctgacctcatggactgtggaaataaagcacggtgaggcaggctgatggagcagagggcaagggggccagggttgggaaggtgagaggcaggatccagtgactgctttctttaccctaaggactgtggctgccaccaacatgaatgagaccagcagccgttcccatgccgtctttaccatcgtcttcacacagcgctgccatgaccagctcacggggctggactcggagaaggtgggatcgcccccccccccactcccccaccggatgcaacctcccctggcaacagggacagtgacatggtagaagggtcttgggccctccctgcccatgctgggttgagtgcctcctcaggactaccatgaccgcgccccacccctaccctgtttttccgtcagatcagtctgtccccctctactgtttgcttgtcttttttttttttttttaagacagagtcttgctctgttacccaggttggagtacagtggtgcagtggtgcgatgtcagctcactgtaacctccacctcccgggttc

SEQ ID NO: 84973 - DNA, 1031 bp, Homo sapiens
gagctgggagggactaattctctaggagaggatgaggatccagaaggacctgtcaggctcctggaagtaatgaaatgactgttacaggaaaaaatggcaatatatgcttacaggtcaaacagtaaattgttaagaggctaggctactgggtgactttcttgacagaagttcttgcaaaacgtcagagttgaagtggaccatagcctaacagatctcagtggagtgctttctggtatgtcatgctcagcctcactgatggaaatagtgtccaaatcagaggatgtgtaatccatgttgacggtcaggaatggaccctgcattcagtcttgagatcatcccattgaggatagttagggtgctgaagggcacagtgtggggagtatgagtgttcttggaaagagaaggataaggtagctagtgatgtttgccttccaacatttgagggattttcttgcagaagagaaagcagtaaggactttttatcccagagggcagaactagaaacactagcacacatgacgtgggaccagtttcagctcagcacagctaagaattctttttttttttttttgagatggagtcttgctctgtcgctaggctggagtgcagtggctccatcttggctcactgcaacctccgccttctgggttcaagagattctcctgcctcagcctcccgaataactgggattacaggcgcccaccaccacacctggctaatttttgtatttttagtagagacgggggttttagcctggcacagtggctcacgcctgtaatcccagcatttggggaggccaaggcaggcaggtcacctgagttcaggagttcgagaccagcctgaccaacatggtgaaaccccgtctctactaaaaatacaaaaattagctaggtgtggtggcacgcacctgtaatcccagctactcgggagactgaggcaggagaatcacttgaacccaggaggtggaggttgcggtgagccaagatggagccattgcactccagcctagcgacagagcaagactccgtctc

SEQ ID NO: 84974 - DNA, 1664 bp, Homo sapiens
acgctctgtcacccaggctggagtgcaatggcgtggtctcggctcactgcaacctctacctcctgggttcaagtgattctcctgcctcagcctcccaagtagctaggattacaggtgcctgccaccacaccaggctaatttttgtattttagtagagacggggtttcaccatgttggccaggctggtctcgaactcctgacctcaggtgatccacccgcctgggcctcccaaagtgctgggattacaggtgtgagtcaccacacctagccccacctaagaattttctgatggtgcaaatcatctaatagtggaaaggactggccgcctccttcagtaatgagctctccacccctggagttcaagtagagagactgggtgcccatttaccatggctgcagtaggagggctccttgcctggtaggaggctgaccagcagtcttctgtagtccttacagactggtcctctgtgaagctcttggtctcctggatgtctctcatcagctccttctttccttagcctcattctttttcctctttctccctcccaggcctgaagacggaagaagggagtgtcagaggcgccctgccagctgtgtcatctcccccagctccagtttcaccctcatcacccaccacacataatggggagctggagccgtcattctcccccaacacggagtcccagattgggcctgaggaagccatggagaggctgcaggtgggaagctggagctggcaagggctgggggtctgggcattcctgggagtttacttctccaaagtcaagcttgagaaagaaggaattctaggagtagcatggccccagggtaggttgtccctaccctgggtctgcttgtcccagaccatcctgaaacctacccaccttacgcccccaggagacagagaagattatagctgagctgaacgagacatgggaggagaagctacgcaagacagaagccctgaggatggagaggtgtgagggccgacagttggggtcctgggtggagttggaggccatgggggaggtcaggccccacagggaaggaggtcacgggcagtgaaggtaagactgacatttgcctctcctctgcccacagagaagcattgctggctgagatgggggtggccgtccgggaggatgggggaactgtgggcgtcttctctccaaagaaggtgagtgaggaatcgagcgaggaggcctagagagctctctggatgcctagaaaagaggcagcaggtgcagggtagtgagtgctgtccctgatcgctccctttgaggtccccggcttgtccctccatcatttctgtcccctcccctgccacctcctctccgtcttgtttagtcatccctgccttctcccttcagccattcaacagtcagcctcaggagagggagaggacctgggaaatcggaggttggttgcaatagagcatgcttttgtatcatttgagttttgtattctgtgcatgctcaaaaagataactaaagaaatctatttttcagaaggataacttgggaagacaagactaaagggaatagaggaggcatgagcactacattgtaagacagtggttgccagtgcagcgaggggttggttatagatggaggcacccgtgtagcttggagctatgctgcaactggtttcctggagaaggtggt

SEQ ID NO: 84975 - DNA, 2395 bp, Homo sapiens
ccaaagtgaagagagagataggaagctgcctcggggccaccccttgcaaagggggtgtgtcccacaaacgctgctatgggtggggtggggggctggggtgctgcgtagccagtgtttgactttcttttcaagtgggggaaagtgggagaggactgagagtgaggcaagttctccccagcccctgtccgtctgtctgtctgtctgtggtggtttctgtttcttgggaggcatggtaggatcataagtcattcccctccccttccaggcctcctgctatatttgggggacctgactggtttggctggagtcccatgaggatgtgggccctttaataaaggatagcaaacagggagcttgtggcctgtttgttttgggttttcatggaggtgtaggttatataaggcaatggcacaggtcttaagcatacttatcagtgaagtattgtatgtgtgctctgtgcaggcaccacccagatctggatataagaatgtttccatcttgtcttcctgaacttcaccctcctgtctcttccttcagggtgcgcagcccgatcttttccccgctttttttttttgggagacagggtcttgctttgttgcccaggctggaggtacagtcttggctcactgcagcctccgcctcctgagtagctgggattacaggcatgtgccaccacgcccggctcattactgttttttttgtagtgacgaggtttcaccatattggccaggctggtctcgaactcctgatgacctcaagtgatccgcccaccttggcctcccaaagtggtgggattacaggtgtgagccaccgcgcccggcctcccctgctttcatgtttgcttacccagtgtctcagtctgtgccagcagcaccactgtctgttatggacaaagcacagaagcggggatgcgaggggaggtagagggaccgccagcctgtcaatgcttaactggctgttgctgacagatacagaaggatttgtggggtacagaggagttctgctttaagtcacctaacttacttgaaaggtctcccaagcagccagtttctcttgatagtgaatgggttgggcaagcatactgcgcttacctgattgttttcatcctggttgtgttacctgccttctggcaggctacatcattgttcccagtcgttattttatttgtgttaagactgtttgttggccaggcgcagtggttcacgcctgtaatgccagcactgggaggccgaggcaggtggatcacgaggtcaggagatcgagaccatcctggctatcatggtgaaaccccatctctactaaaaataaaaataaaaaaattagccgggcatggtggcgggggcctgtagtcccagctactcaggaggctgaggcaggagaatggcatgaacctgggaggcggagcttgcagtgagctgagattgcgccactgcactccagcctgggcgacagagcgagactccatttcaagaaaaattaaaaaactgtttgttgcctgcttgttttaatgttctggcttgaggcagcgagcccttgactatgccacattgccaggattttgcaggttagattgtactacagcactgcctttggcttgccagactctggagtccccacattttcatcctgttctcaggaaaacactttgacccacttgaagctctgagctactgcttcacagcttcctggggtcagtctccagccaaaaccatagatatcccaactgcagccaaaccacggctctgggcgaaggaacgattaggtttactctaggtttccacaccctgatgctcctgcctttactttgacacctctgactgccaggttttcacagacctgttgacagtgactcaagatctggaatgtaatggatggtttggcaacagtgtttgcttgagcagtttaaaatctggccagggagactcaatgtgagcaagaaaatgatagaataccaagttttctggaggtcagagggagctgagttgagtgttaccgagaatgctgtggggtttgagatgagaaaaatagcttgctaatttaaaagacggattatttttccctaaagaccttgacttatgtaaatgtatattatccataattttaaaaatccacttatggctgggcacagaagctcacacctgtaatcccagcactttgggaggctgaggcaggaggatcagttgagtccaggagttcgagaccagcctgggcaacatagtgaaaccctgtatctacaaaacatagaaaaactagttgggtgtggtggtgtgtacctgtagttccagctactagggaggtaggaagatcacctgagcccatggagattgaggctgtggtgagctgtgaaggcaccacagcactctggcctgggcaagagtgggactctctcaaaaaa

SEQ ID NO: 84976 - DNA, 1034 bp, Homo sapiens
atgtaatgaatgtgggaagacctttagggttagttcacagcttattcagcatcagagaattcatactgaagaaagataccatgaatgcaatgagtgtggcaaagccttcaagcatagctcaggccttattagacaccagaaaattcatactggagaaaaaccatatctgtgtaatgaatgtgggaagggcttcgggcagagttctgagcttatccggcatcagagaattcatacaggggacaaaccctatgaatgtaatgaatgtgggaaaacttttggccagaactcagagattattagacatattagaattcatactggtgagaagccctatgtatgtaaggaatgtgggaaggccttcagggggaactcagaacttcttagacatgagagaattcacactggagagaaaccctatgaatgctttgagtgtggaaaggctttcaggcggacctctcaccttattgtccaccagagaattcatactggagagaaaccccatcaatgtaatgagtgtgcaagaaccttttgggataattctgagctgcttctccaccagaaaattcatattggagagaaaccttatgaatgtagcgagtgtgagaaaacatttagccagcattcccaacttatcatacatcagagaattcacactggagagaagccttatgagtgccaagaatgtcagaagacttttagtcggagctctcacctcctccgacatcaaagtgttcactgtatggagtaatctgcaaaataggaaagcttttagtggaaaagctaaagtccaacttattcatttgttcataatatgcaaatatgcaccccaagtattcaaatccaatgaatggacagaacctcctctgtcctcccactgattttaaatagttggttgaagaagatgaggcacttttttttttttttttttaagcattggggtcttgctctgttgcccaggatgggatgcagtggcacagtcgtaactcactgcttccttgaactcctgggctcaaacagtcctcctgcctcagcct

SEQ ID NO: 84977 - DNA, 2200 bp, Homo sapiens
gtgaccccgccgggcggaggcgggggcgcgcgggctgcggcgcgcgagggcggcgcgggcgccccggctgccgtcgctggggagggggcgggaggcgcgggtgcagcgcttgcgggagggcagagggaagggcgtggggaggctgctgggtagcgtggggtagtgtggggagggagcggttctgggtagcgggggaccggcacgtgggttctgcccgtgggggaggatggaaatcgggaacatgtgctatattcgttaaagaaaaaaaatcttagcttaggtagtgtaccctccctgccgccccaatccttgctatagaactctttgcacccagttatgtgacctgaaagtagttgtgtacagtaactggatttagtagcattccctgaatggcagtgtggcttaatggttaagtgttggggcctgggagtctagaggacctgtattcttaaccagcaagctctgggctcatttcttagcctcgttgagcctcagtattctcacccacgaattaaccaagaggttaattcatgcctttatattttatctataaaaatagcaacacgaatgtgtatatacaataatagtattatggaggtattaggaataatgagaatagtgtttgagaatgctgaggcctacttgcactacttgaagatatttgcttgtggaactaaaaaaaaaaaagtgaagtcgaagaaatgtgtcatttatattcttggaaggaaaaaagggccccatcctaaataatcaaagttggttgtcagagcccttcgtgaccttctgggaaattggactaagctgtgcttcacagattgactacatggttccaggttttaccacctagaatagatgtttggaaatagtgtgcttgggcttttccaaggtcccactgtatctagttgtgaaagtactttctggtgtatttctataatcagcgtgtgtgcttagcatctttaagtgtgagtagagtagaatgttgggaaaaggggcttggtacggagtaggtactttaaaacttggctttccttggggttgtctcaaaataacctttcgtgaaacccttactttttatttttgcctttggggaacttgaaaccatgttatcagattttaaggttctggctgctctctgggaaatgtgcttcagagcctgttagcctgtagttttgggtgttgttgcttgcctaaggggagatgtccagtaagcatttagacttttataagaacctgctttgctgtttctgttccaggagaagggaagggaagcatttttggtgggctgtcagagagaggaaactgggatgtcttcaggctgcattttaatgatcaccttttgcatttggtgtcaggcaagaaaactttgttcttccacaatcccactttgttactgcacacagaggcaagatacagagagcttgtggttctgaacaggagtggtaggtatgcatagctggctgctgccttctcttgagttgcatggaaagaaacgtctagggcagctcaggtgacatgaccgtctggaatcaaaattccctgcctctttgaagatatgaaatggtcttccttgtaaataggcagaagtgactaagcacttgaacgaggctagggaaaactagctttaggaaatcttgtattcttggtattttagttcaggtttctttcctatttctcaaatcttgtgactctaggatgagatttagtttgcatagattgcaatttttattttaaattaatgtaggtagccatggctactttttacagtaggagagagataatttggtacgtttgagtgccttgtgtcagtgccttagaagttcatcttggggattttaatttttttttttttctttgagacagtatctcactctgttgcccaggctggagagcagtggcgcgatcttggctcactgcagcctcgacctcctggggtcaaagcaatcctgctacctcagcctcccaagtagctgtgactacaggtgcatgccactattcccagctaatttttgtatttttgtagatacggcgttttgccatgttgcctaggctggtcccaaactcctgaactcaagggatccacctgcctacacttcccaaagtgctaggattgtaggtgtgagcccgtgagtccggcttttggggatttaatttgtgtctttagctgaactcatgtagaccattttagctttaggcacgtttg

SEQ ID NO: 84978 - DNA, 1044 bp, Homo sapiens
tgtgtcattaggaataactgtctgagaccaactggaaagccaacccctagtagcttcaaaagtgaagggttcagtttttctgtgtgttacacgttcacaagtagagcattctaaatttggttcagctgctcaaggatgtcaaagatctgagtttcttcagttttctgctttcttcctctgtgggcctgtttgccacatcattattttttgtagatttagttctgatttctttttgggactatttattcctttaaatcttctactgttttcttagttacatttgttgggttctctacttcaggcacatggatcatccttatattggatagtctgtttctcatagctgtttcctctctaattcctttacttttctttaaaattcactgagattatctcaggtctttttgatgtgtttaacaaaacggattgcattaatggatttctggatgtttgtttttgcgcacttcagatgaactcaacttggttgtgatggattgttattgtagtatgtagctagatctgatttgctaaggttcgagaatttttgcgattatattcataagtgagattggcttgtagttttccattttggtactgcattgggttttggtatcttttttttgtttgtttaaggcagagtttcattcttgttgcccaggctggagtgcaatggtgctatctcagctcaccacaacctccgcctccaaagttcaagtgattctcctgcctcagcctcccaagtagctgggattacaagcatgtgccaccacacccggctaattttgtatttttagtagactgggtttctacatgttgatgaggccggtctcaaactcccaacctcaggtaatccacccgccttggcctcccaaagtgctgggattacaggtgtgagccaccgtgcccagcctggttttggtatcttgattatactagcttggtaaaacgggaaacatttcatttttttctatgttgaggacagtttaagtagtatagaaaatattctctgaacatttgatagaatttatgttctctttcaagatt

SEQ ID NO: 84979 - DNA, 1017 bp, Homo sapiens
catgttagccaggatggtctcgatctcctgacctcgtgatctgcccgcctcggcctcccaaagtgctgggattacaggtgtgagccaccatgcttggcccagattagttaatattctaaatgtgaaatagtgatgactttttccaccgtgtttgcaattgtgtatcactttttgccttagtgctctttataaaaaggcaggtgaggctagccctatttctgagtgtatagctatggcctagagattactctaggcttcatataacaaacccaactacagtggcttaccaaattaggagttcctttttctcccagaacacgaaatccaaaggtagataatctaggcctggttttgtattggttccatgatgtcaacaatgcctcaaactccttcagcccttctgttctttcatccttagcatatggttttcaacttaatctttgcctcagctgaaaaatagctgcttctccttcagtctgcatcagaaaagcaaaaattttctagaagtacccagcatatccctttcgctttgttgaccaagtgtgtggtcactcataactacaagggaaactggacaatgtagttttaaaattgcgcacattgatttcctaaacaaaattggagtcttactggtaaggaagaaggagtggaaattaatgggcaatcaacagggtctgttacctagtggtttttttttttttttttgagatacttaggcttgagtgcagtggtgtgatcttggctcactgcaacctccgcctcctgggttcaggcaattttcgtgcctctgccttccaagtagctgggaccacagacatggcgacatcacacccaaataatcttttcttttttttccctttcccttcccctttccttctcttttttttgagacagagtctcactctgtcacccaggctggagtgcggtggcatgatctcggctcactgcaacctctgcctcccgggttcacgtgattctcctgcctcagccttccgagtagctgggactacaggtgcc

SEQ ID NO: 84980 - DNA, 1038 bp, Homo sapiens
aactattccagaaatatatcccttttcgtatactttcaggtagtgggattggggcgacatgttatatttgccttgggagccatagtatagtgtctaagaacatagattttggagttggccttaagttcgaattctagctttgcttcattctgggcatgaaacattggccagactatttaatctttcctaaggttttctccttcgtaaaataatatatgacacaggtttattgtgaagattagaagtgatgatttaaagcccttatttctgtatataataagaactacaactagtttgtcttgttttttagtgaattaaacattttccagaaattagacgtaagctttttatataactttaaaaaatttagtgtgccaggttatttttttttcataatgcttagatgtgaaatatgtggtgatgttttgtagaaacagttcgtgactatgagcaccagttccaccttaggctggagcaggagcgaacacagtgggcacagtatagagaatccgcagagagggaaatagctgatttaagaagaaggctgtctgaaggtcaagaggaggaaaatttagaaaatgaaatgaaaaaggtatgaaggaatgtgttcatttgtagaaatatttgaattcaaatgcaaaatgctttaatattgttgtgtaatagaaagtaatagaagtactttgatatttcctgtgagaataattatttggacacagacctaaacatagtactaaataatgttatatctatggctaactctctcaccttcttcacatttttgatcaaatatcactacttcatggggtttttcccgaccacccgccatttaacattgcaacctgccaacttccctctgccacctgtcactactctcctctcccttatccttctctagtttttctctttccatagcacatatttccttatactacacagagttcacctattgtgtttattgtttactgtctttctttccttgctaaaatataagctctgtgaaggcaggagtttctctttctctctttttttttaata

SEQ ID NO: 84981 - DNA, 1103 bp, Homo sapiens
gctgaggcaggagaatggtgtgaacctgggaggtggagcttgcagtgagcggagatcgtggcactgcactccagcctgggtgacagagcgagactccgtctcaaaaaaaaaaatttatttattatgtgtatttccttttatatatgggatattttcttaattgattaagaagtcaaatttgttttagtgaatcaattttcccatttactcccgaattctaaatggaatatttgggaaaactcagttataccttgacattcaaagtaatgcactatttgaaagttagacattagttcagttttgcgaatattaatatagtgtctggtcaagttacttgttataataatttttagcaaatggaagggttagagtttcttagaaaagcagtaaatgaataagtcgtagcatttaattctttttaaccataggcccaagaggatgctgagaaacttcggtccgttgtgatgccaatggaaaaggaaattgcagctttgaaggataaactgacagaggctgaagacaaaattaaagagctggaggcctcaaaggttatgaaacattgtaatccatttgcttgaaacccaagtttctgccccaatgccatgaacaaaattagaatcagtaatagggaaaaaaacctgtaatttagactatgcatcttaagaatctttctttaaaatgcaaaaaactgccgggcgaggtggctcacgcctgtaatcccagcactttgggaggctgaggcgggcggatcacctgaggttgggagttggagaccagtctgaccaacatggagaaaccccatctctactaaaaatacaaattaaccaggcatggtggcgcatgcctgtaatcccggctgctcccagcctcgggaggctgaggcaggagaatcgcttgaagcccggtggcggaggttgcagtgagctgagattgtgcctttgcactccggcctgggcaacaggagcgaaattctgtctcaataataaaaaataaatttaaatgcaaaaaactgctttgagatggttttgctcttatggacatttaaaataatcacaataatgatgttttatcacaagtggctgctttgtcacaaagttaatgtt

SEQ ID NO: 84982 - DNA, 1547 bp, Homo sapiens
tgggtgacagagcaagacactgtctcaaaaaaaaaaaaaaaaaaaaaaaaggaaaaacaggtaaagtatagctaggtggcgcatgcctgtaattccagctacttgggaggctgaggcataagaattgcttgaacccaggagccagaggttgacgttgcagtaagctgagatcgcggcaccaccctccagcctgggcgacagatcgagactccgtctcagaaaaaaaaataaaaaaaaataaacaggtaaagtgtatgagctgtcggttaacaaaagaggaaaccagaatagtcaaggagtgtgaaaagatagtcaacattcaaccacactagaaattggggaaatgtaaatgaaagtgggacatcattttaccctaaccaggttgtaagggttatagagaaattggttgcattcaccgactactggtgtatgtgaaactcttccgtttaaggcactgttgtcacattgtcctcccagttgactgtttttggtttctcatgaccctcattgcttctctgtattttctcctgcatagatcctgataccacgtacatttttctgaataggtggctttcagtggtttgtttgtaccctctccttgtcacctggctttttgtagatgtccatttgttgttggttttggtcattccagggtatggaactcaaagtaattcaaatagtatgtcactattgccatcatcttcccagggtcctgctcagtagttttcaaatattagaaattcattattaattaaaccaaatgtttattccaaaaagtaataactggtagaattagtgggttatataccaccattttaaatctgccatacggactcttttaccatcagctgaattaccaccgtcctcaggtgttagagaaagtatttcatgatagttgcaactttaccattctttgttcatatcatgtgctggactgtcaaccttcagtgaagcatcaaatgattgcttaaatggtcatttaagtctttgactattattgcatgatggcctaggagtaaagataactgaaaacagataagccactttaagtttgaagaaataggaagataaaaggcatgaaaaggaccttgaatgtgatattagatataaccatttgaaaaagttgaaagttaactaaagggttagaatttagaatggacaatttatgtgacagtctaaagtgacgtaatccttgattttctggggaagaattgtattttttttggttataactttcctatattagactatattgttactattttgagtattacacttaattgatcaacagaaaaaaagtattttttttaaagatgtggttttattttattgttattttttggaaacagggtttctccgtgtttcccaggctggtctcaaactcctgagctcaagcattctgcccacctttgcctcccaaagtgctaggattacaggcgtgagccaccacacctgggcaagatgtgattttaaaaagtattctgcatttgcctttaagtcattacagtgtgagactagttatttgttccattataatttcctctttt

SEQ ID NO: 84983 - DNA, 1027 bp, Homo sapiens
ctttttatacatttaaagcatttggaattccctcaccagaagtaaaaggaaagcaaacttaaaagtgtatggtatcgtttttgtccttagaaattaactaccgatttaaaaaagcaaaacatacctggtgttactgttatggctgaaacagatacatgcatatgttgatgtgggaatacaaattggagccgcctttttgaaaagcaagggacaaagctgttatgtgaaatctcaattgtatattttattctggtggtgtgattatggataacatctattaagttattttcccagttttctatagtacatattttataattaaaaattataaatgttaatttatgtagatgtaaaagtaagtgtaaatttttttgaggcatagccagaacttaccatcattctgtatctaagatagaaactgttgtaaatttcagtttaatggaattgcatcttctttcaggttaaagaactgaatcattatctggaagctgagaaatcttgtaggactgatctagagatgtatgtagctgttttgaatactcagaaatctgttctacaggaagatgctgagaaactgcggaaagaattgcatgaaggtaaatatactgtatatttttatctttgtctctaagaaccatataagttaaattgatgttgactaataacagtgacaaatcttaaaataacaatgcaacatgttagtgattcaatttaagccttgtagttggtttaaatgtactcatgcaaagctgaaattatggtttttccttcgtgagctcagtaataacttcacaaggtggctgggtacagtggctcactcctataatcccagcactttgggaggccaaggtgggcagatcacctaaggtcaggagtttgagaccagcctggccaacatggcgaaaacccgtctctactgcaaaaacaaaaattatccaggtgtggtgatgcgcacctgttatcccagctactcaggaggttgaggcacgagaatcacttgaacccaggaggcagaggttgcggtgag

SEQ ID NO: 84984 - DNA, 1050 bp, Homo sapiens
gatgtggaccattggtcagacctgggctaggagccctgtgctaaagaaattgcctaccattggccgggcgcggtggctcacgcctgtaattccagcactttgggaggccgagacgggcggatcatgaggtcaggagatcgagaccatcctggctaacatggtgaaaccccgtctctactaaaaatacaaaaaattagccgggcatggtggcaggcgcctgtagtcccagctactccggaggctgaggcaggagaatggcgtgaacccgggaggcagagcttgcagtgagccaagattgcaccactgcactccagcctgggcgacagagcgagactccatctcaaaaaaaaaaagaaattgcctaccattaaaattcagtgtttttgatttgtggtgggggggttcctaaacagtttgccatctcttggagcaagagcgacaacaacacaaccagttaaaacatacgtggcagaaggccaatgaccagtttctggaatctcagcgtttactgatgagagacatgcagcgaatggagattgtgctaacttcagaacagctccgacaagttgaagaactgaagaagaaagatcaggtgaatagaagtttttaggactgatttgctttgtcagtaatgtcccccaccacatgtgattgcattaccttatgtgtattagagactgacttaagctgcaacaaggtgataaaggtgatatgtgccacttttaaaaacataacagctacatttgaggggttttgtttttcatctttagaaatggcctcctctcgggggtggggaaactgatttggaaatgatcttcagtgactgcaggatgcagcagtgcgtatttcggagaaaatctttctctcctgtgctgaccagttctcccaggccaagtcttgaggtcaagcttgtccaacctgcagctcttggctttgaatgcggcccaacacaaatttgtaaactttcttaaaacattatgagattttttttgcaatcttttttgtttgttttagctcatcagctatcgttagcgtcagtgtattttgtgt

SEQ ID NO: 84985 - DNA, 1050 bp, Homo sapiens
atgtggagaggatgaggtgggagaattgcttgaacccaggaggttgaggctgcagtgaaccatatttgcaccactgcattccagcctgagtgtcagagcaagaccttgtctcaaaaacaaactttttcatatttattttctacagtaatcacaaggaatgttctgtgtaaattttttttttcaaggatcatttgaagaggcggttttgctttcttttattttgccttactttatacagtatacttttcttggaagctgcttcctgatttcttctttataccagtgttcttagtttgtgcttataatattaaaatattttgtaatggccagaggcccttagatgggattacaaaacaaagaagcgtaagtatccagttttctcttatcataacgctctgttctttatttgttttgaatggttaaagaactgtgtcacttattaagtaggttacttgggtcatatatatgtttttttcttccttttaggaggatgatgaacaacaaagactcaataagagaaaggatcacaaaaaagcagatgttgaggaagaaataaaaataccagtagtgtgtgctttaactcaagaagaatcttcagcccagttatcaaatgaagaggtatagtgagtctataattaaagtcattaaatacacaatgtcaacaattttagcttactcatacatcagttaattacattgttcatatgagaagtgagaagtgcatagctacgaggtgaaagttagataaaaatgacagtattttcagttgtttttatggcattataggtagcactatttgaaacatgttgcagcttcattcgctgtctgaaatagatgttcttttttccagtatttccaaaatttaatacattagaataaacctttaaataatgtctgcaaaatcttttttgatgtgaatagtacatgttgctaatacttgtcttttttgtttaaaaagagattatctaaagcgctgaaatgcttaactccctgtagcatatatgagagtattaaccagtattaggttttcatccctgacggccatgggtg

SEQ ID NO: 84986 - DNA, 1051 bp, Homo sapiens
gggaaaacaggaaagggacatttgttgtgatttacagagaagtatttttatttttgattctctcttaacagatccgtagactttcagagctggtgttttgcagtttgaatgttgaatataattgttttgtattgagaataatgacacaactcttggtttagagttaatctgaagcctagctaacatggtgtgaaaccctatctctactaaaaatacacaaattagctgggcgaggtggtggatccctgtaatcccagctactcaggtgactgaggcatgagaattgtttgaacccgggaggtggaggttgcaatgagctgagattttgctactgcactccagcctggatgacagtgagatcctgtctcacacacacaaaagttaatctgagatgctttggagagttggatttatggctaaagatatttgaaatttgtagacctcacattttctttaacctgatgcttataatatgcttttctctctacaaaatgttcattatggaaaatttgggaagtatagaaaacaccattcaaaataaaaataactgatagatcatcctacccagaggtaacaactaatattttggtatgtatctctttcttcctttccttattttcttttccagagataatatatatgttaacatatgttaacatatttcttttttttttttttttaatttgagacagggtctcactctcacccaggctggagtgcagtggtgcaatcttggctcactgcagccttgacctcccgggctcaagcggtccttctgcctcatcctcctgagtagctgagactacaggcatccgccatcgtgcccagctaattttttgtagagacggtgtttcaacatgttgccccggctggaacacatgtgtttctatttgcacttttttttttaaatttgagacagggtctcactttcacccaggctggagtgcagtggcgtgatctcagctcattgcaacctctgcctcccaggttcaagcgattctcctgcctcagcctcctgagtagctgggattacaggcatgagccaccacgc

SEQ ID NO: 84987 - DNA, 1731 bp, Homo sapiens
gaaaataccacattcttgggccgggtgcggtggctcacgcctgtaatcccagcactttgggaggctgaggtcgggggatcacgaggtcaggagagcgagaccatcctggccaacatggtgaaaccccatctctactaaaaatagaaaacattagccgggcgaggtggcgggcacctgtagtcccagctacttgggaggctgaggcaggagaatggcgtgagcccgggaggcggagcttgcagtgagcggagatcgcgccactgcactccagcctgggcgacagagcgagactccgtctcagaaaaaaagaaaatactacgttctcgtcatttcctttccactactctggcttctcctttgctcatccccaagatgttaatctttctcagggttctgcccttggccctctttgcctacacactcatcctacgtgttctgatttgctgctgtgactttaattatcattatacgatagttactctcaagtctctatcgaaagacttctgtgtccctctgtcaagggaatatctctgcttggattcatgataggcacctcgcgcttgacacacgccacactgaattgcaggtgacgttcctcaactgttcgtatttgggagctctttgagctaccagagcattcagcacatagctccagcccatccttttatcacagtattataacagtctgcttacttatcttttttttttttgaagccgtatgtatctcgaggtcagggattatatcttgctcacagttgtatcctgagggcctggttttgtgtccagcatgtagaaatgacacttagtgtttgttcaatgagtctgtgaaggtagcacattaatgattatcatgtgtaatgagtggcggaatacatttattatagtttttgtctttaaaaacgcagagaattgtctaacttggccatatgtattttcacatttcaggagcatttagacagcacccgtggctcagttcattccttagatgcaggcttgctgttgccatctggagatcctttcagtaaatcggacaatgacatgtttaaagatggactcaggagagcacagtctacagacagcttgggaacctcgggctcattgcaatccaaagctttaggctataactacaaagcaaaatctgctggaaacctggacgagtcagattttggaccactggtaggagcagattcagtgtctgagaactttgatactgcatcccttgggtcactccagatgccaagtgggtttatgttaaccaaagatcaggaaagagcaatcaaggcgatgacaccagaacaagaagagacagcgtccctcctctccagcgttacccagggcatggagagtgcctatgtgtcccctagtggttatcgtttagttagtgaaacagaatggaatctcttgcagaaagaggtgagttacctttctcacgtttttcctcttgctcacgctgaggcacactgggaagctctgggatttagcgttcattcaacagacggttcctggagtcagtgcaggcacatgttgccagcaagtggatattaacgtgtgtcacctgacccttgtcatagtctgccttgggtattccaggtaattgtgacagagaaaggagctagctagttaatcacagtgaatgtgaacctccccacctgaactcacagctctcaggttggagcaatctgcctgactagcattgcggaatttaagttagagcaacctggatttggtttg

SEQ ID NO: 84988 - DNA, 1213 bp, Homo sapiens
attataatgaggcaagtggggcatggttatctcccatttacaggtgagaaaactggctgggaaagataaagtgagttgctcaagtgttccctttgacttagtcgcaaaacctgactcctggtgctttccttgactgagggctgcttccctttaaggaagccaccggtcagtaagtggaacagcttactgaggcctgaaagaaactattctcattggtcttatgtaacacatacgtgagaaggtgctatttactagtttggtacctattttataattggagctggtgaaacggtgacttggcactgtttttatttgtctttccttccctttggttgtttagtattataccatgagtgccatgggatagtaccttttgcttgctttgtgttttcctcacatgtgatgttttgtgcctcttggcgataaattgtgtcccatgtgtcctatcatacttgtactggagagtttgattttttagaatctgaccctatattgtaactttttgccgtaaggccctgaagaaagtgtttactgcatgttctactgactaccattggtaagactatgcacgtgtacctcaagtgtgtgatgtagaattgttttgcctgataagaggtaattttggtgcccttcaggtacataatgctggaaataaacttggtagacgttgtgatatgtgttccaattacgaaaaacagttacaaggaattcagattcaggaggctgaaacgagagaccaggtgagtttcttctggatgcgccaaattggatattgtcgttttcattggaggtgcagaattaattgcccccctctccggccccagccccatttacattatgaagcatatccatcttgttaagttatgaaataacctggtacatgcaatggcagttacatttccagtgggagctcactaggactctgctttttttttttttgtttttgtttttgtttgttttttttgagagggggtctcgctctattgccaggctggagtgcaggggggatctcagctcactgcaacttccgaccccctggttcaagtgattcttctccctcagcctgccgagtagctgggattacagggacacgccaccacccccagctattttttgtatttttagtagagatggggtttcaccatgttgcctaggatggtctcaaactcctgacttcatgatccacctgcctcagcctcccaaagtgttggga

SEQ ID NO: 84989 - DNA, 1079 bp, Homo sapiens
tctttgttaatgtatggctgcatgtgactcgggttttggcactgccttgtgttatctgaaaggccaaggctttgcacatagcagatgtgcatgcagctgttggatgatggtcagtggttcccatgaacaaataaaatgtcaattccagacactaaatagttagaagatggaagagttagtttcagaataaccgatttcctaactatgtttctatacatgtgtttttttaaagatctctgcactcgtcctaagagcccaggcctccgagatcttacttgaagagttacagcaggggctttcccaggcaaagagggatgttcaggaacagatggtaagtttacattttaagtaaatgacaactatgttactatatattccttttttgttctatcttgacatcatctttgataggaatttatcatcctgtccaaagtagttactgttgtcttctcccgggactgtagaacattaataatggacaaaatattgtaaagacattattccttttttaaacctactttctggccaaacaaaaattttttctcatcgtttaacttatttttctgatttgggaaacctaaacagaataaactatggacctaatttaatttttaattccaaataaaagctaaaaaattgaatgtctgagagccctagctggtacagcttttgaccagtcattttgtgattttcctggatggctaatttatttagaataaccttattagggctgggctgaggcgggtggatcacgaggtcaggagattgagaccatcctgtctaacatggtgaaaccccatctgtactaaaaatacaaaaaactagccgggcgtggtggtgtgcacctgcaaatcccagctactcgggaggctgaggcaggagaagcgcttgaacctgggaggctgaagttgcagtgagctgagatcgcgccactgcactccagcctgggtgacacagcaagactctctttcaaaagaaaaaaaaaataaccttattagtttcacaggggttatgaaaaaaaacatgtaactgttgtggtgctggggaccttccagaaggccatctatgctgagagggat

SEQ ID NO: 84990 - DNA, 1050 bp, Homo sapiens
ggcctcagcctccctccctagttgctgggattacaggcaccccgctgtacccagctaactttctgcattttagtagagacagggtttcactgttttgcccaggctggtctcaaactcctgagctcaggcaatccacccacctcagcctcccaaagtgttgggattacaggcgtgagccaccacacccaaccaaaagatagaatttttaagcggtttgtagaaacagtggagaatgagcctcagatacttgcttcattgcctgtcccttgttgaatatatgctgtaaaccagaaaatctctgtgcagctttttctaagtctagcagaacttcaccataccccgtccatcctcagcactcctttagtttggacttgtttttctctggtgtagctatcaccagaccggatctacctttctggctgtgattagtatctacttctattttaggcggtgctgatgcagtcacgggaacaggtttcagaagagctggtgaggttacagaaagataatgacagtctccagggaaagcacagcctgcatgtgtcattacagcaagcagaagacttcatcctcccagacactacagaggtaacttactttccacatgatcaaaaatgtcaacaagtacgttttctgaaatggccgtatgttctttatgtaaacagttttattcagatataattcacgtgccaattcaaccatttaaaatgtaccattcagtggtttttgctgtactcacagatgtgtgcaaccatcatcacaatcaattttagaacattttcatcacctcaagtagtaactccctgtgacccgactacaccagctaaacacacacacacacacacacacacacacacacacacacacacacgaaaaagtaacacttcgccctttagctaccatccttattccccctcctcccctagccttaagcaactactaacctttctgcctctatagatttccctattctggactttcctatgaatagaatcatacgatatgtggtcttttgtgtccatgttctttcacgtagccttaatgttttga

SEQ ID NO: 84991 - DNA, 1965 bp, Homo sapiens
ccagctaattttgtatttttagtagagacgggtttctccatgttggtcaagctggtctcgaactcctgacctcaggtgatctgcctgcctcggccttgcaaatgctgggattacagttgtaagccaacgcgcctggccgaaaactcgtctttttaggagttctgtggcctctttggcaattattcatagataggattctcagtacttgaacccagaaccaggggaacgtgattcaatgggtggcatttccctgcagagatgtgatacatgatctagaggtagtttatgacacagtgtccatttgcatggatcctgcttttccctgagcctaaatatgctgattgcttggtggtaattttgagacagcccccggaacccatgttcagcatacatttgaatcctttggggggtgctctaaaattttaaagaaaaaaatgttcatgcacaataatagatgaatgctaatacatctcatttttttccttctagcttctatttctagcctaaaagctgaattagaaagaataaaagtggaaaaaggacaggtaagtcgtgagtttcaaattaattctatcagcaaccagtggttatttactgactcctactatgctgcacccaacgaataaaaaatagttaaggcatgggccctgccttaaggaacttttgtcttgtgggaagaaaaccacggggtaagggtgtgctggtgatttattgagagtgccctgtgtgtcaggctacgttaaactggaggaggtaaggctaagatgtgactgtggcctggagtttccagtgtagtgagaagataggcaaggcatggtcataacatgttatatgcttagaggtacagtagaaatatgtataaaaaacattacaaacaagagatgacattttctagctggcttagtcctcttagacatcattagttcctttcatagtaaccccattcaacttcctgacctcactgttccttgatttagagattttcacctccaccctgctctccccttccacacactgggctgcattttgcccaactgtgacatctcactgcagccttaagttccttgaccacaatctgccatccttccagctcttccatcggagtacctcattcagacctccagttctctgaacttcccctttcattctggtttcagcagcttcatggcttgctttctttcccctaggttgcatcttactggcctgcctcttcccttcatctcccaccacacctgtccctatggtctttgactccttgtcctgctgctgccctcacctgaccactgcccaaccttggactagtcttgctgtccccagctgctgatgccacgagacttggtgacactgcatgctcaagctgccagatgggcctccagtgttcctcatgcagcctttcatgtgtcctaagttgcgtctcttccattcctcacagtggcagtttcagagtcacctcacctcagccccctcactctcagcagatgctggcctcactcctcaggcatcaggcagggccaccttcagctactgggctcctcaattacaggttttccttttattcccagtcttttctttttcttcagagaatatcatgacctgcttctgaccacagtgtcattgcataggtgctttgactgagtatctccgacttttccagatgtccccgcgcagtgccgggccttgaacttctgcctcttgactgatcttttccattatgcatgaacaggctcaggtgtctcatattcagaaggaaaaagtctgtctttggattgcactcctctcccgagctaccactctttcttcctccctctgttgccacagtcttgatcatcatcactgcctgacttcccaggcatccctccacctgctgcagtctgcctcctgcctccactttgctactgatattgcaccagcagaaattaccagcgctcgaaataacatctcatcctttccattctagctgccact

SEQ ID NO: 84992 - DNA, 2115 bp, Homo sapiens
tgtgctgtaggccagccgaacatgccactgttgctgcatgtgtttttagtgcgtgccatccattccctcttattggagtatctctccatcttctccccttgtcacccttgtctttgccctgtaaaaatgtaggagtcaaatgtcatctcctctaggaagtcctttgtaacttttctggcagaattaaatgcttctttcttcatcctttacatgtctgtttaccctgatttctccattttgaggccttagaatatagtaggcacctaataatggttaatgaaagaatagttcaggaagaatacagaggggatccacagagctgaaagggtgagaggagtattcccagtgtagcccgagtgtcttggtgtaattctccaggctctaggctcttttaggtagtgcactggggcccagagggagtttctgtgagtttcagctttttcctttttcacagttggagtccacattaagagagaagtctcaacagcttgagagtcttcaggaaataaagatcagtttggaagagcagttaaagaaagagactgctgctaaggtagtgttttcattagtcatttaattttaaaaagcagggctaagaatgcaggatcacatcttgcttgttgaaaaaaaaatattggtgctttgaagtgtcaccttttaaaaagttggcaaaactgacagcttgtgaaaagaaaaaacttaaacgaattgatctattccagctgggttaaatcttttctgccaggtctggaggcctgcgtcataggctagcttcagatagtaggcagtcagggccattgaccaagcctgggcactgcccagttagaagcactgctttgaaaatgtcattccatttgactgatgtatcaaatcctaagagagattgcatcaaaccaggtttgctgcctaaattttgatgagttccgttagaataaacgtgcatgttgtgggggtagtttcctagaaatggtcttagtgagctgagtggtcagacctgaaagtgcagacagtgttgctgaactgcttgtttttggaaaggctcccacacatcctgctggttttctgtaagagagactggggatagctggggcgtattcactaagtttcctggtggatgcttgactgtggaggttgtcagaggaagtcctgtatgtatccctgttggtgtgacagacaccgatcttagcagctgttttggtgattatcgtcactgtcaccagctgctgggggtgggggagggcagcactttaatccatttcttcctttggcttttcatacccagttcatctcaggacttagagcaagtagtctagatggcctgcacgcttgccctatagataaagagattggtcgtgtataggagtgcgacggatatccacccacctttctgccctagtagtaggtaactacaagttactggatttcctaagtaattcggccctttggcattaatcttcattcaaaacttgtattttttaggctaccgttgaacaactaatgtttgaagagaagaataaagctcagagattacagacagaattagatgtcagtgagcaagtccagagggattttgtaaagctttcacagacccttcaggtgaggcatttggggaaccacatacagagcacgaaggcagttttgggggacagaaccttgccgatccctgacttgaccactggcagtagctagaggtttagagactggctgctcctacctccaccccaaatgtctgactcatcattcaagccagaaacctggtgtgttcttcacacttggcccatttttctttttctgtatgccttgccaattttgcctccttatgagtaaagtactgactccttagcataccatgtaagactcttcccaaccaggcccacccctgtattttgctcatctctctgccttgttttacatgtttaactgcttgtggttcctcgcccacagcgtggtgttctgtctggtaagcatcctcatctcatcccctcctgactcctttctttcaaggctcagcgtaggtctgtcccctctgtggagctcttctaggtccctgagctgggctaaagtgcccctccctctgccatgctccctcgggcactctatgaatgcctgtaatga

SEQ ID NO: 84993 - DNA, 1930 bp, Homo sapiens
catggtggcgtgtgcttataatcccagctacttgggaggctgagacaggagaattgcttgaacccgggaagtggaggttgcagtgagccaagatcatgccactgcactccagcctgggtgacggagcaatactccatctggaggaaaagaaaaagcaagcaagccaggtgtgatggcaggcacctgtaatctcagctactcgggaggctgagacaggagaatcacttgaacccgggaggtggagactacagtgagccgagatcacaccattgcactctggcctgggctggcctggatgatgagcaaaactctcccccccaaaaaaaaatcccagtccgttacacggtagctttggggaattatttttaaaatttttaattgttcttgctgtctccctttgaagtgactagtactctggtgagttaatctgctacatctcagctaaaccagtcaaagttcagaaaatctaggcaggagccacctgtagttatctcaccattgtttctccaggtgcagttagagcggatccggcaagctgactccttggagagaatccgggcaattctgaatgatactaaactgacagacattaaccagcttcctgagacatgacaccctcatggcaggattctagcctgcactttgggtttttaactcatctttagagcaacagtaattattatttaactcttaactgaagaaagagaagtcacaacaaaaggaagactggagaaatgcttacttctagagggagaagactgtgcggcacaggaaacagcaaacagtggggtgatctgcagcccagagaccttcaaatgcgaacactataaactccaggcttgattccaacaggcgtgggatcagatttggtgatggaaaaagcgctgtttccttgcctgctttctccaagacagattttcggaacacatttccctaccctaaagcgacatcccagtagtgtttggaattttctgttcatatagtgtttggaattttctgttcatagatattggaagagagaatttgctttatctgttgtctagagctcatcagtaacagtattcagttagcagacagaagtgtagtatgctgtatgaatattttatattaaaatatgaaggtttgagagcaggccattggctactgactgtattttgttttccttttaccattttatcttatcttgctttggaggaccttaaatgctactgaaacttacctgagaaccataggactgtggcaaacaaaaccaattcatgaagtgaattaatgatgaggatctgaaaacttggctggggctatatatactggaagttgaaggttaaaggaaaagcacaagaaactttggaagcactttttctgcatacttagatgatcttcatgggcccacagggtaccaggataaagccgaactggtaccatctactcttttgaagtgttttagtctagttattggatcagtgaaaaacattagtatacgtttttaaataggctaatttttcaacttggatcattaggcttacgtactacttgtttcaaatgtgtcaaatacaaaaatggtaactaggttgacagatactttgtatttttcttttgaattcagacctggaatgtaagtaagtgacaatgcttatggaaagccagttagttagaattggaaatctgtcttgtcattttacaagcattagattcctttcctgtgtgaagaaagcctcagtgaaacaggtctttgccataactttatgaagtgctacagaaagcacaaagaattgattcatgttcatcaatacctgctgagagtactgtcccaggaatatccagtggatggattcatcatccaggaggttcaaaagtaagatggttttcaaatcatttttgagactggttgcataacagcagggtacctgaaagagccttctgggagttagtg

SEQ ID NO: 84994 - DNA, 1040 bp, Homo sapiens
atgaggtcactatggacttaccctaaagatcttctgtacttctctcttccataggacaaatgataagtactacatacctcatctcttgggttattattgtagtcttgcattcatggttatgaatttaaaaataaataccaattatggaaatagtactaaaggcttgccgcacatgaaacattattttaattggtttaaagtccctttataaagagtgctacatggtttagataaaggaaacatataactattgagttacaggggattttattaattataaaatgcaatcaatttaaattacgtaggtttaagactagtcccttggataagccccaagcgaatttgtcttcagattattaaaattagtgctgtaaatcagggtgggcaattcacagcctttctgaactgactgaactagagcttgcagtgaagtgttctgctgagactgagcaccttacagatatttttctccagaagatggtgctgggtaataaaatcatcacaattagggaatggttagtggtctctactgtggcaaatgccaactgttggaattcactttattgtagaaaaacccaaactgagactcttaagttttgtttagcaatgtgtttctggtatgaaacaaactactgtgtcactgtccaggtaggaaacaattctttcaactgggttttcagcataaatgggaactgatgtagaaggcaggatttagcccttctaggcaaaagaaaagctcagttgggtttcacgagtgttcctgtgcttatattcagtctgtgcctacatgttctcatgcatgtctaacctgatttacctcttacctgtaacctaccttatcatgtggcttttaattgacagtcactcagccatttctaagcagatatagtagtacctttcagaactcacattggcaagtgtaaaaagatgacttaaggtgaagtgaggacaaaatcacattctgcatactaacctatttttttctccctttaaggtgctaaacttgcacctcatgtccactcagtaacaagtattgggac

SEQ ID NO: 84995 - DNA, 1851 bp, Homo sapiens
gctaggtgtttgtgctgccttgatcttttagaaaagaactggaaatggcagtcagaaatgctttcacaaatcaggggcattggaataataagggtgtagcttcccaaagtgaccttttcaaggtggaaaacatgcattcttgcacttttacaaaagttacactttattttatattctgaaagttctggattaatgtggtttctgctttcctgtaatacagtaaatcactccatggtagaattcaatttacttacttattttgcagaagtacagtccatccagcgtctcctcccctgctttgtactcgagaagatgttgaagtggcagagtctcccctccgtgttctggctgaaaccccagattcctttgaaaagcatattagaagcattttgcaacgtagtgttgccaatccagcatttttgaagtatgcaaccttgggcatagcggttttatgaatgggttctcttctgtcttcagaattactgtgcatcctttctgtcctcatctgtttcatatactttttactgtgataaatttggaagaaactggatatatttgatcagctagtgaatggggagcaggagggaagtggcacctgagaatgataaacaggaagtgtttaaaaagaagttaggctaggccgggcgtggtggctcacacctgtaatctcagcactttgggagaccaagacgggtgaatcgcgaggtcaggagatcgagaccatcctggctaacacagcaaaaccccatctctactaaaaatacaaaaaaaaattagctgggtgtggtggcagatgcctgtaatcccagctacttgggaggctgaggcaggagaaccgcttgaacctgggaggcagaggttgcagtgagctgagatcccaccactgcactccagcctgggcgacagtgagactcgtctcaagttaggctgggcacggtggcttacagctgtaatcccagcactttgggaggcccaggcaggcggatcacctaaggtcaggagttcaaaaccagcccggccaacatggtgaaaccctgtctctactaaaaatgcaataattagccaggcgtggtggtgggcacctgtaatcccagctactcgagaggctgaggcagaagaattgctcgaacctgggaggtggaggttgcagtgagccgagatagcaccaatgcactccagcctgggtgacagagcgagactgcatctcaaataaataaattaaaaatataaaaagtttaaaaagcacctgtgacttgagtctatttattttcagttgttttactcagctaaggaaaataaaggtagaaactttgtttttaagagcttctgaaaaggacatagcccctcctcctgaagaatgccttcagctcctcagcagagccacccaggtgttcagagagcagtacattctcaaacaggacttggcaaaggaggagattcagcggaggtatgatgtcctgtgttcacaaaccatcgatccctggctggtagctgatgctgtatggtagcctagacctggcttctgaataaactctatttctttttgtttttaaagggtcaaattattatgtgaccaaaaaaagaaacaactagaagatctcagttattgtcgagaagagaggtaagtgtcaaaaataagaagaatacaataggtcagtaagactggaaccatattctcaccctaagatgctgagccacattaggtggtttcagcatcaaggggtggacctcaagagtctcttgtgtcttacatcattaggaaaagtctgcgggaaatggctgagcgtttagctgacaaatatgaggaagctaaagaaaaacaagaggatatcatgaacaggtcagtgggct

SEQ ID NO: 84996 - DNA, 1217 bp, Homo sapiens
gatattatgaatgtcagagtagcggctacttctctggggagtgaaaggctatgaccagggaaggtcgcatgggaaccctgaggccccctgcagtgtcctgattcttgacctggatactggttacatagtgtatagcccagtagtgtgtagatttcacactgataataaaaagttaaagtttacaaccttccagatatcgtctccatgtcttgtccaaaaaggtaaatgggagctatggaaggggaactagtgttttcaactgctgtttaaagactgctggttctaaagggatggcgagaaagaataggttaaggggaactggacattatattgaaatgagagtattttaaatggaagagacatgagtttgcaagctgaggggaagtagataatagggagattttgaaacgacacagttgatggtacaattttcagaaggtgtgagaggaggcggcatccacattcgggggcagatgtgtgttgtaggcatgcaggtgggatgggcatgggagccgctaggagagcatgttggcagaatgacagttcccatctgaggtctcagtttccagtgtcttcactgaagtgggaaggaagactgagagagatacacgctgtgcgtgccaagtgatttcctgtgacattgacattgggcctcattgagagagactcggtagttctgttcattcaacagtttctaagcacttaatttgttagcactgggctaggcaaacaaagatagctggggcttatgtgcaagttggagagatcttcagtgtaacgtgtaacttttgagattacagtcagcagcacgctacagttagggattcctgagtgacttagtcacatgggctctagactttagtgtggagctgcattaaaggtttccaagccaccacttttgaggttatggtactgataggatgtcccaagcaacttcagcccaggcctgagaaggccgcggacctgtcatgtctttgctcttggttccattgcatttgctgctttgtaatttaactatgactgtgtttttccaggcagccagctccaattcgaggattttggattgtacctgacattctgggacccacgatgatctgcatcaccagtacctatgaatgcctcatatggccgttattgtacgtcccattttatattctccacacagctcttgttaattctgcaatatctaagttgggaaaatgcactcagtaaccaac

SEQ ID NO: 84997 - DNA, 1020 bp, Homo sapiens
ataaatgcagcagaaggttaagtgcattttggatttagcaaatctcacaggtgacctttgccacagtagcttcagtggagtggtgaaagcataaaccatagtaaatttagggcaagggttttcaacctttgtactattgacattttggtctgaattattgtttgttttagaggtgctgtgctgtgcgggaatgtttagcggcttctgtctagcctctaaccactagatgctaatacctccccccacattgtgacaaccagttgtgacaagccaaaatgtcttcagacattgccactgtccgctagggcaaaattatctctggttgagaaacacagagtggtgggatctgagtgggaaagcgagaagatggagtattgggaatacactacatttataatgaaggtatgatagctggaggaaaacaaagtcaaagaatggttttatgggatgagcatgcatactgtcaacatttcccaaatatgtttttactccttctttagccctggaaatattggaaagctgttgggtccattgcccatgcatcctgcggctgaagataactatggttatgatgcgtgtgctgtactctgcttaccctgtgtccccaatatcttagtgatcgctactgaatcaggaatgctgtatcactgtgtcgtgctagaaggggaagaagaagatgaccacacggtaagtgcaggctgctgtggttgtttgtatcttcaacacctggcatagttcctgacccaatatgaatgcttaatatatgagaaggaattttaacttacttatggaacttctgatattttggaaattaaacagttaaaaaagtagctgaagcacacttagcagtctaagtggaaagaagttagaaggttgcccaacttacttggtccaccagtctgcatgttactttctggtctctatattgcaatcttcagggacagatacaaagagccttggaatcactgaattggcttttttcacaaacatcttcctaaaggaagagagacgttttgtctt

SEQ ID NO: 84998 - DNA, 1149 bp, Homo sapiens
tttttttgagacggagtttcgctcttgtcgcccaggctggagtgcaatggcacaatctcggctcactgcaacctccgcctcccaggttcaagcaattctcctgccttagcctcccaagtagctgggactacaggcacctgccaccacgcccaactaatttttgtatttttagtagaaacggggtttcaccatgttggccaggctggtctcgaactcctgacctcaggtgatccacccacctcggcctcccaaattgctgggattacaggcatgagccactgcacccagctgagaatttttaaatgttaacattcttcataatcattttttgtcttttcagtccattgcctacaaattccatacatacccacctcctgttattagacattttgtgtttttgttttgttttgtttttctttttactttttgttgtttttgtttttaacaagttggtttttacatctctttccagaagggcgtataccgcatctctaggagagacagcagttgcatttgactttgggccattggcagcagtcccaaagactctatttggacaaaacggcaaagatgaagtagtggcatacccactgtacatcttatatgaaaatggagagactttcctgacatacatcagtctgttacacaggtaagttgaggtggtcacccacctgaaatgaaaactcagtttgggctccagtagatatcattgaggctggacttgggagccatgtttttgagtctgtggaaatgttgcagccttcacatgcttggcttgcatatttttgagaaagagttagtacaggtcatttggcctttcatttcttcatattatttgggtaagttctatagaattcttggataatcacttatgataggcctggatttgtgttcacaaattctagttatccgaacaagtgcttattgtttatcttatatgaacaagacaccacgtaggcgtggtaatctggtatcttatgtcccagttgtggggagaaagatacatacacatgaaaaaatactatccataccacagtattggtacacagacagtaagaaccccgaggaaggagagatcattctgactgggaggttaaggaaattttcgtagagaaggagtggtgtcatgtgtgacttaaaggtctcatt

SEQ ID NO: 84999 - DNA, 1050 bp, Homo sapiens
attgattgaatagatgccttgaatgtcctctcagcatgatttcagggaaataaatctgaaggaaagagaatcaaagagtgttaaaatagaaatttcttcagggcctggcgtggtggctcatgcctgtaatcccagcactttgcgaggccgaggtgggcagatcacctgaggtcgggagtttgagaccagcctgaccaacatggagaaaccccctctctactgaaaatacaaagttcgctgggcgaggtggcaggtgcctgtaatcccagctacttgaaagactgaggcaggagaatcacttgaacctgggaggcggaggttgcagtgagccgagattgtgccgttacactccagcctgggcaacaagagagaaactccatctgcaaaaaaaagaagttcctttagaagattttcatccaagttgtacaaaatgttttggaaaattattatctttattttagtaccactccagttgcggagagatttttcaccagttccacctctctgactctaaagcatgctgcatggtatccaagtgaaatcctggatccccacgtagtgctgttaacatcagacaacgtaatcaggtaaattttatttctctctcttgaagccttgcgagtgggaaagctctgtttctgtttgccaattaacagctcaacatagaacgaagtgagtcattgaatgagtcagtgcttttattggatggctgttgtaacccattctcaatcataagaattgcctaactgctctaacttaccactattccttctcaactagtcttcctgcctccaggtatctcctctcctaatctgacaccttagaataatctttccaaaactctttcatcattgtcacccttttggtaataatgtagcataaaggaaagagaatgtaagtgtaaatttagagatttgaattattgtcccacctccttttctgttatctttgagatcttgagctttttaggggttggggggctcagtttccaatcttttaaattgagcaggtttgattcaatagtttctaacgccccttccaagctttgca

SEQ ID NO: 85000 - DNA, 1046 bp, Homo sapiens
gaatttataagctttcagtaaatattggtgactatctcaataaccttcactcctccaaaatctcaaaaccttagagatggggaagaaagcagcttatcatgagttgtaactttggatgttaaaagcaagcatgagtaagctgggtgtggtagctgtagcctataatcagcactttaggaggccaaggtggaggcaggtggatcttgtgagcacgggaacaggtgttcagaccagcctgggcaacatgacgaaacccccatctctacaaaaaaaacctttttaattagctgggagtgatggtgcacacctgtagtcccagctcctctggaagctgaggtggggaggacacttgaacccccatagtaaagtctgcagtgggctgccactgcactccagcctgggtgacagcaagactctgtctcaaaaaaaaaaaaaaaaatttgtgagttaatggtacaagtgtgagtacttatccagagttttattatcctataattgtagtaaactaagtattactgtgatttcaagtaactgccacctatatttaaattaaaattaactatgttgactggtttgctctaattttcagagattgctttgcataaatccacccctgtttgaaatctatcaagtcttgttaagcccaacacaacatcatgtagcacttataggaataaaaggacttatggtattagaattacctaaaagatgggggaagaattctgaatttgaaggtggaaaatcaacagtgaattgtaggtaagttgtatactatttatctgtataatttattatatatacagaaaattgttcaagactagtggttcttaagcatgtttagtatactactcttaaaacattaaaacactcctcgtggtctgcagactggcttctgtgttatcaatgttcatagtatatgtgtaattgattgtactttattctgcctgaagtaccacgttgctgtctcatttgaggctaggccattctttcgattaggtagaagtaagattttgtaaaaccagttatctgtcagccagaagtttgcc

SEQ ID NO: 85001 - DNA, 1802 bp, Homo sapiens
gctttcccagccaccccaactagcatctccctgacgttggacccagtctgctcccagagctccgcatcagaggaaaagctgctgctgttattcagccataaggatggccaggttccccagcctttgaccctggtcccttatgaagactcctggaacagtcaagctggaaagagatcttgaaactttaggaaagctttgcagtgtacgggtggaggaaaaggcttggaatgttaagggactgatataaactcagttaattggcacatagctgaggctggtatccacatttcttaactgaaaacccagtgtgttatttaaccaagcagggtgccaacagaagtgagatcaagctcttcatttgggaatagtatggcataagactattcaaatggctacataatatcctaatagtggtggccatcagacactctgaacagagatccttgatccagccatccatctccttccagcagcagcatgtattgacttcttgtttccccagcctgaactgacatcaactcccaatttcgtggttgaagttataaagaatgatgatggcaagaaggcccttgtgttggactgtcattatccagaggatgaggtatgcaggatggagtgctagcctcttggcacccctggggaacagtgtgtcccttgggaacttcctgtccctattttagcagaaatttaaacacttttctagcttagaccagcccagcagggggagagaggtggggagtgagggaagagggttaaaacctgatgagtttcatgctgtcagtggccccctttcttcccctgagtctagcttgtcctggagaacccttcagtttcccaatattgtttcttctcaggttggacaagaagacgaggctgagagtgacatcttctctatcagggaagttagctttcagtccactggcgagtctgaatggaaggatactaattatacactcaacacagattccttggactgggtgagtgcttgataaggtgggggaaccttttgggccttggaaggaagggtcctagttcaaggggagaaaaaagcattttaatgttcattacagatttttttttaactagtaaatattgttctttgcaggccttatatgaccacctaatggatttccttgccgaccgaggggtggacaacacttttgcagatgagctggtggagctcagcacagccctggagcaccaggagtacattacttttcttgaagacctcaagagttttgtcaagagccagtagagcagacagatgctgaaagccatagtttcatggcaggctttggccagtgaacaaatcctactctgaagctagacatgtgctttgaaatgattatcatcctaatatcatgggggaaaaaataccaaatttaaattatatgttttgtgttctcatttattatcatttttttctgtacaaatctattatttctagatttttgtataacatgatagacataaaattggtttatctcctccaaggcagtttgtctttttctattcctcccccttcaacctgcgtcacaaaagaccaagaacagatgtcggaaaagtttttttttcttcagtattgtttaaaagtttcaatacaaaataagttataaataaaaggcttgtatgtacaaggctcctcagagggaatgagttgtcttcaaccccatagaatgatgtgagtccaagctggctctagaggatcacagcccaagtatcacaggcctaggtttaaacaggaaaataattagcttaaattgtattctagtcatgaaagatatctgataaaagttgtaatc

SEQ ID NO: 85002 - DNA, 1001 bp, Homo sapiens
gggcagtgtcagctggctgtggccatgagatgcccagtcagcacatggcagtgagccctggggtactggccctgttgggagtaacccatgcatgacttgtttggctgagataaactgaggccagctttggcttccagcagctggtacatggtaggcacacttcagacctgctgagtcactcaggattggatgtaggcacccagcctagtttgaagttctgcatataattcagccagctaggacagagacattgtttcaatacgcctttttaactgtagcagatttccatgtttatgtgttaacctgctcggttaaaaccatgccttgtctgttttgccttgtctgttttcccttgccgttttagaatcacggtcactttcaacattaacaacagcatcccaccaacatttgatggtgaggaggaaccctcgcaagggcagaaggttgaagaacaggaggtaagctaatactataatcagcttttacctcagttctgacaggctgtgcctggggcttagaggaggagcgtttttctttggtctttcaaaaaaaaaaaattcctctaagtccagtcgcatggctcacgcctataatcccagcactttgggaggccgagacgggcagatcacgaggtcaagagatcgagaccatcctggccaacatggtgaaaccccgtctctactaaaaatacaaaaattagctgggcatggtggcaggtccctgtaatcccagctactcgggaggctgaggcaggagaatcgcttgaacccgggaggcagaggttgcggtgagccaagatcacaccactgcactccagcctggcgacagagcaagactctgtctcaaaaaaaaaaaaaaaaaaaaaagagagagagaatggcaggggcataagagactttaactggatcatgcctactcttcaaacatttcaggaagtgctgtgcccagcctagtaaccagccagtatgagggccacagagtccctagacattctgcccaag

SEQ ID NO: 85003 - DNA, 1155 bp, Homo sapiens
caacattatcacagaacattgtaacaagggctataggagttacgacccaggaactgtggatgaaaaccaatacatatatatatcataacaccacagcctcctagaggaaagtgaccgtggaagggtctggtgagagctggcgggagacaagagtgcattccacgcagcccaaaagccttgcgtgctttgagaacagcaggtggaaagtgggtaagcggccactagagggaattaaacagcttcggacagcggactcggcagcgcagcaagaaagctccggaatccggattcgaggcttcccgggctgcaccggagtctccagcagagggcgcgattccgcccgctggccttaggtcgtcagagcgccggcgcgggaagcgcttccgggcaggggcggggcttccggcggcgcctcaggtcgcggggcgcctaggcctgggttgtcctttgcatctgcacgtgttcgcagtcgtttccgcgatgctgcctctgctgcgctgcgtgccccgtgtgctgggctcctccgtcgccggcctccgcgctgccgcgcccgcctcgcctttccggcagctcctgcagccggcaccccggctgtgcacccggcccttcgggctgctcagcgtgcgcgcaggttccgagcggcggccgggcctcctgcggcctcgcggaccctgcgcctgtggctgtggctgcggctcgctgcacaccgacggtgaggtttagcgggccgggggtgtggtttgcgttcaacagagggaaaacgtagaccaggaatagggcctgcaaccgacctctgaggtctgggacatttttccattgattggcaaccagcgggctaaacccacgtatgatcatatttcccccacctcccctatccagcagtttcgttttcttttggtagggggtgaataaaattaaatactagggtacctttttccttagtcttattctatcgaaagtggacctttgggaaggcccatggtcgtggttgaaaatagcatagttatatcgtttggcaagtggaagaggattggaaattctcctggtttatagcggaaagtggtaatgcgttcattgttggaaatcacttttccagaatcaggctcagcttcctactactattatggtatttttaccgataaggaaacaggcttc

SEQ ID NO: 85004 - DNA, 1131 bp, Homo sapiens
atgtttcacaataacattgcaatataatcttcagctactctctttccattggtaaaatctctgatggtgtgataactctttgccaacctacgaaacccatatctggaagaatcaccagctcccgtgagcagcttcatgtaaatagatgcactccaagcagattgcatgcctcaggtgtttgtcttctagtaatcatggagtgtgcaacacccagagtaacactacaaggggcaggactgcaaacagcaggtcctggctaaaaacccttaatgctgcattgctgccagttgtaaagagatgcctgaatggaggcaagttctgccctgtgggtgaaactgatgatgtactgtactgtcatatataaatccactaaatccagctaccaggaactgcctggaactgtggccatgcatttttttttttctttaaagaccagtgtgatagtaggccatgcatctgagatacgatattccttggtaactagagggagaaaaaaaaatcaagtaggttcaggcttatgttgtattttgagagtctggttttatttgaacagaaataactctacagaaagctcttgtaaataatgctcaaatttgcacccgacgatcaaatccattaaaaatgaatcttgtatatgatgtgtgtggcttgtttcttgcatctcttttccattattcatagaaaattatttagaaaatattaagtgttagtcttaccatgagttagtaagacataccttcttagtagcttatatgtcctgtatatcctgggaaggtaggattgttgatttttaataaatctgaaccctgtctttgggttatattaatttactggagaaactcacagaactcagggaaacacatttaccggtttcatacaaaagatatgaccaaggatacagataaggagatgagcagggtggggaatggggaagaagctcccagcctccatgccgtccctggaccaccaccctccaggaacctccatgtatttagctatcagaggctctccaaaccctgtcctcgggtttttatggaagcctctggacttatctaaatgatataagctggcttcttgtccccagaaaaatgatgttccattagaacttggatgcaaggttggaggtgcaga

SEQ ID NO: 85005 - DNA, 1018 bp, Homo sapiens
aagttaatggtgagaatatgtttgaagacttctgaatcatccgtgtgtcaatgcggctttttggttttcttcctccttttagggctatcgcaaagtgatcatttcaaccaacatcgctgaaacctccataaccattacaggaataaaatatgtagttgacacgggcatggttaaagcaaagaagtataaccctggtgagaatttgtagttcatgaatgtctctcctgtgtctagtgagcagccactgaaactgtagtcccacagttttcccctgagtgtttcatgtttgtaactaacaaattcaggtggcaggcgccatgagtgagatcacctacactccaggtccgcgaaggagtcctgaggcgggtatgtgagacaggaagtagaggcaggaaagaagagcccaggttgagcaaacttgggcacacagggtcagggacctgggcagagggtctggtaccccatcagaagtcggctctaaggccagggacagctgggtgtcaatcaaagggtgtcatcagaaactatatatatatggctggtttgagctcccaggtttctcaggaaggaaccagatctcctggctgaggtgaggcatggaaggagcactggcttctcctaagaaggtgcagtgagaagctaacttaaggtcatcttgactcatgtctgttttatactttgctttattccacagaggatttgagaccactgaaattattgctcccaattattgaactgaaatgctctagtaaacatttgagggtcctggcttccacaggtgtatctttttgtgatgacgtaggtgaaagagcttgggtctccagtgccaggctaatgatacacctttatcaagaaaatgaacctcatttactgctagaaaacagacatcacattatttctgtcttacagcagaactgggagggaggataaagcacacaagtgatttgaggcatttaatttcgtagtcattgattgatagtatgacccccatcctagtttgctgaaactcccagtttta

SEQ ID NO: 85006 - DNA, 1024 bp, Homo sapiens
agctcactgcaagctccgcctcccaggttcacgccattgcttacctcagcctcccaagtagctgggactacaggcgcccaccaccgcacctggctaattttttgtatttttagtagagacggggtttcaccgtgttagccaggatggcctcgatctcctgacctcgtgatccgcctgcctcggcctcccaaagtgctggggctgggattacagacgtgagccaccgtgcccggtgaaactccatctcaaaaaaaaaaaaagaaggaaaggaaaggaaacagacctgtgtgctctagcagggtgttttcctctgcctgttctgctcagagccttggaagaaagtaaactgtgatgggggtggcacaggcctcaatcatctgcttttggggctcgagagggacacggaaaggccttcccactatttgtttctggtcctcctcttcgttctcttatgcaggtgattgtgatgtcagctacgatggatgtggacctgttctctcagtatttcaatggcgcccccgtcctctacctagagggtcggcagcatccgatccaggtgttttacaccaaacagcctcagaatgattacctgcacgccgcgcttgtctccgtcttccagatccaccaggtatggtgctgggggcaaattcctgaaaagttctcttttatcttgcagttggtagtgagaacattgagccttgaaaagaaaagctactgaataaaacaactttgtgagttgtgtcatcaagatgaataaggaggccaggtgcggtggctcacgcctgtaatccctgcactttgggaggccgaggcaggtggatcacctgaggtcaggagttcaagaccagcctggccaacatggtgaaaccccatctctactaaaaatacaaaaattagccaggcatgatggcgggtgcctgtaatcccagctactcgggatgctgaggtgggagaatcgcctgaatccgggaggtggaagttgcaatgaggcgagattgcaccactgcactccagcctaggtgac

SEQ ID NO: 85007 - DNA, 1853 bp, Homo sapiens
tcatttaagtagggaatatctgtatacattaatgactaggtaaaacaggaaatacattttgaatatacagcctaaaggcaggcagttacagggtttttgatttctccgattttatagggtgcaagttcccagtggcaggatgccctgctgtgtgactgactacactgtgtcctgagcagtggtaatttcaatcacctctcatcagtttggccagccctacaaccaccattcctagccctgtgttgcttgacaggatacctgtgcttgaatggacataaggaaaagtccttactttctccccaatttacctctcaatcttagttcttccagaacacacttccctttcacaatgcaaataaactgaaagtgagatttgatacatggaattttgagaccaaccaactaaccttacacataatttgagggattcctggattcttctagtgatactgaaaagcacacttgactaaagcatagtgttttttgtttgttatggaaatacggtatacgttcatttaaaaataaatggacatacaaattgcatctccttaggagatacattttatatacatttcggtgcgtttttttccagtatggatttctatttgtttctctcttcctcttgttttttctgtgtcactcttgtatgtcctcatatctttcatacctcttgtgtagtctctagaagcagaacacctaagtcctgggtctggataatgaaaccctcagtctctggggcctctgaaaataaggaagcattggagctattgccatgttgagtaatgggcttcctagaactattgtcatctatcctgccagtgttttatgttgtagctgtttttctttgacaggtgagttccagctatgttgttagtcatgatcctgccattattttctgtgttctgtaggatgtctccaggctacttaaacatattttatgagtttgcaataaaattgttgaatcttgtatgatcaagtcactcctctgctcagaaatccacagtgacttcttagtaagcccctacattatatgcatacttgtttttttcttaactttactcccacttctacctaacagggacctcaacttaagtctcttcagttcttcaaggcctggccttgttcctgattcctcaaaaaatcttgactctaaggcctattttattgtctgtctctgaatccctataaagcttcaagtctgtatgacattcttaacgccaaattatatattgtcttgtactgttcctagctggtacatgtatattagtcttgtctccctcatgagaatgtaagctccttaagggcagggaccatgtcttaatttttgtatccaccacagtgcctagcacagtgcttggcacatgggtgctgaataaatacctttgtttattgatcagcaaagtattatctggtatttttaattatagagggattaaagtgtatgcatgcaagcttgagcctagttgctgaagcttgtggttgtctctgaaagtgggatagagggaaactgaacatgatcaagggcagtaatttggtggtcggaaaagcaaaggtgaccaccagctgttatggtcgtgatcagaccagttaagtccacagaccatcccagacaagttaaaaatgaaatgtgtctgacacttcgtcgtttgaaggaagaaccaggatattctctgaatagttattagcttgtcagtatctacatatgaaagctggtgaaccccaagagacttcttcaggagaaacagcagatttcagtctaccaatgggagaaatgtgagcagcatggcttgatgcatatataggacttaatttttccactctttggtcctcttagctttgaggctatagaatag

SEQ ID NO: 85008 - DNA, 1750 bp, Homo sapiens
gtggcacacaactgtaatcccagctactcaggagaatgaggcaggagaatcgcttgaatctgagaggcggagcttgcagtgagccgatatggcaccattgcactccatcctaggtgacagagcgagactctgtctcaaaagaaaaaaaaaaaagaataggggactgaaagcatgtctgtgtgtcatctggattagttcccagccagggacagtttgtaaaaaatgatgctggtcttgaccttttctcaaatgcttggtaaaaaagtaatcacattaccactcaaacattcttatacaaatgaagacttgactaattacaaataatatggaatccaagtgtacttacaagataacattaaatttttactttgttcatattcgtgtgcttaatattttcttaacttggaacttaagatatcgttactgtcgaatgctagaagaaggctctttccgaggtcggacagcagactttgtatttatgttcctttttggtggattcttaatgaccgtatccttcaacaaacaacacgggaaaatgttgaagaacaccctggctcttcctaaagcttgtcatctgtctcccacagttctctagatcttagcttcagggcactatcatttattttacagcacattttctgtgacaagtttccaaacctagcagtcggacaggatgagcaagtcaaaggaacttttaacccaggtgggttactgttaagcaactcagttatatcattactgcttggcgtacttcacttttaaactaagttggtaagacatttacttggtggctaccaaaaccaataaattattttttcagaaaaagaattttcatctatacaatagacttagatatggtacggtctgacaagatggttttgttccagctagctttattcatctctgtaaaggtgctaatcgtgagcaagctttaatataattattgactgaagaattaacacattttccaaagaggcaagaacttcacgaaagcagagtatttgtttgaagtagctgtaaatctcgataatttagcctaagcagatttttgcctgattgctctgggtaattattttctgggtgtttctccttctattctaaagatgtaacaacttgacttttccaattcaaacttctgttagaacacaatctttagttctcctgctcagtctttcctattaaacttttaatgttgatattttccttaatgccatctgctagctttttggtctgtttgtgagcttagttttcttgggccaggcctttacaataatgctcgtctatgtgtggagccgaaggaacccctatgtccgcatgaacttcttcggccttctcaacttccaggccccctttctgccctgggtgctcatgggattttccttgttgttggggaactcaatcattgtggaccttttgggtaaggctcttctcactattttttaaattattttacctgtaaaagtattttgttactatttttcatgtttattctgtttggccttcacgtattacctattgtaaaataccacaatattagttcattaatttttaataattatgttgacattcatcctaaatataggcaatttgtgttggtaggtctacctgcaatctaaattttaattctctccctcatcctttatttctgcttgactctaggtattgcagttggacacatatattttttcttggaagatgtatttcccaatcaacctggtggaataagaattctgaaaacaccatctatttt

SEQ ID NO: 85009 - DNA, 1027 bp, Homo sapiens
atcttccccaccgtcgcctgccccaccccccacccaccccatttccccttccgccagcaggccccggcggcggggcgggcccaaaggccccccgcccactttagttttcccgcgactgcccaatcaacgccaagcaaccgcaatccgtagagacctaaggaacgcacatccgccaatcacgagttgcgtcgccaccgcccccccccagcgccccatctccccaccctctcttctccaccagccaacgtccgggaaaaacgagtaagtacaggttccttctgccaatccccgccggccacagctaactttcccgcccggcccctttctgtcataattgaggtgtccacaaccagccaatcaggaacgcgagagtatcccgcgtttgctttcgctcgccgaggcgcgtatcagtcggaattttggggagccaaccgcgccgtctgtccctggcaagccagcggcggtttaaaggaggtggcgggaagcctgtgtgtgcttcaaatcgtcaccctcatggtcgctccggtaagtgctgcggggcagcattttctctgaggaggagcggggacgggcgagactggcataagcgtcttcgcgagggagcaaggcggcctgtgggtcggcctcaccccggcctccgacctgaagatcccagcatgcagcgcgggcgcggggcccgacggaagccgggagccggccggaagcagttcctgcgctctggcttctgggtcctgtcctgcgcgatcgcggggtcttagacagctcaactcgccgagatgacctgggcacctctgcgttgaatcggcaaatactgatcaagccgcatttattctgctctcaggaactctaagtctagcagagaagatgaggcggtagaagttcatcagtcagtgcccgaagagaggtcctaatgggaattcgaagaaaggagttaatcaaggaagtgtatttttttgttgttgtttgagatggcgcccacctgtaatcccagctacttgggaggctgagctaagaggatcacttgaac

SEQ ID NO: 85010 - DNA, 1046 bp, Homo sapiens
tcctgtcttcctaaccgagcagaagtggatattcagtgccactagtgggtctgctgctgaagcttgagcctccaacctgatcagtttggccagagcactggggaatgagtcacagagctggttccttatggcatcagcctgagcaggcgactcagagcctctgaatccagagcctccaggccctgatggaacccctccgagcagggcctctagggaagtggtgtttctcattatagaagctccaagcttgtactcccatccagctcagacccccatcagccttggtgagaccagctccctgactctttctctggaggtacaatgaggtcaaggccaaggactttggggcagctcagtgtttagaccttcagggccttaggccttaaaatgcaggtgataatcatatacactagcagggccagagctgggccctaacatccagggctgctcatctggggaatgagggaatgaatgtggctttccgctcaccaccttctccctgggcctcctggtctggccttcacattcttcctttaatctctcctcatcatggctttgacaatcgtgctgacatacggcctgaaaaattatcggaagtgtgccacttggagaatgtggtcagggaggaactctgcatatgccctgcctcctggtgtggatgtgagaagtggatggaagaatgggctggattcatttcatcagctatgaaatacagtgcacctgctggtagctgttaaggcccctccccttcacttcgcttcccttcctttgctgccggaagcccctggagatgtgagctcccttctagagagtggctcccttgacatgagggggtcgagagtattctgaggacaaggatgtgcagcaggctgtcttggcctctctcccatagcccgagtgcccagtggcagcatcaagttgggcaggtctgactttggttgggcactccactcacttgtccacctgtatccaactcactccgtggggtttcaacacctgtttaccttccagattctgggatgggcttgagacgacccttaagcttt

SEQ ID NO: 85011 - DNA, 1035 bp, Homo sapiens
tcagagagccttctgccttctcttctctgggtgctcagcctctgtttgcaggtgcacggctcaggcgctaccctggtcctttgattctggcctctggagtccaggaggcctgggaaggctacacaagcccctccctcccctgggccccatcctgtgtgaaagccaacgaccagcctgtgcagaagctccttccaacccaggctcacagttccagtgcacccctgggagtcagctgattgcatgcatatatcaagcatctgcaacatagtcctgcctgggctaggtacatttatatgtggtagtgtctcattgcaggctgggccatgcagtcattgagagtccaggctccgaacacagactcttcaaaaccttggctctcctgtttaccagctgtgtggcttgggaaaaactagctaatatgccttcttttgccagtttcctcatctgtgtaacagggatatgatatctctaggttgttggattggtttcagggttaagtgagataatatgtaaagtgtttagctgagtgcttgacacacaggaagggctgaggaagagcccctgctgctgttcctcctcccccttattgatattgctgtcatcactgactcctcattattcctcaaggggagagctgttgtccccattttacagatggggaagctgaggcccagcaaggttaagcaacctacccagtgtcacacagctggccagtaacaaagctgggatttaaacctggctttgtccagtgctcctgcaacacagctggtccttggataaagcaagcacagggtgaggggtgtcccagcctgggagtgccaggtagtggacccgcctattacatctcggtgctctttctccaccttccagatttctgcgccaggagatgaggggcggtagagccctggaatggagatgtccttgacgcctgggcagaggctgcagctgcaggaccctgtggccactggagataagtaatggtgccatttgaacacctactggaaacggggcaggaacagtgagtgaccccaggcg

SEQ ID NO: 85012 - DNA, 1033 bp, Homo sapiens
ccccgtttgaaagatcttccttaaatttgctaaaatcaaacttgccctaactgatttcttctctctggcccccaaggaggcaacgaccctgtctctcagggcatttgccaaggtagagaggcctctctgagcccagggagggcagggctagagaggaggggtagagtccatgagaggtaatccagccttcccaacttctgagttggggtagtggaagaaagcagtggtcaggccgacgcctggctcctggcagagccgtcagggtggacagtgggccattaaaaaagagaaaatgggcaggaaacaaacaagtgggaggtgtcagatgctcactttgctcagcactgagtgggagggaggtagcctgcagcactcatctcccgggtttctctgagagtggccttggccaggaaggcagaggttcccctggcttttcctaagggtgggcccatgattcctgggcctctggtattagccatgcttccctttctgcaggcacctacattggatgcttcagtgacgatggccacgagaggactctgaaaggagctgtgttttatgacttgagaaagatgactgtctcccactgccaggatgcgtgtgctgagcggtgagtgctggggccctggactgttgattctagaggcaggaaggtccagggacagttccagaatgaggaggcatatcagctaccagttggctgtcatagcataattggaactcactgctcagatcccagttttccagaagaaaggaagtttgttggcagatgacctgggtgccgggagctgggtgctgggtgatggcctgggtgctgagagctgggtgaccgcctgggtgctgggagttgggtgatgacctgggtgctgggagcttgggtgctggtgctgggtgcagggagatgcgacttccagtccagccatagcagggactcagcgtgtgactttgatgagttcttttccttctctgggcctcagtttacttatatattttacaataagataaagggctttaactgagatttctctgagag

SEQ ID NO: 85013 - DNA, 1055 bp, Homo sapiens
aaggaaccaaccaagtagggctgtgcttataagaacatgggctacttgagctgcttgaagctcacatcttgttgatctttgtctcccctggaattgggcacagagcacagtggtggaaggatggtggtcatccctgtggattccatacagatacagctggcaatacatcgtccatgttcatcccattcctgagccctgggaagcatgaccctcaaattcactcagtgtgcttctcttcttatcgttccctggcaggagttccccttggccattctcaggggctgggaatgctactgtgcttaccctaccccccggttcaacctgcgggatgccatggacagctcagtatgtggccaggaccctgaggcacagaggctggcagaatactgtgaggtctaccagacacctgtgcaaggtgggttctgcatccccgactggtagtggcatttggtctggggggtggggagagcttccagggtttggagatgccagtcatggccaagcatgcagttatgaggtatggcatgtgtctgtgtaaaggtcttggcatcttgatgggtgttggagataatggggagggtcagttttccaccctccacagaggctgaatcctggactcactttaaaaaacactggaccctttatctaagtctctctggagatgacaatggtaagaggatgaacagagaggggcaggtcctagagagatagcaacagaaaggtggtaggattgggaggcgtgggaagaatgagatcccaggagctgcaggggccactggtgcctccaggacctgggaaccctccttggtgtgagcatcaggtctgcccctgttgaccttaggaactgatgaaaggaagagccggggacgagggatgttaccacctttatcaagtgcctactgtgacccagcatggccctggatgttttggggctttcccctggtgatttcatgtgctccttgtagcagccctggggatgagacataacgaatgacttgcctgtcattagtccagctctggtttattgttggcagtacctgggtgtgttactttgc

SEQ ID NO: 85014 - DNA, 1039 bp, Homo sapiens
ggagcccaatcagtaaccttttggcaggagagggaggtgggttgtccctaggacacccagtttgagtgggttgtccctgggacacgcagtgcaaggcaaaccagctgcacctctccgtggagtagggatcccttcccagcccacccagagaggctcctttaagagcccctcctttccagcccacccagaccccctctcccaggctgtgtgaaaggtgtgggtcacaggacactcggagggacccttaggcctgaagagcctcaatgggccaaactgcaggacatcttgggagtcaaagactcacaccaatctcagctagggggacccctccaataacagaaggaagacggagcccagagagggcaagcaaccagctcaggggctcacagccagcccagctgagccagagcccaaggctgcagcctcccaagggagggcatgaggcagggctccgggaagaggaagccctggcctccagggccacagggaaatggtgaggacactgaggacaacgggggttggggacaatggacagctgcaggacagaccgtcagcaccagaccccacccccgagggctgtggacagagacggcgtaacatgagcccggggatgtgctctcactcccagaaagtggccatcttgccataagagcgccaaccccaaaatggtgacccaaaccacaggaagggcgggcacaaatgccactcacacctccacaagacagcccagaggctgtgcctgccagcggcgcttggtgccgaggctggggctgcccccttgagggcctgcctagctcgctgtgaagcctggggacgcaggagggtggtcgactttgcccaaacgcttcagccccgggcaagcctgcccccaggatgacacaaacatgaaccctgacttgggcttgcggtcgcaggcccgtgggaggcagcagtggctgcaccgagatccccggacctcaccccgtcgcagctcagggagccccccgggctcgggcaggatccctccccgctctggtcggacactgctggacagacacgg

SEQ ID NO: 85015 - DNA, 1015 bp, Homo sapiens
aaccctgaggctgaggctgctgttttcacggcaggagaggaaccatgaggcctcttgtgaggccagtgcaggggcccaacttagagaggaggcttggagtaggacagggggtggaggtgccacagagtggcaagatttgcattacggtgagagcgcttgtggctgtctgcgttgtaggagaaagacgggagcccagtacgtcctgtttcccacttgagtgactaaggtggttctgtgtcctgcacgtgcggaagagcagggctgggcagggggcggaggaaagtgagttttgtttgtaggttcttgggggtgggagagagtgtgctgggctgggggtgggtccccagcccggtggcacccaggccagggtgctccagcccaaacctgtgccccacgtggcacatccacgactgtctgggtgtgtgaagtgtgagctgcctcttagttgctgggacggaaggggagtagaggagtctggaacttagagaagacatcaggattccagataaaaatgtgggtgtcatcagagcttggacggcatttacaactggcgatgagtgccagactaagggtgctcctacagagagggaagttcagggatgagtcctggagctcccccagggagagaaggagaagccactgaaggagagaagaggacatccctgaggttggaggacccagagagtgtagggagaggacccctgagataggcggggtgggagtcaccggggcagtggcaagaatggcttccgtagaggagtgatggagaagaaccctgactggagtgggtggaggagagggggcaggtgaggaaggggtgacagcatatgggctaagtcctctgtcagtgctgctgtgagggacagcagggatgtggcggtcactggagaggcatgaggaatctgagagagtattttttaagatgggcagtattacacgtatttgaatgctaaggagagtgatctagcggagggagtctaatcagctctgcgggattgggaggggagcatggctg

SEQ ID NO: 85016 - DNA, 1003 bp, Homo sapiens
acccctccaagctctcagtgagtagggtgactcacctgagcaggggctgtgagaacagaaggttagccgactcctctgtcttcagagtcgcccacctgtgctaagcacctgcttgtctgaggcatcttggggctcagaggcccccaacaggctcccggacacactcctgtggccagggctggtgtaaacttgagctttcagagctgatggcgggtccagggatccgtgctccaatctattttttttatgagtgcccagcctggactctgaaggggtagggcagagagtgtgccatcctggtgggcttcatggaagaggtggcctttgattagggtccagagaggggaggtgcatttgggcaggtggagaagagctagaggatgagggttgagatcttccaggcagggagaacagcaggagcgagggcaggtgttttggcgaagagccagtggcctccagggtcaagtggggtgaaccgggcatggaccgagtgtatcgtcgatgggagacctgtaatggacagtcagcagcttggaaatcggagccttggctccacgccctacttgaggaaatttagcctaagcctgctcagaggtttgcgtcagggatgggggagttgtgcatggggccgattcaggattaaaaaccatcccttcctcacccctaattcaatggagcctttatttccaaatccctgcctgcctggagcttcaataggtcggctaggctggaaacctccctcccccatggatccctctttggtcaggggactcccctccctcccctgaggctatcctagctctcaggctggagtccccattcccttccagaggcagcctcaattctttgtggcgcaggggaggagttggataagagaggatatggctatgagtcactcctgggacctcagctggtgcttttggggcaacgtcccagaggctccctctgcagctttattggaggtaggggtgatggctgggactccagcttgtgtctgcataac

SEQ ID NO: 85017 - DNA, 1709 bp, Homo sapiens
gtctggggttgcaggtttggaaaggcctgggtttgacactcagcttctctcgtctagtagctgtgacattttggacaagttacttgatgtctctcagcctcagtttactcagttgtggaaagatgaccatactgtcgtgccaggtgcggtggctcatgcctgtagtcccagcactttggcagaccgaggcaggcagattgcctgagctcaggagttcgagaccagcctggggaacacggtgaagccgcatctctactaaaatacaaaaaattagctgggcatggtggcatgcgcctgtaatcccagctacttgggaggctgaggcaggaaaatcgcttgaacccaggaggtggaagttgcagtgagccgagattgtgccactgcactccagcctggcaacagagtgagactctgcctcagaaataaaataaaatataaataaataaataaataaataaataaaagaaaagatggccatatcatctacttcttagagttgctgagggcaccagagatgatatctgtgagatactaggatccgcacaggctggatagaaagttctgatggttgtcacttgttactggacggatgtgccttggaagctggaacacctggtccccatgtgatgatgaatcttatcaagtggggctcagtctttctggcgctctactggtcctgcggctgcctcagttgccattgtcacagcagtgtttccccaagagttggagtccccagagaggaggacatgagccagccagacagcacagggcctcttgggttgcaagtgtggggagggaggtctccatgggcctctcaggcatgcgcaggtatgaggttgcaagggcttgtctgcagtggctatgcggggaggggtgtcttggagactttctcctttgtggctgccaggcagccccagccttcattgtgcagttgggcaggcggcctggcagcctggcagcctgctgtcactggcgtgagcctgatatttgaaaccaaactagaggaagccaagggaaccattgtgtgtgggggcttggtgggggtccagagaagagagagggccttggacttgggggaggagacctgggtgacctactgccgagttgctgtgcagtctcagctcgtgcctggggccccatctgtctgttcatggagtccctcctggttctgacattctcggggtcttctgttgccacctctctgtcccctggcttcctctgtctgtgcctctttctgtttctgccttgttcatgctgctccgttagttagcacagtgaccatttccggagtgctcccactatacctgccatggtgctggctgtagggactcagggatcttgtatgtttccattgaacctcactctttctgtgcttccatccagtgtgaatggcaccatcctccatgaatccaagccagaaaccttctagacttctctgtctctgtcaccatccactatcaaatcagcctctgctagtgtcattcaacctccagcagtgctatgagacccacccactcctccctgtccccatcccttctctagttgaggccctatcttctctctcctggaccattgcatcctcctgtgcactggcgtccctgcctccctgcctcccggcctccctgccttcctgcttcccatctcacccactctgatcctcccttcagcgtgtcagagagacctttggaggaggaaaggctggttctcac

SEQ ID NO: 85018 - DNA, 1044 bp, Homo sapiens
agtatttctttctcttccagagacttttctaaccacacgttaccttgttcttcttattcttatttcttggtccttggtgggttctgagaatatgctttgactctaaccaacagctcacccattttctcttcatcagtctccattctgcaggtcagctcttctgtattttgttttgtttttagagattgggtctcattctcctgcctcagccttctgagtagttgggaccacaggcctgcactaccacacctgcctaattttttgtagagacagggtctcgctgtgttgtcttggttggtcttggactcctaggctcaagcgatcctccggcctcagcctctcaaagtgctaggattacatgcgtatgtcactgtgccaggcctggggtttgtttttttgtttgtttgttttttaaaatcatcttttcattttcatgtgctctgattgattcttttgattagcaatctgatcttaattcatggaagcatgggctcatgctacattttttaaagtctccttctgcttgttttagaacatttcagagttttctgtaggttagatatgggtgggaataactacacacttaagattggattattcagccaaagatcataggtgagattacaacacagagcaggagacatcttgatttgaatgatctaaggaggcacacagctgccattaacactattcaagtgaagcaggtcttgccaaattcttttttagaagttgagatataattcccataccataaaacccacctttttgtaaaatgtacaattcagtgtggttttagtatattcatgaagggatgcaactatcaccattatctagctcaataatattttttcttttctttctttctttttttttttttttttttgagatggagtctcactctgttgcccgggctggagtgcaatggtgcaacctcggctcactgcaacctctgccacccgggttcaagcgattctctgacctcagcctcccaagtagctgggattacaggtgcccgccaccaggtctggctaatttttgtatttt

SEQ ID NO: 85019 - DNA, 1068 bp, Homo sapiens
tccacccccacacttcctctctgcctgccccgctgaacttagtcatgcgtttcccttctggtcggcttggctccccagaatctcccacccacacatcgttcctctgtcttcactgtgggtcttggtgaggtcagcctaaggcctctcactcctggcctgcagagccctgcagaaggtcaccgtgcctgtgtcccggaagcccacagcacattcctgccacctgccacagggaggccctcagtgctccgagatagctctatccatgcctggcaagtcttgtggactggggagaattctagggagacttccggctctgaaatgccgcgatcacgaggggcaggagcattcagatcccagacatgtcggctctgccatctgccctgcagccccagtggtccctaagcctgagctgaatttgaccgaggaagccctcagcggacactgatttctcgagtgcatacaggaagcagggagtccagggagccgtggagatcaaactggccaccaaacttgtgcagccaccgtcctgtgtggccctaaagacctcccgggggagagtggcatctccagggccaggctcaataagagatttggcttttcttaaccataattagccaacacattgcttctggagagttactagaggtcaaaaaagttccctgaatgctttgaacaacagctcacgtattagctggcactttacaatttataaaatgcatttacatatattctttccttacatcactataaccactcctgttttgtataccaacagtagttcagctcattaagaattcgagccacaagttaaattcctgtgtgattttcatgccttggtttcctaataggtgaaatggggatgaaaaaatagcacccacccaaggtttttgtgaggattaagggaaatgcccatgaaaccacttagaataacgctgagcagacagtaagtgctcaataaatgttacctattagactccccactgagaacctcgtaagagggaacctttcagcttgtcgcgcaggcttggttccgaagtgtgtccctggcctccttccacccattgcact

SEQ ID NO: 85020 - DNA, 1267 bp, Homo sapiens
ctataaaggatctgaagaaactctctagtccctctcctacattttgagcttgagtaagagtacctttaacctaatgtttcttaaacagaatgtttatctcccctacttttcaaaatgcaagaaatgtgttatttttcctcttgtggccctacatcatttcacagcatgttttcttactatattactgttctctgaactaaatcttcctgaccgtgttcagttgtccttaatctgtcctgaccaggtggagactgggccctgacttcccagtaatggatgggtgggaacttattagaggaaatgcctttttttaggaaggtgagacacagaccctccactcttattgacctattaagtggtctttagttcaggaaaatgtatgttaaatacagtatgtgtgcccacttaaaagactgagtttatgagatttttgttgatgattaaaatgcttttgaagcagatgggataatattctgaagactatagttaatttctaaaatgatgatcctttaagatttgaatgcctttaaaagtagtcatattcattatgtctttgctattggctttagtgagctacacatctgaaagtactcacagaaattgttactaattaattagatatcctaaataataacatgttttaattaagattgtgttaactgttagagatagccatttaataacacatttccctggagtccttattttcagttttgtgattaaaagtcatacttttgcgagataaactaagagaataattgattgtttttgtggcaggctttggaatctctcctggaaaagaaactgtcaccaaaaaaggtgaaaaaatgtttcagtgaaattcggagcagatttcctatcggtagccaaaaggccttggagagatggccaagtacatcaccaaagggtgagaggaggcccctcacagcaaaggacacattcccacaggaaacaagtcgaccttctgtagcaaagcagcttcttgccggtatgtgtcttaaagtgtttattgtaagacattttattcattacaattatctgggctataacagttactgcactgaggggaaagtcaggatttaggacctagcccacaacagatgaactttaactaggatcagtaaatagcaaccaagatgtttcctggggctggaggcattctatagaggaaggttgagaaagtaacatttcctttgctacatcatagtgtttgggctacccaaggcaaattcccatagagctggaagttagaaccctactttaaaaa

SEQ ID NO: 85021 - DNA, 1081 bp, Homo sapiens
ccacttcctgctcggtgtaaggaactgggcagccttattcgccagctttcactttgttctgtcaagctggatgcagacccttctgttcctgatgtggttatagatattctgcaacaaattgaggtatggaattaattccaatttttgttagaggtgcattggaagtaatgcttactattacctagtttcgttaggatttatggagaatacaagacaaagccattacctagtgaattaaagctttgcagagggcagaagaaacacttctttttgttttgctatttttacagtgtagtctgtattatcgtatttcactgcttcgaaaattggtaacttgaatataaaacatgtaacaactttaaaccaggttcattaactaaacagaatgtcccattccctggcccatgccatttgagaaaaaaatttattagcatagaaaaggaaaccagtaaagcattcttagattagaatatcagtgtttaatttagatggattttggaaaagaagaaacacttaaaggtacagtatatggaatcagagcctcaaatcttgtgatatagctagagacgtctagaaatcacagctggcatgtattagacaggaattgatagtgttcttagttttcattggtgacaaagacacattaattttatagctctctgaagtttgcatggtgtttccatgtaattatgccatttgaccctttctatggcagtatgctttgcaatgggttttactgctgttgtacaggttaaatttttttagaaaagcaaacatcggagagatgacagttatttttcttgagagctaggcatcaaattctattttctgactcccatgctagtattagttcccctacgccatacattttcatccacaaatagaaaggtgatctttatgttagcatggcagagtaagctgttagctgtagaagaaaggtggatagtggagagaattctagactaaatgacactccagttctaccaccattaaccagctcttggtggtctttaaggccacttctgccttcacagtttcattatcaagcaaatgtgtttgtgattttcattggttacattcg

SEQ ID NO: 85022 - DNA, 1040 bp, Homo sapiens
cagtcagagtgagagggagcaatttgggagagagttatgtgggggaggctagattgaggggggcgttccagtagtgtgtgtagggaagaagttggggctgtgtgggagggaacaggttcggggtaggtttgtcatgggttgcggatgaaggcactggctgtaagggcatctcagcatgggggagagagggttttcgtggagatgccccagggtatgtagagggacaaattgggacgtttcctggagcagtgggaaagggccagattgcaaggagagtcccagaactttgtacagggggacagtttaggggtgggtgtccctggactttgtgcgtgtgtgtgtatgtgtgtgtgtagcatcacttgaggcatgctggaactgtggggatcacctagtttttttctagtggagaatggactatttggcccttggcacctagaagcagccaggagggaagtactgaccatttaaaagtggcagatctccgggccccatttctgcagccttcattctgcaactccagccacccacctgtgccaacgtcaagccagttgggattgccttgctcatgtgcctcctcccatctgcttttttcatgtgtgctacagccttagaaataaggactcttagacagctgtctttatgttcccaagaagtatctgtctttaagcaaatctagtctgcaaattttggatttattcaaaagcttaaattagggttttttttaaaaaaaccttgaatttcccaattgatttactgtaggattttttgagagaacaaattccccagagatttaaaactagtcagttcacagaaaatcagcttaactcaacaaatgctaaattgtgtactatgctcagagcactttgtaatgggaaatagaagagcaagacaaggcccttcccctcaagtcgccttgtctggctgggaagatgagacatgtacatgtgaaataggtaaataacagtatgagacaatactatacgtgatcagtacgtgagtggcagggatagtaaagtctataatgaggccttcagaat

SEQ ID NO: 85023 - DNA, 1053 bp, Homo sapiens
ggctcctagggtgcctggttctgtggagctggagcctggtgatggaggcttttcaggcttgtcagggaggcagcaaactgcaggaatgcctggcactgtggggctgtctgcagctagtggggtgcccgtggctcccagggtgcctaggcctgtgcaagaggaaactggctcagaattgtggggtgaaagagagacagtgggcggacctgcagatgccaagggtcccacaaggatggaggtgcccacctcgaccaggatgcctgggcccatggcggagaagactggctctgggggtgtctcaggtttgttgggaggcagacagactacaggagtgtccatggctgtggggctgctggggtctgtgggggaggggaccatctttgagcatgtctctggcctgtctggaagaaggcagactgctgggaggcctgtggctgctagaggttccatggccgtgggagtgcccacagctcccgggcttccagggccaatggtaggggatacgggctctggggatgacggctcaggcatatggggaaggagactggccactgaggggcccacagctgccagggttcctggacctgtggagggggagacaggctctgaaggtgtctcaggcctgtggagaaggagacacggtggagccattcccgaggccgggagggtgcctctgcctctgggggtgcttgcagctgtaggagctcccatggcagggcgtgcgcctgctgcggtgtgggtgactgggtcctcaggagcagaagcggacgtgggtgtctcaggtctgaccgtgctgaggagacagtccacagggggagtgggggcttcagaggatgagacaggaggtgggaatattttgggactggccgggggcagccaggctgtggggacatctcacacctgtgtgcctggggccaggttatggagctgtccaaggtctttgggggaagaaacagcctatgagaatgctctaggcatgtcagggacaagaacagctgtgggggtaccctcagtttcaagggaggaaataggccttggccatttcagagacca

SEQ ID NO: 85024 - DNA, 1251 bp, Homo sapiens
cgcctcgggatgtggggaaggaagtagagtcgagctccatcccgtgcctgcaggagagggacctgtcgaaaggggtgttcctggccgagcttcctgggtagagacaagccgcggcggtcttacagggccctgggtgaaggaacaggcaagggggatccctcgggccccctcagggcccacagctctgggcttaggggcagcttacgagagagccttaggcttctgtggacagggacaggctgggagggtgcctcctgcgagtgtgcctggggctttggcgtcaagttctgaaatggccccgcacctgtggaggggagaagctgtgggggttcctgagactggggaggagataggctatgggtttgtctcaggcccttgtgaaaaagaacagactatgggcgagcctgggaccgtggggtggactggggctgtgggagcgcccagagccatggagggagagctcggctgtggcggtgctgcaggtctgtgggggagaggacagtccccgcagattcctggggctctgacacatgaagcagtctgtggggccacccctggcgtatgggggaggggacaggctgtgggggtgtccgatgctgtggaggaggagcctacttctgtgggtgccgcaggtgtgtgttacaggagacaggctgtggaggagacagactctgtgggtatgcccggcccgtggggcacaggatactctgttggggtgccctgtgctgctgaagaggaaactagatgtggaggtgacccagggttcagggaaaggggacagcctgtgtgggtggagacaggctctgggggtgatccagggtcacggggagctgcgcagactgcagagtcatcatgtcctggggagcaggcagcaggttctgggggtgccccaggcctgtgggggatacaacaggctacaggggtacccagggccttggggaaggacacgggctgtgtgagtgtcccagggctgtggggagcgggacagatggtaagggtgccccaggctgtggtggtacctggagccctgggagaagagctgagccacagcgggggcctgggcctgtgggacggacagcaagctcttggggggcccccagccgaggcagtgcctgggcttggagaggagacctgtagtgggaatgttctgagcccgtgggaaaggaggcaggctgtgggggagccagagagtctggggcctccagctttaggggtccctgggtcagtggatcaggaggctggctgtggaga

SEQ ID NO: 85025 - DNA, 1095 bp, Homo sapiens
acgttggaaaccgctagaagggaatagcatggtttgtccctaaattttcactctgcttaccagttactgtgttgtgtggtcttgagcaagttaatttaatctttctgaacttaaaccttctcattttcgaaaatattgaacactgacctttgatgactaatcggggaaaaaaccctatgctaccagagtgtactaagttactgttatagaaatggtaggctacaagatcgtttttaagagaataactgaattataccttggcattatttacctaaattatgttgttcattcacttacaaacttaaacccaggtaccctcagtgtttacacatgttagagctgctccaatatgaacacttccgaaaggagctggtgaatgctcagtgtgcgaaatttattgatgaacagcagattctacattggcagcactattcccggaagcggatgcgccttcagcaagccttggcagagcagcaacagcaaaataacacatcgggaaaatgaaaaactggatacaaacgaggcacttaatacatgtatataatgtatttcttttgtacagtgaagacaaaaaaaatgaaaactcttcctatctacctttattatggtagcccctagaacctttagtgtgctttttcatccaactttttattgttaatagactatttctgttaaacctgaattgttctttgatttccctgtggatttgtaaggtgtttttcttttttacgcatttagcataatcagctgattaagaatggaaaagttaggtgctttagaccaaataaggcactggggcatggggtaggggtgggccaccaagtatactgaattctaaggctagctgttcctgacatatagtagggcaagaccatctcctggaaccttactgtctcagatcaactactctaccactctactctaagatgtagtgagagtagcggagtcactgacctctttaaatcataggacaggaactgcataaaggttcttgaattctgcaggacaggaaataactgtattacctgctttgcaaggtggctttaagaatcactgaatcactgtggcctcacttgacctagtcatggcaggaca

SEQ ID NO: 85026 - DNA, 1054 bp, Homo sapiens
aggattggtttgacctacagatttttttttttaatgcttttcagttcttgcccaaagaggttacttcaaagacaaagcttttgttaattatcttaaatacttgctttactggaaagacccagaatatgccaagtatctaaagtaagtttaatttttataatcctaagcatgtgtatactttattatataatagatttcttagtttcacattggcaaaaatgtatttggaatctctccacttctttttgttatcaccgtcttaatacaagacaccctcatctctaacttgtaacactgcagtaatctactccctggttatctgtgcttccacttttaccttcctgcccccatctccaccccaacccaaaccaagcaaaacagctttctacacagaaaccagcttaatcttttaaaaatataaatcagaacactttactttcttgcttagaacctttcaatggctttccattccatgcagaataaaatccagtcttttttcttggactaaagccttatacgatctggccctgccttttctgaccttgtcttttaccacccttcccatctcaccaggtttctggtccctaagaactcacaatctgtaaatgtagtagcataagccatgggctgaaattaaaagagggtatctgtaaggaaggtgtttctggggttatttgaaggaggtgatcttacctgagtcttagagttgctgtcttttatttaaggcctcttatttgccaggaacagtgctaaatgcttcatatgcattaactcatttatatatatatatttaccattcaggtcgttcagcagacactttcatgttaaggcttactaagttgcaagaaacatattataaccacaaagcaattcccttttaatggttaaaaaaaaaaaacaaaaaaaacaaaaaaaaccaacccaccttgaactcacacccctgctttgtcttaagcaggtagaaagcaataatgaacctttaaaaaaaaaaaaaagtttgagaggaaaatgtttcaaacttctctcaaagtcacttttctgtgtccaataacaa

SEQ ID NO: 85027 - DNA, 1088 bp, Homo sapiens
agtcttgagaggccctctttccgtagaattcagtaggagcatgttgctaggtaggaagtgagtacatggttttctggtcaagagcttcaacaatgcctccaattcccaacaggtagaccttctgcagggggtcccgtggattgggaggctagagtctgagccatgcacagagctcagtcctgacatcagacaccaaatcagtcatgctgcactctgggtctcagtttccttcatgaaggcgttagaccagagggtctctaagggctttccccagagtcacggatcctcttactccagctgaccctccctctgcttgggccagatggagcccccatcccaatctcccatgctgtctcatcttggagcctgttccaaggtcccactgcctgcttccctatgggggttcgctgaaggccatctcaggcctttcccctatctatatcttgcctctgacattttataaaaagggtccaccctgggcctttgagttctctcttcttagtgcttggatcagacatctgggcttgaggttagctgaacacacaatgttgaccaggattgccctcttaattttttttggcagggacttatggctccacaaagattctttgcattccaaaattaagtccctgggctccttagcctttgacctctgaatgagatgctcctgagggcaggacatatgtctcctcccctgttcatcatcagctgagagctttcttggagaaggactggggtctccccatctggcatctacctgggacaggtgaagtcttctctcctccccaccatctcttgcacataaacaaaacaactctttgatctgggttccaagcaggataccagctcactagcacaaagcccaatccttgagatgaacaaatcaggatgttcttgggtaagacctgtaatggcatgttcttgtctgtggaaacaaagtccaaatgctgtattgtctgattacaaactacagctggtggcctggtgaggtggctcatgcctgcaacaccttgggaggctgagacgggtggatcacgaggtcaggagttcaagaacagcctggctaagatgatgaaaccccgtctcta

SEQ ID NO: 85028 - DNA, 1026 bp, Homo sapiens
caccccagccagggacggaatgcctggtcttgagcaacctcccactgctggagtgcgagtgggaatcagagcctcctgaagcctctgggaactcctcctgtggccaccaccaaaggatgaggaatctgagttgccaacttcaggacgacacctggcttgccacccacagtgcaccacaggccaacctacgcccttcatcacttggttctgttttaatcgactggccccctgtcccacctctccagtgagcctccttcaactccttggtcccctgttgtctgggtcaacatttgccgagacgccttggctggcaccctctggggtcccccttttctcccaggcaggtcatcttttctgggagatgcttcccctgccatccccaaatagctaggatcacactccaagtatgggcagtgatggcgctctgggggccacagtgggctatctaggccctccctcacctgaggcccagagtggacacagctgttaatttccactggctatgccacttcagagtctttcatgccagcgtttgagctcctctgggtaaaatcttccctttgttgactggccttcacagccatggctggtgacaacagaggatcgttgagattgagcagcgcttggtgatctctcagcaaacaacccctgcccgtgggccaatctacttgaagttactcggacaaagaccccaaagtggggcaacaactccagagaggctgtgggaatcttcagaacccccctgtaagagacagacatgagagacaagcatcttctttcccccgcaagtccattttatttccttcttgtgctgctctggaagagaggcagtagcaaagagatgagctcctggatggcattttccagggcaggagaaagtatgagagcctcaggaaaccccatcaaggaccgagtatgtgtctggttccttgggtgggacgattcctgaccacactgtccagctcttgctctcattaaatgctctgtctcccgcggaaagctccactgtgctgctgacttgtctct

SEQ ID NO: 85029 - DNA, 1740 bp, Homo sapiens
tccatccatccatccatccatccatccatccatccatctatccatccatccatccaacattcctattatgtccctagtgttatgccaggcacagagattacagaggagattgagatacggtccctgttcgtggcagacttcacagactagggaggggcacatatatgaaagggcatttcaggaagtagcacacgagcaagggaaaaatgtgaggtatttagctgaggagaagtagaagatgaggctggtaaggctaccagaagccacttctctgagggccccaagatagaggggtgtggacttgatcgtgaatgcagtagacagccactgaaggactgaggccagggggtgagttggtcagatctgcacatgaggaaatcactctgatgtctggagtgggggcctgggctgggcagggcttggaggagaactagctgagactctgcagccttccatctcactcaggctcagaactttggactctgtggacattctctcctcctttggcccccagctcagcacagtctccagctttacttcggactcagactattcctgctcagccttcgttgctgacttctctgttctccctgaaacaggagtgtctgcccaggctctgtccttggcctctcctctttttacacttcattctctccctggacaatctcttctcagcccaaagccctaaatctaaaccttcaatttctggttgaaatcattctcctgagcttccaaaactgtggagcactgaagaggaggagatggatgtgagacatttgggtgacttggtgactgactgggtataaggaaggaggggaacagagaccggcagcatgactcccagcctgctgggctggatggctggtggatggtgagtccattcaccaaactgggaggcccagagagagaagcagattctgggctatggaggatgaatgcagggtggagcatgttgagtctgttgtgctcttgggacatctggatggacatttccagaaggcatatgggtatgtaaatccacatagtaggccagctggctggaaatacagatttaggagacagcagagtgaggacggggatgaaaatggtgggaatggatgaggtcacctatgaggtgtagagagagagggtcgggaggggaggatgggccaagcttgccctggccctgaaggaactgcaagctgggagcgctgagatgactgccctcctggtgcttcccaggcctcggggctgtccgtgtggatggggaagcagatggagcccttgcacgcagtgcccccggcagccatcaccttgatcttgtccttgctcgttgccgtgttcactgagtgcacaagcaacgtggccaccaccaccttgttcctgcccatctttgcctccatggtaagtaacctgacagtggggaggagcccttccatttcacaggaacacatggccatattgtgggtccctgacgaggcagcaatgtccaggccagactcagaccaggctttggagacccaggtctgactgtgacgtggatttgtggaccctggatgcctctgcccctgaggcctccactgctttgccactcctctttgtacccctcctgctgaccaaagcaccaaccatggaccaagtgctcaaatttattttataaatctaattggattatttttcaagctggggagacaggacttgggctaaggaggagcaggccagtgccgtggtctctgagcatgtagcacaggtgtgcaggag

SEQ ID NO: 85030 - DNA, 1033 bp, Homo sapiens
agacagaattctagagaacctggtcaagaagaggtcctgaaatacacttatggagaatgcacgctgagagggggaagtaaactgcttaggatcacccaaagttggtggtcaagagtgtgggcatcttgatttctagccaggattcagtctcccataccactcttatttttttatttttttgagacagagtctcacactgtcacccaggctggagtgcaatggcatgatctcaactcactgcaacctccacctcccagcaattctcctgcctcagcctgccgagtagctgggattacaggcgcccgccagcatgtctggctaattttttgtatttttagtagagacggggtttcactatgttggccaggctggtcttgaactcctgacctcgtgatccgcccgcctcagcctcccaaagtgctgggattacaagtgtgagccactgcacctggccaccactcttgaccttgacttttaaggctgtgagcctgtttctttgcatagaagcatttggacacagaactgccggagttgtgatgggtttgttgagtgactgtctctgtcgcagatgagctgtgcttttccccacctaggtatgtctccgatgccactgtggccatctttgtggccaccctgctattcattgtgccttcacagaagcccaagtttaacttccgcagccagactgaggaaggtaagtctcctgttctgatcgcccagtcatcaggactggagccctggaaccaaagggtcactatgggatgccttgggccctagagggagaaaatcccatcatatccaagaggattggctacaaaagcctgggaaacagtggctttcaagccaccggtggtattatttagtgcaaaatatcttttttgctttttaacatttgaatttaacatttgaaattttatttatattacaacaggaacagaaaatgtttcaaattttccataacactgatttccattcagcacaattttttgttttctctcttcctcccagtctttgctaatatgcctgtatatta

SEQ ID NO: 85031 - DNA, 1050 bp, Homo sapiens
ctggcaggggtggaaagatgtggccccatctagcctctgtgtcctggcacccctgtgcccacacagaagccttagagaggatagggagctgatgtcaggggagctaacgtcccagtctgctttctgctatgatgcaagacccaccacctcccctggggtcagggactctggctcagagagggagtgtggattgaactctgagctaaagtcatggcagatgacaatgtacttccagacgctgggtccttggttgaaacttgtagaaaatagacacctctaaaagactccccagcactccctttgctcactgcttttggtggctaatggtgatggccccatggcatccgaggtctacagatggtatgaagggctggggttgggtcattcactgcttcactgcttcgttatagtccccttgtgaggtatcaggtgaaccatgggatggtttggaactttctagccttggccacaaagggatgcaggccatgaggaccccaagagggagagaaacctgggccctgccgcggggtagtcatggtctgttgagggtggcaagatgcctggggcttccaggcatgtctggtacataaatgtactaattgaggtatgtactaattgcagtgggcaggcacaaaaataaggtgatgccatcctttgcagacaggagcctggacaggggtggggagggcagtgggcgcaggagctgggaggtggaaaggacaggtctggagcctggctgggcagaaacgtgaggttcaacaacccgtttgttttaatttcgggagtgttttctgtaatgatatccttacagttctccagtaactttctttgggaagagcagcccgtctgggctgagtggggaaagctctgcgcctgctttgacactcttgagctaaagggggcgcccctggggctagcagagccccggggatgggaggcggggcctgtggtggaagtgaccctcctccagcctccgctctgggaagcttttgagatttcctttgctaagtggggggaccgttctttgcagaaacccacagagcgagattg

SEQ ID NO: 85032 - DNA, 1088 bp, Homo sapiens
tctgtcatctgtgtgactttagccaagtgcctgtgctctctgggccttggtgttctcatctgtacaatggggctaggtggtttggttctgacactttaaggctttgggaatcaaaagggattaacgttagttcctaggatgggggagggggagactgggaggagcccttgggtgggcctagcacaggccctggatgggtcaaggacagcagatccaactgtggaggctgtgcagttgccacaccaactgtgggcagccacacttcctctgtagcaagaagtctggggttgttattgtccaggggaagtagccaggcaggagagctgcgatttcagctctgctggtagggagtgatgttccctggaatgattatagtagcttggctgaccttcctgccacaggagaccccactcacacacacacacatacacactctctctctcacacacacacactcacaaacacacacagacacacacacaaacacacagacacacacaaaacacacgcacaaacacaaacacacacaaaaacacacgcacaaacacacacccaaacacacaaacacagacacacaaacacacacacaaacacacacacaaaacacacaaaaaacacaaacacacacatacacatacacacacacacacacacacaccctgaactggaaaccctaactcagtgtgtgtgtatgtgtgtgtatgtgtgtgtgtgtaagagagagagagagagagattaagctgtcctttgagtgaggaccagggaggggaagaagagaacccagggagagtccttccaaaggctgccttcacgagctttccttctggcggggttgggtgaggaccctggaccttgtcttcttgttttttccctttctgcctgttttggtcaccctgcccccaccctccatggccgccccattgtgcaaggaaacccagagggtacacagcacgggcagggcagctgggaagctggtgagaagctgggaggaccttggcagcctgagcaacacagtccttgccaggaggtgactcccagggcacgccaccctctgccaacacccaggcctctctcctcaccgactgtct

SEQ ID NO: 85033 - DNA, 1316 bp, Homo sapiens
tccattccgctgtgttgattgaggacgttcccttcacggagaaagattttgagtaagtattcgggtgggggaggcgggctgggagcaggtgggaggtggcgaggcctagggtcagaattacgtctgggaggcccggtgcttagggcccctaggttagaggacttggagaggagagcggctttcttgagaatgtggttaggagccagggagtcagacctcagcggccatcccaaacccaccaccttaggtgtgacctctttaggtattttacttttctgtgcttctcagtccacctctgcaaaatggctatgacagatctcaccccataggatggtcaagaagattgaataaagtaatacacgtaacagcgcctaaacaggtgtcgggcacatagtgctcagaaaatgttggctcctattaaagtttgacccctttgcttcattcccacccccaggaatggcccccagaacatatacaacctttacgagcaagtcagctacaactgtttcatcgctgcaggcctttacctcctcctcggaggcttctctttctgccaagttcggctcaataagcgcaaggaatacatggtgcgctagggccccggcgcgtttccccgctccagcccctcctctatttaaagactccctgcaccgtgtcacccaggtcgcgtcccacccttgccggcgccctctgcgggactgggtttcccgggcgagagactgaatcccttctcccatctctggcatccggcccccgtggagagggctgaggctggggggctgttccgtttctccacccttcgctgtgtcccgtatctcaataaagagaatctgctctcttcagccctgtgtctgtgcttgagtgggggcgagcacggggctgagactagaggtcggcctctgcctggaaagtcccgatgtctgagcggaagtggagcgaagtgtggcgcggaagtgaggcgaaggctttccccatcgactgggcgcgccgagcggtctaagcgactgcgtctgatggggcggggagccgccgggttgagcctatccgctgcggggagggcgggacttcctgcgcgggggcccgagccgctcagtctccctgctctccgtggtcccggctcgcgtgtagcggcggcggcggcgtctccgtgaggaggcgcgcggggccatgacgtcagcgtccacaaaggttcgacctccctcgcggacagcgctccctggcggccacgggagggcgggccccccacttggctcgcggctcttccgccccgggcggggggcgggcgggagccgagcctggggtggggctaggggctc

SEQ ID NO: 85034 - DNA, 1051 bp, Homo sapiens
atttattttgagatggagtcttgctctgtggcccaggctggagtgcagtggcatgatcttggctcactgcaacctccacctcccgggttcaagtgattctcctgcctcagtctcctgagtttctgggattacaggctcccaccacaacgcccagttaattttggtatttttagtagagacgaggtctcaccatgttggccacgctggtctcgaactcctgacctcaagtgatccaccagccttggcctcccaaagttctgggattacaggcgtgagccaccgtgcctggcccagttccaatcttgactttattacttaactcgatcaagatgctgaatctctcagttggtttccccatctgtaaactggggataatagtacctactattaagcgttgcccaaggggttcagttagaaaatccatgcactaaaaatgcttagtttatgtgctgacatgcagcaggagccaagtaatattagcttagctggtcttattggtgttattttcaacaggggataagctgctgtagtgggaagtgaaggaaggttttagtttagtgtttttttttttgttttttgttttttgttttgagatggagttttgctcttgtctcccaggctggagtgcaatggcatgatctcggctcactgcgacctccacctcctgggttcaagtgattctcctgcctcagtctcccgaataggtgggactacaggtgtttgccactatgcctggctaaattttttgtatttttagtagagacagggtttcaccattttggtcaggctggtctcgaactcctgacctcaggtgatctgcctgcctgggcctcccaaagtgctgggattataggcgtgagccaccatgccctgcctagtttttgttttttgattaaaaaaaaaaaaaatctaatccaggtcatgggtttaaaaagattgagaaacgaccactgcgatggtttgaatgttacctccaaaaactcatattgaaacttaatccccaacttggcggtactgagaggtggaaactttaaaaggtgattggatggga

SEQ ID NO: 85035 - DNA, 1327 bp, Homo sapiens
ggaggacagaaggaggccactggagtggagtagggtgggggacagagagaaataggtgtgtcagagaagtcagagaggcgtggcacacaggacttcccgtggatttttcagagtggtgtagaagctgctggagggctgtggagggaaccgtgagccagttactctgggtgtgaaggggaatacacagcagggggcaatggagagccagctaggctgttgctggcgttaggatgagggacgatggtggagtcactgtcactctggggagagcttaacctctctaagcctcagtatacctagctgtaaaatggaaataactacctaccttggtggatacttgggaggaataaactggaaagtacacgtaaagccctcagcacagtgcctgacgcatggtagaaaatggtagcaattattgtcattggcctcttggtctattttcagatatgcataagcccaaaagttaaagcctggaatcatttggagttttaacaagttttaccctcaaaaagtaggaaagaggcaggcctggcatggtggctcacgcctgtaatcccagcactttgggaggctgaggtgggcagatcacgaggtcaggagttcaagaccagcctggccaacatggtgaaaccctgtctctactaaaaaaacaaacaaacaaaaaaagctgggggtggtggcgggcgcctgtaatcccagctactggggaggctgaggcaggagaatcccttgaacccgggaggcggagtttacagtcagctgagattgcgccactgcactccagcttgggcgacagggcaagactctgtctcaaaaaaaaagtaggaaagaggtatagagagggtcctgggtcagagaatcctggctgtcccaaggttgaaaaggtgtgcctggggtggacagagtggcattgaggaggagagagctggggggagagagaccctactggagacagggagcttgggcccccattcctgcaggccggcttcttgtcaactgcagagatgggatattgaagcccttggggtgggttgtgtcagctcagatttaaacttgtgtgcagaggcccgtctgctcctttcagcactggtggtccccctcttcccttgccctggcgcacagccctccagcccgaaaggttggaggatagccttccttttcctcaacctcccctgcttcatctcaacccaattcctgctcagcctcttctagatatgggaccataggccgccctctttgggaagttcgtgaagagcctctgctttgcccctcctgcctgtttgttcaggtgcctcttttcagatctgcgggtattagactccctgca

SEQ ID NO: 85036 - DNA, 1893 bp, Homo sapiens
ccagaatgaactgccagtttacaggagatacaggggcagaggcataggctaaacaaaccacaggagggtaagcagtaatttccctgttagaatttccctcataggctggtcaaggtggctcatgcctgtaatcccagcactttgggaggcataagcgggtggatcatttgagttcagaagttccagaccagcctggacaacatggtgaaacactgtctctactaaaaatacaaaaattagctgggcatggtggcgcgcgcctgtaatcccagctacttgggaggctgaggcatgagaatcacttgaacctgggaggcagaggctgcagtgagccaagatcacggcactgcactccagcctgagactccttctcaaaaaaaccccaaaaaaacaaaagaatttccctcatagaatgtgggaaattcttttagacaaatgacctagttttttcaacgaatggatggcagagaggtggggggaaaaaagagggagaagaattttatggattaagagattcgagtgacacaggaacccagagaaaacccccaaagcgtaatattaatgctccctttgacttccccatccctggcatactgaggacatataacgttcaaatcctttatcccctaggacaaccagcctctgatgtcacctataaattcctgacccctgatgtcactgtgatctgatatccccttaccaccccaccctggcatctctggcagaatatcttcccttccacctaactttggctcttctggcaccctggggagaaggttgggtggcgggtgctgtttccctccaggcactttcatctctgccctgtcttcctcagcttattcccagcacctggacaatgagatcagtcacagcagctacctgggcaccgactaccccacagccatgacccccacttcccctcggcgctactctccagtggccaaggacctgctcggggaggaagacattccccgagaaccgaggcgaattgtgatccaccggggctccacgggcctgggcttcaacatcgtgggtggcgaggacggtgaaggcatcttcatctcctttatcctggccgggggccctgcagacctcagtggggagctgcggaagggggaccagatcctgtcggtgagggaaggcctgcccctacctgcaccaccccctccccacagggcagagcgcagagctcttggggaggggcctggatgggctgcagccgagtcctcttgcgggaccactccctgctccacctggacccagaagtgctgcctcctgtctctggtgacacagcctgtcgtcctctctctaggtcaacggtgtggacctccgaaatgccagccatgagcaggctgccattgccctgaagaatgcgggtcagacggtcacgatcatcgctcagtataaaccagaaggtaccaggccggaagttccttgtcttgtgagctgaaatggcccttagaactcttcctcagctgatggcttcagtaggggaggacaggggtgacagtaggatggggacagagctcagaaacctccctgtccttcctcagagtacagccgattcgaggccaagatccacgaccttcgggaacagctcatgaacagcagcctgggctcagggactgcgtccctgcggagcaaccccaaaaggggtttctacatcaggtcagaggcttcccgggctggactcctcagcccctctgcgttcctgggcactctgtgcctggcccgggcctcagccgctcctcttctccaccctgcctgctctagctccccaccccaggcctgaggcgcagccagggttcatgggcttggctgcacaggttaacatttgaaatactccctgtcgatgggaaaatagcctctgccccaagtatcccaattgccttc

SEQ ID NO: 85037 - DNA, 1048 bp, Homo sapiens
ctcaaagaggcaggctccatcgttcgcctctatgtcatgcgccggaagcccccggctgagaaggtcatggagatcaagctcatcaaggggcctaaaggtagtaactcattttgttcccacccccatcccaactgtcctgtgcccccaagcctgcttcctgggcacccacctctggcctcccctccatccaggtcttggcttcagcatcgcagggggcgtagggaaccagcacatcccaggagataatagcatctatgtaacaaagatcatcgaagggggtgctgcccacaaggatgggaggttgcagattggagacaagatcctggcggtgaggactccatctagcccattttctagcccagatttgggtctcacctactagccctggcaggcccaagttcatcacttcaccccagtgcttctgtcttgggccatttgtggctttgtctgagctttgctttccttgactccaggtcaacagtgtggggctagaggacgtcatgcatgaagatgctgtggcagccctgaagaacacgtatgatgttgtctacctaaaggtggccaagcccagcaatgcctacctgagtgacagctatgctcccccagacatcacaacctgtgagagcccttcaaacaccaaagttccccatgacccatcccgtttaacccatgacatgcagtcccacgacatccctgtagctgtccctcttcagatattccctatgaaatagccacaacctctgatccttgctgttgttggagaagagatggaaaatcaattaccataaaagaactagaaaagatcgtcaacgatctctctcctggaaggcacaaagcctggttggttttatggctaattttgtgaaattctcaaggaatagataattcttctgctcttccagagtacaggaaaagataaaagatttcacatttcattttataaggccagttcgaatggtcacaaggatagtgtaaaataaggagagtatagacccgttttgcttctgaatagagatacaagagtttacaataatatagtagcaaagca

SEQ ID NO: 85038 - DNA, 1126 bp, Homo sapiens
aacgtggggcggggcccagggcaggagaggcggggctagcggatcccttctgcgctcaggagtttggtcggccccaggccacgccccacccccctgttgtcctgacgacagggcctcctggaggtgggtctccccgggtcttgactggtcctagataccgttgctaggcaacacggtccttagaggaaggggtggattggacggctggttggtgagaccgagggaggggcctgcagctggggaaccccggattcccggggtgcagggtttagggcaaatgtctgtgaaagtgaggggcaagtctaggggagggttatgaaaatatctgggtagatatggggggttggggggatggggcaggaaatggggaccaggacccggtggacatgatccctggggtgtccatgtgtagcacataaggcatgtaacaccctgtggtgttacatccggtgagaagctcccttcccccaagcctacccccctctccccactctttgccatctgctgctcccctctccgtctggctgtctcccttcccgcttctcctacacctccttccacatgcagggggccccgggctgggcagagttagatccttgcgcgtgtgcatctgtgcgtgtgtgtgcgcgtgcgcatgtgcacgcgtgtgcgtgtgtgtgatgtggattgaggctgggcccttgagcagctctcagggtggcggagtgggcttggctaagaggctgaaagggtagccacgctgatgggaccctccgttatgggctccctctcgagtcaaggctcaggctgctttttgtctcttgttttcccaaacaggccaattctcccccagtgattgtcaacacagataccctagaagccccaggatatgtgagttgtttagattttggggctggggccattgcagaaggaaggagggagtaagggagggcagcagatgacgggcaggtggtcagacaggaatgtctgtctcactgcttttgtgtttctgtcccgtgctggagttgcaggtgaacgggaccgagggggagatggaatacgaggaaatcacattggaaagggtgagcaggctcctccatcggcagtccccgtggcctcccgtctgtacctttctttctgccatgtg

SEQ ID NO: 85039 - DNA, 1040 bp, Homo sapiens
gtgggatgctctgggaagggggaggttgctgacatttcaccaagaagatggggaggaggtctctgagcctagggagcgggcaagcaggttctggagttagaactggcaagagaggagttgggggataggaagggtaagaggtcctgggtcaggggccagatagggataagactgtgagatcagggcagtgaatgaggctgacagagcaaggaaaggaaggccctggagacagggatggtacagagtgtttgtgcgaattctgtggatgctaggagtgagggaaagaagactagagatgctttgtgcaaggcagggccattaaatccctgagcagggggaagaggaggtagggagcctgaggggtggtagttagtacagagctgctgctgatcagagctcaggagcagaagggggtggagggagagagtgttggaggccataagcatggggtggaggtctcaggacaaggcctcacctggggaacaggagaagccccaattttcagaagagaggggagttgattgagaagtgtaagattgttacttgagaataatcttgagggtatgaaggtagggtaagggagaatggtgataaactctctggggaatcagaaattgagatggagtagctgggtggggtggcatgtgcctgtagctactcaggaggctgaggtgggaggactgcttgagcccaggagttcaaggccgcagtgagctatgatcacaccactgcactccagcctgggtgacacagcgagaccttgtctctggaaaaaaagaaattgggatggaggatgaggccacattggtaagggatggggctggagggtgcgacagggccagggaagcggatggagaatggaggctggggttggaagatggatgttgaagggcgagacagggatggagatggagcatgtgggatgcgggcagagatagggatgggaagcaaatgaatgtcgtagtggatgaaggtgggtgtgctgggaaggaggttccaggatagggatggggatggggattgaggatgggctatgggat

SEQ ID NO: 85040 - DNA, 1074 bp, Homo sapiens
ggttcggatggaggctgcatctgacccgcttgagggctcggttagacagaaagcggccacagtctcccctgttggggagagagctactttaccccaagttctgatgagcttcaaagtcccctcggcccacttccccatccctccagcaggcagttcccccttaacacctgggagtatccagttcttttgcatgtcccaaccagcacactgtgatgcctccccaaaaccttcccccaactgaaatgctcagccatctgataatctaagtgccaactggcctaatctgtgccaagcccagtgtgccccccaatccctggctctcctagggttgcctcaccagatgccagcttggggaggtatttttctttctgggcctttgtgccaaagagcaggatgcctttgaaaccgatgctctgatgggcccccagggtaatgcccacgccaaggtcatgcatgcccacgatctccaccaaacgggcgtactggaggggaagcaggaatctggggttgtcactggctgcagggggacctgaccttaacaggagagtgtgggcaacagggcagttcctgacctagggcagttcctgacctagggcagtgcctgacctgggccatccccagtgtgtagaaaagaagtggggtgtgcaaagggcacagcagagaatgctggtctgtcttaggtctaggtaggagggtgacttgctactagtcagtctattgttaggcaatccccaacttagagatttgtaaggacttgggaaccagggtgaggcccatggctcaggcctaggggactgcatgtaaattgtgttatgtttggacagttaacatccatcccacaggcacccagggcaggtgcttagaagagaccttagccctagtctctaggtctatggcaaaagagctgagtctgccaagctggggtatggcatactgggatgtggcgatagggcgccctcacctgggtgttgcaaaggcccacaccacccagctcactgggcacttgcagaccaaaggcccccagctccttgaggccctgccaagtggtctcctccaccatctccagagcgtcat

SEQ ID NO: 85041 - DNA, 1093 bp, Homo sapiens
ggggcttgggaggccctcacctcagttacatactgcagcataaccatccgtgccagcttctcctggatcagcccaaagttgtgaattttctccccaaactgggtacgattagtggcatgatctacctggaagagggtccacacatcccgctgtggttcagtgtggttctgcagtctccctaggagaggggctgggcttgcgccagagggatgggttttgcatacaaccagagttcagtctacgctggatggagacctaagctagcaagtcgggctgctggtaggggaggagtttctagtgtagggagtgcctgcaagtgatcagggacacatggcaagggggacagtgagacttctgtttgggttacctagggactcgggcagggtactcaccgccttagcaatgatgcctctcatggtacctgccagggccgcagccatgccaaaccttccattgttgaggatgtgcatggcaaccttgaagccactcccaacctcacccagcacgttctccgatggcacccgtactccatcaaagaacacctctgctgtgtttgaagccttgatgcccatcttcttctcagggggcccactgtgtcagggcagtgtgggaaagcagaggtgtgttcaacaggttgtcactgggggaaaaactgctccttcgctccttatgcaccagggaggaatgacgaccactagactattagaggctacagccaccacttcccctcaggccctgagggctaaggaggcctggctatgtcctattttgtgttggacttggttgctggagccaaaactttagctcagttgcatacatattagtcccaaaggccacattcagtccacctgctttggcttttgcacacgtccccagggtgacttgcaacagccatctgcccaggagcccagtcctgcccctcagtcctaagctcccccaacccaaattcactcactgggtaatgcccccgaagcccctctccaccacaaaagctgtgatcttctccttcacggctcctgtggctggatctgtaactggtgtcttggcaaagaccgtgaagatgtctgctaggcccccattactgtggaagaat

SEQ ID NO: 85042 - DNA, 3495 bp, Homo sapiens
tgccaggacaccggcagcaccccagggttgaccctgggttattgaagggcactctggctccttttcccaccacagacgtcatccttcagcagcgtcacagattccacaatgtctctcaatatcatcacagtcacgctaaacatgggtatggggagagcctgtggctagggcgtggggagggcctggtctctagggttccgggcgtcctgtggcaggggctcctcttttcacatggcctctctccacagagaagtacaacttcctgggtatctccattgttggccagagcaatgagcggggagacggaggcatctacattggctccatcatgaagggtggggctgtggcggccgacgggcgcattgagccaggggacatgcttttgcaggtgtgctggggtagggccactgagctgccctgcacgggggccctcagcctctcccaccgtgtctctgacccacttgccgtcgcttccaggtgaatgacatgaactttgagaacatgagcaacgatgacgctgtgcgggtgctgagggacattgtgcacaagcctgggtgagttgccaagcaggttgccggtcctcagtcctctttttttttctctttcatgttttgttttggaattttaataagtactaagacagccgggcgtggtggctcgagcctgtaaacccagcactttgggaggcccagatgggtggatcacctgaggtgaggagttcgagaccagcctgaccaatgtggtgaaaccgtgtctctactaaaaatagaaaaattaagtgggcatggtggcacatgcctgtagtcccagctagtgaggtggctgagacaggagaatcacttgaaccctggggggtggaggttgcagtgaaacgagatcacgccactgcactccagcctgggcgacagagcaagactccgtctcaaaaaaaaaaaaaagtgctaagacataacgttcaaagtacatgaaacaaatgcatgacatagcaaataatactagagtaaatatccatgtcactgccatctagatcatcaaataggagattgctgataccctagaacttcctcctcagatgtcccttcctgctcccaaatgcctcactgccccaggggtagtcactctcctgacttctttggccatcaccataacaaagaaaagctttgcctcactggatagttaccacccttgcacgtatccttgaacactgcagtttcgttttacctgtttttggactttctgtgaatggaactgtacagcgtgtactctcttgtctcacttggcagtatgtttttaagagttttccatgttgatgagtcatccacattgtggtgccttccaccctcaccttctctagcccagccgcgatgtgcttgcttctccccctctttgtgtctcttaatccatccttgcttcagacccccgccctcctgaggcctcctcttcccctgcgcccttgactggacttctcttccccatagccccattgtgctgactgtggccaagtgctgggatccctctcctcaggcctatttcactctcccccgaagtgagtgacactcagggaggggcctgaagttgggggtgggggctgcccaggaggctggggccgggcctgtggtcatggggaatgggtgggaggagggtccaggcagaggtggaacaggaggctgagtcagggagggactgggctggcttttggggactgagaatgggtcattttggtgccatctttgtcccagatgagcccatccagccaattgaccctgctgcctgggtgtcccattccgcggctctgactggcaccttcccagcctatccaggttcctcctccatgagcaccattacatctggatcgtctttgcctgatggtgagccgccagcccacctcatcccaccctcccagcagaaggctgtcccgcagtggtctgatccattgcccttgtgggagcgatccctgactctggttacccgttgtctcctctgccaggctgtgaaggccggggtctctccgtccatacggacatggcatcggtgaccaaggccatggcagctccagagtctggactggaagtccgggaccgcatgtggctcaagatcaccatccctaatgcctttctgggtatggctgggtcctgggcaggtggctggagaaggggaggaggtggtgaccaaagccaggaatggcacaggcagaggcgagagcaggagttggaagaagaacctgaggcctttttccactgtgggtgctcccaggctcggatgtggttgactggctctaccatcacgtggagggctttcctgagcggcgggaggcccgcaagtatgccagcgggctgctcaaagcaggcctgatccgacacaccgtcaacaagatcaccttctctgagcagtgctattacgtcttcggagacctcagtggtggctgtgagagctgtaagtccccctgccccaactctgggagtgtggctttgcctaccttgttctgcctctccaaccctagacctagcccagaaaccgcagccagggccaccatggatggtcgagcagtgtgtgtcccgcactaggtcctgcactggccgaggatgggggctgacgtccacccatgtgctgctggacaagccatgtgccaggtgcaggactgtgtccaccgggggaaggtgcacctcttacctgagtcccgcaaagacgtgggctagtggctgtgcccctgccctcatggcagaagtagatgggagtttcttgtcagagacccttgtgaacccctgttttgagccccatcgtgggtgggtctgggagaactgttcccagttcctctccattcggtgtcttggggccctagcctcttgaagcagtgatttcttcctctcttcccttgctttccagacctagtcaacctgtctctcaatgacaacgatggctccagtggggcttcagaccaggataccctggctcctctgcctggggccaccccctggcccctgctgcccactttctcctaccaataccctgccccacacccctacagcccgcagcctccaccctaccatgagctttcatcttacacctatggtgggggcagtgccagcagccagcatagtgagggtaagtcatccccacatacctgtacggccaggatctgagggtggatgagaggggagccagggaggagcctgggtgaggactcagttgcccctcccctccctccacaggcagccggagcagtgggtcgacacggagtgatgggggggcagggcgcacggggaggcccgaggagcgggcccccgagtccaagtccggcagtggcagtgagtctgagccctccagccgagggggcagccttcggcggggtggggaagcaagtgggactagcgatgggggccctcctccatccagaggctcaactgggggtgcccctaatctccgagcccacccagggctccatccctatggaccgccccctggcatggccctcccctacaaccccatgatggtggt

SEQ ID NO: 85043 - DNA, 1035 bp, Homo sapiens
aaaactaaaggaaagtataagagtagaggctttgatgaggaccaaagccttttttggaaggttttttttttttttttttttgagccgcccaggctggaatgcagtggcgcgatctcgacttactgcaaccactgtctcccgggttcaagcgactctcccatctcagcctcctgagtagctgggattatagacacccaccatcatgcccggctaatttttgtattttagtagagatggggtttcaccatgctggccaggctggtcttgaactcctgacctcaggtgatccgcccgcctcagcctcccaaagtgctgggattacaggtgtgagccaccgtgcctgacctttttggaaggtttgtaaggaacaggggtggggttgagaggaggccaccagccagtctcattagataggtatctcaggcagccgcatcagcgtgcgggattgcttttgaaactggactaagaggtttgagtcagactcaaggaagtctttggagcagcactgtgcccctgagggtgcgttagggagaggagaaataaggaaaggggattgagtttggagatttcttaggtgtcggagtgagttctttcaatgtaagagaagacctgaacagggcaggagaaagtcaacatcctggagccaggtgaagattgggagaaagtttgatgggggtcggggtggggatggttggtccagctcactgacctctaccttgtcgcttggcagggtggtgaaggaagaaatttcagatgacaacgcccgcctcccctgcttcaacggaagggtggtatcctgggtaagaggttctgacaccgaggaccaggccccctcagcattgccaagctccctcaagcctcagtctgtttctgtatcctccccaggccgcgcgttagcagccctggctctttacctcctgtctgtttggagagccggcgagaggccctcagccttctccttctggagtctctaatacttgctaggtttttttgctcttctccagctctctgagaccctttctcattctttcactt

SEQ ID NO: 85044 - DNA, 2021 bp, Homo sapiens
atggtaacaaatgaggctatacagaaaaagagctaaggacataacggctccggtctgggtgatacagtgttccacaggccctgggcaggggcagcggtgaggtgtcagacttgagggtagaggtaacacggactggtcaagaggacatgctgatgggaattggggtggggagaagtttttggagtacagtgggatttagtggttgaggtaggacattttggggtaaatccagtcactccttttcaagctgggtttgtggaggggctgagatgacactggggttctgctgaccctggtctcttcccccttttaaggaaagtgactggccagcctctggctccagctctccattgcgaggagagagtgcggccgacagtgatggctgggactcggccccctcagatcttcgaaccatccagacttttgttaagaaagcaaagtcatccaagagaagggcagctcaagcaggtcccacccagccaggacccccaaggtccactttctctcgtctgcaggcccccgacagtgctaccttgcttgagaagatgaagctcaaggactctctctttgatctggatgggcccaaagtggcatctcctttgtcccccacatccctgacacatacctcccggccccctgctgctcttacccccgtgcccctttcccagggggacctctcccatcctcctcgaaagaaggaccgaaagaaccgaaagttggggccaggagctggggctggctttggggtgcttcggaggcctcggccaactcctggggatggggaaaagagatctcgaatcaagaagagcaagaagcggaagttaaaaaaggcagaacggggggatagactcccacctcctgggcctccccaggcaccccccagtgatacagactctgaagaggaggaggaagaggaggaagaggaagaagaagaagagatggcaacagtggtagggggtgaagccccagtccctgtgctgccaacaccccctgaggctcctaggccccctgccacagtgcaccctgaaggagtccctcctgctgacagtgaaagcaaggaggtgggcagcactgaaacaagccaagatggagatgccagctccagtgaaggcgagatgcgggtcatggacgaggacatcatggtagaatcaggtgagaggttcgggctggggcgaggggtttgagggtgttgtggatccaacagctcaggcagaataccaaacaaacctttttttccccaggtgatgactcatgggatctgatcacatgttactgtcgaaagccctttgcagggcggcccatgattgagtgcagcctgtgtgggacgtggatccacctctcctgtgctaagattaagaagaccaacgtccccgacttcttttattgccagaaatgcaaggaactgaggccagaggcccggcggttaggggggcctcccaaatctggagagccctgatggcaccaactttagcctggaacttccaaatgacaacatgatttgggaactgagcctcagggtcctcagcctatcccctggagcttggatactgtctgcacttcaaggcaggaattctcaagggagacttgtttgaaaatgagtgtctcactttcccaccctatccttcctccccactctgtggacttgaaattgaatccattacggttggggatgggaggctgtctgtgtcccgacacataatctctgtctcttggacctgccaccatcactttctgggtcaggattggaattgggatggaatgggacagttgtctataaaactctagtgtaaatattagcactcccctccctcatcttttcttctatttcactccccatttattttcttctacaccggttgtatttttaattttggacttcccctattgggcatggcagctcaaaggtggagtactagagcctggccaagtgaggaaggaaagcagaaaggtgacgattctcactcacctcttttgtttttaataatatcggccgctgtttgtacagacagcctgcgtgttgt

SEQ ID NO: 85045 - DNA, 1027 bp, Homo sapiens
ctgtgtgtgtctggggtgggggtgaggggcgcgccgggccgcgtgctcgagtagaaggggccggagggcggggagcggttcggcgtggtcatcctggaccctgggggctggcgggcggcgtgtgcggtctcggagggcccgaggcggtggagcgcggccgggtaggaactcggggctccgggcgcgtgtgaaggacgggggcggctggcggcggcccggacgcggccccgggagcggtacggtggggtggggcgctgagggatccgagtagactggagtcgagagagaccgtgagttgggggggcggggcgccgggcctccggttgggggaaggggagcgctatagcgaggcctcagagggcgccgcgcccaggctccgcccctcgcggggcggaagggggagccggggcggatccaacacagctgggggcctgctggcctggcagagggacctgggagagcagggggttcacttaggaacaacggggtttagagggggagttttacacagattgttcctagtgtcttgactcagcttttattgcttttccagatccacctccgacccttaagccagagactcaggtgaggtttgccttacctttgcagcctagtagccctgcctgacaacgccccccgccccccttttctagacctcacttagggactgtgtttctgggaatgccattcttaaactgtgtggctttgcatgtgatccatatctccttcctttcagccaccagagaaacggcggagaacaattgaggatttcaacaaattctgcagttttgttttggcatatgctggttacattccccctagcaaagaggtaggggcaagagaattactgacttgaggctggtgtggtgggactatagagtgactgttgttcaaacagaactgtattgctttatagaaggaggcccttagaaattatatgtaagaccagggaagttggagactcttagggctgtggtaggaaagctggtatgcggggagtggatggccgggatagctagcttgaaca

SEQ ID NO: 85046 - DNA, 1038 bp, Homo sapiens
tcctggtctccccgccgctccccgggggaggggagcggcttggtgcgcctgcgccagcctgtggctttctgggaatcaaagttccggaggttcatgcggtcccttttccgctgttcccggacggactacaaaacccttggtgcactgcgcctcggcgccggcggggggaggagggagagaagaggagggagggaggagagaggaggtggaggaggaggaggagggagcaggcggccggcggcgcggggggagggggcccggtccgggagtgcgggaggcagtggtagagggaggtggcggcagcggctagcggactcgagtctcaaccgggctgaggcggacacttctgtggagcgaagcagtgggagcatcgagcactagaggcggcaccgggatccccggctccggggaggggggcgccggaccgggaggaggggagggggcgatgctggaagccatggcggagcccagtcccgaaggtgagctctcgaccggtgcagagcgctgagccggcggggggcgggcgaggaatcaattggcaaacttggaggtcgagccccggagcccagcgggggagttcggggagggggtcgggaggctggccctggaggtgggagagcgacgagttgagagaccttggagaaagaggagtgggaaactgggctggggtagttggagatcagacggtgtgggggtgcgggggataggagcttgaaacccggagcctcgggggttagggcccgaaagggccaccggcagattggggccctggaactggaaggttaggggaatccagtggccggagagttgctcaggagggaggacgtagaagaggctgagtgaggggcccggtagttcgccgaggtggggtagtttgtggcggtggtaccggagctccgagtagttgccgccggagaatgcccggtgattgtcggagaggtgggcaggtagttgtggggagaagagggggtctgggtattgtctacggcagacggacctgtaccggggggtagttgtggagagagcgagccaggaagc

SEQ ID NO: 85047 - DNA, 1456 bp, Homo sapiens
ccaccagtgccacaatgggtcagctgtaccaggtatggtgactgggaagtggtggaggctttggagaggaatcttggaagagcgtgaggggaagaaagtgttgttacatcagtagttttggactagcttcctggcttgccttaaagtttcataatagccgtgggttgggggtttggacagaacagtaggagtagagagaaggaaagagaacagtgagctagagaaactatctgttcgggactcttcccagtccccctccccattccaaagcagcagaaaacagtttgaggcctttttgcccaggactgcagagattatactgctcgtgtggtaggccttggagtcagtgaaggagtcaggcaatggtttgtggttctagaagaacgtgtctgggtcgtggttggtttaagttactggagcccagttgctgaacagttttctgctttcatcccaggaacaccatgaagaagacttctttctctacattgcctacagtgacgaaagtgtctacggtctgtgaagctgctgcccctgagctggaggggggtctcattctacaaagagagaggtggcccccctttcttgacctcctcctccttcaagctcaaacaccacctcccttattcaggaccggcacttcttaatgtttgtggctttctctccagcctctcttaggaggggtaatggtggagttggcatcttgtaactctcctttctcctttcttcccctttctctgcccgcctttcccatcctgctgtagacttcttgattgtcagtctgtgtcacatccagtgattgttttggtttctgttccctttctgactgcccaaggggctcagaaccccagcaatcccttcctttcactaccttcttttttgggggtagttggaagggactgaaattgtggggggaaggtaggaggcacatcaataaagaggaaaccaccaagctgaactgaattttgccttgtgttgctcccctcgtcccgctgattttaagtctttccaaggtgtcagtgggtttcagtggtggggaaagaagagtactgggtacaagctggagggatagaagtatattttggtttattctgttcatgttgggcttttccctgtctgcaaaaagagggtgcttttgttgtgatggaatggaatactgaggattatttcttgaaactttagttttataacacgcatgtgaaactaaatgttaaaaatgctcatgtaaaaaaaaatttttttttactgtgggttcctgtggagaaagttccgaagtacctgctttaggtgaacatccacatttgctagaacattctaactaagatattttcatgtgtgcaagctagtaaaacggctgttctcagttgcatgtcacttggctagacttttgccggtgtgtgggatccggcagagtggaatcagggagggagaagactgggagcgggagccattatcgcca

SEQ ID NO: 85048 - DNA, 1050 bp, Homo sapiens
cagccaggccaatatagttaaaccccgcctctactagaaatacaaaaatgagccgagcgtggtggtgcacgcctgtagtcccagctattagggaggctgaggcaggagaattgcttgaacctgggaggcggaggttgcagtgagccgagatcatgccgctgcactccagcctgggcaacagagcgagactccatctcaaaaaaaaaaaaaaaagaagaagaaataagcctaaattacatacatagtacctgtggtaaatgttcattatgtgctccctgttactgttactggggaaggcttccttatcaagggtttcaatcctcttttgtgctatttgtaggtaattcagtaccaaactgttcgatatgatatcctccccttatctcctgtgtcccggaatcggctaggtaagtatgtggtgggaagcctcctttagggtgaagtaggggctagctctgggtcagaggtcggtcaatattattcctccccactctggttcagcccaggtgaagaggaagatcctggtgctggatctggatgagacacttattcactcccaccatgatggggtcctgaggcccacagtccggcctggtacgcctcctgacttcatcctcaaggtgtgtggtggtggggagtgatgaaatggttccatctgttcctctgcccaaacctggactccctttcccagtcccagagcatctgtctccatccgctggcaccagtgtcagcctggaggagggaagcagatgggtggggcgttttctaggcctgggttgtggtggtcatgacatcccccagcccatcttgttcctctgtaggtggtaatagacaaacatcctgtccggttttttgtacataagaggccccatgtggatttcttcctggaagtggtgagttttggagagctaaagggagctctgtaatgaaggaatggttttagggctctgggaattgggaggatttggaggaaggggtgaggagaaacgggttagagcagttttctagaggggaggctgtgtaatggtaggggagtggctttcagtactt

SEQ ID NO: 85049 - DNA, 1067 bp, Homo sapiens
gtggtttgagaccagcctggccaatatagcaaaaccccatctctactaaaaagacaaaaattagctgggtgtggtagcacgtgcctgtaatcccagctactcgggaggctgaggcaggagaatcacttgaacctgggaggcggaggttgcagtgagctaagatcacgccactgtactccagcctgggcaacaaagccagaccctgtctcaaaaaaaaaaaaaaaagttgagggcaggagctgaaagcagtcagttaaataggtgattgggggctgaggatgtgaggtcctggagtctgtctagtttcttcagtaagatgaaaaaaactcttttcttttttctctccagactcagtggttctccatccttccggacttcagcctggatctccaagaggggccctctgtagagtcccagccctactccgatcctcatatacccccggtatctaagaatgccaaggccagaacaaggaaatgtagtttagtatctggtcacgggagagaaaataaaagctgcagaggttgggggtggggtcagggattctagggatggggcagagtggcagcatcctttgtacctacaggtggatcccacaactcatttgacctttaaccttcacctgtccaagaaagagagagaagccagagatagcctgatcctgcccttccagttcagttctgaaaagtaaggttgggacctgggtacgtggatccctgagtagatcccagcatctgggccatggagaggttggggcaacaggttattgattaacctgactttatagggactgaagtccacctccagagacaagtccaagttcttgatccacccattccccctataatggcagaggacctttatgtctcttttctctcccttatacccttgggtcacagctccagttgtccccagagcaccctgggcctgggctgagccagaccagacccttgggaggtggccctatccctaggcagtggtgctaggaggacagaaggctatatgggcgtggcagaggctggttaacaagggcttagtacacgcttgctgttctgtgcccagtatgt

SEQ ID NO: 85050 - DNA, 1439 bp, Homo sapiens
tccagtccggaggggctgactcggagcttgggactcctggggagccaccgcctcctccccagcggcggtcaaaaccgggcaagcgaaggggcgtgaccctggtgctcaggtttcttcctcctcacctgggcaaggaggggtgggggccacgacttccggttcaggtgagtgtcccttcggtgacgtcaggtcatcctcggccgcccctccggtcccgcctccccctcccgcgctcccggggcgcgcgggccgcgcccccgacgccctacatatactcaggtgcgccccacctgtccgcccgcacctgctggctcacctccgagccacctctgctgcgcaccgcagcctcggacctacagcccaggatactttgggacttgccggcgctcagaaacgcgcccagacggcccctccaccttttgtttgcctagggtcgccgagagcgcccggagggaaccgcctggccttcggggaccaccaattttgtctggaaccaccctcccggcgtatcctactccctgtgccgcgaggccatcgcttcactggaggggtcgatttgtgtgtagtttggtgacaagatttgcattcacctggcccaaaccctttttgtctctttgggtgaccggaaaactccacctcaagttttcttttgtggggctgccccccaagtgtcgtttgttttactgtagggtctccccgcccggcgcccccagtgttttctgagggcggaaatggccaattcgggcctgcagttgctgggcttctccatggccctgctgggctgggtgggtctggtggcctgcaccgccatcccgcagtggcagatgagctcctatgcgggtgacaacatcatcacggcccaggccatgtacaaggggctgtggatggactgcgtcacgcagagcacggggatgatgagctgcaaaatgtacgactcggtgctcgccctgtccggtaaggccgcgggaccgacggggcggacgcgcccttgaccgaggtggcggggtggcgcgcgtgggagagccgaggccccacggctgggggccctgggttgccggggagctgcagggcgaggaagtggtcggctgggggcggcggggctgggcgggagcgggccggggttccggcggctgcacgtgggcgcgcacctcggtcgcccacgttcctcttcctcccccaacccagcctcgtccccggctcggagcagcggtgcttaggccggggccatcccctcctccattcccgggcaggccatggcctccgtcatctcccgtccttttctcagacagaaacggccccggggcgcggggcacggggcgcgccgagggccgaagggcggtgcggctggtcagagtgggccgccgcctgctgcctctaatcttatcggccgattagccgaagccacaaacccggtggcctcgatagcgggctcagagcag

SEQ ID NO: 85051 - DNA, 1062 bp, Homo sapiens
ccccttccagccttttgctccttcctccttcatctttggtcatctccccttcctgcctttcctgctttggagcttcctgtttcactccttgtcttttttttgttgttgtttgagaggaggaagtctgtgttacccaggctggagtgcagaggtgcaatctcggctcactgcagcctcgcctcctgggctcaagcgatcaccccgcctcagcgtccccagtagctgggaccgcgggtgcacaccaccacgcccagctaaagtttttgtatttttggtagagaagggttttcaccatgttgctcaggctggtcttgaacacttgaactgaagcaatccccctgcccccacctcctaaagtgcaggattacaggcgtgagccaccgcacccagcccactccttgtcttttcgtttacctttgcgccttgtctccagtctccttggaacccagcatcagcaattaatctttctttcctcttcttaggtgcacactgcactttccccacccaccctgcccagtttcctcccaatcttcctactaccctccaacctcctcatacttctcagattctcacataccctgcttattctggctctctctcatttcattttcctctctccattttttacctcaactctctcacgttttttatctttgttttgccctctcaaacatttctctgtctttccttcgtttattcgctaaacatattaaagtcccccttatgctaagctaattgacctgcttttgtataaaatgaagactttcatgaactctttttttttttttttgaaacagagtttttgctcttgtcgcccagactggagtgcaatggcatgatctcggctcactacaacctccacctcctgggttcaagtgattctcctgcctcagcctcccaagtagctgggagtataggtgcccaccaccacgcccagctaatttttgtatttttagtagagacggggtttcaccgtgttagccaggcagatctcgaattcctgacctcaggtgatcccaacccacctcgacctcccaaagtgctgggattacaggcgtgagt

SEQ ID NO: 85052 - DNA, 1101 bp, Homo sapiens
caacactctcacagataggtaggcaaggcaggcaacatcacccccatctcacagaggacactcaggttcggggcagggaagtgacttggccaaggtcacacaaatctgagctcttaaggccaagcctgtctcaaggtcacagaagaattttgagacaagttctcaaacatttctctgccttatggacccaaacatccagtttctcctttatgcccaggttgcagttcagctcctgtttacattgagatctttgtgcaattcctaatatggcccagtttccctcacccaacatgttgggtggagcccagtatcttcaggctccagctgggcccgggcccctagcggaaggaaaaaaatcatggttccatgtgacatgctgtgtctttgtgtctgcctgttcaggatggggaaccccctcagcagcgagtgactgggaccctggtccttgctgtgttctctgcggtgcttggctccctgcagtttgggtacaacattggggtcatcaatgcccctcagaaggtgagggcctgcagctggcagggtgggggtacccaaacgaggaggacaggtgtctcgggggtggtggaaaggggacggtctgcaggaaatctgtcctctgctgtcccccaggtgattgaacagagctacaatgagacgtggctggggaggcaggggcctgagggacccagctccatccctccaggcaccctcaccaccctctgggccctctccgtggccatcttttccgtgggcggcatgatttcctccttcctcattggtatcatctctcagtggcttggaaggttcgcagctggagggcaggggtgggggaaacaggaagggagccactgctgggtgccctcaccctcacagcctcactctgtctgcctgccaggaaaagggccatgctggtcaacaatgtcctggcggtgctggggggcagcctcatgggcctggccaatgctgctgcctcctatgaaatgctcatccttggacgattcctcattggcgcctactcaggtactcacgggcaccacagccctgcctagcgccctgttctctttcaccatgcctgggctttcagatgggaatggacacctg

SEQ ID NO: 85053 - DNA, 1042 bp, Homo sapiens
ttcctctcaggtcccctcaggcctgaccttcccttctccaggtctgaagcgcctgacaggctgggccgatgtttctggagtgctggctgagctgaaggatgagaagcggaagctggagcgtgagcggccactgtccctgctccagctcctgggcagccgtacccaccggcagcccctgatcattgcggtcgtgctgcagctgagccagcagctctctggcatcaatgctgtatgtgtggagcagcctccaggcagggcacagccccgggagggtagacgagagtggggagcaaaccccctccaccaacacccagggtagggccagcctgttgtggctggagtagaggaaggggcattcctgccatcacttcttcttctcccccacctctaggttttctattattcgaccagcatcttcgagacagcaggggtaggccagcctgcctatgccaccataggagctggtgtggtcaacacagtcttcaccttggtctcggtaactgctcacctctggaatggcccgagccactggcttcacctccctgggtgtcccggaggtcctgctcttggttgccctcacccacgcggcccctcctacttcccgtgcccaaaaggctggggtcaagctccgactctccccgcaggtgttgttggtggagcgggcggggcgccggacgctccatctcctgggcctggcgggcatgtgtggctgtgccatcctgatgactgtggctctgctcctgctggtaaggcctggaggctaggaggggctagcagcccaccccatgggaatggtcctgtgagtctctgtgaccagccagggtcccttcttaacacacatgctttcaatcctggcgccagctccggaccaggactggggctgactggctccagaatctgctgggattgtggtctgctcctgagggatttgggctgcactgggaggcagctgtggcacaactctggcagccaggagggagagcccctgtcaagcctcaggaacaatcattcctaaggacccagctttagagtccagggagag

SEQ ID NO: 85054 - DNA, 1167 bp, Homo sapiens
ctcaggtcccaccccagacctggtgaatcaatcagagctggggctggggctccacaatcggtttaacgagctctccaggtgattctgatgcacgctacagcttgagaaccactgcttggtggaaagagctctcactgggactgaggtaagaagcacagtgcattctacccactttgcgactgaaggctgtccctgccttttgctttggagttcatatttcttgcctccctttctgaaatccctgaggggtaaagcggggcgggaggggaggtgcggggagtgcatcctggggatggtggtaactgcacaatctgctgaggccctgagttcaggacttttcccctgctaaactttgaccacctccttgctccaccctccagctctagaccccaagtcaaatgttgaaagaatgaaattgggtggtggccccagcaggggtgacagagactcctgtcttgctgtctcacttttcacatggccttttccccaatcagacagctattaaaagaaacaaccccaggaagtttctgcgcagcgttggagatggggagactgtggaatttgatgtcgtggaaggagagaaggtttggggactgctatggggtatagagttgactaggcttacgggagggtggcctggaggtcatcacaggctaagaccctcctggggccagctctgacccgttctgcgggaatgggactgtgttctctcaccctgatgtcctcttccttaatgctagggctaagggatgtcctaagtatgtccctgtcatcggtcggcagtgtctgggtttcttctctagttcaccaagcacttcgacatccgttctccacgtggggccctgtcctagacttcccgagtccgcctctggagtaaaaaggtggatgctggctgccaggcctttctccacccagtcgtatactcaggagggtgcagtagcaattatttcaaaaggacatgttgctccttcccaaatgggtgcaagcacattccactgcctctccagggagggtagaaagaagttagaggagctaaaggaaagctggagaggggtcttcccctgaaagaaggggaagcaagttgggaaatgcacattggctgttggagcaggttctcactattcccttaccaccttcccagggcgcagaagccactaatgtaactgg

SEQ ID NO: 85055 - DNA, 2540 bp, Homo sapiens
gcaatccggcgacggcggtctcgggaacccccgcccccccggcccggagtcaggcggacaagccggtgctgggtgaggggcaggcgcgcacagggcggctctgaggggtcggcgggctgggggaggggcagtgtggagcccggcaggatccggaaaaccaaaggcggcctggcccgcaggcccagagcgctaactgggctgggagctgcgcaccaaagtggattcccctggtgggaaatcctgccgtaccttcctgggagagagggcggggccggcaggttcagctaaggtcttggggtggagaataaagccccagggtccggccacgcccccgggcgggacacagtgcctagttgactgggttagaactaggcaaacctctgagcctggcaagcaggtgcactggggacccttgcattgggagggctagaaaaaccctcagttatgacctgggggcggcactttgcagaccaggtgagtacccagttctaggtgaaggggctggatttgtaggatgtggggaacgtgacttagagttggaaggctttttgaaagcctgagtccctgtgtgggtgatttcatttggtggactagggtaggaataccttgaagctactagtgaaacctggttggcttgaaggtaacctgaataggtaataaggcagtaggctagatttttttttgttttggagtgtctcaaaactgagttcaactccatctcttccccccatctcactgtccccactgcatctctgcctggcagcaatccaagtcctgggcactgtcaaatggttcaacgtccggaatggttacggattcatcaacaggtatccaaggaacccagggcgggggtggaatgggtgtcttcccagctggcctgtgggactggacacccgcccaacctcatcgacccctgcggaggcacatggttgcaatgtccagctgatgctggttgaaagcctttaaccgcagcacaaatgtgtgcttcgtgacaagaggaagcctcctccgcatcttcaagggtagcggaggattaatgattcaggaacttggcaaacctggctctgaccctgccagcttctcatctcaccttctggaattgcttcattacttttactctgacatgcctttggggcagaatgtattatagggttctctgtgcctcagggcccccggctggaatcctcaactgatttcctgttatggcagcactcacaactcaactcccttaaagagctgtggctcattcgagccctccacctgttgggactgaggctgacagtgggggtcaggaggaaggagccagaggctgctgctttccttcagtaggcagccccacccctcagcaccgggagaggctgtggcagtggattctgagcagagccaggtctcccccagtgggcccttccccagcccaggcatcctgcccggcctggctctcctgggaggccctagttccctcttagcaggctgacctttgtgcagatccaagtgctttaaagctaaaacgtttgttctggggaagggtccctgtctaattctggaaatggcagactgggtcgggggcagagtgcctccaggaaaacttttcctttctcccctccccccacccactggggttcttatgatagagaatgggtgaatgttttcttctctctcacccttggtcccacgcgtgttgagagtggtcctgactctgggattcacctccaggctgaggatgagaataaagtttggcagctgtttagagcaagttcctgacacattgttcccttctcaaacttgttctgcccctctggccccatctgcactttctgcctccttgactatagaaggaagaagactggaattttccaaccctgatgggggttgggggagggggtgttggccagggacagttgcacccagcgctggcaggttgtaaggctagcctggggtggaaggtggagtcccggcaggggcagagctgtctgaggttcctcaaggtgcctttgcctccccagcctgccctttccttgtgaagtccaggtttggcactgaggttttaggtgtatctctctttacaccagcttctgggggccctgctggctctccctcccattccccaggccatgtccacccctaactggaatgctggagaggatgggcccactgagcttagactgggcatctagggggacctcagtgaggagctgagggctttgttgaagtcccttccttaacgacccatcctgttctgcaggaatgacaccaaggaagatgtctttgttcaccaggtaagagctaggttagctttctgaggggaagaaccggccgtctttgaaggcctttgctgtaatccttagcagtgcgctccgccatgtttctctggctcttcttcacaacggcccatccgccttgggtgcctgtgtcaaccaccattagccgcacttgtgctgggttactaaacgtccgtcagaattgagcatgttacccctgggcatggcacgcttactacccaccgggacctgttaacactccaggaagcactgaggcagttt

SEQ ID NO: 85056 - DNA, 6071 bp, Homo sapiens
acgggttcggccagagagcggcgcgaggtgaggagaggcgcgggcgcgcgccccggttggcgcgcggggtgacggttggggttggcccggtgacgttggagcgacgcagggcgggggacggcgagccgcgaggcagccacgcgggagaggccgccaggcggccacgccggggcgagggccaggggccagatcggcccaccggggcaagggtacctgggccgttgaggacccggctcagcgcggccacgtgaggtgggggagggggctattcggtgagagggcatgatggggggggttggcggacggccggggggaggggaggcggcgtggctccggcctggcgcagtctctgaggagggggcggccgcggcaccggaagtgccccccacgggaggctgccctcggggtcgcaggccgcatggccaagcgtggaccggggccgcatggcagcgcggggacccctccccccaggtcccggccaccggaagcccggaacggccacatggtcggcaggagccggcagcccctagcgcggggagctagtcctcgcgggggttccgagggggcctgagattttgaggagtggaagccggaggctcgggtcctaatcaccccggagggcctgctgcaggcatatgttagcgcttcccaacctcaagggccccaggagctttcctgaaaaaccctcctgtgaagtgtggcggtcagccaggtgtaagtggcaccccttcgagctgggaggccggagaaatggggaaacagggcgtttggacaggagcccaacttttctgtcggcctgggtggacagcgcctaaaagcctcaggcagatgagtttcccaccgtgataggcgttcttcaccttgtcactgtcttcctgttgtaactggtttgggagttccacggtttcgaagtccttaactctactagcctagtatgattttctactactcactactaccaaccttttgctttcattttattgtcattcaccaccccccacctctcccactttctactgactgtactggcccggcctgaaaagccgacaggacagatgcatcctgggaaaagtgggagggccttccaggagaggctgggttcctgggttctctttgggaaccaagatcgaggtgtttggcagggggatcatttcggaaacaactttgctttctcccccttggcttgttgcaagtgcatgttggcgaggcgggaatcccccaaagaggccttgtggtttcctgtagcagtgactggtttgtgtgtggatgggggggggcagtgtaacagatgggtggggccttgtcctccggtctccaccctccccccccccaattagccctgcccttttgctggatcatagctgctcacctaattatagccctggctatatgtggggaagaggggtggttggtttcagtggcaagtaacacctgagtcctccccactcccaggaagtaggccttttctcatctctgagatttgacattccagctccctagagccttcctttcccaagccaccactttagctttgatttatgggggagaaaccagctattccaccctcccatacacacaccagttcttgagtatatttgagcccagtcagtattttaagttcaggaactttgactttattttaggtgggtaatggaataaagagttgggaaaatgtttctggagagaaatgggatagattggaggtcctgttgacctccatgcttattcacttcagttctcttcttggctctagttggaatcgaagcctcttaaaatggcagatgacttggacttcgagacaggagatgcaggggcctcagccaccttcccaatgcagtgctcagcattacgtaagaatggctttgtggtgctcaaaggccggccatgtaagatcgtcgagatgtctacttcgaagactggcaagcacggccacgccaaggttagaatttcacctccgcatcttgccttccccatgcctccagtatctttggcgctcccagcagcaagctgccaacagtgctgactttcctttaactctgcttttactgtctgattgtttttgtttagcgctcagccttcatacccattcagacaactacacctgctccccagtcttcagcctcttctgtggttacccttctgtccccgcatcattctctggcagtccctccgtttctccagctttgtgccaatctcttcaattcataggcctttatgctctagctattcagttgctccttccttattcttggttttcactttttctttcttcccttgagccgttgttaagtggttgcttccatcacgttgcccagggtttctccaattctacgccttcccctggagggactcctgcgtcaattctgagctttcaggtcaccttgctgcttcgttccccagttctagctttccctttggaactctgacgcaggatcaaactgcccctacctgccccatcccactctccttgggttccttgagcctccatgctttcatgggttttaacattcttgctagcacttccctcatcacctcagacttttcctgtctctttagaatttcaacctgattcgttcttgttgaatttcttgtggtgtttttccttaatcagtttttccatcttttgacttgacattgatcttggattattctctagtgtctggatccctctctgtgctcttctggcttccttattttctagctacatagttatttctgatctccctgcaagtccttttcttcagctctttcacatttcttagtttcttatcctttcccttctaccttccttattccccagtttctcagctccttctcctggtgtccggaaaactcttcgaaacttttactcagactcctcccactcccctagactcttagcatcttatcttttatcaaggtaactgtcttctccaagcctgccatgcagttttctattgtgctgtcaaccccaatctcaacggtggttttttagcctctgttttttttctttaagaggctttactgtttcttgagttgactggttcaattccaacactccagtctttgccccaacaatgtaattctgacttccctcatcaggcaaggtcaatttgagcctttatttcctccgttttagagtttggttgggtttctctttgtgatgcatacatacaggtccatctggttggtattgacatctttactgggaagaaatatgaagatatctgcccgtcaactcataatatggatgtccccaacatcaaaaggaatgacttccaggtatgtagatggtctggatgaggatgggttagcggtttatggtggagggaggggttgggggatagggactgaccaggagagcttgtgctgggagagaggagggaaatggcaggagagggtgtttggtattagtttgctatcagtccagtttgtctatcagagcctttactgtcatgtcagcctccctgggcctactaccttcagcctccttccctatctgcccccagctgattggcatccaggatgggtacctatcactgctccaggacagcggggaggtacgagaggaccttcgtctccctgagggagaccttggcaaggagattgagcagaagtacgactgtggagaagagatcctggtatggtgcctccctccctgcttctgtgctcagctttgttctgtacgtttcttcctgagctcagacatctcttggctatccctcttgcttctccagatcacggtgctgtctgccatgacagaggaggcagctgttgcaatcaaggccatggcaaaataactggctcccaggtgagtgtgacaaatccctcactgtccccttcacattttgttgtcctcagcagagctgctgtagtcttaattgtttcaggcttactttctgcccctagcctggctctgtcctccctatccttcctgttgaaggtattatcctgtcttactaatttctctctcctacctagggtggcggtggtggcagcagtgatcctctgaacctgcagaggccccctccccgagcctggcctggctctggcccggtcctaagctggactcctcctacacaatttatttgacgttttattttggttttccccaccccctcaatctgtcggggagcccctgcccttcacctagctcccttggccaggagcgagcgaagctgtggccttggtgaagctgccctcctcttctcccctcacactacagccctggtgggggagaagggggtgggtgctgcttgtggtttagtcttttttttttttttttttttaattcaatctggaatcagaaagcggtggattctggcaaatggtccttgtgccctccccactcatccctggtctggtcccctgttgcctatagccctttaccctgagcaccaccccaacagactggggaccagccccctcgcctgcctgtgtctctccccaaacccctttagatggggagggaagaggaggagaggggaggggacctgccccctcctcaggcatctgggagggccctgcccccatgggctttacccttccctgcgggctctctccccgacacatttgttaaaatcaaacctgaataaaactacaagtttaatatgaagcccccaactcagctgcttatttgaattaaatgggtgtatttggaagccacaaaaagactgaactctgccactgagttcactggaacccgctgtctatcactttgacttgctgtggacctgccagccatccccccaccctccaagcaaccttgacctattccagacagttgggtgggaggcaacacaaacagcagcagccaggggcagtggcaggtagattttattggcctgggacacacaggggataccctcacccacgatggggtggggggtgtggtgttgaagatataatctgatggtcacttgtggtagaatcgcgggttctggctgtgttggatgaaggggagccgagggccaggttggctggtagctgcaaagcccgactggtggtggtgatgaaaagagggctttgtcactgggcatactctcccttccacttaataccctactgataaccacccccaaagaggaaggaaaaaccagatgatgtgggccacctgtcctacctaatcctgcttttccggatccctagtgtagggattctgacaggtaaattctattaccattcttacctttcctgctggctgcatctgcacagggagctggggggaagcaaggagtccaggggctggatgcagagcctgggggtgcatggggcgcagagaggactgcagagaacagagtcagggcctgaggcatactgaagctccccttaacatatccctaaccctgacctcccaaggtgccatactcactgagtcggagaagccagtctgctggttagcatgttccatctgcttttgcaaggacagggcaccaccaggctggaggaaacctaggtggggaagaggggcatgtgagatgagaatgaaacagggaggggaggacctgagagctagagctcctgcatgggatgttatcacctgtctgagtgggctgaaagtggccatgcacagcatagggctgtggctgtggctgagataggtactgcactgcagggaatgccgaaggagctgagaaaggaaaagacagagccattaaaatcttttactgaatggcattcctcctttgaccttgaggaaggccaagccccatccctcctattactcacctctgagctgctgactaggactataagctggctgtgtgggcccatagtgaggtgggggctgagcagtcccataggcaccaccaggactgccttggaattgtccatgctctggtgtccctgcaaaagcagctgctgagcccacgtagtgccgggtctaaggaaggagaatgagaactcgcctacaaactccttgaaagctgaaacccagtgacttgtgtgtatctgtatgccccgtttccccctaaacttaagtgcttgatatgtttgtgacttgaatactggtggcaaggatgcatggatggaagtactaggggctaggcatccaatcctactctcaccgtaagcacttggggtccaaacatttg

SEQ ID NO: 85057 - DNA, 1032 bp, Homo sapiens
aggtgatggggcgagaggcttcactcccttattttttcttgtctgacagattccgggaccccaaatcccagcggacgcaccaggctcaggtggcgttccaggtgtgtgtgcgccctggctcctacaccccgggacccccttccgctgcccttggagaacctcctgaccctcacttcagtccagccgaacttgagtgggtcactaaggagaagggggccacactcctctgtgccctgctggtacgggtggaatgaggggtgagacaccactactacaagcacagtcgggccgcgggcccatggactctgagtggcgactgcctccacctcattcccgtgactcgtggcatgcgcaggtgctggagcttggcagccgcgcaggagcatgtaggcaggctctcagatgtaggtggcaagtggcacagctccatgtccggaggcccagcactccgtctgatgggaggagtcgtgggagcccagctccaggccctggtacccctcttcatgcactgatttggggaacatgactcccttttactcccctaccccacatcacttaatttatttccgtttttgtttctggttactgtgaatcccagaggagtctctccctgtgcccacatgaagctgctttttccggggccaccgggcgggagtggggaagggtgggcgcacggaagatgggggcctctgtacagttgttactgactctgatttctaaggagccaataaacaccgtctcagagcctccgcctcggcctctctctcgcgcgcccctctccggagcccgcgtcccctggggtgccaccaggtgggcccgcgaaattaaagagagctgaggatgccaaggccagtctgcagccgtcgtcgctcacgttcccggcgacggggtttgtacgccgcgggcacccgtcgcagcgcgcttccgccttctttcacctgtgaggtcggccgccgccgtgactccggaaggactcggccgggccgccggatgtgacgcaggggccagggcgcgtcggagccgctgagaaag

SEQ ID NO: 85058 - DNA, 1072 bp, Homo sapiens
tcaagcgattcttctgcctcagcctcccaagtagctgggactacaggcatatgacactacgcccggctaattttgtatttttagtagagacggagtttcaccatgttggtcaggctggtctcaaactcctgacctcaggtgatccacccacctcagcctcccaaagtgctgggattacagtgtgggtcaccatgcccggctggcggttcttttttttaaaaaaaaaaaaaaaaaaaaaaaaaaaaagagggaaagaaacaactaaattagcgttttctggtccttccaagcataagaaaaggcagcatcccaggccacattctgggaggtgcagtattccctctctggctggggtgcggagcctggttcttcccaggaggctgtgattatggagtagttctttcttccccaggtgcggatagatttcctaaaccgacagtggacatcttcccttgtcctgggagtcatcacctgcgcgcctgagaggctcaacttccctgcttctgcctgtgccctcaaacgggcagcctggctgctgcggggccgtggggtcttccacaacggtctcaaggtgagtaggagccagagagaaggaacaggaccaggcctgtgagtagagaagggctggccagaagggagaagtgggcccctagccttggaggtaggaccacaggtgtaaaaggggaacagtaatgggcaggcaagggcgagtagcattgcctggtcagtcttaggcctgctgcttcctgcggtgtccctgccattgagaatgtgccagttttggggaaggggaggggctctaggtaactgcagtgggaggagaacctcggcagtgggcaagcatggaggcaaagccaaggcactggcaaaaggaagcagagcaaagggcgggacagctgccgcggtggagtctgacctctggaagacagccggtctctcctcccagatctgcgagaagtttgggcccaatctggacacgtgccctgaaggcaccatcctgggactgcggctggacagctctggggggctgcatcttcatgttaatggggtggaccagggggtagctgtgcca

SEQ ID NO: 85059 - DNA, 1314 bp, Homo sapiens
cactatcacccaggcaccatcatgatgagcggctgtggaatcctgaccaatggcaagggcacccgccgggagtactgcgaattcagtctggatgagttgcaggtgagggtggggcacagatccctgggccgctttcagcagagccacaggtactctgtgtccctgccagggcaccaagcagggtctcctatgtgacctagaggcagtccctgtatcttccacctaaaggttccttcctagaagcctgagttgcccaagagttcagcactcagattttggagtcagatggttgaattcctcttactgttttcccatttgtagtagcgaaccggggcaagaagcttatcctctttgattgctcccccacctcctgcaatctctaaaatgagcctacgagtagtacttattccataggctgagacttgtagaagctaatgtctgtgaggtggtttaactcagtgcctgactcacgtggagcattgacgaaatgtggaaattgtcatgtctggaaaacaaggacccaggacctgtcctccagggtggtctgagactctcacgaataccttctggagttgttcctgtgtggagtggggtgctgagcaggcctcaggactcctctaaactgtttgtcttctttgattaggagggtgaccacattggcctcacaaggaagtccaactctgccctacacttcttcattaatggtatcgatcagggtaagggccgcccagagagagcctctgggccggggctttcggtggggctgggactgggggctgtacctcatcctcctgcttctctttggtgcttggcctccctgtgtttgactttctcccctcattctccctgtccactcccacacccccgtaccttcctgccacaggagtggcaacccccttgacgcccccagtggtgtatggtgtggtggacttgtacgggatggcagtgaaggtgaccatcgtccacaataacaaccacagtgaccgtctccgccgaaacaacgccatcctgcgggcgctgtcccccgagggtgctctccgccgtgctgcccctgccgcccaggcagaacctgagcgcctgctcttccaccccaactgtgggcagaaggcagccatcacccacgagggacgcactgccctgaggccccagtatggcccatggggtggggagaagcctgaagaagggattctaatgggggggggggggcggggcaaggaagtggaaggcagagggagcctggcgggggcagcttcctggaggttgagctttagttctttggcttggggcagtgagtgttggcaggcattgctgggc

SEQ ID NO: 85060 - DNA, 1028 bp, Homo sapiens
tggtttagtaaacactgagtagagagcagagttgctaaaggaaagcccaaataattaccaagacggagtccagaaaatcactgtctgcatctctggattagtgttccaagagacagaaagccagctagctgtctgagaggtgggaagatatggtggcctgtggaatggggggtggcccattctaagcctctgtccaatacccctatcccaggtcaactcctggagcggctccattgagattggggtgacagcgctggaccccagtgtgctggactttccaagcagtgccacgggcctgaaggggggctcgtgggtagtgtcgggctgctctgtgctgagagatggacgctctgtgttggaggagtatggtcaggacctggaccagcttggtgaaggggaccgcgtgggcgtggagcgcacagttgctggggagcttcggctctgggtgaatgggcgggattgcggtgtggctgccacaggcctgccccctcgtgtctgggccgtcgtggacctttatggcaagtgcacccagatcaccgtgctaccccctgagccaggcttcagcccccctactcccatccccacacctcccctcgagcccttggcccccactgaagactctgccttggctgaacaggggacctctgcagatgaaggtgagaacacagctagggcagtggtggtggggtggggacggaatgggggaaatagagtgacaagacaggctgggtgtgggcagggccaccctgatccccaagtctgttgaatgggagagcaggagctagaggatggggggttctcctggctatgggccgtgaagcagggactgaacccttattcccctcccatcccacctggtccccagccttcatggtgtccccagcgcaggcccggccggagacgtttcctaacagccttgagtcgcataatggtgagggctttggggaggccctgggaaggggagtgggaagtgaggtggacaagggagggccctcaggagaaggggtagggagagaggcaccaggtct

SEQ ID NO: 85061 - DNA, 1047 bp, Homo sapiens
cttgagcctggaggtcagggctgcggtgagccatgattgtgccactgtactccagcctgggtaacagagcaagacccggtctcaaaaacaaaaacaacaacaacaacaaaaattttttaaagggggagtgagatgggagagaagggggccttatttctcggaaaccagccctgctgccctcttcccatggccacaggagcctccccagtgacggagttgtgagattgggggtttctggtgtcctgacttccgtcccagggatcaccttgggtttcccacgttgcagagactaactgaaaggacatgagggctttaccctgggaatgctctgctggggcaggtgggtgttagctgcgattctgtgttattttcccatcctcagaggtctgcggggtttccgagaggctcgccgggatttctggcggggggctgagagcctggaggctgccctgacccacaacgcagaggttcccaggcgccgggcccaggaggcagaagaggcaggagctgctttgaggacggctcgagctgggtaccggggacgggcactggattatgccctgcaggtgcctgccccaatctgtcttcctggggtaccagagcctcaagtgtcacctcgaggcttgggggtctccagtgtgcagtgggaaggggtgctgtgtcttcaagactgatctggggttttttacgtcctcttttacgtcctcagatcaacgtgattgaggacaagaggaagtttgacatcatggagtttgtgagttgtggcgggggtgagggcagggtggagaagagcctgctgccagcacaagggaatggggagaggggttcttcctcagccttcccactgcccgccttgtcccccaggtgctgcgtttggtggaggcccaggctacccatttccagcagggccatgaggagctgagccggctgtcccagtatcgaaaggagctgggcgcccaggtggggccccagggcacagcaggtggtagagggaggttagggactcctaactggggggccttggacatctgagatgcccttcctgtg

SEQ ID NO: 85062 - DNA, 1058 bp, Homo sapiens
caccctcaaccccccttctcgacttctccatgcagaattctcttctggcctgtgagtttctcctccagaacggggcgaacgtgaaccaagcggacagtgcgggccggggcccgctgcaccacgcaaccattcttggccacacggggtagggatgatggcatggggaggaaggctgggagaagttgggcggccggctgaccctggctcttctctccaggctcgcctgcctgttcctgaaacggggagctgatctgggggctcgagactctgaaggcagggaccctctgaccatcgccatggaaacagccaacgctgacatcgtcaccctgtaagaatgcctgaaggggcggggctggcgctgggactccccccacccccgcccacccacgttcgggcgggcgggcggggctgacgccgaaacagaagcctgtgctgtggggcctcggaaaggggctgggccagcgccggggccaggctcgagaaaggctgcgcgaagtgtgcactgggacgtggagtagaaggcaggcgggagggcgggcagggtgcaaggatgcttggcccaccctgagaggcgtaattcgcccatcaacattgctgtcaggcatctttttagcactagacgtgaccccgggggtgggggcagatgaacggaacgcaacccagctcaaaggatgggaagttgtgggggaggtgaggatagtctttttttttttttttgagacggagtctcactctgtcgcccaggctagagtgcaggggcgcgatctcggctcactgcaacccccgcctcccgggttcaagcgattctcctgtctcagcctcccctgagtagctgggactacaggcgtgcgccaccacccccggctaattttttgtatttttagtagagacggggtttcaccatgttggccaggacggtctcgatctcctgacctcgtgatccgcctgcctcggcctcccaaagtgttgggattacaggcgtgagccaccgcgcccggccaaagatagtgtcgttcatttcttaattccctcctcttcaggctacgactggcaaagat

SEQ ID NO: 85063 - DNA, 1456 bp, Homo sapiens
catttaatgctctcaaccactggatgaggtaattattattagtagtattttattttgagacagtcttgctctgtcaccctagctggagtgcagtggtgggatcttggctcactgcaacctccgcctcctgggttcaagcaattctcctgtttcagcctcccgagtagctgggattacaggcgcctgccaccacgcctggctaatttttgtatttttagtagagatggggtttcaccatgttggccaggctggtttcgaactcctgacctcaaatgatccacctgccttggcctcccaaagtgttgggattacaggcatgagccaccgtgcccggcctggatgaggtaattattatctccatgttactgatgggcagttgaggcactgagagtttaagtgacttgcctaaagtcacatggtaagtggaggagttgggatttgagccagtcagtttgacttcagagctgttccctaagctgctacactctaccactaaagcttagtctttactctgaaggcatttgggagccagggaagcctattaggcaggggagttacaagccactctcaccatgacggcactctgatgtggcgcaagaatggattagagggatgatgctgaggctgggagaccaggtaggcaacagtggctgtgaagcagaagggagatgaagaggtctggatgagggtagaggcggtggggctgcagaggagtggaaatttcccagaggggcttgggaggctgctctgacaggcctggatgtggagtgaaagcagtgtacaggatgacgctcctgttagtccccccaggtagagccagggccctcctctcttgctccttgagccctgacctgtttgtcatgggatccaggtctgcctccctcactgaattacaatggggggacagggagagtcccaccctgggcccagcacagactacatacagagcggagctcctctttattcctgctcccatattacctatctgactcaggccacaagcccagccaccctttcctcttgtctccacaggccgggccttcggaagcatgttgtgtgagggatgtcacagaaccaggcgccctgaggatggagactggtgaccccatcacagtcatcgagggcaggtgacagtcccatacctcccaagcaccctcaggaggaggataccctcccagcctaattcctgatcccttctctgcttctctccagctccttgaaccctgatcttctgtctcatctcctctccccactgggtcctgaaagctccagcatggtcctggcctccctgctggagccactgctggcccatagagccttattgcattagggaaaaggcttcccttcctccaggcagatgcggctccaaggcacatagcctagtgagctgactgtgggccagggcccagccctaactcttgcccttattcccatcctatttaccagctcctctttc

SEQ ID NO: 85064 - DNA, 1078 bp, Homo sapiens
ggagggagttcagaggttgaatccccacccttcgtcctccaagaggttagatgaacaaagactccaaagtttatttgcctttcctttttaatcctcttcttactccaactctttaaaaaaaaaactgcccagaaaacccagtaattaagcaaaagggagctcaaagagccaaggcaagccagcccaagagtagcagggtccctcccgcaggggccaaagtctggatgctggggtctccactcagagcctggtagtaaaagctggtgcagaataaggtcgttccggaagctagcaataacccagcctgaaggagacacagcacagaaaacaggattgttaagaacagggcaggctgagagggagtgtgtggggcttggtcagggttaggcgcagggaaagattacccagagtggctttctgcaatggggcacccctaacagggccaggctgtgtaagaagtggtgtttgttggccttgtcaaacagctgtaagaaaaacagaaacgaagggatgtcgtaggcaatacaggtactgagatcccctgatgacacaagggaccaaagttccttcccccaccccacccttgaagtcccagcttgatcccaggcctttggcttacagagcctttggcctttgctgctccagagatccgcggctcgccccaccctctccccgcccacttcccccagggaccccagactttgtgccttcgtagacccacgagtcagggagccccagcgcagttacttcacctccttcccgtaggcatctgggaattgggcgcctgtggagaaaagaagcaaaggttagcggtcctagtgccagccctgaccgcccccaatccggggggacccaggtggacattggcgagaaagggcacccccccccccgccccaggaagcttccgattggtgggaacacgctcgggcagtactgggaaccaattggacccagctgggggactttaaaaggtttagggctccgcggactgtctgataaacgagaggccgggcacctcccataggttacgcccttgcagcagaccccagaggacgccccaagtacagtcccatcttcg

SEQ ID NO: 85065 - DNA, 1034 bp, Homo sapiens
gtggactcctcctccagcacccgatccttaggatcctccgcctggaccgccttctggtccctcgaagccggcccacggaaccagcggatcctcaatctagtcctgtcccgttgccccctcctttctctatcgtccctactgcggggttccctgttctcgggctccccctgatcccatcccctagctctccttttcccggggatcgactggatcccggccccgccccccggggctggggcgatccccctcccccgccgggtgaggcgctgcgggcgggggctgggcctgcggggccgcgggggctcagaggccgccgccccctcccgaaggcctttcgccccccactcggagccctggatggaggcaccacggccccagggctgagccaggtaggacctaagccgggtcggtggagggggctgcgtggcggtccactggggtctccctctccccatctccctccctgcgcctggtttcccccagcctgctctgtctgcgtgtctccgcctagggatgctctcgccgtgtctctgcgtcttggtctctttgtctctgcctctctccagtccatgaatgatcctttgaatgggcccacagaccccgtgtgttcccatctccccctccccctccttctccccttcccagccaagccattttcaccactgcaggaagggggggcctgcggcctgagcccccgtccctcaactctccccggctgggggagtcaggcctgggcaggaatggagagagaaggcagagggatagggagaaggaggagggagcaagatgtggcagacagagatgaggagagaaaatgggggagacagtgatggggaaagacaggagagagagacagaaggcttaagggggaaatttggggaaggcatttggagagagagaaagaaatgagaaacaccaaggagagagatacagaagagaaagatgtaaaaagaccgagggtgagagactgaaggcaagagctggggcaagctggaagaggcccacaaaagatgctcccagggagcactacggag

SEQ ID NO: 85066 - DNA, 1980 bp, Homo sapiens
gaaaggcagggggcatgactgggtgtgtgtggtaaggattcctgtgtcctcatctctggaataaattgacacctgcagagagccacccgcgggctggcgcctggctctgaaaaccccgcgtcagcaaacagctctggcggctggtgggggggcggggggggggcttgccgaaatgacctgggtgtctgcccctccggtctgatcttctcccttggctggcccctgctgccctgagcacccaggcatcagagcagcaactgtagggggggtggcaaggggaagggtaggtgaatggatgggttgggatgggaagagaagaaagctcagtgttgcccccaggacatgggtcacaatggcttgcaaagatgaaaaggtggtggggtccaaggttgcttgaaattgctggaggggggcagtcagtaggctcctgtgatgtctcttcaagcccacctcagcaccccctctcccaagccagaggcctggtcactaaggctaggctttgattggccaacaggcagggcttttagcgttcttggtgcccccaatctccccctcctctcaacatatatacttcttcctctatgttaaggttggggggaactcttgcattctgactcacgcctttgccctccccttcatgccctgaatggaccaccaaaccaagccagccccttcccgtcttcctccagaacccccctccagggttaaagctgcagcccgttgccgaggtaacattgcggggcagcatcccgtcacccggcaaccggctgcaggatcacgcatctgtccctggatttgcccctccagcgtcccctccctactctaaccccagcctcaaggtaccccaacttctgacggaggaaatggagagagtctggggagagaggggtcgcaggcagcacaaatccttagcgaatggtgtgttgaagtggggataaggtgctaggtttgtgcagtcccaagaaaggcctgagtctggcctggggtgggggttcagcgccatgaaattacagctcaggagtaattaacacatataaacaaacctgcctcttccagctaattaatgacttggtatttttgttttctcttccttgtctacctcattccctcccagggaggtgggagctgggactcctgagtccctgaggagaacctgcctgggagggatacatcagctggaagggagcatgctgggtctggagagctgacccgcctctcctctggctgggtcctggacttgaaccacatctgggccccacccccaacctaggcgtctgctgaggggagaagggctgctgggtgggagtggggaggtgtcagggggcctgtgggtgggagaagggggcaacttggtctgaattccaggtcactaaccacttgtctcttctgtttccccattcctttctgtctgccccatccaatttcccttgccctcttccacctctgtatttttctgtctgtccgtctgtctgtatcctgcctccctgcccctctcgctccaccccccgcaggtcgggcctgccttcaccttctcccatttccttccccttccccaccccgtgccccctccatggagaggaacagaccccttctctgtccagtctaacccaggtccctccccaaccccctcctccctcctttccccccgcccctcctccctcctggggcgaggggggcctccctccctctcccccccttctctctctctccgaggggggggggtcccagggagggagggggggtcccccgatcagcatgtggctcctggcgctgtgtctggtggggctggcgggggctcaacgcgggggagggggtcccggcggcggcgccccgggcggccccggcctgggcctcggcagcctcggcgaggagcgcttcccggtggtgaacacggcctacgggcgagtgcgcggtgtgcggcgcgagctcaacaacgagatcctgggccccgtcgtgcagttcttgggcgtgccctacgcc

SEQ ID NO: 85067 - DNA, 1036 bp, Homo sapiens
ccaggcggagggccggcctgagtgggcagatgcggcgcacggggatgaactgccctatgtctttggcgtgcccatggtgggtgccaccgacctcttcccctgtaacttctccaagaatgacgtcatgctcagtgccgtggtcatgacctactggaccaacttcgccaagactgggtgagggccagaggggctgggcggggctgggcggggccctccctccttcacatggccgccgttcctctgttaaggcactcactctggcctgccctcttgctcgagtgaaaccaacccagacacctctgtgccaggcacggagttgagcgttggagactcagcagtatcagacagagaagccgctgtcctttctggggagttgggggcccactcagtggctttggcttggcgtctgtctctccctcctccttgcctgatcccccctgcccgacccccctagggctctgcatctctggctgactgctcaggtgtgtgtgtctgagtgtgtgtaagagtttgtgtgtctctacttctgtctctgtctctctgaaaatccactgacagctctccacctccctctgctgctctcttttgtctgcttacttttcgctttctctggctgccggctgatttcagcctggctgtgtatctgtctctggctgtccctcccgtgtctttgaccctgtctgtgtttcattcaggctcagcttctgcttctccctggctatctctgtgtgtgtccctgcccctctgcccgcatttctggctgtctctgccagtctgtctccatccctatttgcctatttgcctgaagagacaggcagtttctctgtctcttcatatccatctgtgtctctctgcctctgtgactttttctctggctttcttgctgtccccctgtctctctgcatctctgtctgtctccctgcccactgccatccaccctccttcagagccttgccctcactcctcctttccctgccctcctgtgcccacagggaccccaaccagccggtgccgcaggataccaagttcatccaca

SEQ ID NO: 85068 - DNA, 1095 bp, Homo sapiens
ctagtggcccatgcctgtagtcctagtgactcaggaggctgaggtgggagacagttgggactgcagtgaactgtgattgcaccactgcactccagcccgggcaacagagaagaccctgtctcaaaaaaaaaaaaaaattgaaaacaaggtagaggcaggtaagagccttggaacccagaagggcctaggaaaggctgaggacagggacaggcctgtggggcaaaaggttaatgagggtcctcagggctcagggccctgtggctagggagagcattctcttcacagccacagcttctaggtgctgtgtgggccctggcaccccagcaccaccacagatcacctcctctctcctttttatttttttccagtcacctcccagttagggaacggtacacccaattcttgcttgtctcctcggcagtgctggatccagaggctagggggtagcagccggacagggcctccacctcccgggtcagttcccgaagccgccgtctcatgtcccgggcatcatacactattcggcctgaggagcggtgccgggaaaattcagggatgactgctgggcccagggtgggagctgggacaggctggtactgagccgcctctgcctctggcaccgccccctccccaccgttcttgtggctaggagcctcagggctgggaggtggggggttcacaggatacacataggcccttaggcccagctcggaccatatgcctgttttgaggggcctttcctctacggtaggctggaagcggatggtctggggaggggactctggggcatcctgagaccagggaacccaggtcccctgagtgtgttggaagccttcccagtcctcagggacatcccagtggtaggagcagatggctgggtactgatgaggcttctcgtcatcagtgtcaggagcccaagctactgggcagtgagcacagcgtgtgggagagcctcgacggcgatggcggtgagctgggggcggggacacagtcatcatcacagggtccatggtgcaccgaagatggactgcaggagaactctgcttcttagggggctgggtctgctttctgagtaatgatgacttgggagcttct

SEQ ID NO: 85069 - DNA, 1095 bp, Homo sapiens; identical to SEQ ID NO: 85068

SEQ ID NO: 85070 - DNA, 1071 bp, Homo sapiens
gtctagctgttggctttggcctgaaccggaaccagtctcagatgaccacgggtttaaccttcttatcccagagacacccaattctagagctttatggagccgtacttccccctgaatcctagctctaggacatagatcatgactctcagcccttttacccaggatggagctggggcctgtatagccatattattgttctaagtaagttctagccccaccctcccgccttcttgagtgatacctattacggatgagttctggaaaagacccagctatgattcataaaaacacttctggatgaatcaagaaccatttcttgtttttcctagataattctctaaaaatatgattcttccatatagaatgctaagcttatttttacatgcagtttctagctccttcaacccagctgaggtcgtgccagggagacagagtctggagaagggcagaggaattttggaaggatccctggctcatagtagggaagctgggatgggggaggggtcaaaattatggcatgactgaacctgcatctgtgttgggtggacatgaatacttagctacctcagcaggaattccttccaggtcccctttaaagctgaggtccttagagtaatatgtccttaataaaaaggacaaatggatacagccttgaccctcccagtgaggagaccccaattcagcaataagtctcacccttctcccctacaggtcaggccaagaagggtgaaggcctcttgcactccagacctcatacgccccaacagcttctaattggatagaacttgctttaccttacagctcacaacctcagctgggttttaggtacccaaaaagggcctgtctagattttttcagaaaaacgtggagtgctaggggcagcctggaaaagatggggaacctgctagtgaactaggagggagacttccatagcctcagacttggatagggtaggctgagggggccctaagggagggactaaggctccaaggcaggtcacttttccttaggctgttctacttctggcttgttgcaagaggagtagatgccccctcacccacacaaacccca

SEQ ID NO: 85071 - DNA, 1067 bp, Homo sapiens
gatttgcacatgaccttccatccttacctgtattcccatctccccagtgtcactcccctcaccaatcactccagatggttttgggggaaccattctactcttctggtgggctttggggtatccccaccaactttcccttcaaaatagcaccttacaccccatctttgactcagttccccacacccaaagatcccagcctagggatggggtacagggactttaaatagtccctaatccctaatttgcactagttaaccctggtcagggtccctgtatttccttccagtgggggagataaatgtttgctcctaattctctttgaaaactgggcctccctgctctgtgattggataaatatttcccatcccacccacctccccccaaaaaatagctcacaaggggagagccagtatgggggagcaaatttgacaaatgggaattagaggagtgcagttttaaaaggaaaagttgctgtcatcaaaatggcagccttttccccagctactgtttttggggccaagatggctgccctagcagcaatcactgccaagggcaagatcatggcttttggagggaggtgagtttagggagggccaggaccatcctcctacccctcataccctcccagcatatacaaaaggggaggttttagacaggctccctgaatgttaaccacagaggagtcactccttcattcctcctctgtctctttgcacttttcttggtcttggccacagcctgagtgacgaatttcctactgaatgtaccaagttccaatttttaagggggggaaaggtttcaaatggggaaaaacacacaaaaaaaaaaatcactaaaaattcccacaaatcttgtttctggcactttagaaaaactgcaaaaaaatacgtaataaagaatacatatatatatatctacacacaaattatatatctatctatctatacagcggaaccacaagagagactgaggaaggcctggaggcaggggcagaggtgacgacagtgcccctatatccttaacccatactcctctgaggcaaacaggcatgggaaaatggaagggtt

SEQ ID NO: 85072 - DNA, 2058 bp, Homo sapiens
aacatcggctacttccggacaagccactggtcctgccatcttggtttgttcatgcatattcagcaagagaactgcatattcatgagcaaccgcccttccccgggaggacccgccccgccccgccgccattaccgattcgcagagcagaccattttccagctggggggggctacgaatgagaggcttttgctgaagatgaaaccgttgtccaaactagaatgaaagcggcccaattttaccctcgagtcttcaaaccttaagcctcagtgcaaaagggagcagcgaggagaggcggtgggattaaagaaaaaaattcttctctccctgtcacttcaaaaggtcgcccaaccagcgagcggggggtttacccacgactctggctcgcaccccttgcgggcctgcgcaggcggccccgtagcgcaagggagggcgggaaaggaaggggcggggacgcgagggcgaatctataagaagcgtcgttcagcgagttcgctgctcagaagcgccgagagcgcggccgggacggttggagaagaaggcggctcccggaagggggagagacaaactgccgtaacctctgccgttcaggaacccggttacttatttattcgttaccctttttcttcttcctcccccaaaaaccttttccttttcccttctttttttttcctttttgggagctgaaaaatttccggtaagggaaagaagggctcctttcgctccttatttccccgcctccttccctcccccaccttcccctcctccggctttttcctcccaactcggggaggtccttcccggtggccgccctgacgaggtctgagcacctaggcggaggcggcgcaggctttttgtagtgaggtttgcgcctgcgcagcgcgcctgcctccgccatgcacgggggtggccccccctcgggggacagcgcatgcccgctgcgcaccatcaagagagtccagttcggagtcctgagtccggatgaactggtaagcggctctgtcctccccttcccccctcctcccctggcgggcggggccggacgggggctgcggaaacttggcgctttctcgctgcttatgggtgacgggccaggagcatggctcagcagcgccaaggccgtgtaggcgccagtctcgggcctcccagagttatattttgcaaagagttgagcaggcgtagcgctttgtccgagatggggggctggctggagggtgagaaggagggagagaaggatgactgatttcacactccagagttaccgacgttaaaggcgatccgacgaatcctagggagtctttacaagtttggttaagaagccaaacccgggtagcttcctcctcttctgtaatacaaatgttaactgagcacctgctctgttgaagacacaggagactcgggttacagaggtgaacacgacagaccaggaccctaccttcaagagcactgtctgtgggaaagggcaagcagtaaacatgaatacaatgaatgaatgagataattcagttaatggcatttgtctcgaatagagtgaaaaggggtaatcccatggagagtcactgagctggggctactttatttttttatttttattttattttattttttgagacggagtcttgctctgtcgcccaggctggagtgcaatggcacgatctcggctcactgcaatctccgcctcccgggttcaagcgattctcctgccttagcctcctgagtagctgggattacaggcatgcgccaccatgccccgctaatttttgtatttttagtagaggaggggttttgccatgttggccaggctggtctcgaacgcctgccctgaggtgattctcccccgtctttttttttttttttttttttttgagacggagtttcgctcttattccccaggccagagtgcaatggctgaactcctgacttcaggtgatccacccgcctcggcctctcaaagtgctgggattacaggcgtgagctaccgcgcccgtcgaggtggggctactttagatgggatggcgtcagggtctgggaaggcctatcttagaagacattacccaaatg

SEQ ID NO: 85073 - DNA, 1381 bp, Homo sapiens
gaggctgaggcgggcggatcacgaggtcaggagatcgagaccgtcctggctaacacggtgaaaccccgtctcccctaaaaatacaaaaaattagcagggcgtggtggcaggtgcctgtagtcccagctacctgggaggctgaggccggagaatggcgtgaacccgggaggtggagcttgcagtgagccgagattgcgctcctgcattccagcctgggcaacagagcgagactccgtctcaaaaaaaaaaaaaaaatgctcccacctcagacagacccccaacccccacctcagtagctgggacaacaggctcataccaccatgcctaatttttaaatttgttgtagagatgggttctcactatgttacctaggctggtgaactgggctcaagcgatccccctcctctgcctcccaaagtgctgggattccaggcatgagccactgcgcctggccgatgtcatatctttaggagcgcttccctgaccactctgtttaaatagcatcccccgcccttcccttgttttctctgatcattctctgctatattttccttcacagcctgtcactccagaaaggattagtttttctgtttcttgcttccttgctagagaatgaatttcatgagggactttgtctgtgttattcatgttcccttagtatctcaggtagtgcctggcacatgatagacatgtaataaaaattagttgaataaacaagtgaatgaaataattgggcaaatatgcatagataatgtagaaggacttttattgcaacattgtttgaaagtgacaattataaattactcggtatttactaataggaatcctgttgaataacttagggtgtattcttacaatgtaatagaggaacttcccaataaggtcccacactgtgctgatgccctgagacactgtggcacacggtgggcacagtgaggtattttaaatttccaagagaaacacaggtacatttgtcagataccctggaactcctagttcctggtagttctgtttcaacattagatggtgccaaatccctttctataatgtcatatttttgtgaaactgggtttttagcagttgctaagtacaggcaaaaatcagtttgtagaagaaataaaggtggtgctgtttagtctgattccaaggtttgagaggtgcagtgcctaacaggcgccataagtgagtgagatggttatttggtaaagaaataaaaatgttattttgttttaatatattaatagtattttcaacttgtgtgtattttctcaaatggctagtaagttcctaggacataaatgcttaagttgtttgggtctaggtgcttaataaattgctgtcttttcttggaaagatggagtcttgctctgttgcctaggct

SEQ ID NO: 85074 - DNA, 1923 bp, Homo sapiens
aaagtgctgggattacaggcttgagccactgcgcctggtcaataatgtattcttttaggtagagtgtgggctacattgatgagtgagaagatgatccttgttttcaagttacctataatcttgtgagggatttcctatgtatgcagcaaatagttactgagcctcaaccatatgttggttactgtgctaggtgctgaggatatgaagagaaaacatgacccttgccctcaaggattacagtccaatgagagagacagatgtgtcaccaagtaattaaaattgggctgagaaccttgctggggtgtgcataagactaggaagagttagagaagacttcataaggaggtgacctctgaactgggtcttaaagaataaatagaagtttactcccaagggggtgtgtgaagcaaaaggagatttgagaaatctattgtatttagaacataaatgtgggaggcgggtaggagaatgtggtaccaaataaagctgtaaaagcaacttgaagccaaattgtaataaggaccttgttagctttgctaaagcagaggaaagaggacgagtatttactgagattcaatgacagcccttttgttattgtggcctcaggggcagaacccaaagagaacccagcctgactggccaccccctcaagtgtttaacctttatcctgtaggcagtgagaaccattgttggccgaagggttgggggctaatttaaaatgacagtttgaggcctggtgcggtggctcacgactgtaatcccaacactttgggaggctaaggtgagtggatcacttgaggccaggagtttgagaccatcctggccaacatggtgaaaccctgtctctactaaaaatacaaaaattagccaagtgtggtgagcacctgtaattccagctacttgggaggctgaggcacaagaatcacttgaacctgagaggcagaggtggcagtgagccgagattgtaccactgcactccagccggggtgacagcaagaccctgtctcaaaaaaaaaaagtaaaataaaataaaaaatgagagttcgtgaacttggtgatggagggatagctcttctcattaacaaggatatgcgtgtctgctgtctaggacaccccctgacccggtctcagaaagcctgaaagcagaattagtcattagaagggtggttggcttggtcggcatagactttgagcagaaagaggttgaaaatgttgagcctgatttctcttaggcccctctgcagtgtctgttgtggaggccagatacgtaactgcttccgctttttttggtctcattcaaggtgagcaaatccccttcatgtttctcaccagacaatgcagctgatgaggttccagctttgcaaatgtagtcatccatgaggactgtcttcctgagatttcatcaggtcatgttgatgagagttttgaacctgtctgaggctgagaggtgtgcagaacttcttcagctttgcatctgtagaccattttggtttctacccagcagtggccaatcagacctattatgaggggattactggtttgactgtcagagggtaacctctctttttccaagttttttgagggtacctccctccagtggagagtcctaagcagtaggtcaatttaacagacatttgttaggagcccaccatgtttcaggcaggcacatgggattcaggatggttgaggcattctgcctgcctgagaggtgcttatagttatagggaagacagacccccataggtcattttattgcattgttgtatgtgcagtgatagagggctgtggaagcacagaggaggggtgcctgtctactttgggcaggctgtggaaaggcttcctggaggaagcagtgcctgagccgagtcttgaaataggagttttgcagtgggaagagcattccaagcagagaggcactagcat

SEQ ID NO: 85075 - DNA, 2425 bp, Homo sapiens
ggcagggggtgattgagcggactggccgctgccaaacatgtgcaggtaagtgctggggggccaggtgggatcccaaaggggaggtgggttgggtcctcaaaactagggctgacggttgacacctggaggcctctgagatgagtgggagctgggaggaaagcactgggtgtgtgtcccacaggaaacatgacagagtgtcctggccactttggccacattgaactggccaagcctgtgtttcacgtgggcttcctggtgaagacaatgaaagttttgcgctgtgtctgcttcttctgctccaaactgcttgtggactctgtgagtggggaacaggctctggtctgggagcgggggtgcttggtagggggcagggggacagcttcaactgaccctgctctgccctgtccccagaacaacccaaagatcaaggatatcctggctaagtccaagggacagcccaagaagcggctcacacatgtctacgacctttgcaagggcaaaaacatatgcgagggtggggaggagatggacaacaagttcggtgtggaacaacctgagggtgacgaggatctgaccaaagaaaaggtggctggggctggcggagacttttgggaaggaggggtcagaggcctggagggaggaaactggaagggaaggaaacaggaggggctggcctggtgtggagggaaatggcccaccctctgggctctgatggcccctgtctctccttggaagggccatggtggctgtgggcggtaccagcccaggatccggcgttctggcctagagttgtatgcggaatggaagcacgttaatgaggactctcaggagaagaagatcctgctgagtccagagcgagtgcatgagatcttcaaacgcatctcagatgaggagtgttttgtgctgggcatggagccccgctatgcacggccagagtggatgattgtcacagtgctgcctgtgcccccgctctccgtgcggcctgctgttgtgatgcagggctctgcccgtaaccaggtcagtggctccagggctctgcctcttagctggagggcgaggtgtctaaagggaggaagacctgtaggtggggatgggtggatggacctgggtttgaaaattcccctgctacttactagctgtatgatctttaatgagtcctttcacatggttaaaggccacaaacgtgtttctgaatctataaatgatagtgggcagtcctgcctcctggggtggtgtgaggatgagagctgtgctgtgtgcctggtacgttcctgccgagcgctggcagtggtggctggaccatgatgattctgacttcctgcctcaggatgacctgactcacaaactggctgacatcgtgaagatcaacaatcagctgcggcgcaatgagcagaacggcgcagcggcccatgtcattgcagaggatgtgaagctcctccagttccatgtggccaccatggtggacaatgagctgcctggcttgccccgtgtgagtcagcatgctccccacccctctgtgtattggagccagggtgggggctagcatgaggcttcagagctctggaagagggcccagtgctgactttctggattgcccccaccctgtgttttttcctcacaggccatgcagaagtctgggcgtcccctcaagtccctgaagcagcggttgaagggcaaggaaggccgggtgcgagggaacctgatgggcaaaagagtggacttctcggcccgtactgtcatcacccccgaccccaacctctccattgaccaggttggcgtgccccgctccattgctgccaacatgacctttgcggagattgtcacccccttcaacattgacaggtgtgcctccgttggaaagcccttcctggaatggctagggaagacatggcctcagtggcaaggcttcgagagtctgctcctcctacctcgggcgtgggcttggagcaaggaggaattgaagttctgaagtttaacttccactcagggagggtggctgcaggggtattttaggaagcattgagttcattgcacctctttccttcctagacttcaagaactagtgcgcagggggaacagccagtacccaggcgccaagtacatcatccgagacaatggtgatcgcattgacttgcgtttccaccccaagcccagtgaccttcacctgcagaccggctataaggcacgtagcaggccagggcctctctcagccacctgagcagaaagctttccaagatagggcaggctgggttaggccatctgagtctgtctcgttcattgggatccagacttgactgtcttgttaaaggctgttgctgcccaggtgtgcagggagctgttggtctctggcattcagggtgggggtggtataaacccggggcagcttgcatatggcagggaagagggatccgtggaggaacagtgc

SEQ ID NO: 85076 - DNA, 1034 bp, Homo sapiens
ctgagaccttttccttacctcacctctctaggtggaacggcacatgtgtgatggggacattgttatcttcaaccggcagccaactctgcacaaaatgtccatgatggggcatcgggtccgcattctcccatggtctacctttcgcttgaatcttaggtcagtccctggctgagggaagcaggctggaattggtgggaggcgggcaggctgggtggctcctcaaggtttcgctgcagacatcttcccaaccctgacttttctctttaactgtagtgtgacaactccgtacaatgcagactttgacggggatgagatgaacttgcacctgccacagtctctggagacgcgagcagagatccaggagctggccatggttcctcgcatgattgtcaccccccagagcaatcggcctgtcatgggtattgtgcaggacacactcacagcagtgcgcaaattcaccaagagagacgtcttcctggagcgggtgtgtggtccaaatggaaacctggcttaagtgggcagtggggctctggggtgcaaggtggaggctagagaggaagagctgtgttttttttcctgacttacccagcagtggtctgtgagattgtcttttctggtgggcgaacaaaaagggggttaggaaaactcaggccaaaaaggtgtaaggcgttaattccccatttaattccttaaaatttcatgtaataccaggtattgcctgtaaaggaaagataaagggaaaaataagtaagaccttgttcaaattttatttttctattttaaccttcacttatttcctaattattaaaagaaatttatgcttattgttaagaacaaaaacaaaaatttcagtattacaatgaatttttaattaaaagtttttggggccgggcgcagtggctcacgcctgtaatcccagcactttgggaggccgaggcgggtggatcacgaggtcaggagatcaagaccatcttggctaacacggtgaaaccccatctctactgaaaaatacaaaaaattagccgggcgtagtg

SEQ ID NO: 85077 - DNA, 3309 bp, Homo sapiens
acaccaaggtagggcttggcttctggatatgtgaggacagaatttggacgtgggagccaggaccagagcaggggccttgagtgggtgctttgtccttaggtggtggtggagaatggggagctgatcatgggcatcctgtgtaagaagtctctgggcacgtcagctggctccctggtccacatctcctacctagagatgggtcatgacatcactcgcctcttctactccaacattcagactgtcattaacaactggctcctcatcgagggtgagcatggaggcgtggtaccaagacgtctctgtgaattctctaacttcttactgtccttccatccctttctttcctccttggatttggtgccccctgcttctactctcttggctataattccattccatgtttcttagaggtccaaaggggtttgctgatgtttttccctgtctctaggtcatactattggcattggggactccattgctgattctaagacttaccaggacattcagaacactattaagaaggccaagcaggacgtaatagaggtaagaggggaggccaccagagacggaataaggggtttccagggacttcgaagttagcatcatcaagagcaaagggagtgtaaggttagagggaaggggcagagagtagggattgatgtctcaccgagaactctgcctccaggtcatcgagaaggcacacaacaatgagctggagcccaccccagggaacactctgcggcagacgtttgagaatcaggtgaaccgcattcttaacgatgcccgagacaagactggctcctctgctcagaaatccctgtctgaatacaataacttcaagtctatggtcgtgtccggagctaaaggttccaagattaacatctcccaggtgagaagccttgtttttccatatacggggccgctgtgaagtttgggaggaggaaggaaggtgtttgtatgtattagggtcaggagaatcacgggagttgggggaaattttgggaactgttattcttaaggcagagggaattcagtatacaccacctttctgtttcccaggtcattgctgtcgttggacagcagaacgtcgagggcaagcggattccatttggcttcaagcaccggactctgcctcacttcatcaaggatgactacgggcctgagagccgtggctttgtggagaactcctacctagccggcctcacacccactgagttctttttccacgccatggggggtcgtgaggggctcattgacacggctgtcaagactgctgagactggtgaggctttcctcaggggtcttccttgggctgttagcagggactgctgcaggctgagaaacccctaacaggtggggagcggaaatgctcaggctcctattcccagggtataattctggcccttgtggaaagaatagagtctcaagagtaggcaaacacccttgtttggattgctgtgcagcattgcacagtgcagggacagagcttccggggctctgccggcctgtcccatgggagtggttcctgctgggctttttgtccgtctagtggtagacactgagtttgcattcaaaggcctcagacacagagagtactagctgactcttctgacagtcaggtaggttaaggccccagcctgggtctttgggctttatcatccccttacttccctccaggatacatccagcggcggctgatcaagtccatggagtcagtgatggtgaagtacgacgcgactgtgcggaactccatcaaccaggtggtgcagctgcgctacggcgaagacggcctggcaggcgagagcgttgagttccagaacctggctacgcttaagccttccaacaaggcttttgagaagaagtgaggaggcgggcaggcgggtggttctcgcccctggggctcagggcctgagtagtaggattcccatacctattccagagagatagcctggtatgtgtcttgcactagagcttacctttcagcatccttccccacctatctgaaacagctgtgtgacatgggggaggtggtggatggaggtggatttaagattggtccccacatcgtccctgctgatattataaagcagatgcagaggggtgggcctgtactcaggtcccagtggcagtccttgggcctgaatttttctctgtccaggattcttgcctccaaaccactgtacttggtcggctgtgcacctttgggaaccttacagtgcgttttgtggggaccaaggtcccagagcccacctgtccactagctaccccttgcacttccaggttccgctttgattataccaatgagagggccctgcggcgcactctgcaggaggacctggtgaaggacgtgctgagcaacgcacacatccagaacgagttggagcgggaatttgagcggatgcgggaggatcgggaggtgctcagggtcatcttcccaactggagacagcaaggtgcgtgtgggtcgaagtgctgatgctagagatgtgcctccctggatggctgtccccagacacagccctccctccatttccccctctctcaggtcgtcctcccctgtaacctgctgcggatgatctggaatgctcagaaaatcttccacatcaacccacgccttccctccgacctgcaccccatcaaagtggtggagggtaagtacctgcttaggggtctccaagccaggctaggggataggagactgctgggccctggtctaatgatctcctcacctttaattggtccccaggagtcaaggaattgagcaagaagctggtgattgtgaatggggatgacccactaagtcgacaggcccaggaaaatgccacgctgctcttcaacatccacctgcggtccacgttgtgttcccgccgcatggcagaggagtttcggctcagtggggaggccttcgactggctgcttggggagattgagtccaagttcaaccaagccattgtgagtgttgtgctcttcacagcagtcttcttttcctccttttacctgttgacttctgtggtttccaagagcagcccacttctgtccacaacctacagaataggttctgtaggttctgtcccacctaataatagctctcattcatggagagactgcttgtaccttaccaagtcctgtgtttggcccattatcgctttataccatcatggctttaatacactcctagtaggggagggtttgttagtcccatgttgcagagacaaaaactgaggcttggagagagtgactggattgtgtgatggtcatataggaagtaagtggcatgactgggatatgacataggagaattgttcttttt

SEQ ID NO: 85078 - DNA, 1112 bp, Homo sapiens
tggtggctcatgtctgtaatcccagcactttgggaggccaaggcaggtggatcacctgaggtcaggagttcaagactaacctggccaaggtggtgaaaccccatctctactaaaaatagaaaaattagccgggcatggtcgtgtgtgcctgtaatcccagctgctagttggggctgagacaggagaatcgcttgaacctggggggcagaggttgcagtgagccgagattgtgccactgcactccagcctgggcaacaagagcgagattccatctgaaagaaaaaaagaaaaaaaaggagaacttttccccttgaataaagggttttggattcccttgataaggagggttagaagagacgtttagagctactcagttccctgtgtcatggacttctgtctcttcccaggatattctgtgccgtctggagcatacaacgttgaggaaggtgactgccaacacagccatctactatgaccccaacccccagagcacggtggtggcagaggatcaggaatgggtgaatgtctactatgaaatgcctgactttgatgtggcccgaatctccccctggctgttgcgggtggagctggatcggaagcacatgactgaccggaagctcaccatggagcagattgctgaaaagatcaatgctggtaagcctaggagggctggcctggctcaggagccccgctctctgggctaccacctatcgtgttcaccgcacttgagcccccaaagagctacccaccctcacccccatgcatgtaccagttccgcccctccgaggcatcctccaactctccaggtcccctctgcactccctttctcttctgaatgttctcccttcccctttccagggggttctatgaaaagaaagtttctgtgaggagcggggagccaaaagagagccttgctcagagagagctgcgagtggacagtggctggggccagtccccttagctgcagcctttctcatggctcctcaccccaccaggttttggtgacgacttgaactgcatctttaatgatgacaatgcagagaagctggtgctccgtattcgcatcatgaacagcgatgagaacaagatgcaagaggtaatgggggtcctag

SEQ ID NO: 85079 - DNA, 1610 bp, Homo sapiens
gatcactgtcatgccagcagcagcctagatgaacacacagtgaagtgccagagcagggaatggtgtgtgctcgggtacagcagttgggaggatatgacatgtacgtggagcccgcctctcgctaggcgcaggactgcacaagagtggaagttgtgacggggtggtgggatttgggtgcctttccttaggcttcttttaatattgtaaaatcaggattaaaagtctcactggagaattgcaggaacatgggaggtagaggttgcagtgagctgagatcgtggcattgcactccagcccaggctgataacagcgagactccacctcaaaaaaaaaaaaaaaaaagtctcactggaactgtgaggggcagagcctggtgactgactcgtttggccctcaaagaggctgtagttggaggcgagagctggggaagagaccagaggatgccaagtgctgacctcactctcactgcaggaggaagaggtggtggacaagatggatgatgatgtcttcctgcgctgcatcgagtccaacatgctgacagatatgaccctgcagggcatcgagcagatcagcaaggtcagccatcccctctgccaccgccttcctcctcccactcccacactcccctccctgcctactctgagcacgctgtcttcccacaggtgtacatgcacttgccacagacagacaacaagaagaagatcatcatcacggaggatggggaattcaaggccctgcaggagtggatcctggagacggacggcgtgagcttgatgcgggtgctgagtgagaaggacgtggaccccgtacgcaccacgtccaatgacattgtggagatcttcacggtgagcccgtgtgtgctgcctagctgcctttcgtggatctctggctctcaggcccctcattctgtgctgtccactcaggactttttctgcctgattccatttctgagtgtgggatatcctggctcctgacaccctccctggatctgggtggcgacagaagcagggaagagagcagagttgctcagtcctggccctcccctccacttccctcccctgtgccaggtgctgggcattgaagccgtgcggaaggccctggagcgggagctgtaccacgtcatctcctttgatggctcctatgtcaattaccgacacttggctctcttgtgtgataccatgacctgtcgtggccacttgatggccatcacccgacacggagtcaaccgccaggacacaggaccactcatgaagtgttcctttgaggaaacggtaacagtggaatttctgaatagggcagaaggagggagtagtgtgagaagaagggcacacactttgggcagctgggctgtggtgatgggacagtcaggtgctgtgtgtggaggggtctcatggggccggtctgctctgttcaggtggacgtgcttatggaagcagccgcacacggtgagagtgaccccatgaagggggtctctgagaatatcatgctgggccagctggctccggccggcactggctgctttgacctcctgcttgatgcagagaagtgcaagtatggcatggagatccccaccaatatccccggcctgggggctgctggacgtgagtatg

SEQ ID NO: 85080 - DNA, 1595 bp, Homo sapiens
ccagagtccctcttattcccccacttcaccctcctactcccctacctctccatcctattctccaaccagtcccaactatagtcccacatcacccagctattcgccaacgtcacccagctactcaccgacctctcccagctactcacccacctctcccagctactcgcccacctctcccagctactcgcccacctctcccagctactcacccacttcccctagctactcgcccacttcccctagctactcgccaacgtctcccagctactcaccgacatctcccagctactcgccaacttcacccagctattctcccacttctcccagctactcacctacctctccaagctattcacccacctcccccagctactcacccacttccccaagttactcacccaccagcccgaactattctccaaccagtcccaattacaccccaacatcacccagctacagcccgacatcacccagctattcacctactagtcccaactacacacctaccagccctaactacagcccaacctctccaagctactctccaacatcacccagctattccccgacctcaccaagttactccccttccagcccacgatacacaccacagtctccaacctataccccaagctcacccagctacagccccagctcgcccagctacagcccagcctcacccaagtacaccccaaccagtccttcttacagtcccagctccccagagtataccccaacctctcccaagtactcacctaccagtcccaaatattcacccacctctcccaagtactcgcctaccagtcccacctattcacccaccaccccaaaatactccccaacatctcctacttattccccaacctctccagtctacaccccaacctctcccaagtactcacctactagccccacttactcgcccacttcccccaagtactcgcccaccagccccacctactcgcccacctcccccaaaggctcaacctactctcccacttcccctggttactcgcccaccagccccacctacagtctcacaagcccggctatcagcccggatgacagtgacgaggagaactgagggcacgtggggtgcggcagcgggctagggcccagggcagcttgcccgtgctgctgtgcagttcttgcctccctcacggggcgtcacccccagcccagctccgttgtacataaatgccttgtggcagagctcccggtgaacttctggatcccgtttctgatgcagactcttgtcttgttctccacttgtgctgttagaactcactggcccagtggtgttctcactcctaccccacccaccccctgcctgtccccaaattgaagatccttccttgcctgtggcttgatgcggggcgggtaaagggtattttaacttaggggtagttcctgctgtgagtggttacagctgatcctcgggaagaacaaagctaaagctgccttttgtctgttattttatttttttgaagtttaaataaagtttactaattttgaccaaaagtatgtacatcgagtgcttcattggggttcaggagacccccaggcccctgcctcctgcctgggctgctgcttga

SEQ ID NO: 85081 - DNA, 1677 bp, Homo sapiens
cctggtatatcacttgtctccagccacaaacctcacctggacattccgtcctgcctggcaatcttacattcccccacgaagcttgctttcataatcagcaagttgagattttgtaccatttctcctcaaatctcctgtctccatctccctagttgtccagaggacctagaagtcatcgagcaaaggttccctcatctccccccagcaaatctacaaacccacctggtctcttgttctcctttgaccctctggtaatggtgggagatgtgtcctctcttctttctggaaacttccctctcccctttttggatgtggcccctgcatggacccctcacccctgcaccagccacctcgcctttcatgcagaccatgtccagtacacaggcacattctagctgggttcaaatcttggctccaccacttagtatctcatggcctcagacaagttgtgtaacctccatctgtaaaatggaggtaattagagtatcttccttttagggctgttgtgaggattagataagaccaaacacaagtgccagacacagtgcctatctcaagaaagccctcagtacatgttagatcagatgaaaatagtattgttcacagaactaaacttttccttggtccacacacccctccacctactggcctatttctctgctccttgttacagagaaacttctaaaaagggttgtcctaggccgggtgcagtggctcatgcttgtaatcccagcactttgggaggccgaagcgggtggaacacctgaggtcgggagtttgagaccagcctgaccaacatggagaaaccctgtctctactaaaaatacaaaattagccaggcgtggtggcgcatgcctgtaatctcagctactggggaggctgaggcaggagaattgcttgaacccgggaggtggaggttacggtcagccgagatcgtgccattgcactggatccagcctgggtgacaagagtgaaactctgtcacaaaaaaaaaaaaaaaaaaaaaaaaaaaaaaaaaaaaaaaggttgtccctgcctccagttccttatttctcattttcttctcaacccaatgcacactgccttcctgttctaactatgccactgaaaccaccctctttaaggtcagcaggactttcacgttaccaaacccagccatcatttctctgttctcatttcatgtgatctctcagctgcattcaacacagacagccacatcctccttgaaacagtggtttctccgaatccaggatgccaccctccctgggtttcttcctctctctccagcttcttttcagtctctgctggttttcccctcagctccacttcaagatgcccaagagtctcagggcttcattcgtggggcccttctttctcctggcgtctcacccaatcctgtggctttaaatgccatcgataggccgggcacaagggctcacacctgtaatcccagcactttgggaggctgaggctggcggatcacctgagatcaggagttcaagaccagcctggccaacacggtgaaaccctgtctctactaaaaaatacaaaaatgagctgggtgtggtggcacccgcctataatctcagctacttgggaggctgagacaggagaatcgcttggacccaggaggcagatgttgcagtgagccaagatcgaaccactgcactccagcct

SEQ ID NO: 85082 - DNA, 2003 bp, Homo sapiens
atagtgtgtatcagtacttcactctttttatggccaaataatattccattatatggatagacattttgttgatggacaattgggtttcattttattatttttagttgtactaattcagataatgtatgtttacatcctccatataaaagaagcaaataatatagatatccatgaagtaaaacattaaatcccctcacgcttctccttcagttctactcttctccccagaagtgactgcaggtgacaatctgccctgaatgtctctggccatatacattagattttttcacataacttcctagtcaactatgggcatcataggggatgggtcctcccttgcccggggtgatctatgtgtcttctgggtaaagtgggcgccgaatgttcatatgctcaatggatccctggggagtgtgggggagtcctgtagagagacgtttccttatctctgagcatccgtgttcaggtgtggacgggacagtgagtggctgggaggaagccagaatcaacagctccagccctctgcgctacaaccgccagatcggggagtttatagtcacccgggctgggctctactacctgtactgtcaggtaagccccatctggctgcatgggtaacgcagtaagagagtggcgaagggtttgccaggagagtgggggacaagctacagggctgggagggtgagttggggtttgggtgggatgggatgcctgcgtcgctgaggaaattggaaattgaggcgagggcaggcagaggcctggactcggcctgttgtccccaccccaggtgcactttgatgaggggaaggctgtctacctgaagctggacttgctggtggatggtgtgctggccctgcgctgcctggaggaattctcagccactgcggcgagttccctcgggccccagctccgcctctgccaggtgtctggtctgttggccctgcggccagggtcctccctgcggatccgcaccctcccctgggcccatctcaaggctgcccccttcctcacctacttcggactcttccaggttcactgaggggccctggtctccccgcagtcgtcccaggctgccggctcccctcgacagctctctgggcacccggtcccctctgccccaccctcagccgctctttgctccagacctgcccctccctctagaggctgcctgggcctgttcacgtgttttccatcccacataaatacagtattcccactcttatcttacaactcccccaccgcccactctccacctcactagctccccaatccctgaccctttgaggcccccagtgatctcgactcccccctggccacagacccccagggcattgtgttcactgtactctgtgggcaaggatgggtccagaagaccccacttcaggcactaagaggggctggacctggcggcaggaagccaaagagactgggcctaggccaggagttcccaaatgtgaggggcgagaaacaagacaagctcctcccttgagaattccctgtggatttttaaaacagatattatttttattattattgtgacaaaatgttgataaatggatattaaatagaataagtcatagtctctctctttattggggctcaggggacactctcagggtagctgggggccacgtgaaggggggcgttgcggagcggcacagctggaactccgggatgatgttcaggcttgggggcggggacctccatgcctccagcccccaggtgggagcagaggtaggaaggcacactgcccaggaaaaaaatcaatcctccgcccaaggtacagcagaagcggcctccttggcctaggaggcagacttcctcctgcggggaaatcccttcctggctgggaggagcaggggcccttcctcttggtggcctcggacattcagcaggtgctggcacaggccctggctgggaggtggggcgggcaggagccagcctggaggaggggctgagagtcagcaggcacacgggaacccggaaccctgtgtgctggggag

SEQ ID NO: 85083 - DNA, 1013 bp, Homo sapiens
aggccgcttctgctgtaccttgggcggaggattgatttttttcctgggcagtgtgccttcctacctctgctcccacctgggggctggaggcatggaggtccccgcccccaagcctgaacatcatcccggagttccagctgtgccgctccgcaacgccccccttcacgtggcccccagctaccctgagagtgtcccctgagccccaataaagagagagactatgacttattctatttaatatccatttatcaacattttgtcacaataataataaaaataatatctgttttaaaaatccacagggaattctcaagggaggagcttgtcttgtttctcgcccctcacatttgggaactcctggcctaggcccagtctctttggcttcctgccgccaggtccagcccctcttagtgcctgaagtggggtcttctggacccatccttgcccacagagtacagtgaacacaatgccctgggggtctgtggccaggggggagtcgagatcactgggggcctcaaagggtcagggattggggagctagtgaggtggagagtgggcggtgggggagttgtaagataagagtgggaatactgtatttatgtgggatggaaaacacgtgaacaggcccaggcagcctctagagggaggggcaggtctggagcaaagagcggctgagggtggggcagaggggaccgggtgcccagagagctgtcgaggggagccggcagcctgggacgactgcggggagaccagggcccctcagtgaacctggaagagtccgaagtaggtgaggaagggggcagccttgagatgggcccaggggagggtgcggatccgcagggaggaccctggccgcagggccaacagaccagacacctggcagaggcggagctggggcccgagggaactcgccgcagtggctgagaattcctccaggcagcgcagggccagcacaccatccaccagcaagtccagcttcaggtagacagccttcccctcatcaaagtgcacct

SEQ ID NO: 85084 - DNA, 1250 bp, Homo sapiens
gggagtagtgcaggccttattccaacacacccggcccagccttaaccccagaactcagccagtttcttgcttccgtgcccctggttctcctccccatcgagcccacccctcctttcccaccttcagtcacccctagtgaactgccccagcgatctctgctgtgcttgaccccgagggtcttccaccctcgccctgaccctggacactgcccagcttggccccccatcctgctcctggcacaatgccctctagccagccaaccttccctcccccaaccctggggccgccccagggttcctgcgcactgcctgttcctcctgggtgtcactggcagccctgtccttcctagagggactggaacctaattctcctgaggctgagggagggtggagggtctcaaggcaacgctggccccacgacggagtgccaggagcactaacagtacccttagcttgctttcctcctccctcctttttattttcaagttcctttttatttctccttgcgtaacaaccttcttcccttctgcaccactgcccgtacccttacccgccccgccacctccttgctaccccactcttgaaaccacagctgttggcagggtccccagctcatgccagcctcatctcctttcttgctagcccccaaagggcctccaggcaacatggggggcccagtcagagagccggcactctcagttgccctctggttgagttggggggcagctctgggggccgtggcttgtgccatggctctgctgacccaacaaacagagctgcagagcctcaggagagaggtgagccggctgcaggggacaggaggcccctcccagaatggggaagggtatccctggcagagtctcccggagcaggtgagtgaggggaggagggtgtctgggagaggatggttagcatggggggtctctgggcctcctggtctgcaaagtttcaagggggtgcaagagagggtctccggtttggaagtcaggggcgcggccattccaggaaaggaaactgttaaaggttaatgcttctcatacctaacaaatcctggagggcagccagcaccaacactcagggtgctgggaaaaggtgcgtgagagatctgaggcatctcgggggcaggggagggctgggaaggcaggctggctgggaccctcgcatcttaacctaaccttgaccctctttccatgagcagagttccgatgccctggaagcctgggagaatggggagagatcccggaaaaggag

SEQ ID NO: 85085 - DNA, 2196 bp, Homo sapiens
gtttacaaaaatcctgtccacacgaaatcccttgtcggcctctcagtataagaacccccgtgtatacatctccagagggtaccattcccaaagtgacgggatgggatctctcccagtagtggagtacatcatcttacagttgtgaaagaatatttccctttcggagaactccagccaaacagtttcaggctctctaggtctttattacatattctagtattcattgagcctttacaatatgctgggtactatgctgggtgtttggcatatagtggtgacaaatatcccgaagttttcatttctaaatgctaatcctttttctttcttcctgtctatgagtaggaactctctctccatccctgtagaatctcttggacatgtttatctcatgcttatggggtccccatttcttggagtgggattgacattggtggattctgcttcagtgtatccttcttgcggtcttatttgcatgcatgagtcaactgtgtgcatcccattgtgctttccccaggccagtctctcatgcccattccatttcccctgccctataggcctcctttcatgtactctgcccaacggttttgggggacaatctgggccagaaggggagcgcagcttggcaccccctgatgccagcatcctcatcagcaatgtgtgcagcatcggggaccatgtggcccaggagctttttcagggctcagatttgggcatggcagaagaggcagagaggcctggggagaaagccggccagcacagccccctgcgagaggagcatgtgacctgcgtacagagtaaggagcccttaagcaactagcctctctcccttctccgactcctagaggagagtctggaggcctcaccccctcctctctccctttccaccaggcatcttggacgaattccttcaaacgtatggcagcctcatacccctcagcactgatgaggtagtagagaagctggaggacattttccagcaggagttttccaccccttccaggtgaggcttgaaagccctccttgaaagaagggctggggccttggggatgtggagagaatactgctgccttttcttccatagggctgtagttggggaggaggaagctagagctgaaggggaggactctgcaggcaggtgccaaatccttggaagctgatgggagagtctttacctgggaccctgaaatgttctacctgagtagtcatgtttatctttctggggagtgggcctttcgcaggtcctcagaaggacccatcatgagccagaaaaaagggagtcagttagaatttgtattccagggagtagtaggtatttctgtgtgccccagctgcatcatcttttgtgtgactccacccttggcctactcaggaagggcctggtgttgcagctgatccagtcttaccagcggatgccaggcaatgccatggtgaggggcttccgagtggcttataagcggcacgtgctgaccatggatgacttggggaccttgtatggacagaactggctcaatgaccaggtgagaaagggtagagaaacaggcctgagaggggattcagggagcagggtgtctggggccctctgcatgggggagccctgtacccatgccgcaccctccatggcaagctgcctcccatcttctccccaggtgatgaacatgtatggagacctggtcatggacacagtccctgaaaaggtaggcccaaccagataggtcagtacccagaggaacttctgcagttttaagcagctttttaagctcctttcatctctttcattttacacagagagggtctctgtttcagggagagaggtggtagtggtagtgtattaatttcaaatccgtaatcttgggctctggatttatcagttgttttcctttctgccagtatttagtgtttttcgctatggccagccccaaggattgggatgggttcctattgtaactattgtaaaacaagatttaaaaaaaaaaagaaaaagaaaaaggccaccgggcatggtagctcatgcctgtaatcccagcactctgggagaccagggcgggtggatcacctgaggtcgggagttcaagaccagcctgaccaatatggagaaatcccgtctctactaaaaatacaaaattagccgggcatggtggtgcatgcctataatcccagttactcgggaggctgagggaggagaactgcttgaacccg

SEQ ID NO: 85086 - DNA, 1032 bp, Homo sapiens
caacacgggcggatcacctgaggtcaggagttcgagactagcctggccaacattgagaaaccccatctctattaaaaatacaaaaattagccctgtgtgatggcaggtggcctgtaagcccagctattcctggaggcggaggcaggagaatcccatgaacctgggaggcagaggttgcagtgagccgagaccccgccattgcactccagcctgggcaacaagagcaaaactccgtctcaaaaaaaaaaaaaaatcacagtaatgtcatagcgtgggaagtgggtactttagattgggtgatctaggaaggcctctcatagctgagacgtgaatgatgagcagccagccatgcgcagacctgggaatagcaagtacacaagacccatagtgaaaaaccatggctgaggaacagagggcttgtgggggtgacctgtgtagttggcgcagagtgagcaaagggagatggatacaaaattcggtcagagagtagatcatgtaagacatgtacggtaggctgaggaggggggattttattgcgtgtatactgagaagccattgagttttaagcaggctgagaagtgccttctgttttaaactcctgtttcaatgacagattgaaaggggggcaagaatggaagcaggaacagagcacagtagtccaggtgagaaacttgaactggagtgctaaaggaagagagagagagtagttttatgtaggataaattttacgagtaaaaccagtaggactgacaggctctgtgatactgagagatacatatttggtctcctgaccaggctcctggcattcaacttctaaaatccttggaatctccagtgatgtgtgtttttgtgtgctgatgagttgattcatggctagcccctctaggtggcttcatgattagagggttggaactttcagcctcacccccaccaacttcctgggaggggaatggggccaaaggttaaggcaatcactgaggatcagtgatttaatcagtcatgcctagtagtgaagcctctaaaaaccggaaa

SEQ ID NO: 85087 - DNA, 1032 bp, Homo sapiens; identical to SEQ ID NO: 85086

SEQ ID NO: 85088 - DNA, 6843 bp, Homo sapiens
gaggtggcacgtgtctgtagtccaagctacttgggaggctgaggcaggagaatggcatgaacccaggaggtggagcttgcagtgaggcaagatcacgccactgcactccagtctgggcaacagagcaagactccgtctcaaaaaaaaaaaaaagatttgttttttcctccgcaggttggatgtgggaaatgaagaaaaagaaatggaggatgatgcctaggtttttggcctatgtaacgggaaaagtgggagaggaacaggttgggggaggaaaatgaagagttcttttctcttctggtttccctgccctcccattcaaaggccaggaaatttctacagctaggcaggatgattggctccggcattccttaatttcagtcctcaaaatcaagagcttacaccctcagggatcttcttgcagtagagggaagggtggtgacgtacagtgaaaaacatgttggccttcttcatactgagtttgagtcccacttctgccatttctttctttcatgaccttgtgcaagtcacgactttccaagctgcaatttcctcatctgttaggttgaatgttgagaacttcccggtaggattgttatgagcattaactgcgtgtttactttgtgctgtgtcttgttctaagtgtattatggatagtcactagtttaatcctcatatcaaatggatgaggtgtaggtactactatttacactctctgacagataaggaaactgaggtatagaaggttattaagtaggttgcccactgtcataagccagtaaatggaggagctgtatttgaattctggcaggctccagaatcctgggcctgggttcttagctgctaagtgcttctccctttaaagtgtgaaaagcgcctgcccatcatgggttctccagtgttcgttctgatgtctcctccattgtctgaccttcctcccttaccccgaagaaccgaaacatgcagatcctgagcttgcccacaatctaggccttgggtcttctgttctttcacttggttcccttacctgtgtctctgttcctctctagaaccttcatggcaaaaggcaagacttctgtttgttgtacctgacctgtggcactatctctttaggtggacatcttcaataaggagctactgctaatccccatccacctggaggtgcattggtccctcatctctgttgatgtgaggcgacgcaccatcacctattttgactcgcagcgtaccctaaaccgccgctgccctaaggtttgagggggtaggagagagatgggcaaaatgtggggcggtgcagtggcaaggcattgcaggaagaagggtgggctttgggtctttgaggggcgacctgggcatggtgtctgccagcactgtacccaccatactgtgttcaattgagaaacttagggcatcactttcttttcccccatccacatagcatattgccaagtatctacaggcagaggcggtaaagaaagaccgactggatttccaccagggctggaaaggttacttcaaaatggtgagtttcctgagggaggggtatagggtgttggtggggacagtggtagaaggcagaaattgaagtcctacccctgggagtctccatgtgaagggcctgctttctttctcttctctagaatgtggccaggcagaataatgacagtgactgtggtgcttttgtgttgcaggtaagcagatgatggggccacctcccctagctctgaagtcagttgggttaaagggtcgggaggctgttatgcatcccctcatttggctcatagtcagttgtggagcaggaagtaatctgttttagaacaccaaaacactggcttcactggttctcttctggacttctccatcccacattgggactgggtctctagtcttgggcctctggccttcatagagctccctgctaacctccaactcagtgtattttctccatctaaaacattctatcaagtaagaacactagctttagagtcaggctgtttttgaaccccaggctgtgggaccctggctccctttggggatgttctctgaaggatggagacacatctcatatgaaatgtgtagcacaggtcctgacacggggggtttctcatggcttgctttgttaacacccagtactgcaagcatctggccctgtctcagccattcagcttcacccagcaggacatgcccaaacttcgtcggcagatctacaaggagctgtgtcactgcaaactcactgtgtgagcctcgtaccccagaccccaagcccataaatgggaagggagacatgggagtcccttcccaagaaactccagttcctttcctctcttgcctcttcccactcacttccctttggtttttcatatttaaatgtttcaatttctgtatttttttttctttgagagaatacttgttgatttctgatgtgcagggggtggctacagaaaagcccctttcttcctctgtttgcaggggagtgtggccctgtggcctgggtggagcagtcatcctcccccttccccgtgcagggagcaggaaatcagtgctgggggtggtgggcggacaataggatcactgcctgccagatcttcaaacttttatatatatatatatatatatatatatatatatatatatatatatatatatatatatatatatatatatataaaaatatataaatgccacggtcctgctctggtcaataaaggatcctttgttgatacgtaagtggtggtcttccttaaggggcttcaaattagtggatatgcttagctcagaccttccagccagtctcttgagactaaagggttcagctttccatccctggctcaggcactgccaacaccttgtcttcacccaaacaaatccccgagatgggagcagagagcaggaaggagggaaagtagataagcctcaagaataagggcatccgagagggaagctggggaactggacacaagggactggggaggggaccaaccaggattcatgatagtaccccaaagccctttacagttttcttccatccctccaccatccagccaggggaatcctcccatccctacgatatcgctgttgattccttcatccctggcacacgtccaggcagtgtcgaatccatctctgctacaggggaaaacaaataacatttgagtccagtggagaccgggagcagaagtaaagggaagtgataacccccagagcccggaagcctctggaggctgagacctcgccccccttgcgtgatagggcctacggagccacatgaccaaggcactgtcgcctccgcacgtgtgagagtgcagggccccaagatggctgccaggcctcgaggcctgactcttctatgtcacttccgtaccggcgagaaaggcgggccctccagccaatgaggctgcggggcgggccttcaccttgataggcactcgagttatccaatggtgcctgcgggccggagcgactaggaactaacgtcatgccgagttgctgagcgccggcaggcggggccggggcggccaaaccaatgcgatggccggggcggagtcgggcgctctataagttgtcgataggcgggcactccgccctagtttctaaggatcatgtctgcgagccaggattcccggtaagaaaggcatttgcaagagattgtggctgcttattttgccgcccccttccgacgggcccgccgggggtagctgagaggcccaccagggttgcgggagaaaccgaaccgggtggggggagggtccgacttggaggggcgagggggaagacccacggccgacgcggccaccaggtcgaggcggagggtagggacagcccggctagggtcaggcgtgcgaggtctgttacgaggcctcgacccgaggcggtgccatgcgcgaagccccggcgctgagtggcgagacggggtcgcgacctggcgtgggaaagaaaggtggaggcggccgccactatgtgtggcccagagccggcaggtccggttgcctccctgtgccgggggagggacggcgcgcggggttccggagcattctgacggtaccactcgcgagaggcgggggtgcctggtccttagatccagtcacttcgtcgcggctaaaacacgggtcggggagaagaaaccggccgttcagtgtgctggttttcttgacggccaggactgagcctaaccccgaggagcggccgcgtgaggcaccaggagcccacccggcgccgggcgggcgggtccattttgccgcacaagccgggctattggcaaactgcggatgggcaggtccaccttccttcgggggtgagcggcctgaggtatgggagggcgacgctacttcgcgacgggggcgggcgggatgtggattgttcatggaggggtgggagacgccgccgggtggtcgagggagcgagcacatggtggcctgaggcgttcccctcccccagtctgcttcgcttctaagtgttgtgcaatctccccctttgctagctcggcttgggctcattgtgcgcgaggccgccaccgcccgcggcctcccacatccgggcaacgcgaggggggggcttcggctggagggagtgggggagggcgcgggcgggatgacgtggggggaaggggatgtcctaccctccgatctgggaggtgaagggcgggacttccagcgcgctggtgctgcggtgggaggtgcacgcgcttgggctttaagcggctgggtcgggcccacgtggacccggcggcaagcaccacctctgggcaccgtgagcgcggcggcacgcctgccggcctgtcttcagaaagggtcacccccttatgtcgggggtggcctggcctgagccgctgcctgcatggggcaaatgcctcagttttatagaaactcctcctttgggtattttttgggagctggtgggagttggatctgggacagcagattgatggcatcatgcaggccactcctgacagagcccggctgtcaggatttctgagtgcttcggtcgggcaggggacaaaacttatgctttaaaccaacagatccagagacaatggccccgatgggatggagcccgaaggcgtcatcgaggtgagactggagaaatggaattctgtcctcccccattacaactttcagccgtatagagttagagtggcctcttgattgatttcccagatcatctagaagcagctggtttccctaaagggaggagggttgtaagctctgaggcttttgttagtaggcaccagattctgtttgctcggagactacagctcagctccaccttttccatgactcaagctttaatttctttgcatcccctagagtaactggaatgagattgttgacagctttgatgacatgaacctctcggagtcccttctccgtggcatctacgcgtatggttttgagaagccctctgccatccagcagcgagccattctaccttgtatcaagggtgagacctctcagtcccagaagacattgtggactgtccctgacctgggtagagtggcatctggttggtgatgcccatctcatatcagccagggacaaagcaactccttgttcatcccagcttggcttttgatccgtgcccatgcctggttcatgccttggacacataggtttcctttaaagaggtggtattgtagccagcttatatttgcatctacagccatgtttctagtccagcttggtgtgcaatactagatgagttaataactggtccttgtttctgatctggttcccattgtgtaactgtgttgattgggaaggtagtttgtgagccatgaaatgcttggttcattggttgcttattgacctcattaacctaggacttgaatatcccaaagggtatgctctttaccacattcaactcctaatttatttgtttaggttatgatgtgattgctcaagcccaatctgggactgggaaaacggccacatttgccatatcgattctgcagcagattgaattagatctaaaagccacccaggccttggtcctagcacccactcgagaattggctcagcaggtaagagtggcttctattccctccttcagggctgatttagggatgatgagtataatccaaggaccagagaagtcttctctgatcaccaccttgggaggaagacatgggtgccctaacactctcgagacctgctgggttaattaaaagctatttcttacccaaacgtaaccattgcttcctccacccatttcctgagtcaaatgggaaagctgttgggtgaagcctggctggctgggcaagtttgactgtgttctgaataagcaccttcactatgggctaagagatcccttggtgtgggggtgatcttacagtagtcagagcagatggacagtccttttcacccttgcttaatagccagagctgtttcatgcctggggcacacacaattctaatgctggactttttcctgggtcatgctgcaacactgatgtcagagcatgtttttaaatgttctgtggcaggggcagtgattattctgggtgtggataatgtaagaagttacagcagagctccattctaaggcacttggctctcagttttctcagagtgaacatgcctcgtagcttgggtcctatggcaggagtgcaataggacatggatatgcatcacctgttctataaaactggttgctggctgggtgtggtggctcaactcgtataatcccaacactttgggaggccaaggcaggcagatctcttgagatcaggagttggagaccagcctggccaacatagtgaaaccccgcttctactaaaaatacaaaaattagccaggcatggtggcgtgtgccttttatcccagctactcgggaagctcaggcaggagaattt

SEQ ID NO: 85089 - DNA, 1044 bp, Homo sapiens
ccccccacccggttcggtttctcccgcaaccctggtgggcctctcagctacccccggcgggcccgtcggaagggggcggcaaaataagcagccacaatctcttgcaaatgcctttcttaccgggaatcctggctcgcagacatgatccttagaaactagggcggagtgcccgcctatcgacaacttatagagcgcccgactccgccccggccatcgcattggtttggccgccccggccccgcctgccggcgctcagcaactcggcatgacgttagttcctagtcgctccggcccgcaggcaccattggataactcgagtgcctatcaaggtgaaggcccgccccgcagcctcattggctggagggcccgcctttctcgccggtacggaagtgacatagaagagtcaggcctcgaggcctggcagccatcttggggccctgcactctcacacgtgcggaggcgacagtgccttggtcatgtggctccgtaggccctatcacgcaaggggggcgaggtctcagcctccagaggcttccgggctctgggggttatcacttccctttacttctgctcccggtctccactggactcaaatgttatttgttttcccctgtagcagagatggattcgacactgcctggacgtgtgccagggatgaaggaatcaacagcgatatcgtagggatgggaggattcccctggctggatggtggagggatggaagaaaactgtaaagggctttggggtactatcatgaatcctggttggtcccctccccagtcccttgtgtccagttccccagcttccctctcggatgcccttattcttgaggcttatctactttccctccttcctgctctctgctcccatctcggggatttgtttgggtgaagacaaggtgttggcagtgcctgagccagggatggaaagctgaaccctttagtctcaagagactggctggaaggtctgagctaagcatatccactaatttgaagccccttaaggaagaccaccacttacgtatcaacaaaggatcctttattga

SEQ ID NO: 85090 - DNA, 5867 bp, Homo sapiens
aaaaaatggttgctgcgtgatgaggcagttggtcaaattagttttcagaaggttaagggttctaaatatctagagtaaagaaactgaattaattatctgagcggcctcattgtgaatcactgtacactcaggaaccagactgagttgaaatcctgtctttgccacctattgacagcacgatcttaagtggattttagcctctgcctgtttctcagctgaatgtgagtttaataatagtgcatgccccaaagttgttggttaggaatcaatacatgaaaaacatttaagaatggtgccgggcacagtggtaactgacatatgagcacctgcctctctctgctcagatacagaaggtggtcatggcactaggagactacatgggcgcctcctgtcacgcctgtatcgggggcaccaacgtgcgtgctgaggtgcagaaactgcagatggaagctccccacatcatcgtgggtacccctggccgtgtgtttgatatgcttaaccggagatacctgtgtgagtaattcggttctccaatcccctgggtcactttgctcttgtgcacgctttccagtctttcagcgtaagccagagtcattcccaaggatgctggtttctctctgggggaagagctgctctgtgatggagcccatgcgtgtcatctgagcctctggcttccctgccagtgcagccctggcagtgtcctacttcccagggctgttgtctgcctggcgggaaggtcctgggcaaaggatcagtctttgtactctgagagcagactacttggctcctctctgttttttatcagcgaagttggatatatctctcccacatttccctaatcatatgctatatattggctttttttttcttctctagcccccaaatacatcaagatgtttgtactggatgaagctgacgaaatgttaagccgtggattcaaggaccagatctatgacatattccaaaagctcaacagcaacacccaggtgagggcagtcttgcttgaatagctaatgattcttgaaaaatagtaagtgccaggggaaccatatactggattcttgagcctttttatgcatctgcttcagttttaggtgtggctagggaagggagcaggcctcaggaaggaaccagcactctaagactggcctttttttccactaggtagttttgctgtcagccacaatgccttctgatgtgcttgaggtgaccaagaagttcatgagggaccccattcggattcttgtcaagaaggaagagttgaccctggagggtatccgccagttctacatcaacgtggaacgagaggtggggcccagtgcaggaggcgggcctggtagtgagttgttgggtatagcccctgactgatttttgtcccccaacctccaggagtggaagctggacacactatgtgacttgtatgaaaccctgaccatcacccaggcagtcatcttcatcaacacccggaggaaggtggactggctcaccgagaagatgcatgctcgagatttcactgtatccgccatggtgtgtttgcccgctgccagcctgttgtgggtctgcccgtcagaagtgtcctacttgaagccagggttcctggaacccaggtgcctacctggtctgctgcatatttgttttctcttccagcatggagatatggaccaaaaggaacgagacgtgattatgagggagtttcgttctggctctagcagagttttgattaccactgacctgctggtgagtagagggaactgatagcaaaggcagaagggaggatccaaggtgattccctctccaaggggacatcagtgcctctcaggaaagtagcagcttggaatagaatctggcatgcctaaggcctttggggaactgggatgcttatttcctctgccttccttggctgcccacatggatgcctaagtgtcttccctccgggatagagtgtcctccgtgcacatgctgaagagttgtctttcttgacgtaggccagaggcattgatgtgcagcaggtttctttagtcatcaactatgaccttcccaccaacagggaaaactatatccacaggtaagcgtagatctggaacactcccctaccccttcacacctggccctccctgggcttaaagctcctgatattcctcatccccttccttgttttccagaatcggtcgaggtggacggtttggccgtaaaggtgtggctattaacatggtgacagaagaagacaagaggactcttcgagacattgagaccttctacaacacctccattgaggaaatgcccctcaatgttgctgacctcatctgaggggctgtcctgccacccagccccagccagggctcaatctctgggggctgaggagcagcaggaggggggagggaagggagccaagggatggacatcttgtcattttttttctttgaataaatgtcactttttgaggcaaaagaaggaaccgtgaacattttagacacccttttctttggggtaggctcttgccccaggcgccggctcttctcccaaaaaaaaaaaaaaaacactaatccatttccctaacctagtaacctccagatcccagaggctctcctcacctcagctgagctcctttgaaagtgattcaagggactatgtcactcagcctcatttgctggaccaaatctggagggagaacccctaaaacccctaagtgaggttgcccagggggttgtccccaggtggggggaagcaggggagagaaaatggtagccatttttacattgttttgtatagtatttattgattcaggaaacaaacacaaaattctgaataaaatgacttggaaactgcctgtttgggcttctcatttcttacctccccttccctctcccacctgctactgggtgcatctctgctccccccttccccagcagatggttacctttgggctgttgctttcttgtcaccatctgagttctcagacgctggaaagccatgttctcggctctgtgaatgacaatgctgactggagtgctgcccctctgtaaagggctgggtgtggatggtcacaagcccctcacatgcctcagccaagaggaagtagtacaggggtcagcccagaggtccaggggaaaggagtggaaaccgatttccccaccaagggaggggcctgtacctcagctgttcccatagctacttgccacaactgccaagcaagtttcgctgagtttgacacatggatccctgtggatcaactgccctaggactccgtttgcacccatgtgacactgttgactttgccctgatgaagcagggccaacagtcccctaacttaattacaaaaactaatgactaagagagaggtggctagagctgaggcccctgagtcaggctgtgggtgggatcatctccagtacaggaagtgagactttcatttcctcctttccaagagagggctgagggagcagggttgagcaactggtgcagacagcctagctggactttgggtgaggcggttcagccatgaggctggctgtgcttttctcgggggccctgctggggctactggcaggtaaggaggaaggaggctgaggggagggggcccctgggagggagcctgccctgggttgctaaccatctcctctctgccaaaagcccaggggacagggaatgactgtcctcacaaaaaatcagctactttgctgccatccttcacggtgacacccacggttacagagagcactggaacaaccagccacaggactaccaagagccacaaaaccaccactcacaggacaaccaccacaggcaccaccagccacggacccacgactgccactcacaaccccaccaccaccagccatggaaacgtcacagttcatccaacaagcaatagcactgccaccagccagggaccctcaactgccactcacagtcctgccaccactagtcatggaaatgccacggttcatccaacaagcaacagcactgccaccagcccaggattcaccagttctgcccacccagaaccacctccaccctctccgagtcctagcccaacctccaaggagaccattggagactacacgtggaccaatggttcccagccctgtgtccacctccaagcccagattcagattcgagtcatgtacacaacccagggtggaggagaggtaaagctaaaactgggggatgagaggggagggaggcaggactggatataggctcagagggaagaaggaagaggggacagggaaccttggccggcatcgcatgcagtcttgtgaccttccagtctttaacttccgcaggcctggggcatctctgtactgaaccccaacaaaaccaaggtccagggaagctgtgagggtgcccatccccacctgcttctctcattcccctatggacacctcagctttggattcatgcaggtatagccatgacctcagtctcacccctcactcagcctcccggcgcccctcccctcccaatcccacacgctactccttcctctgtggagagggataccacctgcgccttcctcttcgccccacaggacctccagcagaaggttgtctacctgagctacatggcggtggagtacaatgtgtccttcccccacgcagcacgtaagtaacctccttccctttctcattgctaccactagacgccagggttcctgaaaggactaagctggggccagggaggtggataggatctgacccttcctcactcctccagagtggacattctcggctcagaatgcatcccttcgagatctccaagcacccctggggcagagcttcagttgcagcaactcgagcatcattctttcaccagctgtccacctcgacctgctctccctgaggctccaggctgctcagctgccccacacaggggtctttgggcaaagtaagacctacctactccttccctcctagaatcctcccactgcactgaaaaccccttccccaggcccataagccactcatctctcttcttaaccccccaaatctcgctctcccagcttgtcatggctacagggcagctttctttccatcctctacaagactctgccagtttcccccttttatcactgctgagtcactgcggtgagctcctcaccaatctcctactccccagcatccccccattccctcctcccacctttatcccaaccagcacgtcactgcaaatacctacctgccctatccttccgccaggtttctcctgccccagtgaccggtccatcttgctgcctctcatcatcggcctgatccttcttggcctcctcgccctggtgcttattgctttctgcatcatccggagacgcccatccgcctaccaggccctctgagcatttgcttcaaaccccagggcactgagggggttggggtgtggtgggggggtacccttatttcctcgacacgcaactggctcaaagacaatgttattttccttccctttcttgaagaacaaaaagaaagccgggcatgacggctcatgcctgtaatcccagcactttgggaggctgaggcaggtggatcactggaggtcaggagtttgagaccagcctggccaacatggtgaaaccctgtctctactaaaaatacaattagccaggtgtggcggcgtaatcccagctggcctgtaatcccagctacttgggaggctgaggcagaactgcttgaacccaggaggtggaggttgcagtgagccgtcatcgcgccactaagccaagatcgcgccactgcactccagcctgggcgacagagccagactgtctcaaataaataaatatgagataatgcagtcgggagaagggagggagagaattttattaaatgtgacgaactgccccccccccccccccagcaggagagcagcaaaat

SEQ ID NO: 85091 - DNA, 1488 bp, Homo sapiens
atggggcacccattggcccagagaagggaaataaaggatcagagagctcttgggcatttctcagctttatatggggaagcaatggagagccgtggaggtcaagccaagtttgggtgttaatttatagggaatggaagattggatgtggggggtggtaggcatcggagaaaagctgttttggaaagtaacagtctggggcccggtgcggtagctcgagcttataatcccagcactttaaggaggctgaggcaggtggatcatctgaggtcaggagttcgagaccagcctggccaacatggtgaaaccctgtctctactaaaaacacaaaaattaaccgggcatggtggtgtgtgcctgtaattctagctacttgggaggctgagacaagagaattgcttgaacccaagaggcagaggctgcagtgggctgagattgggccactgcactccagcctgggtgacagagcaagactctgtctccaaaaaaaaaaaaaagtgtggtggtttggagcaggaaggaccaggactttctcactgccctccgcctctcctccccccaagacaatgcaagaccctggtgtgggtaagggggctcggggagagcccacaggagcttcaagccctggcctgggtttcagacatctcctgtctgcttacccttttttctctcctcagtcccctgcctcaagattctcctcagcaaaggcctggggctgggcattgtggctggctcacttctaggtatgtctcttatctttctttccagctgttgggttggggtggaggtgctgagaggccatcaactgtgtgggtgttcgttctatagctgttgtgttgcatcccaaagaatggagagtcctcagtcctacttttctcatctttcccctagtaaagctgccccaggtgtttaaaatcctgggagccaagagtgctgaagggttgagtctccagtctgtaatgctggagctagtggcattgactgggaccatggtctacagcatcactaacaacttcccattcaggtgaggggcccacccttccaccccaagggtaatacccacaactctaatggggattaaggtgaaggaggttacaaggcagcaaagtggccgggcccagtggcttgcacctgtaaccccagcactttgggaggccgaggcgggtggatcacctgaggtcaggagttcgaactggccaacatggtgaaaccccgtctctactaaaaatacaaaattagctgggtgtggtgatgggcacctgtaatcccagctacttgggaggctgaggcaggagaatcacttgaacctgggaggcagaggttgcagtgagccaagattgcgccactgcactccagcctgggcaacaagagcgaaactcagtcttaaaaaaaaaaaaaagggacaaggggctaggaaagttttaagcccttttagaaacctaatcatcaccagtggaggtgatcttgagaaggggtgagcatcccgagaat

SEQ ID NO: 85092 - DNA, 1620 bp, Homo sapiens
ggctgtgtggttcctgggaaccctgctgggaactcaggtctgggaaagccaaatgatgtggagagattgacaaggactcctgtctccccacccctaggtgtcgctttcctcgcttgctacggcctggtcctgctggtgcttctctcacctctgacgcccttgactgtagtcaccctgctccaggcctccaatgtgcctgctgtggtggtggggagggtgggtaccaggagcaagggacaagatgttgtgggggcagggtgggggggaagagtagaagatcaaagtgtgggggtgttgtacttgggggagcatgggaagagctcaggtgacagagccaaaggtctcaactcctcccctagcttctccaggcagccaccaactaccacaacgggcacacaggccagctctcagccatcacagtcttcctgctgtttgggggctccctggcccgaatcttcacttccattcaggtgagtgcaacatcttccttctagaaggcactaaaacctcgtcttacttctcccagctaagggccaaagctgccccgtgaggaacctttgtccataagggaacctttcttgagctatgctgaagggtaaccctggctctgtctcttgcaaccaggaaaccggagatcccctgatggctgggacctttgtggtctcctctctctgcaacggcctcatcgccgcccagctgctcttctactggaatgcaaagcctccccacaagcagaaaaaggcgcagtagagccagctactggagtcattccgtttccactcattcacccaacctcagggttctccccatctgagccagcctgctggtgtgacttactcatcctccattcctctgcacttgcagactttctgagccagggttttcttttagtggaaacaaatggttgatggatccagatccttagaaaaggagaggatgggggtagagtctcccaagccaaaattttgacatttgagtgctttcgtaagccctgtacatgtactattaattcagtcattcagccaagcctcctcctctagcagcaatttccagctgtgtaacactatcctgggcaaatgttttaccctgtcctccagcctccctgcttcccttctggccctggaagactgagtctggacggcagagtggagggactgggaggctgtggctgcctccctccctcagcccggctgggactgtctcccggaccccagtgctggggtgggggaagggggacggagaatgactcaggcagggccccagggtggggtgaggaggttcctgctctggcaggtctaggcggaagggagtggagatggggctggttcctgctgcagtgaggggaacagatgggacaataaagactggagactcagttgaataatacaaaactgtttaatactaccaaaaatataattgtatgttgtgcggctctccctggctatcatgggaggactgcaggctgcctctgaactgtagtccaacaggagaaagggttgacagcctggggtaggggatgctgctggattaaaaaaggaggatgaggcccgtcccgtgaggtctgcgtccatgagggttagaggtgggttaggggcatgggggcaccagcaaggggagggt

SEQ ID NO: 85093 - DNA, 2344 bp, Homo sapiens
gcttgtgggtagaggcagaggtctggatggaagtttggggaaatctggaatggagatgatgaaaaagtgattgattggctgggaggcttgtgagtgagaaggagaattcttccagtttgggggatgtgatggatcctgaggtgggatgaatggccgtgaataaatcccattgtgttcttcaggccccagctcagatgtgtctacagcttcagagactgagtcagagaagagagaggagcccaaccgagctgggcctggcgacagggatcccccaacccgaggggaagaaagccggaggcggccgactgggggccggggtaggggacccccacctgccccccggcccacttcgagatacaattcttcatctattagctcaggtaccagacagctgggttcatgaatatgggccaaaaggaaagatgatgggcacctgactgccaactcctcctcttcttcctctgaccagtgctgaaggatccagacagtaatccctacagcctattggacacgtctgaaccagagcccccggttgattcagaacctggggaaccccccccagcaagtgccaggcgccgccgctcccgccgccgccgcactgatgaagacaggaccgtcatggatggaggcctggaatcagatgggcccaacatgacagagaatggcctgggtgagggtgtgcctggggtctggaaagttagagatgggtaggaatcgagggtgggaggttggatgtgtgactctggttttttcctaccctacagaagatgaatcaagacctcaacgtcgtaatcgcagccgccgccgccgtaaccgtggtaatcggactgatggctctatcagtggagaccgccagccaggtcagccaactctggacaccagaatccttcctcagagctgagagaatgggatgctcacccctgtgaaaatcaggggttcgggttcagtgggtgtcttaggctggctaccagaattccatctgaaagtcttaatctcctgccttccccagtgactgtggctgactatatctcacgagcagagtctcagagccgccagaggccacccctggaacgcactaaaccctcagaagactctctttcaggacagaaggtaggcaggcaagatgtgctttaccccatcccttttttgttgttactctggggcagggggcacaaaaaatttcacaaatctcctactgaattgcagaggcagctgtgtctgatggagtttagaccagtgtaaactttgaataggatagagaagaaagtgtggttcacattttctggatcccaagtaagagagactggatcatgagatcagggaaccaacctctggatcaccaaatgccaggagggcttggatggtagggaatgtctcccacctgaatttctactcaccgcttcttgcttttctgttttctttcccactttcccctcagggtgactctgtcagcaagcttcctaagggcccctcggagaatggggagctctccgcccccttggagttgggtagtatggtgaatggggtttcataaaacctccaacctgcacccctcccttctccatctcgcttgctgcccaacaccatggccctcacaggcccaactgacctgcgctggagctgctcttatctaggggggaggggggtggcacagcagcttgggtaccccccaacctccaggagctagtggaggggtgtgtaacagggtcataccccctccctcttgtccaccctacccccagggtaaggggagcctctctccttccccatcagactggatgtgcctttatcctctaatgccccaatctctctctgaacacccccattctccacctgttggtggggggtgctcctcgacccacccagatttgaccgttcagggggcctcccctgctatccctcctcccatcctgtaccccccatttctggggcctcatcactgtggaagacggggatagtaagagataagtgggtgggaggcacggggaaggttttggagtagaaccaggggtgtgtatgaaggggggtgacaaggtccccctggggaggggaccaaccttgtctggtggatgagaaggcgtatttatttttcactgtacagtatttaaaaagagaataaaaaaatccaaatggctgtctggctcctgtgccttctttgtccccagtttggtccatttgtttctctaggactgacctgccctggcccctggctcttgttttctgttcctccacatctgacttctcttcattgtctcttgtcccaaagatggtcttacttctgggaattcctgacattcctaaactccccaggcccaggttctccctcctggttcagaggaggggg

SEQ ID NO: 85094 - DNA, 1068 bp, Homo sapiens
ggcgtgagccaccacatccagctggtcttctgttttagtaacaactccctgctgttcttcctttagactcccgaggcttgccgacaggcccgaagctaccttgagttttctgaggactcagtgcaagtgcccaggaacctggttggtgagttggtggtgtgtatatacagttagaggtcagaatcaagattctctacagtgattctgagcttttatccaggattggcacctccctgtggactcccagtttcacaaggacagagaaacagtctgtaatgggagtgataaaaatgaaagaataaatttctagggattgtaacattttgtcctgtaaaaacacatcagaaacctagaagcaggagaatgaagtaaatggaatccatataaagaaaatgaggctggaagacggtgtatcagctttattcttatttccttaaaaaaaataaaaggctgaattcctcatttacctattccaggcaaagtgattggaaagaacgggaaagtgatccaggagattgtggataaatctggtgtggtgagggttcgagtggaaggtgataatgacaagaagaaccccagggaggaggtatgggtacggggcaagtgggcatagagattggtttccagaagtaaatgggattgtcctctgagggctgggattgttctttgagagggtggagtacggaaagttgtttaacactagtagatttagagcccagaatgatcccactgggcaggctcccctaggagactgggcggcgttaatccttccatttcattttcctttctgatccatcgtttctgctctctgttctctagggaatggttcccttcatttttgttggcacccgagagaacatcagcaatgcccaggctttgctggagtatcacctctcctacctgcaggtacccaggccgggagagaaaaatgctgggtgtgaaaagggaactaagactgctgtgggggtcagctcagggattttggttctctgtttgtctctccgtgtagaacagaaaacatctgtggaaatttggggctatagggttgggtcccagaattttccttgt

SEQ ID NO: 85095 - DNA, 1897 bp, Homo sapiens
ggtgttctagaggcatgttttctgtttttcttaacccctcacttttttttgagacagagttttgctctgtcaccaggctggagtgcagtggcatgacctcggctcactgtaacctccaactccctggttcaagcaattctcctgcctcagcctcccaagcagctgggattataggcacaccccaccaaggccagctaatttttgtatttttaatagagatggggtttcactatgttggcaggatggtcttgatctcctgaccttgtgatccacctgcctcagcctcccacagtgctggaattacaggcgtgagccaccgcgcacagcctacccctcactttttacttaagttgttgagttttatttggggatgagttgatatttgtttgattaaggtaagagttccttacacttgcatgtaccttgtgagaagtactttcacaccagccttgtctaatcctcttgctagtcttgagaataagataagttggatataatcacttagcagatgacacaagaggcagagtatgttttgtttaagatcacacagatagatactcttagggacagatactgttagggccaaatccagaacttcggtgtgtcccagtccaaactctgccctctttacctttcctcccccacaaaccactggtatttggaaggagtggaattaaaagttcctgaccttggccgggcgtggtggcttatgccggtaatcccagcactttgggaggctgaggcgggcggatcacctgaggtcaggagtttgagaccagcctggccaacatggtgaaaccttgtctctactaaaaatacagaaattagccaggcatggtggtggacacctgtagtcgtagctactcaggaggccgaggcatgagaatcacttgaagtcgagaggcggaggttgcagtgagctgagatcgcgccactgcactccagcctgggcgacagagcgagacgccatctcaaagaaaaaacaaaaagttcctgacctttccacacaggtcctcgtggtccgcggactccagagtggttctagctttctattaatatcacacagttttccttatttaagttatgcaaagggtcgtgtgcctgggactgtgagattctaccaccatgattcctacagtgacttttcctttcagacaagcaagcagttggcagcagccttccaagaggagttcacagtgcgagaggacctgatgggactggcaattgggactcacggtgccaacatccagcaggcccgaaaagtacctggggtgaccgccattgagttgggtgaagagacctgcactttccgcatctatggggaggtcagcaaaggatgtctttcttctgggtctcttaggggatagagggaagagaggccgaagtagaaaataagcctcaaactgggcacagtggctcacacctgtaatcccagcaccttcggaggtcaaagtgagaggatcacttgagcctaggagtttgagaccagcctgtgcaacatagtgagacccaatctctacaaaaatttaaaaattagctggaagtagtggtgcgtacctgtagtcgcaggtacttgggaggctgaaatgggaagatagaggggaggatcacttgagcctgggagttggagaacaacctggacaacatagagagaccctgtctttaccccccaaaaaaaccaaaaaccaaaaaacgttaactgagcgtggtggcatgcatctgtggccccagctacttggctacttgggaggcggaggcaggaggatcacttgagcctggaaagtcaaggctgcagtacaccatgatggtgccactgaaccaacctgggcaacatagtcaatagagtgagaccaaaaaatcaaaaaaatagaccagatctctgttgcccaagctggtt

SEQ ID NO: 85096 - DNA, 1029 bp, Homo sapiens
aaagtgctgggattacaggcgtgagccaccgcacccggcccagtcccttttcttttcttatttactcagccctgcttctctgaatttttttttttttttttaatagagacagggtctcactatgttgcccatgctagtcttgaactcctgacttcaagtgatcatcctgccctagcctcccaaagtgctaggattacaggtgcaaaccaccatgtccagcctcccccgaactcttcactgtactctctgcattctgcccgctgagtacttttttcctctgcagctgctccaatgaaaacgtccataaagagttcaagaaagccctgggagccaactgcatctttctcaacatcacaaacagtgagctcttcattctggtgagtttattctgcctgaatttcacataagccttttgaacattttttctttttccctttttaacccttttgcagaaagagaagggcttaaatgtgcttatatttatttgtcaagaggactttattgctcctgactcctacaggcccaggtagccctaccttttttttttcttttttttgagacgaagtctcactcttgtcacccaggctggagaacaatggcacgatctcggctcactgcaacctccacctcccgggttcaagcaattctcctgcctcagcctcctgagtagctgggattacaggtgtgcgtcaccacgccggctaatttttttttttttgagatggaatctcactctgtcgcccaggctggagtgcagtggcgcgatctcggctcactgcaacctccacctcccagattgaagcgattctcctgcctcagcctcccgagtagctgggattacaggcgcctgccattgcgcctggctaatttttttttgtgtttttagtagagacagggtttcaccatgttggccaggctggtcctgaactgctgatctcctgatccacccgcctcggcctcccaaagtgctgggattacagacgtgagccaccgcgcccgacatgcccggctaatttttgtatttttagt

SEQ ID NO: 85097 - DNA, 1056 bp, Homo sapiens
aaagatttctttttctttttcttttttttttttttgagatggagttttgctcttgttgcccaggctggagtgcaatggcatgatcttggctcactgcaacctctgactctcaggttcaagtgattctctttcctcagcctcccaaatagctgggattacagacatgcaccaccacacctggctaatttttgtatttttagtagagacggggtttcaccatgttggcaggctggtctcgaactcctgacctcaggtgatctgcctgcctcgtcctcccaaagtgctgggattataggcgtgagccactgtgcctggcctgggcaaagatttcttagatatgaaaccaaaagcacagttgataaaataataaattcataagctagacctttttcaaaattagaaatccctaattgtatgtgaaaaatagggagaaggtagaaaaattgggagcataggggtgaatgcatggctttggcctccttagtgaggacacagaccacaggaggtggatcagctgttcagtcatccctcttgctcttgtcaaaatatcaagattggagtcttccataaattttattatcctttataaattatcagtgtcattctagattcaattctagtattaaaaaaccgatgtttttaaattaagtcttaatttttccttctgtaaattgtgttcatcacaattttgaacttgtctagtgttccgattattgtcttaggacccatgcatcagggcagcgagtctgctcagatctcttgctgtattgcggaggtaggcccttctctctcgacagatcctcatgtcctctaggtgttccaggacagcctcacactgtctcatgggatattcttagccttgctgaatgttgttggtattttaattgaactctggcaggctgcttagcacaacaggaggcagacagatagggaggcccctgtgggagcctgagtagatcattggtttccaggctgttctgatgcaggtggtacatacacctctccatgacaatatcatttcctttctctgtttgactgcccatattctttccccag

SEQ ID NO: 85098 - DNA, 1053 bp, Homo sapiens
tccaagtgttgggattacagggaaaagaagagggaatggataaaatattagtggttgtgggagtggggaggacacttgagcaggagctaagggaagaacccaaaagggaagagagacccaggcaagtagaagtaaaagtgcctcagaagacttgaatggagaacagtaggagttggcattaaacctgaatgaacatgctcataactcaggttctttttgaaaaaggaaaaaaatctgaatgaagagtagaaaaaacatttctggagaagagaatgtcagagaaagaaaaagcatgggtaaaaaagaggccaggaagtaccagtagtaattaaagccttgggcagtagtaaggctctaagaaagaacattcagtcaagaatgatcttgactgactgcagcctctatagcaagacatatccctaaagacgagaaaggtggcttgtatgaagagtgaaatgcaggcttagattttcccatcgtaaggaaatagcaatctggtaagtgtttgtgattgattagttctatgaggtgggagctgtgcatttgccaagggcatttttggtgttttctctcctaagcttagcctttgtccctagcagcaaagctcatgaatagttcttgtgtattagccttttgaaacctctaattcttttatttttgtttatttattttgttttttgagtcacggtcttgctgtgttgcccaagctatggagtgcagtggtgcaatcacagctcatcacagcctcgacctccctggctcaagtgatcctcccaccttagcctcctaaatagctgggactacaggcacaagccatcataccctgctaatttataaattttttgcagagatgaggtttccctgtgttgtatgggctctctaatttttttaaaaaacatctttattgagctgaaattgacatacaacaaagtagacatatttaaagtgtgccatttgttaagttttgacatgtatgtaactgagtccatcactgcaatcaaaggaatgaacatttctgtcactcccaaaagtcctccatcaactaccaatctt

SEQ ID NO: 85099 - DNA, 1786 bp, Homo sapiens
aacgcgtggggcgggatcgagcttctggagctgagtcctggcccttagaatcttggacccttgctccaacccgcagccttccctgggagaccgcttagagtgaaccctgttcctcttatttttgacccctctaaggcacctgcacctgcttctacccccatctccgggagaatgaacttcaggccattattgtccctggcttggcgctccccgctccgcaggagagacccctttacccagcttctaattgactgtgtccgttgtctggtggaagacataccttagaccttaatcacatcttccccacgatccaagcacatggagaattgtctttcttccacacggtccctttgggaaggccctctgtcccgtaaaagatcctttcatcttcctcagagaggcctctgcctactggctctggaacactcaccccactttcatcttatattccggttcccaagccaaggagaaatggtcagatccatttacgacgtttggcatctttgacctcaggaaccctgggttggatcagtcaagttgcttcccagccagccataaggtggcatctttcgcaagtctctctccccaccacaccttgatctcaagacccactgctctaccattctactcaggaatggatttgaggtctcacttagacctcagataccttcaggtcattcatatagtttcttcgtcttgaggcatgtaagcttcatagtcataatctctaaaaggatctctgaaaggaagcttatgaggttcccttctgtttatcttaagatttccacttcttgaagactcttggccaactatcccagttcgggaatctgacaaccttttttggaagacgggatcatctttcaaagacccttccttatttcacctccccctttgcccaggatttggttccttagaactccttataataccaccttccttatctgctctgaatctattttctaggacatttttttcccatttagattaagccagagagagccctttcttgcctcccaagagtttttctttgtgtgactgttggtattctgaacctcttggatttgatgcctggaattgtcctagagactctcctgatttctgtctcattctttgatttcaccctggggagctggggaagagataccttcccatggcatcacttgttaagagtggatcccccttccccctttccttcagttcccctcaggcctttttcccccactgtagtcctctctagtttctcatgcccttggaaatgtctttctttgactccttctctaagtcatatttttctataactgcagagggtcttgtaatttctcttgggtggtttctgcctgtacttcagttgctaagtgcattgtagtcattttttttttttttttttttttttttgagatggagtctcgccctgttgcccaggcttggagtgcagtggtgcgatcttggctcactgcaagctccgcctccctggttcgcgccattctcctgcctcagcctcccgagtagctgggactacaggtgcccaccaccatgcccggctatttttttgtatttttagtagagacggggtttcactgtgttagccaggatggtctcgatctcctgacctagtgatccacctgcttcggcctcccaaagtgctgggattacaggcgtgagccaccgcgcccggccattgtagtcattttttactcactcttcatacttacccatttttgccttacttccctcatcagatttatttctctgcggtgactgtgggtacccatgtctaacttacctt

SEQ ID NO: 85100 - DNA, 1015 bp, Homo sapiens
agagccgcagagtataaagaccgcgctcggcgaccgcgggcctcgcactgctgaggagcggagcctccgcctggggggccccccatccctggctgtcccccagctgcgcgtccccgccccacccccgcggctgagccaccaccggtgcagtggtctccgcttggcggagcgagccttgagcttcgttccacagcttctttgcatcttggatttcggggcggccccctcccccacctctctctgcctttttgtaccccgctttttttctgcgttctgctcggtttttgtagccgtctgtttttgcaccccatttcgttttgtttctagacggtttggtggggggtgaagctgcattcataccccttcctcttgttattctcccctgctctgacagcaccccttttcatcgcagttggggggcctaggatcggtgcatcttccgccgcgctgccagcaccccgcagcgcgtggtcgtgcaccccggaatctgcagcagctgcatatctgaggggggtctcctttgcccgcgccgccttcgctccccgtgcttttgggtgtgtggagggcttcagcgcgcggcgcccccgcttctccgcaaccccccgccccgcgcccggactcgccccgcgccaccaagatggtcatccagaaagagaagaagagctgcgggcaggtggttgaggagtggaaggagttcgtgtggaacccgaggacgcaccagtttatgggccgcaccgggaccagctggggtacgcagggccggcacgcaaggggcgggggaaagccgcggggcgacgcctcgggggcgcagggtcccgccgacgcggccccagctcccctcccgggtccccggcgtccagcctccctgccgggctctgggctgggagggggccgaatcgccagtctaatctccccggctggccgtgcggaggcggagaaagtaggtcacagccgccttcccgccccccgcggagccccctcgggcggggggtcgccagctccgcctgcgtgtccg

SEQ ID NO: 85101 - DNA, 2271 bp, Homo sapiens
tctgcggggtggtatgagggtttgcttgtgaatggtggccagtacccgctttaaaaggcaccatgctagcacagctttaagcatgagtacgaatgcagaggtaacagatgtgtgccttgtcaggactatgcatggttgagaagttggaaatgtaattggaggcaaaataacagacctccacaaggtcgggcttcactgtgccctaggaccaggagggggctgggagtcatggctagaagccagacacaactgcctgtttccagtttgtctcattttgcctccagaggaaggctctaagacatccctgtggctctgtgatcagtcccagtgcagaacttcagagtgggtagaggggtgtgtggggatagttgaggttatggtgggaaccttgggccctgctgaccctgtttcctcctccctagcctttatcctcctcttctacctcgttttttatgggttcctcaccgccatgttcaccctcaccatgtgggtgatgctgcagactgtctccgaccatacccccaagtaccaggaccgactggccacaccgggtgagtgtggaggctccccctgccagctactctaactgctcttgtgcccccaaacctccagaaggaactcatagttccttccaggagtttgattttgatgacccaatccccacgtgcttggaagttcttgaaatctgtccaccttcccatttactgcagttgggagctgtgtgatttgggcatgtggcagatagccacaggagatcaccctcccatgaagacgatctcagatattcaccgctgtccccactctggtgttccctgtgtccattttcttccctctgtgtgcagtccctcatcttatagatacccccaacttctgcctttgttggctgtaggcttgatgattcgccccaagactgagaaccttgatgtcattgtcaatgtcagtgacactgaaagctgggaccagcatgttcagaagctcaacaagttcttggagcgtgagtgtgggcctggttatgtgtcagttcaagacttcgggcaggggactggggaccttggaagtggaacatctggcccctgagtctctccctcccacctctttagcttacaacgactctatccaagcccaaaagaatgatgtctgccgccctggacgctattacgaacagccagataatggagtcctcaactaccccaaacgtgcctgccaattcaaccggacccagctgggcaactgctccggcattggggactccacccactatggttacagcactgggcagccctgtgtcttcatcaagatgaaccgggtatctatgaccttggtccccagggtgaatggaggaaggatctggggacaccacctgcagacaattgcatcctttcactggggctaatgggcatgagaaagacttggatgtttgtgtagctgagagaaaaagagaggtgggactcttggaggctaagctctgcagttagaaggctggatgccttttgttttttttttagacagggtcttgctatgttgcccaggctggccttgaactcctggaattaagctatcctcccgcctcaacctccctagtagttgggactacagtccccggcttagcttggtctggatgcccatcttcgacaacttcttcctctgactctcttcaccttccaccctcactccaggtcatcaacttctatgcaggagcaaaccagagcatgaatgttacctgtgctgggaaggtgagttcgttgggccttgtctgcctgctcacctgagtggctcacctgagtgtccttcatggtttctgtgtaattcacctgtctctccctatcttctttgctcctagaggccccatcaccatagaaacaagggggtaagagtgggcttttgggctccactgtagcttgaactccgagggccccgcactcctcttgcttctctctgggatgcagaggcctgctctcctaggggccagacacacgccctcctccaccaacgccctggcctctggcttctctccctaacgcttccaccttctccttcattcccagattgtccgtatcgttcgctctccctcccatatggcccccacccgtcagttccttctaggtgtctggtagctgctgatctgttagcaccatctgccaccagttcgttgtccttgggaccctgttccccgcttcccccccggtctgtcctttctagaaactggctgctccctccacatccccttccttgcttcctattcaacccttaatcatgtatctcttctttctt

SEQ ID NO: 85102 - DNA, 1798 bp, Homo sapiens
cagggacagaccatcccctcatctacacacgcacatgcagacacacacacacagactcacagctccagggaggcagacttgagacaggaataattggggcgaaggaagaacaaaagaacaaatggaagtctggtgagctcctgggtgcctgccatccctaactggctcaccccctatcttcctgcacccccacagcgagatgaagatgctgagaatctcggcaacttcgtcatgttccccgccaacggcaacatcgacctcatgtacttcccctactatggcaaaaagttccacgtaagtcccaggggaggcccaggctgatggcgggtgcgggtggtgagctagggaaggaggccgcgttgccccaggcctagaccctgcactgctcctccggcccaggtgaactacacacagcccctggtggctgtgaagttcctgaatgtgacccccaacgtggaggtgaatgtagaatgtcgcatcaacgccgccaacatcgccacagacgatgagcgagacaagttcgccggccgcgtggccttcaaactccgcatcaacaaaacctgaggccccttcctcccaccccatctctctcctgtggatgctcctggaatgtccctgaccctgcctgatccctccctcacccaccccaaaggtatttttgataacagagctatgacttgtctgagcctcacatccttttccttgacttctcaacccagcctgaagtccattgcggttccgtcactcgcctttcccaccaacttctcccaacctcagatcagtcagacagggagctgggctaagatggccacggaggagttaggagcctttctagttctggtttagctgtgagagctatccactctcctgcctgcatatcccctgagagttataggaagtgcccactgacccacccacccacctacaccccccgccacacacacacacaaacgtgcacacgcgtctcatttgacccctttgcttccagagatgaatgtggcactccctccttccattcctaagctctggccaccgtcccttgatctctcatactttctccctgtctacacagtcgccatcttggtgactttgaatttatctggctcctgggcaggtcttctcctcctctccatccctattccctcctctgaaatgcacccctttgtaattgaggacaaggtggttctgtggccttttccctctttgctggcacgttctgcttctcaccctctggtgactctgtgagctgggaaatgagggactggaagtgaggcctgtgttgacccttcctgaaaatcctctagcagcccccgacttcagcagtttctttctttgtttttttgagatggagtttcgctcttgttgcccaggctggagtgcaatggtgcaatctcagctcactgcaacttccgcatcccaggttcaagcgattctcccgcctcaggttcccgagtagctgggactacaggcatgtgccaccatgcccggctaatttctttctttctttttttttttttttgcattttttagtagagatgggggtttctccttgttggtcaggctggtctcgaactcccgacctcaggtgatccacctgcctcggcctcccaaagtgttgggattacaggcgtgagccaccgcgcccggccttcagtttcttcctaggccgttctgtcacccaaatagctgctacccagaggggcggggttgacctaggctgaatatccactttgtttttatggatggctcccttcccccattcgccttcccagaatatccttcaagttccacttcccag

SEQ ID NO: 85103 - DNA, 1105 bp, Homo sapiens
taattttgtatttttagtagagatggggtttcatcttgttggtcaggctggtctccaactcctgacctcaagtgatccgccggccttggcctcccacagtgttgggattacaggcgtgagccaccgcgcccagctgtaattctcaatccagcaatctatcagctcacaaagaagggtttggcagagtcagaatggatctgaagcagcacagcagaaataaaaacagagctagggacataatctaggaaaaggttgggattgaaagggtggaggatggttgtcaaaaagggagattttctgtttacttgagatctgcagagtaggtccaagtgtcctcgtcgtaggtgaacacacgtgcacacacacaaatggtaactgtgtgtgatgatggacgtgctgattaatttgattgtggtaatggtttcacaatatacccccatatcaaatcatcacactgcataccttgaatgtatgcaattttgggggatcaattatgccccaataaagcctaaaataaaaaaaaattaaaaaaaaaaaaaggaagctcatcaaggtgacctgtctacagaggcaaggacagggactgagcttcaggagctctagtttgcctgctgggtagggacagatgtttaagttaaaagtctctgaaagaggcgggtctggatctcctggggagagtgtttggcattccctagtaagaaagagaaaaaaaaaaggtggtcttgaggtcaggaaggctggtggcttcatagctgtctgggatccttggggcaaggcaaggggctcctgcttgcaccttcagcctggttgatgagctgacaggctggtggccccagaagcccccctggacagtagcacccactggaccctaacacccatctccaccaccagggaggaggaagggcaagccatgtctgactgccccttcaagcactggctccaagagagcagtgggtgatggggaagagcctgcctgctcccagcccccctccctgggagccagcagccctgaggagcatgggcaggcagtactgagctcctcaacccgactctcctccctatcccaagaagccctttgaaaggttttcctggcagagtttaaagc

SEQ ID NO: 85104 - DNA, 1858 bp, Homo sapiens
ttctccgcaactcccagcccagagctggagggtctcaaggaggggcctaataattgtgtaatactgaatacagccagagtttcaggtcatatactcagccctgccatgcaccggcaggtcctaggtgacccccgtcaaactcagtttccttatatataaaatggggtaagggggccgggcgcagtggctcacgaatcccacactctgggaggccaaggcgagtggatcacctgaggtcgggagtttgagcccagcctgaccaacatggagaaaccccatctctactaaaaatacaaaagtagccgggcgtggtgatgcatgcctgtaatcccagctacctactcgggaggctgaggcaggagaatcgcttgaacccgggaggcagaggttgcggtgagctgagatctcaccattacactccagcctgggcaacaagagtgaaactccgtctcaaaaaagataaataaagtaaaatggggtaagggaagattacgagactaatacacactaatactctgaggtgctcagtaaacatatttgcatggggtgtggccaccatcttgatttgaattcccgttgtcccagccttaggcccttcaaagcattggtcagggaaaaggggcacagaccctctcactcatgtgatgtcatctctcctccctgcttctgtctcctacagccacctgaagtccaaaaagggtcagtctacctcccgccataaaaaactcatgttcaagacagaagggcctgactcagactgacattctccacttcttgttccccactgacagcctcccacccccatctctccctcccctgccattttgggttttgggtctttgaacccttgcttgcaataggtgtgcgtcagaagcacccaggacttccatttgctttgtcccggggctccactgaacaagttggcctgcactggtgttttgttgtggggaggaggatggggagtaggacataccagcttagattttaaggtttttactgtgagggatgtttgggagatgtaagaaatgttcttgcagttaagggttagtttacaatcagccacattctaggtaggggcccacttcaccgtactaaccagggaagctgtccctcactgttgaattttctctaacttcaaggcccatatctgtgaaatgctggcatttgcacctacctcacagagtgcattgtgagggttaatgaaataatgtacatctggccttgaaaccaccttttattacatggggtctagaacttgacccccttgagggtgcttgttccctctccctgttggtcggtgggttggtagtttctacagttgggcagctggttaggtagagggagttgtcaagtctctgctggcccagccaaaccctgtctgacaacctcttggtgaaccttagtacctaaaaggaaatctcaccccatcccacaccctggaggatttcatctcttgtatatgatgatctggatccaccaagacttgttttatgctcagggtcaatttcttttttcttttttttttttttttttctttttctttgagactgggtctcgctttgttgcccaggctggagtggagtggcgtgatcttggcttactgcagcctttgcctccccggctcgagcagtcctgcctcagcctccggagtagctgggaccacaggttcatgccaccatggccagccaacttttgcatgttttgtagagatggggtctcacagtgttgcccaggctggtctcaaactcctgggctcaggcgatccacctgtctcagcctcccagagtgctgggattacaattgtgagccaccacgtccagctggaagggtcaacatcttttacattctgcaagcacat

SEQ ID NO: 85105 - DNA, 1140 bp, Homo sapiens
gtgggaagcgaaaattccatgggactgactttctgctcttgtctttcagacttcctgaaaacaacgttctggtaaggacaagggttgggctggggacctggagggctggggacctggagggctggggggctggggggctgaggacctggtcctctgactgctcttttcacccatctacagtcccccttgccgtcccaagcaatggatgatttgatgctgtccccggacgatattgaacaatggttcactgaagacccaggtccagatgaagctcccagaatgccagaggctgctccccccgtggcccctgcaccagcagctcctacaccggcggcccctgcaccagccccctcctggcccctgtcatcttctgtcccttcccagaaaacctaccagggcagctacggtttccgtctgggcttcttgcattctgggacagccaagtctgtgacttgcacggtcagttgccctgaggggctggcttccatgagacttcaatgcctggccgtatccccctgcatttcttttgtttggaactttgggattcctcttcaccctttggcttcctgtcagtgtttttttatagtttacccacttaatgtgtgatctctgactcctgtcccaaagttgaatattccccccttgaatttgggcttttatccatcccatcacaccctcagcatctctcctggggatgcagaacttttctttttcttcatccacgtgtattccttggcttttgaaaataagctcctgaccaggcttggtggctcacacctgcaatcccagcactctcaaagaggccaaggcaggcagatcacctgagcccaggagttcaagaccagcctgggtaacatgatgaaacctcgtctctacaaaaaaatacaaaaaattagccaggcatggtggtgcacacctatagtcccagccacttaggaggctgaggtgggaagatcacttgaggccaggagatggaggctgcagtgagctgtgatcacaccactgtgctccagcctgagtgacagagcaagaccctatctcaaaaaaaaaaaaaaaaaagaaaagctcctgaggtgtagacgccaactctctctagctcgctagtgggttgcaggaggtgcttacgcatgtttgtttctt

SEQ ID NO: 85106 - DNA, 1077 bp, Homo sapiens
gtgatattacggaaagccttcctaaaaaatgacattttaactgatgagaagaaaggatccagctgagagcaaacgcaaaagctttcttccttccacccttcatatttgacacaatgcaggattcctccaaaatgatttccaccaattctgccctcacagctctggcttgcagaattttccaccccaaaatgttagtatctacggcaccaggtcggcgagaatcctgactctgcaccctcctccccaactccatttcctttgcttcctccggcaggcggattacttgcccttacttgtcatggcgactgtccagctttgtgccaggagcctcgcaggggttgatgggattggggttttcccctcccatgtgctcaagactggcgctaaaagttttgagcttctcaaaagtctagagccaccgtccagggagcaggtagctgctgggctccggggacactttgcgttcgggctgggagcgtgctttccacgacggtgacacgcttccctggattgggtaagctcctgactgaacttgatgagtcctctctgagtcacgggctctcggctccgtgtattttcagctcgggaaaatcgctggggctgggggtggggcagtggggacttagcgagtttgggggtgagtgggatggaagcttggctagagggatcatcataggagttgcattgttgggagacctgggtgtagatgatggggatgttaggaccatccgaactcaaagttgaacgcctaggcagaggagtggagctttggggaaccttgagccggcctaaagcgtacttctttgcacatccacccggtgctgggcgtagggaatccctgaaataaaagatgcacaaagcattgaggtctgagacttttggatctcgaaacattgagaactcatagctgtatattttagagcccatggcatcctagtgaaaactggggctccattccgaaatgatcatttgggggtgatccggggagcccaagctgctaaggtcccacaacttccggacctttgtccttcctggagcgatctttccaggcagcccccggctccgctagatggagaa

SEQ ID NO: 85107 - DNA, 1045 bp, Homo sapiens
acctgtgggggttcacgccgtcctctgtacggccccgggagcaggtgcagcccagtcggcagaggagcaaacaggctcagagcaggtaggaaaccttcccaaggccaaccagctggtcaaaggactgcttccttcctgaactcataccctgtcagctgtggagcttttggtctctgaaatctttctagaaaattgttgataaagctgattccgttttcctgtaggccttcaacttgcatctctccaaggaagaactgggatttgagagggatgaagtggggcttgggcatttaggtcctttgggaggatagatgtggggagcatcagaggtctttgtcctgcttgtgacagacagcatgggggggatgttgagtccaagcatgttggtgctgggacgggagacagacctctgcttagcctggttagtgccaggagccattgccccctcccccactttgttccttccctctctagcaaaaaagcagggccagagcggcatcatctcctgcatagccttcagcccagcccagcccctctatgcctgtggctcctacggccgctccctgggtctgtatgcctgggatgatggctcccctctcgccttgctgggagggcaccaagggggcatcacccacctctgctttcatcccgatggcaaccgcttcttctcaggagcccgcaaggtaggggtcacaccctgagagcccaaagcagctgggcagcggggcaggagcagggatgtagtctgcagtgtaggggaatgggtggggatggggaaaaaatcccaagctgaaggagtgcctggagaccccgagggaggcagggacatccagggctttgggggtgactccaggtcctgttccttgtctccaggatgctgagctcctgtgctgggatctccggcagtctggttacccactgtggtccctgggtcgagaggtgaccaccaatcagcgcatctacttcgatctggacccgtgagtggctgtgactccttcctacacagggccctgataagcctaggaatgccagagcccagctgtag

SEQ ID NO: 85108 - DNA, 1080 bp, Homo sapiens
tggttggctgccatggaatagtgaaatcacctgggaggggtgggctgtgtggttccagagaggccagctccttggtaactggcatcctgttgccatggcaacggggctggtgatggagcgggagatggcggtgtgcatgtggtgagggcgggctgaagagtggagtgcatttgggcacaccaaggggcaggagacccctgagcctggcttcctgctgcttccaatgtgaatgcacagagtccttggtgcctgctctataagaagagactttccactcagacaaaggcgggcaagcgtgagctgagaattgctgtcctggaaggttgtggggtgagggaaggaaagttctgggggccaggcctctgacatctcttccttgtccaccttaccctcctccccataggttccaggcagagggtggttatgtgctgtaccctcagatcggggaccggctagacctgctctgcccccgggcccggcctcctggccctcactcctctcctaattatgagttctacaagctgtacctggtagggggtgctcagggccggcgctgtgaggcaccccctgccccaaacctccttctcacttgtgatcgcccagacctggatctccgcttcaccatcaagttccaggagtatagccctaatctctggggccacgagttccgctcgcaccacgattactacatcattggtactgctgggcagagggcacgattgagtggggggctcctgatactgagcagagagggagggggacccctgcagccaagagggagatcccagtgccctcaggcagtgttcacaccagggtgtggggccagaatcagggctagattctggagtgccaacctcttcctctggcttttctctcccagccacatcggatgggacccgggagggcctggagagcctgcagggaggtgtgtgcctaaccagaggcatgaaggtgcttctccgagtgggacaaagtgagtggggctgggggacacctcctgggcacgaagggacgttggggcagtacgatcatggttggggcagttgtctcagcccctctctgggtcttcctcatctccag

SEQ ID NO: 85109 - DNA, 1039 bp, Homo sapiens
tgccatgtgttggcggagacggcgggccaagccttcggagagtcgccaccctggtcctggctccttcgggaggggagggtctctgggcctggggggtggaggtgggatgggacctcgggaggctgagcctggggagctagggatagctctgcggggtggcggggctgcagatccccccttctgcccccactatgagaaggtgagtggtgactatgggcatcctgtgtatatcgtgcaggatgggcccccccagagccctccaaacatctactacaaggtatgagggctcctctcacgtggctatcctgaatccagcccttcttggggtgctcctccagtttaattcctggtttgagggacacctctaacatctcggccccctgtgcccccccagccccttcactcctcccggctgctgtcctcgtctccacttttaggattccttaggattcccactgccccacttcctgccctcccgtttggccatgggtgcccccctctgtctcagtgtccctggatcctttttccttggggaggggcacaggctcagcctcctctctgaccatgacccaggcatccttgtccccctcacccacccagagctaggggcgggaacagcccaccttttggttggcaccgccttctttctgcctctcactggttttctcttctctatctcttattctttccctctcttccgtctctaggtctgttcttcttccctagcatcctcctccccacatctcctttcaccctcttggcttcttatcctgtgcctctcccatctcctgggtgggggcatcaaagcatttctccccttagctttcagccccccttctgacctctcataccaaccactcccctcagtctgccaaaaatgggggccttatggggaaggctctgacactccaccccagctcaggccatgggcagcagggctccattctctggcctggcccaggcctctacatacttactccagccatttggggtggttgggtcatgacagctaccatgagaagaagtgtcccgttttgtc

SEQ ID NO: 85110 - DNA, 1040 bp, Homo sapiens
ctgggggtgaaaaagccaaagagtgggagaagggacactgagctgagaccttgctgggcagggtggctgcagagctgggctgaggcagagtaaggggccacctaggacaaggagtgggcatggaacccagaggtgtcggcctggccaggggtggagaaccaggggtgggatgagtttcaggagtcaaattaaggagtagggggctgagacatgaagcacgggcagggggatgcagagaaggagttgggtgtcaaggaggtggggacagaggctgtggggactccttctgcagatgagcaatgagatcatccgcttatgctgccacgccatctccctggaccggatctttgagggatatgtctcttccagcaaggaggacctgcaaggctgcattctctgttgtcacgcttggaaagatcactacgtacaggctgtgcagatgcacatccagtatgatacgcctcccctaacatcccatgtctcaactcccttgtcagccctgtaagagggtagattctgacttctttcctgtacactttgtttagcctcttggttgtattttccgagacccaggagtttctacatctggccaaattttctgtctggatacagatactgtatctcattgccctggcttctccttttttgttttttaattttaattttaatttttttttgagacagagtcttggtctgccacccaggctggagtgcagtggcgcgatctcagctcactgcaagctcagcctccgaggttcatgccattctcctgcctcagcctccccagtagctgggactacaggtgcccgccaccatgccaggctaattttttgtatttttagtagagacagggtttcaccgtgttagccagggtggtctcgatctcctgaccttgtgatctgctcgccttggcctctcaaagtgctgggattacaggcgtgagccaccacgccctgcctggcttcttattttaataatctctcctccctgatcccaggaaccctacctggtcttttcctcctatcttgaccccatcgtct

SEQ ID NO: 85111 - DNA, 1077 bp, Homo sapiens
agctggaggctggtttgggcctggtggactacgcccaggctaggaagggctgatactggttttcaaccttgtgcctcatatcctgctccttctgtgactgacctttttctcccagctttttttcctaaacaaattctctgtgcttctctttcctcattttgactccttttctcattgcgccttggtctcttcctatcaccttcctttttgactctaccttccttctaagttatcaaaactcaatccatctccatagcaagccttatgcatattgttggggtatgtgcgcatgcgcgcatgtgtaggtctcagggagatggtggcccctggaggaaggtggcaggccgactccacccacctgttcttcttcccctcagtgccttgctggtgctcatttcctgccccgtattgggactggaaaggagagtgtgcacacctatcagcagatggtccaggccattgatgagctggttcgaaaaaccttccaagagtggacatcaagtctggacaaggattgcattcggcggttggataccccattgctgcgaatcagccaggagaaggcgggcatgctggatgtcaactttgacaagtacaggagccacctggccccttttccctatactccccttctgcagctctcccaagaatttcactcccatcttttgactcctctcttcattattctctctctttctcatacaatatgtttgctatcgtcattttacttttttttttcttcttttatttttgtctctccccacctcccaccctgctatcaacattttaattttacaacttatcttaaaacacaacaaaacaaaacaatgatcggccaggcacggtggctcacacctgtaatcccagcactttgggaggctgaggtgggcgcatcgcttgagcccaggagtttgagaacagcctgggcaacatggcaaaacccagtctctgcaaaaaatacaaagattagctgggcgtggtggcacaagcctgtagtctcagctacttgggagggtgaggtgggaggatcgcctgagcccgggaggcagaggctgcagtgagctgagatcacaccac

SEQ ID NO: 85112 - DNA, 3416 bp, Homo sapiens
cgaggagtctgtgggtgtcagtctttgtgcctgtccgtggttcccttcccttggttagtatagacaccgggagtcagggagggctattcttgccccagagcgagagtggaggtgagagtggagcgcgagctggcggcgactggggaacaggtgcaagcgccgcgtcggggctgcccggcacggggaggggccatcgtgggggaagacgagaggggaaattccgcgggaccggtggtgagccggtgtgtgggctgaggagttgtgtctgcctctgactgtgtgtctgtgtgtgttcagggaggcgggggctgagtcagtgggaagaggggaaggttttctgggtgactcacgctcccccaccccaagcctgaatcagaccccgagggagggctttgtacggggggcgggggggcgagtgaggagtccagcgcctgggtcccgggtgcggacaaggatccgaggtggctggcgagaatgagtgtgtgtttagtgtacaggaagttttgtcttcaagtgagggctttgtattcttgggtgctggcgtggggctttgtggataaaggtggaagagcagggagctggagggacggcactcactgacttagggaaagctgagtcagttccccgtgggaaaggggaagtggcagaggggaagtgtcatcatcgccgaaggggaagctgcctttcctggtaactggcggcgctctcgggaccacttcccaagcaggcatctgcccctctgttgtctggttccccggctccccctccacgtctggttcttgggtctcctccccgcccctgcctcggtactcgggtgggggcagtcacggagggccatacttgaccacagttcagcgccgtacctggcttggttactgatggaaaggatgctgcctctagtgaggagagagttctgacagtaataccacgtgaaccgcggagagggtccgcggggcccaagcgaccacaagggcttggcggagagtggcacgcagggacctgtagggtccaagcgcttccatgcaaacaaacgaccttgccccttcgggaaggaaggctcttttcaccagaaacccgtctgcccttgtgggctgggtggaaatttccccacagcgcagacttctctcaacgaacgcgaactttccagccacccccagcccctcgtcgcgcactctcccccggcttcctgcccggcgctcgctccagctggagcgctggccccgcccccgcggctttgtactcgacactcgcctctcgctgctctttgtactctagactctcaatggaccgatcccgggagccgagtcggctccctacctgcggggacgccgggtaggcaaggaggaggcgcggggacgcagctcctgggctcagagaggcgagaaggaagagctggggctaaagggaaggtgcccaagagaggggagcgctgtgccagtcgggggtccagtcggcaccaaagcgaaagggtggggggggcgtgaaggaggaagtgaaacgagttctgggttctttaagggagtgggtggtgagagtgggacaagggtgatgtcactgcctgtcgggccccgccctcctccctccctcaggacccccccccccgcagtacatttacacacaccgcttccgctgcgcaagtagccacgtcacgggcaacccccgaaatcccccctcccttggggggcgggggccacgtgggccgtggggaaccgcgtggccccggcggggaagggcagagaggatacgcgagccacgagagaggggccactcgggaccgcggtgcgcgacttctcggaagttgggggactaaaaggggtctgattttgggggtcggtcggtattgaagacccagaaagccaggggaagtagaggacctggaggaactgggtatgagactgggggcttgaccaaggtttgggtcggggtcaggcgttgggggtggagcgccgatagcggcgcggacgggtttgggtgccgtggaagtcgctgtggctggccagccctaagcagttaataggggcgctcggggtagggaggtctgtcactgggcgaggtgaagtgaggaaggggagggacgtcttttttgcgttctgcatccgtctgtcgtccgtcggtcttacggtggccgggcgtggggctactcgagcagcctggccgtggccaccggcggctctgggtgcttgaggcttgcgggtagcgccggcccccacgccggccggagcatgcgactaaccggcctcatccgcatgcgtcttgtcctggctgccttctggccctgacggccggagtgtcggatcctagatggggaccctaggtgggagccgcggggtcacatcggggtcaccccgggctgagctcgtctgaccggctcccgcgcccctcctcccccggccaccgctgccgggctcacctcgctcccattggttccggccaggctgttactgaggcggagacacgggtgatgattggctttctggggagagaggaagtcctgtgattggccagatctctggagcttgccgacgcggtgtgaggacgctcccacggaggccgggtaagcggccgctgcgttttgggtcggcccagtggctccggactggaagcctggcagcgcagccaccccgtccctctgaccggccttttggttccctgccacacacgtcctgactcccagccacactcctgggcctctagggagtggttgggccgggcctccctttggggaaagctaaggccgggccctttgcacaaatgacaaattggtggatgccacagtccgcccatcccagcccctgggccttgactgtgtgctggccagctcgtctcactccttttccttctctctagaattggctgtgaaaggactgaggcagccatctgggggtagcgggcactcttatcagagcggctggagccggaccatcgtcccagagagctggggcagggggccgtgcccaatctccagggctcctggggccactgctgacctggtaagggaaactctggggccgagctggctggatgtacactggcagctctggttttgcctccagtaagagcataatttcttatccccaactcaggctggatgcatcgggcagtggaccctccaggggcccgcgctgcacgggaagcctttgcccttgggggcctgagctgtgctggggcctggagctcctgcccgcctcatccccctcctcgtagcgcatggctgcctggaggcaggtgagaagttggggccctctgtctccaggcacacctctttccatctctgtatccctcaatctgtgtcattctccatgggttcctgtcattctgtgggcttccgtgcatcagccccctcctgcctaggtaggacaagactgctcctttttgccgtatataacagactccttctctctccagatgctcagcca

SEQ ID NO: 85113 - DNA, 1050 bp, Homo sapiens
tttggcaccaacatcgacttgtctgatgctaagcggtcagtggggctgaggccagggaagttggggcaggagtgctgctaggacctcgtggcgggggcggggtgtagcctctcgtcgcacttccgcaccgcaggtggaagccccagctgcaggagctgctgaagctgcccgccttcatgcgggtaacatccacgggcaacatgctgagccacgtgggccacaccatcctgggcatgaacacggtgcagctgtacatgaaggtgcccggcagccgaacgccaggtgcgctccacgcctgtgcgcgctgatgctggaagcgcgagaggaggggctggcggcggcgctcagccgtcagccaatgagggcagagggcggggctatcggggatcgcagttccgacctggccagccatgccgttctctgtcgacccctgcaggccaccaggagaataacaacttctgctccgtcaacatcaacattggcccaggcgactgcgagtggttcgcggtgcacgagcactactgggagaccatcagcgctttctgtgatcggtgcgtgccgtcctgcgcaagtcagactgccgcgtccccgccctcggtccccagttcccacctgacctgtggccaccccgcaggcacggcgtggactacttgacgggttcctggtggccaatcctggatgatctctatgcatccaatattcctgtgtaccgcttcgtgcagcgacccggagacctcgtgtggattaatgcggggactgtgcactgggtgcaggccaccggctggtgcaacaacattgcctggaacgtggggcccctcaccggtgagagggtggggcaggtgttggcgtggtgtggcgcctcagcggcaagggcctgggaggctggggcttggagagccgccagcagtgagggaaggggcttgggcctaggtgtctgggggctgtttgagagtcctgttgtgatcgcctttggcccgcagcctatcagtaccagctggccctggaacgatacgagtggaatgaggtgaagaacgtcaaatccatcgtgcc

SEQ ID NO: 85114 - DNA, 1419 bp, Homo sapiens
ggccccagccagcacgtcgcgatgaggccggacgccccgcccgcctgcctgcccgcgcaaggcgccgcggggccaccagcacatgcctgggctggacctaggtcccgcctgtggccgagaagggggtcgggcccagcccttccaccccattggcagctcccctcacttaatttattaagaaaaactttttttttttttttagcaaatatgaggaaaaaaggaaaaaaaatgggagacgggggagggggctggcagcccctcgcccaccagcgcctcccctcaccgactttggcctttttagcaacagacacaaggaccaggctccggcggcggcgggggtcacatacgggttccctcaccctgccagccgcccgcccgcccggcgcagatgcacgcggctcgtgtatgtacatagacgttacggcagccgaggtttttaatgagattctttctatgggctttacccctcccccggaacctccttttttacttccaatgctagctgtgacccctgtacatgtctctttattcacttggttatgatttgtattttttgttcttttcttgtttttttgtttttaatttataacagtcccactcacctctatttattcatttttgggaaaacccgacctcccacacccccaagccatcctgcccgcccctccagggaccgcccgtcgccgggctctccccgcgccccagtgtgtgtccgggcccggcccgaccgtctccacccgtccgcccgcggctccagccgggttctcatggtgctcaaacccgctcccctcccctacgtcctgcactttctcggaccagtccccccactcccgacccgaccccagccccacctgagggtgagcaactcctgtactgtaggggaagaagtgggaactgaaatggtattttgtaaaaaaaataaataaaataaaaaaattaaaggttttaaagaaagaactatgaggaaaaggaaccccgtccttcccagccccggccaactttaaaaaacacagaccttcacccccacccccttttctttttaagtgtgaaacaacccagggccagggcctcactggggcagggacaccccggggtgagtttctctggggctttattttcgttttgttggttgttttttctccacgctggggctgcggaggggtggggggtttacagtcccgcaccctcgcactgcactgtctctctgccccaggggcagaggggtcttcccaaccctacccctattttcggtgatttttgtgtgagaatattaatattaaaaataaacggagaaaaaaaatcctgtttcgctaacggctggtggtagcaggttgagtaccgggagggctgcaagaccgtgattgatggggaggactgcgcagaccctggcgagggtgagcccctccccggaggcgcctg

SEQ ID NO: 85115 - DNA, 1048 bp, Homo sapiens
tgatgctggcggtggggtctatgggccacaacttcaacccgcctgggctgtttccaccccgtgcacagtatcgcctggtcggcttgggcctgacgcctcttctcccacagttcctgcgctcccaggcacccccttgcaccgcgcacctgcgggaccccggtttcacggccctactggtcaccggattcctgctcctcgtgccgctgctcgtgcttgctctggccagctaccgccgcctctgcctgcgcctccgcctagccgattgcctcgtgccctacagccgagccctttatcggcgtcggcgcgccccgcagccgcggcaaatccgggcctcaccagggtcccaggccgttcccacatcaggaaaggtctgggtctaatgaccctcgagtcaagaacaaccctgacggctgccctccctcttattcggcccaaggacttgaagcccggcatcttccgacctgccctgcccccacccctgcctgagcggagtcctagcatccccttgggagcagcagcgtcagtggacccagtgctgagaaaagcccccacatcccggaaaacccactttcctttcacgacccacatctcaatcctgaacatctaggctggaacctgcacacctccccctcagctccgtcgtgaatgggacaacaatctcgtgccctcgttttatggtgcagcttctctagtatttctggggctggggggcggggctggaggggaaggagtgtccacgcatcaataaagatttaacgaactgaacgcgctctgcgaacagaggcgtggcacaagtactatcacccctgccctgtgccgaggaacaggaaacatgtgccagggctacaaatgagcagagaggagcatccttgagccccctggccttatcgcttttgtccgttcttcctggccagacctcagagatctgttcctgaccccaggcacctccccctcaatagagtggaggggcccagcctcggccgcctgccgctgctccccttggggacctgagcccgttctctgaccccagcttagaggaactcggtgt

SEQ ID NO: 85116 - DNA, 1757 bp, Homo sapiens
gtgttcacgggaaacgtagtatgagtcccgcgtggggcatataaggatcaagtaattgagttgcgccgctttcaggagttgcggggtggggcagagaacgaatacgctccgttttaattcagtggcctgggctacatgggatatttaggacagactatctctctgagacagaaaaacaagggaggaggcagtatgaaagaatgtattctcgctaaattccagtttctaaaggatgtgtaagaaaccagaggtaaaggtctcgcgatatcttaagacatccggcgtagtacgcttcagtgagccacagcgctagagaagtaggagaagctcgcgagatctgtgccgttgccgaggagactaggagggggaggagaggggatctcgcgaaaggaaagaggtcgggagcgctcgcgagatctcggaccacccaacctgaaaggtgcttaggaagttgaaaggcccagaggaggcctccgggcaaatggccggagctggaccgaccatgctgctacgagaagagaatggctgttgcagtcggcgtcagagcagctccagtgctggggttagcacgggctctggttctgggactgaggggcagtcaagcagcaagatggagggggtggggaactgcagctcccggcagcctctgggctttgtgtgagtgccccgcgggctgccgggagctgtggttccgcgggcgggcagcctgggctgcgcggtctgagcgcttgttacaccccgcgcaggattcggacggagagcgcgaggactcggcggctgagcgcgcccgacagcagctagaggcgctgctcaacaagactatgcgcattcgcatgacagatggacggacactggtcggctgcttcctctgcactgaccgtgactgcaatgtcatcctgggctcggcgcaggagttcctcaagccgtcgggtcagtgcccggggaatgcacacccgcctggtaatgtggcggaaccttacgcaaggcatttccccttaagggcctggctgcaacccttgttttctggggctcgttttcgtggctcagaggggcgggactgattctggcctactttcctgatgctctgatccttctttccagattccttctctgccggggagccccgtgtgctgggcctggccatggtacccggacaccacatcgtttccattgaggtgcagagggagagtctgaccgggcctccgtatctctgaccacgatggcgcttacctttcagacttcattaaacttatgaccgaatgggcctgtgtctgtgtgtagctgggatgccggtgcaggatagcacaccccatccctagaggaaagggctcatctgaagtcgggagcaccctcaaccctcctctcccaaccaagatgtccaggggtgccaaaggttctctcaagttcaggggtagagatggggggcagggctgaatgacggaccaacaggccccagggtgggcccctgcatcttccctcccacggctgctgctccagaattgtggcgggagggggtgtcatcctgctccggaaggcccattgtttcccaccccggcctggcaacaccgagttcctctaagctggggtcagagaacgggctcaggtccccaaggggagcagcggcaggcggccgaggctgggcccctccactctattgagggggaggtgcctggggtcaggaacagatctctgaggtctggccaggaagaacggacaaaagcgataaggccagggggctcaaggatgctcctctctgc

SEQ ID NO: 85117 - DNA, 2678 bp, Homo sapiens
ccccaacaaagagaaggggtcttgctctgtcacccagtctggagtgcagtggcaaaatcatggctcactgcagcctggagctcctgggcacaagtgatcctcccatctctgccttgagtagctgggacttcaggtgcacgccacaatgcctaattttttaattttttgtagacacagggtctcgctgtgttgcccaggctggtttcaacctcctggcctcaagtgatcctcttgcctcagcctcccaaatagcctcttcaagacaactaccccataaggtggattaccattactatgttacagataagtccttcgaaactttggaaagtttaatagctcaaagccacactaggtagtaaccactagagccagaatgcaaattcaagtctgcccaactccaaagtccatgttctctcaatataaagggaccatctcaatgtctaatctcatgttaacatttgtagccactgctctcagcaagtatttgggatgtggctttgtcctaggatccctgcacaataggaaattgtggtcctattgtatagtttgcagttattgtctctggaagggagtttgcagagttctcctgtggcgaagaggaggcaaggaaggctaagtgtcagttaagcaatagctattggggctacttctttgttaatcccataccccagatttctctcctgaccttttggggcaaagaggtgggtatttactaacttgaaggaaaactagagtggggaaaaggccggcaaattagtgacactttggcgagggagaaaaaggaggcagtttgccacttggagaagatgaggaagacagggttgcaagacggtgactccaaaagagggagctcgacaggggtaatgtaaacagagatgctaactaagtcagaaaactctcctggtgaccaaaagagaaccactattgggggtaatggctagatttggtctcctttaacttaaggaggggagatttgagaatgacagacagttgaacttcctggcagcagcaagcaaaaaacaaatcaggaagagtttagtgtgtcttctggcaggggacaccagggcccagcacaggagaaggtggcccctgtgagatactggtgggctatataggcattttctgaggggctttgggaggcatgaacaaaggtggaaacattgctgttggcttcggcagtatctgaatttactgtgagatggagggtttaaatctaaccccatggaatgcaggagtccatgaattatctaaatcgatcattttgatctttaatcaactctgcaattatgtgtaccttgtttgctcaattaaaccctgaactatttgagaatgaaagctatgctgttcctctagtgcaagcctcagggcctgtcctgtgcctacaggatgtccccattctgccaaaacctgtccctcttccagagactcctacttcaatgtctcttgctagaaacacatccctttcctcacacatccagtcactcatcaagtgtaatctgtctcctaaatatctctggaacctatcttcttttctccaagttaccatcacctcttgtctaaactgctacggaaacttcctaacctgttctcccatttccacttctgacttccatgctgcaatgagagtcagctatgaaaaacaaacctaaacatcgaactttccttagcttcttcagtggcttccaactgcttttggaataaagtcctaaattcaaagatcttgtataaatcaggctcatctcgcaacacccctctttgttctctatggcctagacacactggctttcagttcattacatgtcttgcctcagaccctcacacactgtcctctctgcctgcaacactcttcctttcactttccacctagctgatcctaaatgttccttcctcagggaggtcttttctgatttcttggtgggtcaagactttctgataaatcagttagcaccatgcattttccagagtttttattacaattgtaaaattatggctgtaataggctggctgcgctgctagattgtaagctcacgagggcagagatcttgttcacatcttgctcactgctatattctcattgctgagcacacagttgcagctcaataaattttgaatgaactccaatgttaagtgaactcatccgtctatacctagtgggggggatgttgtgtcctagtaggcaaggaaggaccaagaaataggatgtctggttcctgtgctatagtctctatccataggattcactttccttgcttccccaatatccaaaaccaaaagttattccatagagggtctctggccaggtgcagtgactcacgcctgtaatcccagaactttgggaggccgaggcatggggatcacctgaggtcaggagttcaagaccagcctggccaacctggcaaaagcctgtttctactaaaaatccaaaaaattagccgggcgtggtggcacacacctataatcccagctacttgggaggctgaggcaggagaatcgcttgaacccgggagatggaggttgcattgagctgagatagtgccattgcactccagcctgggcaacaagaacgaaactccatctaaaaaaaaaaaaaaaaaagttaaaaaaaaaaaagagggtctcaccagatttttgggggccaatccatctgtcatttccccatatggccaccaggtggctgt

SEQ ID NO: 85118 - DNA, 1124 bp, Homo sapiens
agctagagggtgaaagaggccaagcaggaaatgttgccacagaagccaaagagagagcacagaagagaggggagcggccaacagtataaagtgctgcacagaggtcacgtaagatgaagacctgagcgaccatggattcagcaaacagcaggtcatggtggctttgttagagaagccaggctgcagttggacaaggtatgcatgggatattcttagaagaaatctaactgcagaaaggaggagtgttctggctttataaccatgcacagaatatttaaataccttcctttggattccatttcttcaaccataaaatacagataatagaaagtaagatgacagtagggcaacaggcaagacccaggacatggtaccctaaaaagatgctaccttatagtgttgttgagaagattaaataaggaatgggaacctgcccagcactataaagagtccttggaaaagacactcagaaaaccttagttttctttcccattccttgtgctagccattctttatttagtaatgaatcctcccctcaggattttgagatttggcatttttcagcatccaggtaacatctctcatgattagaaaattacagaccgtatctgtgactaacattcagtttccaacctaacaatagtgtttattcctccattaggagaagtttttgagtcaagtaaaatatggtttgtttcatatcatgccagaattgagcttctttatacagtgatggaaagcaagggaatggggccaactactgggagaagagtaactaaagtcagtcctttgctcctaaaggattttaaggtgcttaagctcgtaactcaggttgtgaatcttctcaccttgcagtcatcttaagtgaacctctgaagagagaagtggctaacagtaaacttgatggtttagaatgcagctaccaattatcgagtaccttattacagccagtgctttatgtaagttagctcacttaaacctcaccacaaccctttgagataggcattaatacaccattttacagatggaggagctgagacttgagggataaatagcttgcccagggtcatagttattaagtggcagagcttggattccaggtgctacctttctgacaccaaagc

SEQ ID NO: 85119 - DNA, 1025 bp, Homo sapiens
aaatgtgtattggagaaggcatgaaagcaccggtagtactaaaaagtaccctataaatataggcactgttaataagtaacagtaagctgagcttacatgcacacagagtaggtagaggactgccctgctttctcacttagtctatatgaattctgtaaggtcatgtgaatccagatcctttaggttgtcgacctaggcctaagaagtttgtcttcctcctagtctaaaaagctttctcctgattaaagccttctggctccactcacatgccaccttagagacattttataactctttgaaggagacaaagacacaacctctaaccaggtctctttgaaaaagatgataataaaacttctacacacaatgcactgttctttcatttctgcttttttactgcctgttttcctgagtttaactgtttcagcctctatctttgtgtctctccactctttccctctttccctctcttacttctcttttcttggttctttcttcttatctgtctgtcttgatctctattctagcctctttttctgattggccctctcccctctcttctgtctgattggcctgtatccttccatcaccccatctgtctgctggattctccctgtctgcctgcagtaatgtatgtgatagcactttataaattataaagcactatgttgtataaaacaccattatcactttgtcttccttcttaccttattttttcttcctttatctgtcttcccttcttctctctttctctctctctctgtttgcctgtctgcatcccttttggtgattttgcctgccttctctgtcagtcaatctccattccctccctgccagcctatttttctgccatccctcttctctgtctgctcagttcttgcatctctccttctgtgtttccaggtttctctatatttcttttgcctgtgtagtctctctgtcgttaggccttttatctatgcctgtgtgtctcactgtctagctgcttgtctccctgcctgtcactttcattgtggggcatcagt

SEQ ID NO: 85120 - DNA, 1020 bp, Homo sapiens
ctaagtgagaaagcagggcagtcctctacctactctgtgtgcatgtaagctcagcttactgttacttattaacagtgcctatatttatagggtactttttagtactaccggtgctttcatgccttctccaatacacatttcagtgatgaagcgaccaacaaagatgtcttgctggcatcagaccacttaccatgcagagtagactacatttggagagagtaaagccttcctgagcactcctcaagtactggtagtgaacgcatgcaaccagtaactagtcaatccaaaagacacgtgctttgggtaacacttggtagaatcaaaaagaccagagatggcaagcccagccaagttagttaggagtactgacagactgacagaggaaggagcatccagaaaaactggaagaaaagtagggaggagtacagcaaaacacaagcaaaagcaagcaagcaaaaagacttgtatatgtgtagacttttctctggagcagtatccaggaaatgtgaaacagtggctgcttctgaggagaggaactccgggactaggggagaaggatgggagacaggtttacttttcacagtacactttctgtacttttaaaatgttgtaccataagtatgtactacctatttagaagttaactggaaaaagaaacaaaagaagagagaaaagcaagaagagacgtggacagcaagagcctgccaagcagacagcaaaaaggcaggaaggcagcgagagactgggaaaatggcaaaaagactgagacaggcagactgtctgaggaaccagaaagacagaaaaagagataactgaaataaaggcaaacgtgagagaaggcagggtaggggatgtggcaagaagttagataagactttgaggcaaaggggttactgagaggtttaggggagagagactatcctcattgatggaagttggcagagaagaagcaaaggaagaaaaagctggtaagtatgaagactaaagagagaaaagcctgaaacggtgggatagcagcaa

SEQ ID NO: 85121 - DNA, 1581 bp, Homo sapiens
ccctgtctactaaacacctgggggccaaggatccagagacagggatccgtgagggccaaggatccagagacagggatccgtgagggatggcggaacaggaagccaaaggcctggggagggcgtagaatgaagtctgcctcactgacggccacggggctatgggcagtatgtttttcagagcgacgaaggtcctgaaccagaggctgaggaatcagacctggacagtggcagtgtccacagtgcctcaggccggcctgatggccctgtccgcaccaagaaactaaagagaggccggccaggaaggaagaagaagaagggtaaggagtgttgactgtgtgtgatcctgtcagtgggccgtcctctcattcttattttcaattttgacttctctcttcaacccttctccctctctctctccatctccccctgccctgcttccttatccctccaccggggtatatgacagtcctgggctgtcctgcagtggccggggaggaggaggttgatggctacgagacggatcaccaggattactgtgaggtgtgccagcagggtggggaaattattctgtgtgacacctgccctcgtgcctaccacctcgtctgccttgatcctgagcttgaccgggctccagagggcaaatggagctgccctcactgtgtgagtacctaatgccagcatctgatggccctgaggaacccacccatctctttcccccttggtttcacttaccctcttcctgcccccagatggctggacttcttagtaacagatgtccgagtgtctaggatcctaatgtattcctttctcccacaatcaacatttctgaaactggagtgtccttttccttagttcccaccagtcttctctgcacttctaggattcaggtgtcctgtctttgcctgtatcttccagtttcattccttaatttcttccatctgtctgtgtgtctatccttggccccctaggagaaggagggggtccagtgggaggccaaggaggaagaagaagaatacgaagaggagggagaggaagaaggggagaaggaggaggaggatgatcacatggagtactgccgcgtatgcaaggacggcggggagctcctgtgctgtgacgcgtgcatctcctcctaccacattcattgtctaaaccctcccctgcctgacattcccaatggtgaatggctgtgtccccgatgcacagtgagtggaaacatctcccctctgtatttactgtcaggcctgatcccttcccccatccctggggcccacatgtccagcttttcatttctctgcactcccccacccttgtgggacccctatcttctcatctaacaatgggttctttctgcctctttctttcctcctccttgtacgtgtccatcccaaagtgccccgtgctgaagggtcgagtgcagaagatcctacattggcggtggggggagccacctgtagcagtgccagcccctcaacaggcagatggaaatccagatgtcccacccccccgtcctcttcaaggcagatcagagcgagagttctttgtcaagtgggtaggactatcctactggcactgctcctgggc

SEQ ID NO: 85122 - DNA, 1046 bp, Homo sapiens
cgaactcccaacctcaggtgatccacctgcctctgcctcccaaagtgctgggacgcgcctgttattctcttattgccccggctggagtgcagtggtgtgatcttggctcgctgcaacctccgcctcatgcattcaagcgattctcctgcctcagcctcctgagtatctgggattacaggcgtgcgccaccacacctggctaatttctgtatttttagtagagacggggtttcgccatgttggccaggctggtcttgaactcctgacctcaggtgatccacccgcctgagcctcctaaagcactgggattacaggcatgagccaccgtgcctgggccaatccatcctttttcatagctccctttccctgtcccattcctcctgccggcctcttcccggttccttgttgtcctctgtgagtgtcaggactatctctttcccttttttctgtgccctgctagctggaaatcttccatttggttatgtatcgaaactaccagcggaagaatgacatggatgagcccccacccctggactatggctccggcgaggatgatgggaagagcgacaagcgtaaagtgaaagacccgcactatgctgagatggaggagaagtactatcgttttggcatcaagccagagtggatgaccgtccaccgcatcatcaaccacaggtgaatcctcggtccctgggaagtcagacctggtatatgacattattcttaccatggtgatggccccatgttagtatttgctgattaaccaggtaattgatctaaccttgataacctctgctgtagctccagcctttctggccttgtttcctccaggggaacgggagaaaacaggaggaaaatccggccaggcagtgcctcttttgtcctttgcctcctgtcatctccagtggcataagacatagcacatgagtctggggatgagggcatgaaagcaaaacatgagagacataattcatccagaccagtgttttgaatgtttcttcttcatagtacttattactgcctaaacttaatggtatgtatttagttatt

SEQ ID NO: 85123 - DNA, 1130 bp, Homo sapiens
gagcctgggaaaaaggaaatatgggaaaatctaggtcatggacagtgggaagtaggtctggaatgggttcagaaaagaaagcgtaggactcccaaggatgaggcctcattcagacccactctttttccagagaactaattatgggggaagaccctgcccagccccgcaagtataagaagaagaagaaggagctacagggtgatgggcctcccagttctcccactaatgatgtgagtcctctcagttgtcatttcttgtttctggagtgatggtgatcgaagattttccaagggctactgatggaacttcccagagattcagtaacctctgtgaacagtagctcttccttcagcatccagtcttgccccaagagtggctaagaattttggcctgaaagggcaggagccactagagatagcccactggtggctctgtcaccagctggcccttccccatggtgctgctggatattgtcttaaggaatgagggggaggggctgaagactagatgtgagaacttttgtaaactcaggccatagtagagggaattgtaatccaacttggtatccatgccagggaggaagagactaagactggaggagccgccgactatttccttgagctttctgacttcttgtctctatagcctaccgtgaaatatgagactcagccacggtttatcacagccactggaggcaccctgcacatgtatcagttggaagggctgaactggctacgcttctcctgggcccagggcactgacaccattctagctgatgagatggggctaggcaagaccatacaaaccatcgtcttcctctactcactctacaaggaggtgctggattctaggaccttgaaggggaccgcctggactggggaagtggggagggggaagataaaggggtgtagctggcagaggactagggtatacggcctctagcctagacttatgctgcccccattcttgactcccagggccacacaaaaggtcccttcctggtgagtgccccactctctaccatcattaactgggagcgggagttccagatgtgggcacccaaattctatgtggtgacatacacgggtgacaaggacagccgggccatcattcgtgagaatgaattctcc

SEQ ID NO: 85124 - DNA, 1110 bp, Homo sapiens
ttcctggaggagtttgctgacatatccaaagaggaccagatcaagaaactgcatgatttgctggggccacacatgctgcggagactcaaggcagatgtctttaagaacatgccagccaagacagagctcatcgttcgggtggagctaagccccatgcagaagtaagatgcaagacgagctgcctggagtagggcttggggattgatgggagcgttccaagtgcaatatcataattgcttcctttatttatgtttcttttacacccctttcctggcctttaggaaatactacaaatacatcctgactcgaaattttgaggccttgaattcacgaggtggtgggaaccaggtgtcgctgcttaatatcatgatggatcttaagaagtgctgcaaccatccatacctttttcccgtggctgctatggtagatacacagagcagggagctgatcgaacgcccattctcagaaaacatgggtggggagtagtggggaggtgggtattgagccacaggggtggagctgggctggaaggccacggactgggtgtctgagaacaggaggaattgggaacatgtggaagctggatccgggcatctggccttctaggtgtggcaagaatatgggggcatgtttccaactgaccccctcctcctcctctctcctcccttttcaggagtcccccaaactccccagtggggcttatgagggtggggcacttattaagtcgtctgggaagctcatgctgctccagaagatgctgcgaaagctgaaggagcaaggacaccgagtgctcatcttctcgcaggtgacctgtgcccttagctgtctttacatctgcttcctcttccctctcctcatcctccagactttaatttcttacggtcttcctgtggctgctctggtgtgacaaatgaggagattcctcctgtaagagtttttttttttttttttttttttgagacagagtttcgctcttattgcccaggctggagtgcagtggcacgatctcggctcactgcaacctctgcttcctgggttcaagtgattctcctgcctcagcctcccaagtagctgggattacaggcgtgcaccaccatgcctagctaattt

SEQ ID NO: 85125 - DNA, 1108 bp, Homo sapiens
ggttggaagttggtgcctggatcactgaaggtagaaaggacaagacctaagaaccctagacatttgtcgccattgcctccttgctcccaccctcaggtgctgggcttcaacacccgtcagcggaaggctttcctcaatgctgtgatgcgctgggggatgccaccacaggatgccttcaccacacagtggctggtgcgggacctgaggggcaagactgagaaggagtttaagtgagtgtgggtgatacagggctgagttggacgcaaggggaagagctttgggtgttcctttcttccttggggccgccatatgatgtgaccttactcaactgattatcaccctccctgtcatacaatacttcctggctcgatttcctggggggtggtctcagcccactccacctcccctcagccgagcctagagtagaggggccaggcatcctccccaggggaggggcgttgaagcaaggagcctctcctgggctgtcctagcctcacatttacttgaccacaataacctggcaggaggagctggtggaaaggatgaagagctgactgatggggcccaggaattaagtaccaaggccaaagggaaagacccaggggtggggcgcagggggacagttaggacttggagggctggtaatggtgagagtgagaggcccaggggaggagccctggagcacctggggatttgggggtttgggggtcctcagtcatcctcgcgcctccctcactgccctataccccttctgtggctcccctaaccctcctcccactcccatgctccttagggcctatgtgtctttgttcatgcgccatctgtgtgagcctggggcagacggctctgaaacctttgccgatggggtccctcgggagggactgagtcgccagcaggtgttgacccgcattggagtcatgtctctcgtcaaaaagaaggtatcagtcttcctgtcacccaaagaatcaagctggctgcctagtctctgtccttcctctgcctctgtccctgagttgtaagcttgcgctggtgtgagacggaggagactggagcttcctgtctgtaagcgcctggagctgacacctaaccctcccaccctgccacccca

SEQ ID NO: 85126 - DNA, 1050 bp, Homo sapiens
tggtcaatgccggaactgatgcctgaccccagcgccgattctaagcgctcctccagagcctcctctcctaccaaaacgtctcccaccactcctgaggcttctgctaccaacagtccctgcacctctaaacctggtaatcagaagtcaggatggtgggagagacagaaagggagccaggagtcagggcgggagaatctctgtctttatcactgtgccttcccctgcagctactccagctccaagtgagaaaggagaaggcataaggacacctcttgagaaggaggaagctgaaaaccaggaggaaaagccagagaagaacagcagaattggggagaagatggagacagaggtgtgtggctccctggattcccctgtggagcgggaggggagggggcttggaggccaggtacctgggagccctctggctcatcctgaccccattgtcctcttccaggctgatgcccccagcccagccccatcacttggggagcggctggagccaaggaagattcctctagaggatgaggtgccaggggtgcctggagagatggagcctgaacctgggtaccgtggggacagagagaagtcaggtgggtgcatggccttaggagtgatgggggattagaatttgggatttccctcttctggggtcaggggatgagggtaacatcctcccttcctatcccctaccccctcccacagccacagagtcgacgccaggagaaaggggggaggagaagccgttggatggacaggaacacagggagaggccggagggggaaacaggggatttgggcaagagaggtaatgggtggaagggaccggacacctgggtcccagagggcatcaggggaggtggagtctggggaaccgaatgcttgggtcctgggcgggtagctgtttgaaaggccagtacagtacagtacagatagtagtcttgggacctgggaggagggtgtcctgaggtgtgagctttgacctgtctgtcctagcagaagatgtaaaaggtgaccgggagcttcgaccagggcctcgagatgagccacggtc

SEQ ID NO: 85127 - DNA, 1114 bp, Homo sapiens
gcctctgtgtcccctccacacagtggggcctcttcactggcagtggaactgcatgcctgccatactgcttaacatcatccagttaggggccttggactgtgaatgcaccatacagatccctggctgtgatcaaacaaatcacattccctcacatgtgtttcaccccataaggcagaaactaccacccatccaaccctctggccttaccccatgaaacttccctttgaccttcgacctttcctcctaccccctctcaccttgccattgatagagattatatcccaaagccctctaaccatctaatcctgcctggtgtagtcactgactcctggcccctttgatccctgttctaattccttgaatctgtaatactgaccttctaacctccctctccccttacatattaaaaccgtgattccttaaagctttgacacttaccacctcccatgcctcctgactatttcctccccatcatccccaaccccaaaccttgctcttccagtatgagatgttctgacaactccccgcccccatgtcttccaatgtccccccatcttcctttcctccatgctccctttttctttcttctttctctccatctgtcttctgtggtaatctggtctctctgtctcttttcctgacactttttcttttcccctgagttgcttctgttttccatctacttcttttactttcttgatctctggttctttgacatctgtgttctcctctctcgctctttttctgcctgtatctgtccatctgatgcctctcttttcctggctccatctctgtatttccctgtctttctcttgcccttctttctctgtggcccgggccccagttctgaaccagctggaggagttgctgagcgacatgaaggcggacgtgacccgcctgccagccacgctgtcccgaataccccccatcgcagcccgccttcagatgtccgagcgcagcatcctcagccggctggccagcaagggcacggagcctcaccccacaccggtaaccctctttccccctagctccagttttccctgtttgtgttcctcctgcacacatacaaacacttccatcagaatcctatacaatatggaaaaacaacttgcta

SEQ ID NO: 85128 - DNA, 1070 bp, Homo sapiens
tgcttgagatggccgccaagaccccttcaaacttcactaagtaggtctcccttctttccatctcttctttctgtctctggcactccctcactttgtccctctcttggtttctgtcgatacccctgactacgagaatcaagtttaccaaggttgactgggtcctgtcagacccaggggatgcccctgagcttccctccttacccctgggaaggtcagggatgcatggatctccacgctacacggatctccaggctatgcctcctccagtggagtgtccttgggtccgtgtcctggggagtggagggagggaatcagcttctcactctggcctgctcggggtgcctgacccagatactgcccctgcctgccccaaaggctaggtcttctgcgacctttcttgggtgcaaggggagtggggccggtgggaaggatggaccacatttttcatctccatgctgagggacagggtctgggtagactgaaatgtaactgactttatctcagaggactgccagaccagaagctcagaacctgaagtagggggtagaggaggggctcctgcttgggagtgagctgaggtcactgatctgacctgctttgtcacctgaggaatctgatcccctctatatggtggccctgattggaaagctgagctgacacctgggttgggggctttgggaggatgagggggctcactggttcagagacagtcttcacaagtcaataggaacagagggagtggagagggagaactaggcttttctgtcttactctcccccctccccccaggtcctcaatctgcctttcctccaggcccatctgcctagcctagccagggacccctgtctgtctgaatgcctgaacttgacttggtttacctcttccaacctgccatctaccatttggcacagcactctgcctgagggcctggtctcacaaactcaccacaatcaaacaaaattcctcccagcccctcactgcacacaacccacagatgactcaaacacagacaagaccccagaagaaggacaaaccagactgcacgtcttcaatgtgataagagggaatgg

SEQ ID NO: 85129 - DNA, 1107 bp, Homo sapiens
gcaggaaggatggcttcctggccttccaaactagccgttacaaactccattactacgagacgcccactgggatcaaagttgtcatgaatactgacttgggcgtgggacccatccgagatgtgctgcaccacatctacagtgcggtcagtgccagccccagggacccatcccccagagctcttcagaaccccaagactccctcatctcccctgccccaatcctactatatgtttgctcaactcaagagttttctcaggggcccttaggttcttaactcccaccaccactttctcctcagagagggcttgccttccagcccttattccttgtgcattcacacacccctgaggttatacaaggtttggggctaaaaaccagaagtatccaaagcctggctctaacatcttccctttccatagctgtatgtggagctggtggtgaagaatcccctgtgcccgctgggccaaactgtgcaaagtgagctctttcgctcccgactggactcctatgttcgctctctgcccttcttctccgcccgggctggctgaagcaacctacctcaagtctcaggagaattcatgtctgcctggggcccttccgaacctgtgccaactaagggcccccactgtaagcccccgcacccccaccccctgcccagagcaacagcctaaaggcctgccctgatgctctcctcctaccagagtgaagcccacagagtccctccacctccacaccaggccctctctccagttttatcccctgcctaatgctgcgagaagcacagaataaactttttgtcactctctgcggcctgagcgtgttggtttgagggccctctcagtcctgccccacgcatgaaggtggaaagtagggcagccacaccccctggagggccacgaagtggctttgcggatgggtttctcaaccgtgggaatattgatgctttgagctggataattctttattgtggggaccgtcctgtgctttgtaggattttagcatccctggccaccacccactagatgctgatagcacaggcatgaaatcaaaaatatctccaaaccttgccgaaagtacgctgggagatacattccctcccgattgaga

SEQ ID NO: 85130 - DNA, 1026 bp, Homo sapiens
tccctgcttgcttcttgcggtgccattcgctgtagtgcagacacactccattccggtcaaacaggtacaggttgtggacagtcatctgcagggcagggagtgtgagcctcgctccggggccgcccccactccttgggctcgggttcccggacccacagccttccaaccaggtggggaccccacccacggactcaccggaactgctccgagtgcccgtcaagagttacttccggtttccacggagctccgccccttaggggggttctcgctcggccgcggctgggcattaactccgctccagtgctgcttgtcagactccgcctccctccctcagccaatctgtggccaccggagccgcgcacgcgcggccaggcgctcgggatacagaagtgatgtgagtgtctgcgagcgtggtctcgcgggcgggtgacgtcatcgaggcgagagaggcggagccgtggacagtgggcgggaggctgccaacggttttgagcgtagggggaggcgtgagagggggatctcaggggaggaggtcaatcgcttgccccccactttggcaaattggggactgaggactggaagggtggagagtaggcggaaccaggtggtcgtcggggcagaggatctcgggctaggcttgagggcggcgtgcttcttagggacgacttagggcgtgactgagggttcacaaggtttcttttggggtggtcgggagggagagattctagggaacaaggaagctcgctatggctttcttgccaggaggggtcgaagggaaagtacaagggagctggagctgaccctgggtagaacgggtgaagggatgggggagcgtgaggttccgccctctcttgagactggaaccaattgagggactagtagggcagggggacagaaattgggctcctagtggatttgggtccgtttccgttgggacgttttgggtgtgagaacttaagagctcagttgaccggggatagcctgtgccggagttgatctgcagcttccagcactcgtagtcgggaa

SEQ ID NO: 85131 - DNA, 1543 bp, Homo sapiens
aacctgggaggcggagcttgcagtgagccgagatcatgccgctgcactccagcctgggcgacagagcgagactccgtctcaaaaaaaaaaaactaaaaaagaaaagggctgagggttaagagcctgaaagctgggacttaaatgtttttctgaggagggcttttttgaccattccatctaatatggcaccacctcctttccaagtagtcagatcgccttcttatttctttcatgtagcttatcgttctgatatatcttgtttttttctcctctctaaaatttgagggtccgtatcttgtttgtcttagtactggctgcctaaggtctagaatatacataacacagaaacactctgtgtttgtcgaatggacacaaactctgctagcttgtgcacaggatttacagctactggtgatatactgagctttatctctgtgagcctctgccttagtgtctgaaggggacagagaaatagacaaaggagaggaaaagtcaaaatcactggttgccatttttggaagcctctctttctccatgttaaaccccttggcatgaatgaaaggctttcccctttatccttgctgtgtttattcattgtgtccaatgagcttctgaaggtaggagtaactttgcacattttgctgtgtgggctgctgcatctctgccaaaaggtttatgggatttttactcaggagatccaggaaaaggaggagcctggaatctaagcacttatctcctgaaaaggtacagaaacatgttggagatcttgagcctcaaggtgcttgcttcagaattttcctgattctccctctccagacctattctgttcttgggacccaagcttcttggctccagcccactcccccactagaggagctggaaagtttggtgctgtggtcataccaaagatgggcaacacccagactcctcacccttttccccagcattgtgagcgccatattcagagcctgcagacccgagtgttagagctacagcaacaattagccgtggctgtggctgccgaccgcaagaaagataccatgattgaacaactggacaaggtaccagggtagcaaaatgtgggtgggtctctccatgaagagcattaaggaataataaataagtgggtggccaaccaatgtttcttggtacatgctgagagctgggcaaggggttggtttgctgactgttgggagaagatggctgttgaccctgcccctgtgggtagaaagaggcaaaaaagttattttgaaatttcatcttacttgccctacctaagaccctggcccgtgtggtggagggctggaaccggcatgaggctgagcggacagaggttctcaggggacttcaagaggaacaccaggcagcagagctcaccagaagcaagcagcaggaggtgagcgccctggagcatatggcattagaacctgagtcacagatctcaagatggaaaggggcagaaatagctctggaattagggtttccaacagattgacctcagtcttgtagtggctgtcctgacatttcttctcatccctccttt

SEQ ID NO: 85132 - DNA, 1049 bp, Homo sapiens
ctcccaggttcatgccattctcctgcctcagcctcccaagtagctgggactacaggcgcccgccaacacgcccggctaattttttgtatttttagtagaaacggggtttcaccgtgttagccaagatggtctcgatctcctgacctcgtgatccgcccgtctcggcctcccaaagtgctaggattacaggcgtgagccaccgcgcccagcctcagggtatgttatatcagacacgtagaatggatttgattgctctgtcgaacatttattttagctaagaaatttatgtctttcacccatagtcattttcactttgatgtatgtttaaagtgcgaatatcttaataaggaaagggaacctctttcactccttgaggcaaaattcttgttcttcatctcatatgaggggaaagttggtactggattttgtctacattatatcctccatcctcttctaagcccaaacagatttgggccgttatcccaccttccttcactccaggcccggtatgaaagccagcggatccagctggagtcggagctggctgtgcagctggagcagcgggtgacagagcggctggcgcaggctcaggagagcagcctacggcaagcagcctccctcagggaacatcacaggtacgtgggactcactgggtgtcacttctctcagccacagcacgtatcgttagtgccaggcctgtgttcccttcaatccctttgccatggtccagcactgtgactcccagggtgcgctaactcccatcagctgggacctgagtctctctcgggagggctgccttcacgcgttcatggagagccagaagtgcctgggaattttcatcccatagggagtagcccttaaccaagaactgatgggtgcagaatgatagatggtccagctccctcactgggacagtgctgaggtatgacctgtgctgtctccagagctgctctgtcggactgagcctcctcgcagcctggcctcacttctcctcacacccattctgctgccgagattttctggaactgcttccgaaataaatttattta

SEQ ID NO: 85133 - DNA, 1026 bp, Homo sapiens
cagcctcaaacggtcctcccaaagtgttgggattacaggtgtgagccactgcatccggaaatttataatcttattaaagtgtttgtaccatgtcttatctctttaaacctactgtgctttgacccttctttctgcctctctcctggtcaggctcctcctgctggaccctccagccccgggcctcaggagcccgagaaggaggagaggagggtctggactatgcctcccatggccgtggccctgaagcctgtattgcagcagagccgggaagcaagggacgagctacctggagcgcctcctgttctttgcagttcctcctcagatcttagcctcctgttgggcccctcttttcagagccagcattctttccagcccctggagcccaaaccagacctcacttcatccacaggtaactgggggcagaagtcactggggttccccttctgtgcatgaattggctccctctttcgtaccctgctttctgtctgatacttgagcatttagtttcccagatgcctttagtgatcgcaagttgcaaggagcagaaatctgctcacattggtccaaataaagggattgagatctcatggaaatatgacatcgctggacttaatgagaactggagttgggaacggggtactatcaggaactgaggcagctagctggcccttttctgtgggcctgcatagcctcctgggtccacctctcctgcacatctgctcttttttcttgctagaccagcattcaaggttctcacccttcataacttcagtttacacatgggtttgaccagctgtgatactgactctagctgagcctctagacatttatagagacatcggtgtctcagtttttttaggtccagtttaaagaggccatctgattggattggctgaccttgggtgtggtgtccacccctagtttaatgtcacctgtgatttgagtggatgggggcattctgtgtggtacaaacatgacaacctaggtcgaattaaaaatgagggatggggccgggtgcagtggctc

SEQ ID NO: 85134 - DNA, 1027 bp, Homo sapiens
aaccatgtttataaaacttccatttaaatgctcactaaaatggacaaagaaaaacaatactagggaagaaaataacgtagacatgaaatttaaaaaggccccaaattcatggtacaaacactgaaaagcactcagtcaaactgaaactggaagaggatatcctaccttgagactcacacgcagctctcagctctggcacatggtgcagggtagtggtgatggcaggtacaattctgaaagtggtgttggcaggtaagaggtgggtgtttgagggacagagtttaccagattctgagaagaaggcagggcccttctatctgaccctgagttatacacatgataggatgtggattcatagagtgttttgtactaatgtttgcattttacttccacctaagtaactttctagcccccaggggacgggcaaaggaagaaaaggtgaagatgaatgaccagacatgtgggttgccctgctcagctgtgtcagaacggcttgatcctcagccccgcacaggaccactctctggcatgcaccagcggagaaactggaggcacactggcgcaggagcagccccaggcttgagggcttttccagccctgtctgtttacccacgtatggaaatgtttacttttctattttttaccttaaatatgtaacactggtttgaccaaactctcagattcatggcacactatcatcattggtaggtgatggtttgctacggtttttaatagctggtaaagtgaacacccagttcattctcctcattatctcctggattcccgcctaccgccatcagtcagtatgccctacatttttcttgacgtgaagcacagcctggagaatattccctgaaacagctctttaaacgcaatccaaaaaaggcatcatgctgacttaaccatgttatgaggtgagtaaaacaacgttgatttttaaaactgtatatattggctgggttcggtggctcatgcctgtaatcccagcactttgggaggccgaggtgggtggatcacctgagatcag

SEQ ID NO: 85135 - DNA, 1018 bp, Homo sapiens
gccggagcctcctggcgtcccccctccctccctccgctgccccacccccgcgctgtacccgggggctccacccggcttcgctccctcaagtagcccacggcgaactccaatatctccgctttctccagcttcgggttccggaggttctacagacgggaggggagggcgcagagacagaaaggggtggggagaaagggggaaagtggcagggggaagaagggagggacggatgcgggagctggtggtgcccccgatcgcatttgcgcactgcccacagaacgcgcgaccaaatgcggagtggagatgaccaaggaaagtcctggcccaccctgagacgaaactgtccaatcctaggggttggaaccaatgcccaacgcgtgaggaggagatttgaaaccgcaacccagggaatgaaattaaccacccgacataacagaggctggctcatcagaggctggctgtgggggagggggaaccggacacttagagacccaaagggtgaaactgaccgaccccgggagcgaaatttacagaaccaggcgtgaaacttacagacccgaggggtggcgaagaagatcgcgttctgagagcgagtgggggtctgggatggaattccaaaggcgggactcgggtgaggatgccttggggccagggttgccaaccaagcttgtgtccccaccccagtgggaagccctgggacgcggaaacgggaagcttggggacctagggctagcggagggactgacctggtcccgggtccgctccagcagcagcagcctcagctcttccaggctgcggttgatgcggtcccggcgccgcttctccacaagcggcttgagcatctgcgaccagcgagaaaaggagagcgggccgaccagaccgagactcagtgcggccgccccggcgtcggatcccgccgctgggagagcccggcttccaccccggccacaagaccccagattgcctagggccggccccattcgatccctctccgctccccctcccaatgcccctagat

SEQ ID NO: 85136 - DNA, 1038 bp, Homo sapiens
tacggcctcgatgggcaggaggaatgcctaggctggcagtgcccacaggagtttggcggaccagagccatctgtccatgtgtccatggactcaccctgcttcctccatctgccagcatgcctccatcttccgcacacccccagctcgacccctcgtgtaacctctccctggccttgttcctttctcaataaatccccttgtccctggctcctgtgattcttccctgaaggtgccccacctcctgagtcccccgttctgtgtgggttgagaagctctctctgggaccttggcctgtcctctccctggtcagcgtgtcagggcagtgtgggtagcaggggtactaaccccaggttgaggtccttgctaaccctagtctctccccacaggctgccaccacggccccgcacccccaagccgccgacaccactgccgatccaaagccaagcgctcacgccaccaccagaaccctcgggctgaagcgccctgctatgtctcacacccctcacccgtgccaccctccaccccctggcccaccccaccagccactacccccttcccagcggttgtccagccctaccctctcccagtgttctctcctcgaggaggcccccagcctcttccccctgctcccacatctgtgcccccagctgctttccccgcccctttggtgaccccaatggtggccttggtgctccctaactatctgttcccaaccccatccagctatccttatggggcactccagacccctgctgaagggcctcccactcctgcctcgcactccccttctccatccttgcccgccctcgccccgagtcctcctcaccgcccggactctccactgttcaactcgagatgcagctctccactccagctcaatctgctgcagctggaggagctcccccgtgctgagggggctgctgttgcaggaggccctgggagcagtgccgggcccccacctcccagtgcggaggctgctgagccagaggccagactggtgagcactgacccctgcgtctgcctgccagcccccacccc

SEQ ID NO: 85137 - DNA, 1260 bp, Homo sapiens
acgcccgggtctctgtacaaagtgcgccttatacgctgccaccgctcacggctgcgcctgcgcagatttagcagccgtggttaagagtgtcgtcaaggaaaatccccagcttctgggtaaacaagttgccgcgtgagaccgccggcacgtgtaccctacagctccaagacctctcagcctatgagaaagcttggagagcgggactggcatttacgtcaccaatcttggcaggtcgggggttatttccccagccaataagaacctcagaagtgtcgagggcgtggcttccggtcaggcttccaatccccgcgttggggcggcccctctctcacgtgtatctctcccgcccccgttggcctgctgaccaatgagaagacgatggcggccggaggtgccaatggaggctgtgcgggggccggcggctgcacgcggcacggggcatgggtcggcgcccctaagccaataagcgtggggggcgtggcagcccggcccgtgggcgggtttggaggagccagtgtaatgctagaagtcctagaagaaatttggagtgtgcgtgcgcgccgagcggtgagtgctcggggatgggggagagatgcggggcgatcggtgtggacttttccggggtggtgtggtcggttaggaaggtgttagagtgtgtgtgtgtgggatcatgcaaatacgtgataactgcggtgggagctctgatggttgtggagaatagggaccgtgaactcaggtctagagggacggggtgggagttagtgacatcagatccctcgcccccgtggagtccctggacacttgactgcccggggggaagggctcggaagccctctgcgacctgagggagctccctctcaggtcgggactgaaggagcccctgctcccagggtgtttgggtggtctccttaaacacttgaaagaggcagaggttcggaggccggagggaggccctggtagggcaagtcggagggtaccaaagggttggcatgctgatatgagaaaggatggtgttttaatttgtgagacccagagctagtcacattacggctccgggcgtctttctcatgttaagcggaagggtttaggcctcagagtcgtccttgagaatagacgtggggtagcaactattgagtcctgagaggatagggttggggtttgggcagattggctgtgcacgtcttcctgagcccctagaggtggggaggcaccaacagggtgttttggtatctgtctgtacaaacaaccaggccaggcgtc

SEQ ID NO: 85138 - DNA, 1100 bp, Homo sapiens
tggtgtgaaagggtaggagagatgctggaggtgggggtgctgtgttttagaccccccatattatcccagtgtcccctgcccccctcttcccccaccccatgcccccaattctgtggcgcatccagattgtgaaaatgtacaataaatgtgtaatgagtaaccaggtgttgtctaagatcttttttatttttctattttttttttttggttgggggagaataagatcttttcttaaccaatgggaataatattggatcggaaggtataccaggaaggttgagaagatacattggtaatggactggactttgcaagaggccctgaccttgggcagggcaaagtgtgattctcaaagtggccacaggggggcactaggagttggtaatgggaagtgtcatagccagcccgtgtctctaagcccggtgcgccctgtggtctagggttcccagctttcgtttccctttactggggcatgttcctgctgttggactcctttctactcctcgatttaacttctagacgctctgccgtggctcccgtgcagcagtagatgaagtagttggccatttctgtgaagcatgtcttcccctctgtgcctaacccagtgccagcgcccagatggggttagtaaattgtggtttaaataggctcacagagacaaagctgagtatgttgtggagctgcctgtagatggcctactacccctgtactctgttgtatgacttgtgactttagaccccacactgaactgccacagcctgtaggtccaggaggccccgatgtggcatcttagtatccctgttcccaggtgcttcaacaatgagtggccggccgcggtggctcacgccagtaatcccagccctttgggaggccgaggtgggcggatcacgaggtcaggagttcaagaccagcctggccaacacagtgaaaccacatctctactaaaaatacacacaaaaaattagccggggatggtggcgggcacctgtaatcccagctactcgggaggctgaggcagagaattgcttgaacctgggaggtggaggttgcagtgagcccagatcaccccactgtgctccagcctgggtgacagaacgagac

SEQ ID NO: 85139 - DNA, 1774 bp, Homo sapiens
accaggggcttgagacatgaccaggaagccaaccaccccattatttgagagcttgcggtctcagaggctcagaggattagggtctgtggcttcaaggccataccatggagcggaagggacctcagaacctacctgtctagccccttgctttgtagatggaaaaactgagtccaagagagggtgtcagccagctggggagtggggaggattggagcagggccaggcctgacacactgctttcttgttctctctctttctctcccctctccctcttcctcatcttcttcccctctctccacagtttacttcagcacttaaatccccgaggagtctgccctgcctagagaagggcctctcccccaaccctcagccgttcctccacctctcagccatatctttcagcccccactcccctggatccgtgtgtgtgtgtgtccgtgtgtgtgtccccctgtaaatagccagctgttatttatacatatataatattatatatatttggtctgtttgtagttttattactagatgatttttccggttgtccttaacaccccttcctgaggttcccttcacccctctctcttgccttccttccctttccctttcttcctgactagccccaagtcccttcatttgcatctgctatgcaatagtccctctcctttccttcttcttccctcagatttagctgatccttcctcccaccctggccttcctttcctctttcctcctcactctccccgtcatgctccctctgccccgccctcaaaaaaaaaaaaaaaaaaaaaaaaacaacagcacctgtccaggcttccttaggtacatcttctttgtatccattgggaggctctgagactggccccacttggtcctaagaatcccaaggtctttgggagcgtccagcatgttaattagcgtatcattacatactgctatccctttccatttctttttgttccatcactcttctctcaacctgtgtttctttttttactgaggagttagtccccattagttcttgtatcacattttcatttgcacgacattactcgcaggtggtggggagcctgggcttttggggaaccaggctgctctggtccccagcattgcctcctcctagcccctctagtccagtttgcctcccttaccctcattttccaaacctcttgtaccctcctctccctcccccagctggtatgtaagtgtcttgaagttcagtatgttatgatggaccaataattctgccacttcgggtttctccctacattcctgctccccagttttcatgtggggtactcaactgacattcccatggggtttccctcccatctgcctgatccacctcctcctcccaccaggagagttgggggttggccacaattgatctcttgtgagaggggtggctaccagtgtgtgtgtgggggtcatcactgccttggggaggagtggggcagggcagagaatccccccaattcctgcctgaaatctctggcctcacccctgctgggggttggactgaaaaccctcctccccaatttggggggtgttgccccatcactgcccagctcctctgactgccccccctgaatttagggtgggggtactagtcactgccaatgtgtgtatgggacttgctggaaaacggggatgcttgcccctctccaggactattgagcccagagagagctgtcctctcattgggtgaactgattgaggaagggtctattgtctttttaaatggcacaattttaagggtttgagggtacagtccctt

SEQ ID NO: 85140 - DNA, 1041 bp, Homo sapiens
aggagactgcagcagacccaggcccaggtggatgaggtgagtgtggggggagtcaaaagcagtaggagggaccctgggggttggcgtataggtgtaggggcccatgttggtttgggagtgatgacagttcacgcctgtgggtttgcggacaaagataccatgccccatccctgtctccctgtcagcacgcacttggaagggcgctgggggtgttaatcagctttgctagcctggggtgtgccagcctgggcaggtgtgctctggtgatggacagagcgcctgaggttccatagagggagggtgttgctatgacatctgagatgtcaccagcatgcccctgatgtgtgctccttgcatgtccccaggtgtgctaggcatgttctgtgtgtccttggcatgttaacctggcagtatcagggtgcatgttccatgtgtggcacggtgggcacatgtttgaggattgccctcactgaggtgggccttggcacacccccctgcctcgtgggcccttctcccaggtggtggacatcatgagggtgaacgtggacaaggtcctggagcgagaccagaagctgtcggagctggacgaccgtgcagatgcactccaggcgggggcctcccagtttgaaacaagcgcagccaagctcaagcgcaaatactggtggaaaaacctcaaggtaagggtggggacaggaaggaggacaggtgggtgaatggggtatcatagtttgtcttactgatcctcgcctctcacccccagatgatgatcatcttgggagtgatttgcgccatcatcctcatcatcatcataggtgagtagggtgagaatggccggggccctttccctggagaggtttccccagtggattctaggttttgaaggtcattaatctagtttttactcttcagccaaaaacacatatagctgctaatggcaattctgattcatctagagccaaaaactttgatgttatttagcctgcattttgcctagttcttggcagtcttgttaacatttggaaataggaaagctggtgtatc

SEQ ID NO: 85141 - DNA, 1040 bp, Homo sapiens
gggcgacatggcaaaaccccgtctctacaaaacaatacaaaaaattagccaaacatagtggtgcacacctgtagttccagctgcttgggaggctgaggtgggaggttcacctgcacccaggaagtggaggctgcagtgagccatgatcacaccactgcactgcagcctgagtgccaggagtgagacctgtctcaaaaaaaaaaaaaaaaaaaaaaaaagactgacgaactctccatgcttttcttccctctgtctgcaacttacatgcattttcgacctagaccttcagaggtgagctcccccagtgagagattcatcaaatataactgttcacagatgaaagaagttgtcataggccaaaagtgaggaaaatccaggacctgcttttgcaaggttttccaaggtctctgaatagaaggaagtgaaagagtcagctacatgaacatctagggaaagagcattccagacagaggacatagcaagtgcaaagatggtgagaacaagccaagtgtgtttgttgaacagtaaggaaggcagcatttcagaaacctagtgatggaaggggaagaaaagttcagtgtgaggttcgttaggtaaacaggggccagatgaagccaggccttgcagctacagggagggacatggtcaggttggtgttctagatgatgactctagttgcaacatggataatggattttaagcaaattttatttttatttatattcttcttccattttttttctttcttttaagcagattttaaacagaaggctaataattatccagaagagacaggatgaggcttggacaaaggaggtggagggtatcaaaagatatttagaagataaaggaagtctggacttggtgctgtgggtgagtgggaaaaagggagggtcaggatggctgttagattatgggggctctgacagctggaggtctggggcattctgcttataataggccttctgggccaggcgcagtggctcacgcctgtaatcccagcactttgggagaccgaggcaggcagatcatgaggtcaa

SEQ ID NO: 85142 - DNA, 1032 bp, Homo sapiens
cccccgccttctgcccctgcgcggccctgcccagcgcctgcacccacacccacaccggccattcccccaatcgaccccgaggtgctgcgggatctggagcggttgagtcgggagctgggaggccgggtggaccgtctgcttcgcggtctgggtggcgcggtgcaggagctgacggcgctgagcgtgggttgcatccagacctaccgcgatgctgtggactccttaggtgaagccgtggacatgagcatcaagggcatgtacaccctgctggcgcgctgcgaggagctggagcgggctctgcagccggttcaggggctggcgcgccaagtccgggatatccgacgtactctggaggtgttggaggccctgtgcaagtgaccaggaggacaggagaggccggtcctggccagggcagggcccagcaggaccctaaggactcttcagggagtcctggtgggaagtgcccactgaggggaggcctgtgtgttggaggctcttccagatgcgttcagctggcccgtgcccactcgctgggccttaggctggtgtatgtggggaagttctaacggctctcctggtgggaagggatgttgctctgcttgtattcagttggccatctgtagctaccctgttcttcccaactctcctccctagctagagcaccagccctgggaacacggggctttaggtctgcttgaaggtgaggacgtgactcccacatgtaatcaggagaaagggacagaggaagccccagcccccactgtggctatcctgactccagtggccacatctcaggtgccaggggctgtgggagcttgtgccgtccttggccaaacaccccgcaggcaaagatgcacccctgctgatggagagccttctgcttctgccctctggccctctaccataccacttccccagccagaaccggcgtgcagctaggaggaatgggttgcacggcggagggggtgaggtgggaggcgtctcactgctctcagggttcaggtagaatgttgctggttttgaagctcacct

SEQ ID NO: 85143 - DNA, 2784 bp, Homo sapiens
cctggccagaaggtgatggagaatagcagtgggacacccgacatcttaacgtaagtgccccaagcctgggggtggacgggggtgaggggacaatgaacaggcaggaagtcggggagataaaacctaagcacgggaggagtagggatgaagacaagtggggcggaggacaggatgggatgaggaagcagagagaaagcaaacctcttaataaccaaaaccggttctgagttgccttcctccactttctaagcaggcggcacttcacaattgatgactttgagattgggcgtcctctgggcaaaggcaagtttggaaacgtgtacttggctcgggagaagaaaagccatttcatcgtggcgctcaaggtcctcttcaagtcccagatagagaaggagggcgtggagcatcagctgcgcagagagatcgaaatccaggcccacctgcagtatgggttgatgccccctgagccgaagcccctctgctccctcacccccagctcctcattcagccccacttcatccagattgctttctctgtagctatggctagtgagccccatttagctcttagtcctggcaagccttgaatccagaaatctgcctccagtttccccttaccactcccagccctggtgtccccggcctgggccacgtctgaccccagtttgctcctatcatcttttccagctcttttatgcctttggcctgaggcctcctctgtctcttcccccagccatcccaacatcctgcgtctctacaactatttttatgaccggaggaggatctacttgattctagagtatgccccccgcggggagctctacaaggagctgcagaagagctgcacatttgacgagcagcgaacagccacggtccgggcgggtgggcacctggggcgccagtagggggctcgaggctgagggtgtgctgcttgtagctggaggtccatccttgtctgattgcctgtcgttgcccctcccagatcatggaggagttggcagatgctctaatgtactgccatgggaagaaggtgattcacagagacataaagccagaaaatctgctcttagggctcaagggagagctgaagattgctgacttcggctggtctgtgcatgcgccctccctgaggtatggtggcctgggaggccagacctgggtgtgaggctgggccattaaaacctctccaggggccgtgcaccgtggctcacacctgtaatcccagcactttgggaggccgaggagggcggatcacctgaggtcaggagttcgagactagatttgccaacatgatgaaaccttgtctctactaaatatacaaaaattagccggccatggtggcggacgccagtaatcccagctactggggaggctgaggcaggagaattgtttgaacctgggaggcggaggttgcagtgagccgagattacgccattgcactccagcctgtgtgacagatcgagactctgtctcaaaaaaaaaaaaaaaaaatggttagagtgtggtgctaataaccccaaggtcgcaggtttgatccctgtaggggccaatggtaaaactttggccaggcgcggtggctcacgcctaccagtcccagcactttgggaggccaaggcgggtggatcacttgaggccaggagttcaagaccagcggaccagcctggccaacatgatgaaaccccatctttactaaaaacacaaaatttattaagcagacatggtggtgcacacttgtaatcccagctgttcgggaggctgagacatgagaatcacttgaacccgggaggcagaggttgcagtgagccaagatcgccccactgcactccagcctggactctctcaaaaaaagcccggagcagtggccttttttcctcccacatcactttttaatggtttcatagtatcacatagtagctgatttatttaaccagaacatgcctgatgggcattagagatgtccccagtgaactccaaatgaacactgccctcatatcagggtatcttattaagatatatccttcagtgtggagttgctgggctgtgtgcaggctcacctctggggctttgggatatatcatcaccccaaccccacccccactccagtggccttgcctggctggacctctcccctggtacatcccgtggtcttttggctcccagccgtcaggcagcagggaaaggagagttcctatgtcactaggacccctgcccacgccccttatccctcccaggaggaagacaatgtgtggcaccctggactacctgcccccagagatgattgaggggcgcatgcacaatgagaaggtggatctgtggtgcattggagtgctttgctatgagctgctggtggggaacccaccctttgagagtgcatcacacaacgagacctatcgccgcatcgtcaaggtgggagggcggcctgggcttcgtgccagctgctgaagccaggagctggggggctgggggtgggcagagtgtatttgcatggccctaagtaactccaaacagaatgggtagtcaaggaagatgtagccagggtgaaactaatgcagcccttccatctcttcacacctgcaggtggacctaaagttccccgcttccgtgcccatgggagcccaggacctcatctccaaactgctcaggcataacccctcggaacggctgcccctggcccaggtctcagcccacccttgggtccgggccaactctcggagggtgctgcctccctctgcccttcaatctgtcgcctgatggtccctgtcattcactcgggtgcgtgtgtttg

SEQ ID NO: 85144 - DNA, 1067 bp, Homo sapiens
agctactcgggtggctgaggcacgagaatcgcttgaacccgggaggcagaggttgcagcaagcccagatagcaccattatactccagcctgagcgacagagagagacctgtctcaaaaaaggaaaaaaaaaaagaaaagaaaaagcaagataattcactgggggaatttggggaaactttcctaaactggaagccaagcgtgagcccttctcattccgcctcttccattgggttcccatgacttacgtcacaggacatcgagccaatgggaactaggcatgggcgacgagcttgcccaatggggccggggcgggagatttgaaaagtccttggccagggcgcggcgtggcagattcagttgtttgcgggcggccgggagagtagcagtgccttggaccccaggtgagctggcctcctgtcgcaggccttgcgccgggagtgggcagatgatcaggtagatcagagggtccgttgggctggcctgcgcgcacgccgcagggctggaaggaggtagggacgatagcagggcgggggcggtgagaccagcgcccagattggggctagtgtgctgacctgctcccttttaccagctcgggctagcgcttccggctcgatcggtccaacccctccctctctctctctttttctctgcttctcacggctgtttcccttctccgcccagctctcctccccctttctctctaaggatggcccagaaggagaactcctacccctggccctacggccgacagacggtaaggcccttccctccgtccctgcgcccccatgaccccgcatggcgagttcctgctgggaaacttgagatcctgcaatgagcaatcctttaagcactttcttccccgttatgctccaaagtacgggtcccaagtttgacgacagaacccgctctggtcatttgtagccacatcctgtcaggtgctgccaacgtgaatctgaccagccagtgactcccagctggtgaggacctctgcagggctcgtcacatacaaatgatatctgggactgagcaggcagggcctggccttcaggccatgattcccaatcca

SEQ ID NO: 85145 - DNA, 2823 bp, Homo sapiens
atcagaaggtaaactgggactccagggacccaggacctgacctgcgccctgagcctctggctaggatcccagcactttgctctccatcctcccaggttcacctcattttctttggctcttcagtccgctggtttgagttcttgcacccgggacaggtgtaccgactcatagctcctggccccgctgtgagtgtcctacttcatcatacctttccccagaaagcttttttggggttggggtctaaagagggcatgccagtgcctggtcattctctaggcctcctggaagaaggctggatttagatacaccagaaagcctgtgtgtgttgacacacttccttctccatgctccagaaagaacaaaattgggtcagaatgttttgtgaacctcccactggactagcacacactcacaggcagtcgtcttcccatttccgtgcagacaccaatgttgtttgaaaaggatggttcatcctgcatatctcggcgtcctctggagttggctggctgtgcatcctgcctcactgtccaggacaactggactctggagcttgaaagctcccaggatatccaagatgtgctggatgcaaacaagtcattgcctgaatcctcactgaccgacctgctcagtgacaagtaaatgtccaccaagcccctctggttaatttggccactctctcttctcccaagctagctgggtttggtgaagacttcattttctgctgcaggaggtatttcttttgttattgttgtttttgtttgtttttttttgagacggagtctcactctgttgcctaagccagagtgcaatggcctgatctcagctcactgaaacctctacttccctggttcgaaggattatcctgcatcagcctcccaaatagctgggattataggggtgcacgccaccacacccagctagtttttttgtatttttagtagagacagggtttcgtcatgttggccaggctggtcttgagttcttgaccttaagtgagcctcccacctcagcctcccaaagtgctgggatttaggggcgtgagccaccttgtgcgggttttgaatgatctgccacaaccctctttttcccataggccctgttactcttagtgtgcagtgtggcagagctcaggttttttcaggactttatatatgaagttctagcagatactttagctccattttctgccttgaatctgactgtctccactctgtgctttcttgtgcctccattctcagtgtatttccctgaccttccagtttcacagattccttggtgtctttctccgctgagattttgtcacggacactatgtgaaccccttgtggcgtctctctggatgaaactgggtaatgacccttcctttgtggggaaggtatgaaatagagtgatgggactttgtggacttcacagatcctactaacacccaccttccttctatagggaacacgggggccatgagaaggtgtgtgaagctaacagtcgctcttgagactgctgaatgtgaattcccccctcacctggatgtatatatagaagacccacacttgcctccctcactaggactacttccaggagcccgggtccacttcagccagttggagaaaagggtttccaggtgaagatgtgtagtgtcacctgcctcctcttgctactgatgtggctctctggaatgtgcacccctgcttaactttgctgcagcgaccccttctctttcatacaggtttccatatatcagtctgccatttgtgcccagccagtaccctcacgaggtgttgcaggctggtcctcctcctagtcttcccctagctttggtagagccatggctaggatatgtccctcagggggagtggccactctgtggtgcttgatctctgagtcccagcttctaccccaatttgccttgtcttcctggtcactcactattcctcttccacttgcagatctcacaatgtttattgttgtttccggtcatccacttatgtgcaggtcctgagttttccccctgagaccaccatcaggtcagtgcccagaccccaacccctaaacttcctggcttcacatctgcatctcccacatgtccctggttctgaagattttgccatcattacagtcttctccaatcccaacaagatgtgttgagtcagaggagcttctctactccaaataaaaaatgctctgtgtctatcattgtacccagaatcatttagtgttctaggcttttgaaggcttttcagtcttaacatgcaaatatttcttggctaacatcatggtgttcaaacctgaaaaataaccaatgactatcagagatcaggaattaaaatggggcttctaggagcgcatggaacccactgctgtccccatcctgatgccctctaagtccttctagacccaccctgctttcagaacccctttgcctgttctgttatcttgacccctgtctctgtctccctgtatttatttagcattcccctgccccacatctacctggctgaacttctgcagggtggtcagtccccattccaggccactgcctcttgccatatcgtctctgtcttcagccttcagctcttctgggtgtgtgcttattgtaccagcatctgccggcaggtaagggagggaaggaacaggctgaactgagtatggagtgccagagggatgtgatgggaccaagaggacttttccaaccactgtcttcatcccagggaaagtgcactcgcctgggctccacttgccctacgcagacagctataagccaggccatcatcaggtgagagcacaaggcgtgcacccattgtgccatttacttatgagaccactttgt

SEQ ID NO: 85146 - DNA, 1086 bp, Homo sapiens
agcctacggggcctccctgtacgagcagctggtgtgggaacgtcagttaggacttcccctctacctgtgggctaccaaggccctggaggagctggcctgcaagtgaggaggctgagggcccagggcggggaggcagtgggagtagcacacttccttggcaaggagagcaggattcttgaagaggcaggctcttcaggggaagtgactgtgctgcttttcctggccaaggctgtgtccccatgtgctgagacaccaccagttcctgcaacattcctctcctgggagccccagcctgggactgcaactcctggctcctaccctggatcttctagctccgccaggcagccctgttcggaatgcacacaatgagatccttgaagagccacatcactgtcccctccagaaagtatgaggatgtgggggaaggatggtggcagaacactggaggacacctggggcccatgggacacacacccgatttctcttccctccttgacagtacactcggctgcagactccctcctccttccccactctggccaccctgaaagaagaaggacagcgtaaggcctgggcctcctttgaccctaaggcccttctgcccctcccggaggcctcctacctgcccagctgccaactcaatcgccgcctggcttggtcctggctctgtctgctgccctctgccttctgcccagcccaggtaagggggaccctagcagggctcaggtgatttccctttttgtcatccttattgccacgactctagtctcggttactatctttcttcgtcattttgactacactagccttctaagcagaccacttcatctgttgttggccctccaattcattctctctgcagcaactagaaatggggatatgccaggcacagtggctcatgcctgtaatcccaacactttgggaggctaaggcatgaggatcactggagcccaagagtttgagaccagcctgggtagagagaccttgttgctacaaaaaagttgtcttaattaggtgcggtggcatgtgcctatggtcccagctactcaggaggctgaggtaggattgcttgagcctgagagatca

SEQ ID NO: 85147 - DNA, 1040 bp, Homo sapiens
tacttcccttgacatcagtcacaatactggatacatatatactcaatacactttgattacatgaatgaatgttgtttgtgtgttatggggcgggatagggcacagttttctcagtggaatatttatgtattttgaaggaagttttagggatggtttgtatgttggggaagtggtttggaaatatttggcatctcctgtgagagaggagagacgctaagatttagttggcagacatagggaagatggagaggtgagttgagactcacagagggcaggtctctgagttcaaatcgtgagggaaaaggactctggcagagtggcagtgttggggtctcttgtgtcacattgcctgtctctgcacaagccaggtccctgcccagctggtgtggcacagagcccttcggcctggtacagcctatgtgctgacagaactgcgagtgtccaagatccgtggtcagcgccagcatgtttggatgaccagtcagtcctcccgtctgttgctgctgaaaccagaatgtgtgcaggagctggaactggagctggaaggacccctcttagaggctgaccccaagccactccccatgcccagcaactcggaggacaagaaggatccagaaagtcttgtccggtattctagactcctatcctattcggtgagcacagggagagatcctagagcttgaggggccagaaatgtgggttttcaaagaggaagaaaatagtggtcaactggacctcggcctgtttgcagggagcagtcactggcgtgttgaatgagcccgctggcctctatgagctggatgggcagctggggctctgccttgcctaccagcagttccgtggccttaggcgggtgatgcgacctggagtgtgtctgcaggtatgtgagatcagggctgataacaaaaagagacctctgcagcttctcttaccttcataggctccttttctgcagcagggtggttatatagaaatatagaaattaaaagtgtgtgttagggggcacttttgctaaggataacttggacagaagcttaaat

SEQ ID NO: 85148 - DNA, 1359 bp, Homo sapiens
atccttattttctttttcctttttttttttttttttttttgagacagtctcactctgttgcccaagctggagtgcagtggcgtgatctcagctcactgcaacctccatctcctgggttcaagcaattcttctgcctcagcatcccaagaaactgggattacagctgcacaccaccatgctcggctaattttttgtatttttagtagagatggggtttcaccatgttggccgggctggtctcaaactcctgacctcaggtgatccacccgccttggcctcccaaagtgctgggattacaggtgtgagccactcgcccggccccatccttattttcttaggcctttagccccaggttttacccctttaatcaatcaaactcacctcttagtccatgttccctgcaacctttccctgggctcttgagggtttatcagggttgagggttgccttagtaggcttggacctggctttgcaggacctctgttcccttcactctacagcttcgtctcagtacaggacctcaagactcaccagcgtctcccatgctgcagccacctgtcgtggagcagtagtgcataccaggcctgggcccaagaggctggaccaaatgggaaccccctgccccgagagcagctgttacttttagggacactaacagacctatcggcagacttggaacaagagtgcaggaacggaagcctctatgtgagagataacactggcgtcctgagctgtgaggtaagtggaaggtggagatcagatgcctcagatcctgacaagaatggtgtccaaggatcaaggcaattaagtctctgaggaaacaaacggggaggtgggtggataggatgctaaggttctgattaacccttgctcttggtctttcttagctcatagacctggacctttcttggttgggccatctttttctgttcccccgttggagttacctccctcctgccaggtggaattcctcaggggaagggcacttggagctgtgggatgcccctgtgccagtgtttcctttgaccatcagtcctggccccgtcacgcctatccctgtcctctacccagagagtgcttcctgcctgctcaggctcaggtaatttccccctctaggcatggcaggggcgctgtaaaactgaaggatgatgctgggtcagtggagggagagaaagaaaagggcattgatagtaatatagactgaatgttccaaatcaagggaatggtgggctttgaatattaagaaggtaaagagaagggttgttcaagggatctgtgccttacctaagggaaagagaattttgaaggtttttagcatagcttgctttgggctatggacattttgtatcattaccaggt

SEQ ID NO: 85149 - DNA, 1028 bp, Homo sapiens
agtttccctcttgttgcccaggctggagtgcaatggctcgatcttggctcaccacaacctccgcctcctgggttcaagcaattctcctgcctcagcctcccaagtagctggaattataggtgtgcaccaccacccccagctaattttgtgtttttagtagagacagggtttcaccatgttggtcaggctggtctcgaactcccaacctcaagtgatccgcctgcctcagcctcccaaagtgttgggattacaggcgtgagccaccgcacccggcccggatatttttttctagtcctttattcttcccaagtttccttggtgggccggatagtcaagatgttttaactaaattcactttcctcaggaacaagcctggcttgaggatgctcaggtcttcatccaaaagaccctgtgtccagctgtcaaggagcctaatgtccagttgactccattggtaattgattgtgtgaagactgtctggttgtcccagggaaggaaccaaggttctacactgcccctcagctataggtaaggagaggtggcggttgcgggggctgggcaggggcaggtattgaattcaggattgaaaagtaaggttctataattagaaaaagggcaagtgagagagtgagcggaggacaaggtagtctaaacataccccttctgcagagcttttctaacactatcaagctttccttttcctaaagttctcctgaattggcttaagattaaagaaaaagagaggaagaggggaagagagaaagaaaatttggaaaaagaactctcgaagtggggaaagaggctggtgttatctttattttgtgtattgggaaacaaagatacagagaactgtttgacattaccaagtgcagatcattgtgtttaagatgtgagttttagggcttccgagagtgtgtttatatatatatgtgtatatatatatatatatatatatatatttttttttttttttttttttctctctacactatcatttccaaaagtgttctaggcaacgttagtaaagc

SEQ ID NO: 85150 - DNA, 2194 bp, Homo sapiens
tcagttcaacagataggccatagttaatgttatttttattttatttatttattgagacggagttttgctcttgttgcccaggctggagtgcaatggcgcgatctcggctcactgcaacctctgcctcccgggttcaagcagttctcctgcctcagcctccctagtaactgtgattacaggcgcccgccaccacacccagctaattttatatttttagtagagacagggtttcactatgttggccgggctgatctccaactcctgacctcaggcaatccacctgcctcagtctcccaaagtgctggggttacagatgtgagccaccacgcccggcttagttaatgttattttttaggaacctaattcatctctccagcaaaggacacatctctccagcaaaggacacctctctccagcaaaggacacctgcagagatgtccccagtccttcacttctatgttcgtccctctggccatgagggggcagcccctggacacactcggaggaaactgcaagggaaactgccagagctgcagggcgtcgagactgaactgtgctacaacgtgaactggacaggttgggcccaggtattagattcttgggggacatgcctcggtgctgggggcagtgtctcaaggtgtccttgccctgtctccctgcagctgaggccctccccagtgctgaggagacaaagaagctgatgtggctgtttggttgccccttactgctggatgatgttgctcgggagtcctggctccttcctggctccaatgacctgctgctggaggtcgggcccaggtaagtatctcatcctgcccacccctttcttctgctttcctttgcttcctcttgtgatccttgggagatttgcttttcctttgctctttgctacttcctgcctaggaaaccacacatgtgctttccccatttgggtagatccctccaaagacctagcctgctccaaaacatgttctcaaagcaaaataaattagattccaagttaaaatcaaacagttttggccaggcgcggtggctcacgcctgtaatcccagcactttgggaggccgaggtggggcagatcacgagatcaggagattgagaccatcctggctaacacggtgaagcctcgtctctactaaaaatacaaaaaattagccgggtgtggtggcgggcgcctgtagtcccagctactaggcaggctgaggcaggagaatggtgtgaacccgggaggcagaggttgcagtgaaccgagatcacgccactgcactctagcctgggcaacagagcaagactctgcctcacagaaagaaaaaaaaatcaaatagttttgatgctagaggacagttttggtttggtttgagtgtactttaaaagcaggtttcttgttgcccagcctgaggctgaaagccaatggtgaggggatagcggtgggaggttgtccagacagcagtaggcaggatccaccctcccagctgaggcctgccgggggttctccagtcctaaccatcaggcccattgttcaggctgaacttctccaccccaacatccaccaacatcgtgtcagtgtgccgcgccactgggctggggcctgtggatcgtgtggagaccacccggcgctaccggctctcggtgaggtgatggggaatcaggaggaggagatgagccagagatacaagattagatcctaagctctagagagaagcagggacaggtgctcctggctttaggcctgctctgtatggtcgtacaagttgttcactgcctgaaagtacctggttgaggggtaaatggggcagaaatccagcctatgcttcctttaatttgtgcatcctggcatggattcatacctggaaagggcgtctttttgtaatctgagaaaaagtgccatatggtgtggcagtgggctagccttgcatgactaagagggtaggaaggtggaccatttctctccattcttaaactcttcaccccttgccctctgtgtgtctgcacccctagtttgcccaccccccgtcagctgaggtggaagccattgctctggctaccctgcacgaccggatgacagagcagcacttcccccatcccatccagagtttctcccctgagagcatgccggaacccctcaatggccctatcaatatactgggtgagggccggcttgcgctggagaaggccaaccaggagcttggtgagt

SEQ ID NO: 85151 - DNA, 3095 bp, Homo sapiens
aggcaggaatatcgcttgaacccaggagacggaggttgcagtgagctgagatcacaccactgtacttcagcctggacaacagagcgagactccatctcaaaaaaaaaaaagctggtcaggcttctccctaacatcagcttcctctgtgttcacgctgccttgctttcgaggcctcttctcgtggcttccccagtgttctgattctgccttcccttcttacaggcatggaagttgtaaaggttggaggtcccgtctacaggattggagttggaggtggagctgcttcatctgtgcaggtgagtgggaattgctaaaggtgcagaatccttgatataaccgggccccaggcataggggagcgtataggagcttccagtctcgctgagctgagctatgccatatatgcccccaggtgcagggagataacaccagtgacctggactttggggctgtgcagcgaggagacccggagatggaacagaagatgaaccgtgtgatcagggcttgtgtggaggcccccaagggaaaccccatctgcagccttcatgatcagggcgctggtggcaatggtgaggaaaggagttggaacaagagactgggcctgcctggtatcctgccaggtttcgtttagggagaggtatcaggaatctccaaccaaccacccagctctgggtcccattctccatgctctgtacattctagacaggttcagggttggaagggtggaagcctgctgccgtgggatgattggtggtaagggtgcggcagcagttgacacaggaacacaccaaattacaggcccctttggaggccagggactgccctttgttgcctgaccaccactaggtcactgcttctccttgcaaccctctcaccaggcaatgtcctaaaagagctgagtgacccagctggagccatcatttacaccagccgcttccaggtgggtctcgtcccctgaagtgtgacattttcccacccctgccagccccagcccgcttccacccatctctcttgcaacaacatgagacgtgggagtgcccactggcccttctctttcctccccgccgtggctgtgcagcttggggacccaaccctgaatgccctggaaatctggggggctgagtaccaggaatcaaatgctcttctgctgaggtcccccaaccgggacttcctgactcatgtcagtgcccgtgaacgttgcccggcttgcttcgtgggcaccatcactggagaccggagagtgagttggcccagggagttgggagcaaacactggggcagacatgagccacctgggtatgggctagagggagagctgtcaagggagagagacgagaggaagatgggaggtagtggcaaacaagctgtggggaatgttggatccaaggaggggcagggactcaatatggaaaccaaacaaggagtggaaagcacatttgtgccctgatttctaggaacattccttgctggtgttcatagtctcatcccctctgggtggggtccctgtggtctatagatagtgctggtggacgatcgggagtgtcctgtcagaagaaatggccagggggatgcccccccgacacccctgccaacccctgtggacctggagctcgaatgggtgctgggcaagatgcctcggaaggtatgtggggttgaggggatgggtttttcctgtggtcctctccacaccaccctttaccctacgtgcactttgtcgcctgtgtgcccagcccgccccaggtgttcacactgcctgtcgctgtctgtgttgcaggagttcttcctgcagaggaagccccccatgctgcagcctctggccttgcccccagggctgagcgtgcaccaggctctggagagggttctgaggctgcccgccgtggccagcaagcgctacctcaccaataaggtcctccctgcacccttcctctgccccctgcctccttcctccgctcagcctcttctgccctcccacccttagaaagtgctgtgggggtttttgcctggccctgcaggaagcagcaggggcagggcagccaccctgatggcctggtctccctgctacccaccttctaagtagagctgttgtctgcattgggggaaagacaggcctcccactgccctgagtgccttgggggcatgtgcgggagctcaggctgtccctgtcccttgctctcttgctaaccccacctggttccacaggtggaccgctctgtgggaggcctggtggcccagcagcagtgcgtggggcccctgcaaactcctctggcagatgtagcggttgtggcactgagccatgaggagctcataggggctgccacagccttgggagaacagccagtcaagagcctgctggacccaaaagtcgccgcccggctggccgtggccgaagccctcaccaacctggtgtttgctctggtcactgacctccgggtgagttctcccacagcttctatcctggagcccccgggcttcaggacccttccacatccatctgtagcccttcatttcatgttgcaacctcccagtccgcctgcacccctggcctctccacatttctcttcccctctaatgctgtgcctctgccacccccaggatgtgaagtgtagcgggaactggatgtgggcagccaagctcccaggggagggcgcagctttggcggatgcctgtgaggctatggtggcagtgatggcagccctgggtgtggcagtggatggtggcaaggactccctcagcatggctgctcgggttggcactgagaccgtgcgggctcctggtgaggtgtgggagccccagggaggggaggaggaactatggagctgggttggcaactcattcctttggactcctccttgctctacagggtcactggtcatctcagcctatgccgtctgcccagacatcacagccactgtgaccccagacctcaagcatcctgaagggagaggtatggacatggccccatcctttgtgatctttgcttgtgtgatctttgtttggctcctgctttgtgagtgctgggcccccatctcaacactgggctgtggtgttttctgggactgattgtctaggtgtctcaccacatgctgggaatagcagt

SEQ ID NO: 85152 - DNA, 2192 bp, Homo sapiens
ttggtgcgggccttcagcatcactcaggggctgctgaaaggtgagtgaagacccctggggagatagcgcacagggtgccaggcgtgcagcaggcgttcaccatctgagcagtggggcaaaagggactccaatggacgatgtaccccagatcccctgacattctgacacacactcttgatggactgactccggaaggtggggtggggctgtcaggtttgggtcccgaggttgctgagctttcttctccttcctccagaccgcctcctctgctcaggccacgatgtcagtgacggaggcctcgtcacatgcctgctggagatggcctttgctggaaattgcgggctacaggtggatgtgcctgtccccagggttgatggtaaggaacctggggtctagtctcaggcccgggctgccttctctaccctgcagaccccatttccaatatattaaagagtggagtgccctccagtcccctttccctgagtcttccctgactagcttttctgtgctgtctctctgacagctgaactggatggaactggctgacacccaccatgttcctgactgcacccctctgagacttcccatccctgagatgtccatgatgaaacatcctcagtcctgccgtcctagccctcatcctccctgatccctaccctactctctggctgcatccctctgaccctcaccctggcccttcctgcatttccctgatcccgccccaactcccttggcccttcttgcatccccctgactccccacattgctctcccagtcctgtctgtgctgttcgctgaggagccaggcctcgtgctggaggtgcaggagccagacctggcccaggtgctgaagcgttaccgggatgctggcctccattgcctggagctgggccacacaggcgaggccgggccccacgccatggtgaggaagtgagggagagagcggtgtgcagtgggcagtcagagtggggtggccgcggtccatccctctcccactgtggagggggccatcctttctcctagcccgtgggagatttgttcctcttcctaggtccgggtgtcagtgaacggggctgtggttctggaggagcctgttggggagctgcgagccctctgggaggagacgagtttccagctggaccggctacaggcagagcctcgctgtgtggcagaggaggaacggggcctgagggagcggatggggcccagctattgcctgccccccacctttcccaaagcctccgtgccccgtgagcctggtgagggagtgtgtgcagaggctccgcgtcctgggggcactgagcctggatgcctgggcctgccctcagaaaggtgtctggggagttggggtggggaagtgactttctggcccaaagacacttattctcccccaaggtggtcccagcccccgagtcgccatcttgcgagaggagggcagtaatggagaccgggagatggccgatgccttccacttagctgggtttgaggtgagcagggtagggggcagctgggggtgattgtccagcctcagctgcgtgtcctcccacccacactccccctccccaccttcgcaggtatgggacgtgaccatgcaggacctctgctctggggcaattgggctggacactttccgtggcgtggccttcgtgggcggcttcagctatgcagatgtcctgggctctgccaaaggtcagtgtgcaggcttctgcccactcccttcccccacattcctgaagaggtgcctttagccccatcttcctgggctggggattggcctctcactccaccgagctacgagagagtgggcccattcgttctgggccacatgccaacagaaggctggtagtaaatttttaattttttcattgaaaaaaagtatatatatacacatatgtaattaaaatatatattattaaatatatattatttatatatattatttatatattattaaaatgtatattatttatatattattaaaatatatattatttatatatattatttatatattattaaaatatattatttatatatattatttatatattattaaaatatgtatatttttaaatatatatatatatatatatgtattttttgagacggagtttcacccttgttgcccaggctggagtgcaatggcgcaatcttggctcaccgcaacctccacctcctgggttcaagcgattt

SEQ ID NO: 85153 - DNA, 1609 bp, Homo sapiens
cagttatgccccttcattcccaattcccttttttgaggtcctccatgtctcaccctgacttccctattccctgctagggtgggcagctgctgtgacctttcatcccagggctggggctgagctgaggcgcttccggaagcggccagacaccttcagcctgggcgtgtgtaatggctgtcaactgctggctctgctcggctgggtgggaggcgaccccaatgaggatgctgcagagatgggccctgactcccagccagcccggccaggccttctgctacgccacaacctgtctgggcgctacgagtctcgctgggccagcgtgcgtgtggggcctgggccagccctgatgctgcgagggatggagggcgccgtgctgcccgtgtggagtgcgcacggggaaggtcaggcccaaggaaggctgggggagggcccgagggttgggggcaagggtgggcatgaaggaccttggctctcacttccctcctccttccatcccaggttacgtagcattttcttctccggaactccaagctcagattgaggccaggggcttggctccactgcactgggctgatgatgacgggaaccccacagagcagtaccctctgaatcccaatgggtccccagggggcgtggctggcatctgctcctgtgatggccgccacctggctgtcatgcctcaccctgagcgggccgttaggccttggcagtgggcatggcgaccccctccatttgatactctgaccacctccccctggctccagctctttatcaatgcccgaaactggaccctggaagggagctgctgactggccacaggggctcacctgggccccatggcttttcacctaagtgggtcctgccccctcccccatgaccttcaggagcaccccatattatttccaaaaatatcttggacagacaaggaccaaaatgccaaaatctcagcggactcgataatctgcctgctgatgttccttctgtggctgtgtctattttcagttctgctctaacatggcatgccctttctcagcccaggaaacagcatgtggttcagagaaaagagcgacaaggaaaagttaggactcctgaggtccgaacaggggcttctgttgcccacttcacaacacccagtgatcaccggtgtgcaattgcctccttggctctgagggatgttttgcgctcccttttctcatcattggggttagcgggtgcagacaaattcagcaatagtatgcagatcagcccctcaccacctcattgttctcatctggaactgaaactttctggatttctcttgaagtgctacactgcactgaatgtaaggaattgttgcttgtggaagtttctcagcgtttctggctgtcttagggctggcctcagaacccagcattcctgttatttgcttctaaattagcagctctctttttttttttttttttgaggcagtctcactctgtcacccaggctggagtacaatggcgtgatctcggcccactgcaacctctgcctcctgggttcaagcaattttcctgcctcagcctcccgagtagctgggagtacaggcacacaccaccacacccagctaatttttgtatttttagtagag

SEQ ID NO: 85154 - DNA, 1352 bp, Homo sapiens
cagcaaacttattctactctctttacccagaaataggtcagactcaactacatccatatctgatttcttcctttgtttttttttttttttgtatgtttagtagagacagggtttgaccatgttggccaggctggtctagaactcctgatctcaggtgatccacccacctgggcctcccaaagtgctgggattacaggtgtgagccacggcgcctggccccccaacagcattttagagatgaggaaatgagactcagagaggagtctgatggctatagtaagaaatgaggagtcaagctccttagtgtgcgctacaaaaaccctgcacacctgactgtgtttgcagctccctgccacccattcccatcctaccctcccttgccaaacagatacacttgctttctccaaaatatgccctctcatctccaagtttttgctcctgatgttcccccagctagaatacccctaggatgtcctactgaattctgagtcaaactttaagactcaaagtatgggccaggcatggtggcgcatgcctataatcccatcactttgggaggccaaggcaggaggatcacttgagaccagaagtccgagaccagcctgggcaacacagtgagactccatccctaaaataaaacacacacacacacacaaaaattaccggagcatggtggtgcatgcctgtagtcccagctactcaggaggctgaggcaggaggatggcttgagcccacaaggttgaggctgcagtgagctacgactgcaccactacagtctagtcttggcaacagtgagaccgcctctcaaaaaaaaaaacaaaaaaagactcaaagtgtgctccactgttccttcagtgaggcatcgggggctgtgtcctaaatgtctttgtatctccagcccttcacattagggcctggcaaggtaagagaccaataaatatgtaccctttggcttcatttcactaagtcattagggtccagaggtatggtcagcacttggaaccctgtggaatggcctcaagatcagagtcctcttgcccaattcttggctgggaagtaggtgacatctagaatccatgagggtatgggtgatctcctgggttccagacatttgcattgagtttattcaatcacttaacaatatatattaggtctgggctgggcacgctggctcacgcctgtaataatcccagcactttgggaggccaaggcaggcggatcatctgaggtcggaagttcgagactcacctgaccaacatggagaaactccatctctactaaaaatacaaaattagctgggtgtggtggtgcatgcctgtaatccagctacttgggaggttggggcaggagaa

SEQ ID NO: 85155 - DNA, 1089 bp, Homo sapiens
ctctcttcccccaggttggctgaaggggcttcctggggccttccctgcccagctggtgtgtgaagtcacaggggaacacgaaaggaggaggcaccttcgccagaaccagaggcttctcgaggctgttggatcttcttcaggcacccccaatgcccccccaccctaatgcaggctgaggagggggcacatgttgggagacacctaccagtgtggcacggagagaacaaagcccattcatccattggattcactgtcagtggagatactacctctcgtggcaaccatagagatcgagcttcaggacagagcagccaatgaaaacggccgcctgaacccacagcaataagaatgaatgaggatgccttgaatgtgtggccaatggagacagaggcttagtgcagagcagccaatgggtactgagctggctgagcctatggccaatgagtattcctgctatgctcagggccaaggaagacaaatctaggtcatggcagttgaaaaagggcctcattggagataaagtcgtaggataaaattgggaacaggaatgagcaggaagccaatcagccaaagaaaatggtgatctggacccaagagaccagtagtcaccctgcttgtttctgcagcaatgactggtcctgtcttttgagtctgggaaatactagtttccattcctggatgcttcctgtgccctctcaagccagttcttctcttccagaagaattcagagtatgtgtctcagaaaatctgtgtgtgtacatgtgcatgtgtagatatgtgtgtatatgtatcaggaaaggcattctgctgactgtggtgtgtgtgtggtgattgtgctcctgacccacaaatgactgagtgctccatttcttcctttaccccccatttttcctattattcgctccaagaaagatgctaagtctgagctccagaagagactgtgctgggtgtggcttggcacccaggggatgagagccctgagctttgggtctcttggaggctagggttctgtggcagttgcagggcaatgttatggagcagccaacggcctggcagaggagcccaagggactgaagatggccagtagct

SEQ ID NO: 85156 - DNA, 1172 bp, Homo sapiens
gtatttttagtagagaaggggtttcaccgtgttggccagactggtctcaaactcctgacctcaggtgatccgcctgcctctgcctcccaaagtgctgggattgggggcatgaaccaccgcacccagcctgaagttactttggaaacaaatatatttgtatatgacagcttgtaaaactgtagtgagaagagcagaatcatatatttctcagtgaaaaagaaacaaatcttataatgaagcacagaagaggctttaagaattactgataccatcttgccttttctcctttgttggtaggaaattagtaaataagccaggtttgatggctaaagagtgatttctggagttttttaaaagttaaaatcttttcttattaggcatccacctaccccaggtttgggaaatggtattgaatgttgggctttcccttgtgttttagtgattatttaaagcttgggagtgtttttttcttatttttctgcaggtggttatcactaggctaaaactggacaaagaccgcaaaaagatcctcgaacggaaagccaaatctcgccaagtaggaaaggaaaagggcaaatacaaggaagaaaccattgagaagatgcaggaataaagtaatcttatatacaagctttgattaaaacttgaaacaaagagcctgtgttttgtgtgtggtgatttaggacactccctagttttcagtggatcagtctcttacctctgatttgttggtctaaaatttttctgaaatcaggactgatgagattttttttatagtgggcagcagcatttgaggatatatcagaagctggaggggtgtcattgagaagaagaaggcctacaagaaaagctagttggaaacacttcctcttgaacctgtcttttaacttgcttactatggataggttgctatatggacaggctatattttttaccttactgcgtaaaagtttgtattgccattggataggaagtcttgctttcaataggataagaagcttctgtgactttatagcttctagatgacttcttcaagctgttcctccagattgagaggtctcgggttcaggttatctgatagacccatgggccccctttaccttgttttctgcacaagtgctggatgagtgccatcaaaccaaaacctaacacgtctttgagttaaaatataa

SEQ ID NO: 85157 - DNA, 1831 bp, Homo sapiens
agctcgttaaagtaccggcacgctggccgcgcccacgccacgggcgggaggggacggtgagtgcagggacccaggcgaccggccggccggcgtccccgcgcctcctggcggccagaagcagggcctgcgcttccccggctaaggggtgccggcccccgccccggcacctgggagtgaaggtaccagcgggtctcctgggcggtctcctggggccgctcgttccttcatcacccccaggggcagttggaccctgagcagccttagccaatagccccgggactacccttcccagaggattcagcggcagcacccgggtctcggaagggagacactaggacctggaggaggggagttttgcaatccctcgcagttcccctcctagccactaggtgacactagccataaatttatttcccagtttactcccctcgctcaaactccgcgcccctctcgctccgagagacataggtctcgcgagatctttggtaaacttacagaaccggaagcagcgtgtagttctcttcccttttgcggccatcaccgaagcgggagcgggtaaggattcggcgggcaagcgggtgtaatcagcagccatccgttcttgggcatggtggcttccgaccgcggggaccccgagagtctcttgtcggccgagtagcagccaggaaggagagactgggatggttttttatctgttgctttcttaaatcaagggccgccgggccggagatggatggagggaccggggatttgggaactcgaaaacgagctgagggaagggagcctgtggaaatagactggagtctgggtagtgtcgtttcctagagaatggtctcgaagtaacttctcggtaaagtcttcacggaatttccagaccacacttgcccactgggaggcttttaggacccgagacgtgtgcaggcttttccaggttcgggttggtgggccttattcattttggcggggctatacgtattcactcttaagcctgtagaagatgaacgttgattgtaccttctaaaacgtgaggttatagttaagagaattgcgttgtcggtctgctcagcagagatgtaagtccagtcttgatttcctcaggcactacttgaggagttgggagagtgtaactaaaaggtcttataactaggacaagtgtttttgatgcaaaagtctttagtccgtaaacatatacagaaaacacccgaataaaacaaaaaataaaaagtttcgagcttcggttgataggcccttccgatcaaacagtttttgttgaagttgcacaacatgacactgcctatgatcattctagactatcaagataaaatcattgcggttatttgtttggaagctggatgagattttggtcatttaagagtctttttaactttttatttagccaaaatgaagtttaatccctttgtgacttccgaccgaagcaagaatcgcaaaaggcatttcaatgcaccttcccacattcgaaggaagattatgtcttcccctctttccaaagagctgagacagaagtacaacgtgcgatccatgcccatccgaaaggatgatgaagttcaggtgtgtatccctacttgttctcgttgtcttgatggatattttacgcacttagcttagaagagagattgcattcctgagaaagatgcttctgagactcttgctcccaaagagtggcaagatgagttgagccagggaccaaaaaacagtaagtaagctgcttttcagtttttaattgtattatttggtgaaaatcttttttttttttttttttgagatgaagtctcgctcttgtcccccccaggctggagtgcagtggtgccat

SEQ ID NO: 85158 - DNA, 1033 bp, Homo sapiens
ggagcgcctgcgcaagaggacgcctgcgcaagaggacgccgtcagcttggcgtcagcgcgccgggctctggcccgccccctgtgacaccagccccgccccaccccgccccgcatacccgtgcgctgccgcgcatgctccgagccccgcccccgtgcgtcacagaatggcctcggacacccaggcagtccctgacgtgtcggggaggagccgggcgcggaggtacgctgagtggagctcggggctgcgtaggggagctgagccgagcggctgggcgggcctggccgggccggcggaggggagacgtcggttgagcggcggcgaacatgcgcttttgacacattggaggtgagcctgcagcgcggggccgctccctaaggggctgcgctgggccggcggcgccgaggcctgcccttggggagccttcccggcccggggccgtgtctgaggctccgccggggcgggccgggccgggttccggggcggccagcctgggggcaactgttccaaccgctctaactgtcccctcccttccctggtccgatgtgtggccccccaggggcgcctgcaagggaacgattccggtggcctccggaagatgtgccccgttccgggtagggtgagggctggcggtgacggaggccgggacgtggcaccgtgggctggggcgctggcggcgcaaggagtggcccagtcggaggtggcagcggcgcgcccagcccgcctcctcctaccccctcttcgaaattccttcatttgcgagggtggcttggagcggggttgcattttgatctctcagtgcctctctcccatggggggcgagagcgcgagcagcccacgttgggctcggattggcattctcctgactcccgcccggaactgctaatcatcctccccctggagttcggcaaagtgtcaccaacgggctcgggttacttgtgctcgactcttttcttgctgtaagccatgagatgaccctttaagttttgcaaaggaggtgagagttctgtcaccactgattattaccttctattt

SEQ ID NO: 85159 - DNA, 1040 bp, Homo sapiens
ggcctcccaaagtgctgggattacaggtgtgagccactgtgcccggcctttttttttttcttttatttgagatggaatctcacccttttgcccaggctggagtgcagtggccaatctcggctcactgcaacctcctcctcccgggtttgagcgattctcctgcctcagcctcctgagtagctgggattacaggtgccggccaccatacccagctaatttttttttttttttttcatattttcggtatagacgaggtttcaccatgttggccaggctggtcttgaactcctaacctcaagtgatccgcctgcctcagcctcccaaagtgctaggattataggcatgagccaccgcgcctggcctgctttgttcgcctgctttgttcttaatgtggctcataaaggctattccaaaaaagaagttttggaaatgtttttcagcaatggtgatatcactggaatatgcatatattcctgaaatgatcagttttaaagaatcatttgcatgttttaaattttgaagcctgtttactttgtggtcatacttgaaaggtctgctatcgaactaccaatttttaatagcttgatgaacatttaggtttttactatgtgccaggttctgtcctaagtactttacaaatattagctcacttcataagctcattctaatgattatccccattttacaggtgaggaaatggggcactgagtcattaagtcacttgcccaaggtcacccaagtagtgagtagatgcatcagtagcgagtctgaacttccaggtctgacttcagacttgggcagtttggcttcccggtctgggctcttaaccactatgctatgctgctcctatgacttattcttggttaaatgttttaaattgttttgatctggaagagatgatggtccttttagtaaatgatatccaacataggttataatactgttagaggggccaataagcgggttatgaaaatagcctattgattagaaaagttgtggtcaacattcaattcacatgagattcagcaagaaaataaaga

SEQ ID NO: 85160 - DNA, 1048 bp, Homo sapiens
cctttaccatctactgtagccacatgcttgagggtatttagtgtctggggagtgggtgggttctgggaaggttggatgggcaggtgaaaggtagggaatgtgaactctgtgcttaccctgggccgcatttagcctgaaaatccagaggtttccttaacaagtttgcggattttgaggcaaggattttttatattagttcttttcagagagattgttattgggtttctttctgagaggagaatggttgacaaaatttaacatgagtttaggcacttagaatgaatgtgtcatttagttgtttttaaagtaattgttacaagagtgtgggtaaattccttgggttcccccccacccttttaacttgagttacctctttagtaaagagaactgtatattaatgacatgtactttcctatactgatgccctcaggagaagctagagcatcaatatgcacagagctataagcaggtctcagtgttagaagatgatttaagtcagactcgggccattaaggagcagttgcataagtatgtgagagagctggagcaggccaacgacgacctggagcgagccaaaaggtaaacgaatgactgcattttgttagaaaaaaaccaccttggtaattagtgattaaaatctttattaggctcttcccctagatcttagtcccagaacatttcctgttggtgtttcatgtcacctgtaactcatcggacggaagggaaccccaaatcctcatctcccagataacgcccttcaaagctttctctttcaatttttcttttttccttctttcatatactgtggttgatcctattggttttgttttgttttttgagacagggtctcacattgtcgcccagtctggagtgcagtggcatgatctcggctcactgcaacctctgcctcccagattcaagcgattcttgtgcctcagccttccaagtagctgggattataggcatgtgccaccacacccagctaatttttgtatttttagtagagacggggttttgccatgttggccaggctggtcttgaattcctg

SEQ ID NO: 85161 - DNA, 1088 bp, Homo sapiens
agaaagggtgaacatccagaatgtatagagttcttacaaattgattacaggaaagacaaaccagtagagaaatgtacaaagactaaacagctgattttcagaagagattcaaatgactagttactatggaaatagaaactaaaaaacgtgactatcaaattgtcaaaaaaaaaaaagataatatctaatattatcaagggcaccaccgcatagattgctgatattagcacaggctttttagagagcattttggcagtgtctgttaaggtgaaaaaaatgggcatatgttctgacccagcagttctatttttaggaatctcttttccagaaatacttgtctagatgtttaagagtatatgtccttgtagcattacttataatggcgaaaaatttgatataatgtaaatatccaccaattggacagtggtttagcctatttatggtatctatactttatccatagtttgaagtagtttgttgatattgtattgagtgttacactactttgtaacatcaacaacaaaacccaaatgtaaagggaactgcaagtgtaatcactcagcttttatttttctctagctataccaaatggttttggtaccagtccactaactccctctgctaggatatcagcactaaacatcgtgggggatctcttacggaaagtaggggtaagtttcaattatttatcactaggtgtttccactgacaaggtattgaattatttcttaatttgaagtgagggaagaaagaaaggatactttcctgtggtaaaggctgtcatgaagctcagaagcaaaagcatccattgactagccaagtccagatgacacttcatgatgcccctgcagaagagcctgtaccttgaactctgaggttcccaccggggcattcttcctgttccccactcctgtttcaacagcacgatgcctctgtccttgtctagaatactttgtctaaggcctgctgtgtgtcttctaccaccctcatcctggtctttgctgctgtctaccgtcttcctggtcattcctttgttttgtgtttgtgggactttaacatttggctcatggcattactctctactttta

SEQ ID NO: 85162 - DNA, 1052 bp, Homo sapiens
gatgagtaagttttgaggcttgaaatagaaatggtttgaaatgcaaatttttatgtgcagctactgttttgacaaccatatcattcctccttcttttttgtaggctttagaatccaaattagcagcttgcaggaattttgcaaaggaccaagcatcacgaaaatcctatatttcagggaatgttaactgtggggtgctgaatggcaatggcacaaagttctctcgatcagggcatacatctttcttcgacaaagggtaagtcctgaatgttttaagtgataattttttgagtagtaaagtgacaggttagtaagtgagcataatgaagccttgaaaaggtaaactcagcttgacaaaccttcccgaagcctgttatcattctaatcttaggtgacatgacgtctgttgttgtcctctagtccccatggagtctgttgccccaggaaccctgaatctgaggcttctgtcctgggaagcagactcttgaaaggcagcagtgtgaggctctggtgagtcaaaatgactgcgataaggtccctgttctccaggtgcttacaggctggcagacttggaaatatttttttggggtagaagacagcatcacaattaaatatatgcaaactctacaacagacatcccctgtgagaattttagagaaatataaagccctgaagtacttaggcactggatcaaatacagtttaggagatacaacttttgtataaagttaaggcttttttgaagattgaaataaaattgttttaaggttgaagcatccttaatgcaaaaaatttcagttagtatggaagtatatgaactaaaaagtcatggtttcctgccttcacactgtttctgcattccttacagttattccaaggcatgccaaatcatatttttatgcatctgctctaagttgtttgtaacacagttacgggattatactttaaatattgctttgcagtgtgcctatcatgacttctattgccattatctttccatgtcatgtatattattctacctcaatttacttatttatttttaaatactacatgg

SEQ ID NO: 85163 - DNA, 1032 bp, Homo sapiens
ggctcaagtgatcctcctgcctcagcctcccaaagtgctgggcttgccgccgcgcccagctgaaatcagaactttattctaaccattgggtttcctcgggtggagtaaacataaaattgattttcctcaggcttaggagtttcaggcagacttgcggcagcccttgtttttatagtggaatgataaatggaatgactggatggttttacatgagcgtagccatttcccctgaatgatatggagaacttttagggtagtcttcataaatgttggaagcagtgcctaattatttttccctacaacttataatgatcctctactagagtagttattagtttctccttggaatcgtatttcttgatgggccgcaggtgcctttcatgagagcaggtgtgaatcataaatggataggtcggacaggtgcctgtgcgtgtggaagccctgaagaacagtcacgaggagggaaggataacactgtctgttcagggtcgctactcctgcccgccacttgcctcccaagacagagcaccagggcagggattgccaagaggtgagcctgttctgagggagatgtggggaccttagggtgagctgaagccaggaacaggccttgggcacactgactgcacctctgccccttgagagcatccgagatgtaagtgtaggctttacttcctgagctgaacccggaaatgtgctgtgcttcccaatcggaacagttgcagatactgagttttggttttaaatggtagacattttacattgtgccttttctattaagaaatatgcttttgtgggctggctgttgtgtgagtgtttagcttatatgataagtggattgtgtatgcgcactgaaatattaacctactgttgctggagttgtctttctagttgctgtattcctgaggataactcttttgtgggttttgctgtgttttcactttcttgccgctttgcttcgattccggcttttggcctgtctggctttttacctctggcttttcttctgccaacctgttgaccagataaaaa

SEQ ID NO: 85164 - DNA, 3655 bp, Homo sapiens
gggtgtacatgtgttcaccttcccacccgctgaaacttcagatgcagtgaagccttctcacataaaacaatataccttaactgggcgtattgctctgtgggattcaaaagtattttgtaaattctggtcacttgagggcttcttggaatcaggtttttgtctagtctgtgagcacttctgccagttcctgaaacatgggctgccgtgcctgcttcccaggtgccgagctgtttccttcaaccatggtcaccctttgtctcaccatctgaaaggacacacatttcatgtggagtgtggtcgcttggagtctctcaaaaacactcttttttttcccataactttatgtagtttcttaggtaacatgtgctctatttttgtaagccactctgagttcttttgggctgtgtgtaggtgggcatggactaattttagggcgtgatgtggaaatagtattcgtattactgtttaatatgttctcctttcttttattaggcaagaaaaagtcatatttcccacgttgttcatgggtaactgaatttgtttgctgtgctctttttcattctttcttaatcctggtgtgtggtggaagacacattaacaatctggttttactaactgcatggggctgactcagctttaaccaacttacagcccatcagtgaactttcacggtcctgttcgacttgactgtatgccgttattagttcagctgtgagaaacaagaacaaattagttgcagtggtcctggggtggctgggagtagcatgccaggtggcacgcctgagatgggctagggcgctgtagtgttgatttcagagtctggcgatgggggtttgaggtcactgtcaggccctgggatcacctttgactgtcttcctgggactgggggtcttcccgttacccagttgcttctgttttctcaagtcaggcaccagtgtgagcattccctcacctctgcgctcacgcatggagtccccagttaaaatggaatggtacatggggacgtgtgtaagatctgccttacatttcagaactgctttgcagtttgcagagcctgggctgagaactggagcaggctggagctgctctgagcccacactcatccactgaaataggagactcaggtgtggcgtgtgcctgcctgcaggctcttctggatagcttgagcccaccctcctgccctctccagtgtcctgatccttgctgctttgacagagttaatgtttccatccttcatctcagctgctttggatttattgtcctgagtagcttctaagtgtgccttggctcttcccccttttcacttcttccactgacattttacaactgaccttagcactttttcttagctggattctctatatttcagcctccttaactagtctgtggtggtaagatcatgaaattttatagctctggaaccttttttttacatatatgattcccagatctgtatcttcaagcctgccccatcactcttccttcagtcctgtcttgtgcactgggacattgccctgtggctctttgctgctccctgaaactgaatctgttgaatatagagtctcttctcttgcaaatcttttccccatgcacagctttgcaggcctctgaaggacttcactagacctgtcatcccatctagaaggccagctttcttctctctctgttctttaactttctactttttgagtcaggagagaggcgctaggtgagaccctggtggattgatgttccctctctactccacccaccttcacattaagcgttccatttctgcccatgtagaaatttaccggttctctctttatagtctgggctgcaccacttacttttcccattagagccggcctgcattggagtgccgaagtggttgcttctgagggctgctaggtggcctctgaccaggaggagactagaaaagggtcctggcctgggcatctggaggcagctgtggccccgacttccccatcagtggctcactaggtgagcctaggctaatggctggaccttctcttgctttggttgtcttggcagtggaacagtgggatgaacctgttgttccttacggtgcacttgaaaatgccagaatcccatcctcaacctgcttgaggagccatctcctagttgctgcttttgtacacccccgtggcccaggtgccagattcttcttggcatccaatggtgctccctttctgctgggttccgggcactgtctgcagtacaggtttaggggcttgcctgccactgtgatgtgtgaggccaggaatctgaggttcacacgtgctgagagctgcaggcatttgtggggcctgcctggttgtccctgaggtttctaggagaagcaggtgtcagggactctgggactagccagacagatggagcctattatatgagggctaccgtggcaaataggatatggccttggccccagaagaggcacaggcctgtgaccttgggagagtgggaaggatgatttcaaacttgcaaatgtgttgaagctcaaaaatcagacctaacccagtgaggaaagagacaatctggctgtttgtcgtcgaagtaggacagtgtgcaacagggagaaatgacatttgtcagagcctttctcctggggctcttggtctctgtatgcgtggttggaatttaaactccacatatgtactctgagtttagtttctttagacatgaactttgtttcttccaagtaggcagggactatttgtcaagtctctgcatgcctgtttgtctgtgaggttatcctcaccccgtcagtgtacgaaacagctgtctctgcagggagtgtgtgtcggcattttttttttttaaggagaacctctctccatgagtctgtatttagctccctggagccgtctgatgagtaggtgggggcagtagtgggcaggtgtggtgcagtgtggccccttgtcgtagttggctttatctcccaaattgctagtgggacaaattttcctaggaagcgtttcaaggtggaaaggctgaagtggctcctgagagaggttccaggctgcacactccctccccctcttgctgcttcctgtggctgcgctgcatggtgcgtgagggggatgcttggggggctccctgcatcgctgggctctgggtgcgtgatggggacgctggggggctccctgtgtcgctgggctccgggtgctgggtcctggctgcaggctattgggttgggctgggctgtctgcacacgagtctgcgttgaaaagcctactcatctggcgttgcttgctaaacaatttttaaaaggttatttttctccaccttattaagatattcgtgtattaatacattatatttggaaaatgtaaggagatttggaaaatgattaaaaaaggataaagtagtaaacaaaattcacccacagcccagagggaagaaaagtaacgattcttaaattttctttttatgatatatatgatcctatgtacatatatgttggtgtgtgtatatatatatgtgtatgcgtatatataatgtatgtatatatacatttatttatacacactccccctctgtccctgctttgtggatttagctgcatggatagtaatgtctatctaaggggctatagtctagaatctagaatatatactatttgcttttttttctttcatatcattgaatctac

SEQ ID NO: 85165 - DNA, 1129 bp, Homo sapiens
tgccccttgggccatcaggaccctacagcctgcgaggaatagttttagaaagcagattaatttcctattgtgtgtgagtgattttaaatgagtttttcgtttcccctttcttcccttctgtgctctggttgctcccacagggcagtaaacggctttgaccccgctcctcctcctcctggtctgggctcctcgcgtccatcgtcagcgccgggtatgctgcctctcagtgtgtgagtgcctagcctccaggtgggggctcctgccctcctccaacaacccaggacacccacgcctcacccctcggtgcctgggcccagccccgtgcccctccgtctgcctccgcacggctggcagagggcaggctgcatgcagtggcggctactgggccctgcccagccccggaactctgcgcgatatcaatactggctattttctcttctcgccgtagtgccgttggtttcacatgattgcacttttgtgggtcgcaaggtgatacatacgtgtattacttggtcactggatgcagaagtacccattcatcacacctgccccatagcccccactctgctgtactgataggatttagttgtgttttaggacattgcaaatcttctagaagttctcccccaaatcaggtcaatgtgtgccctcctgagctcccacccaggcatctccagtgctcatgatcatgtgtcccccaactccacccctcacagtttgggcctgtttctggcaaagagtcaggaaggttactgaattagggaacattttctgcaccttctgattttacttaagcagctaccattccatggacttgcctcccagagcagcacaatgcccgtctgagccccacgtggcaggagcctctgggacggggcacacacaggcccagcctctgtgctgtctcctcctccgtgcgcctcagactcggggtgagggaggcgggcagcctctcgccagccttcccgtccttcagttcaacgacatctttggagtgtttttgttttctcttccaagggccgtcccgttgtgttaggaagggtgagtggctggttccagggtgggccggtgccagctccggggtggactgaacagcggcggctgtccctgtgcatcctttgattactct

SEQ ID NO: 85166 - DNA, 1047 bp, Homo sapiens
tttgagcccaaaatgggaatattggttttgtgtccgaggcttgttccaagtttgtcaatgaggtttatggagcctccagaacagatgccatcttcctgaatgttgacatgccagtgggtgtgactccttcatttttccttctcccttccctttggacagtgttacagtgaacacttagcatcctgtttttggttggtagttaagcaaactgacattacggaaagtgccttagacactacagtactaagacaatgttgaatatatcattcgcctctataacaatttaatgtattcagttttgactgtgcttcatatcatgtacctctctagtcaaagtggtattacagacattcagtgacaatgaatcagtgttaattctaaatccttgatcctctgcaatgtgcttgaaaacacaaaccttttgggttaaaagctttaacatctattaggaagaatttgtcctgtgggtttggaatcttggattttccccctttatgaactgtactggctgttgaccaccagacacctgaccgcaaatatcttttcttgtattcccatatttctagacaatgatttttgtaagacaataaatttattcattatagatatttgcgcctgctctgtttacttgaagaaaaaagcacccgtggagaataaagagacctcaataaacaagaataatcatgtgaacgtggaatctgttttctcaccttctgttctcgatttcccatctgtgatctgactggagggtgggtgctacacaccaacttcaaatgatggcgccaggccctttttgctgagggcgctgtctcccaggtcagacgacagaataattctcaggccagtcctggctccaactcttgttcctgccagtgcctcacaggatgcacacgcactaggaagggaaagaccacccaaaggcaggagctggcccacctgtcaagggagtgatttaggagggctctggtcaccagccaatgaagctcactgctgggttaggacattttcaggggtccaggacatttcaggctgcattttcaggcagac

SEQ ID NO: 85167 - DNA, 1038 bp, Homo sapiens
cgtggtggtgcatgccttgtaatcccagctactcaggaggctgaggcaggagaattgcttgaacccaggaggcggaggttgcagcgagcagagatggcgccactgcaccccagcctgggcgacagagcaagactgcatctcaaaaacaaacaaagtaagataactgagtacaatgatgaatacctgtgtacagtaattaacacctacacgtgcaggaataatgcacttattctacctgtcactattgaggaatacattaaaggcaattctgattttgaccagaaggaaaggtttcagcacattagtcatgaattctggacagagaggtccataatgcctccaccatgtgtcatcttcccaaagaaaaggggctttaaaaaatattttttcccacacaaaataccatttcaagaatttcaaaactactgtgaccactttcacagggaacgagcagccgccaacaaattagtccgtcgcactgagaagaagctgaaagaaatcttcatgcaggttgaggatgagcgtcgacacgcggaccagtataaagagcaggtacgcgaggaagtgcctccctgggaagcgcgtgagcaaaggaactggtggagaatgagctggtggcacaactgaccagtggaattcagggccctcccgattctgatgtttcagctaacgtgggctgttccatgttcctggtgggcactcccagtacccgagacacaggagggcggggagagcaggtcaggaagcaagttcagtgaggcctggactgaactgtaaagctcctgcttcctccactagaatgtgtgcttcgtgagtacagggatttctgcctgttttgctccctgttatctccctaatgcctagtatagtttctggatattgctggcagtcatgagatactggctgggtgtagggtgggcacaggagatactgaatagaaagtgaagggaagacaaaggtactgcacgctgcacccgagtgagcttcagcgtctgcatccaggcccccttttctaagtacacagggaatgttccgcag

SEQ ID NO: 85168 - DNA, 1078 bp, Homo sapiens
cagtttctgcctggttctgacacccctgcaacatggccatgccccatgtcctcacagctctaggaaacaggaatgcctgcttagtcctctgtacctcttagcaaccaccccatgcccgctctgtgcctaccccagcctttattacatggttaccgtattgtcttgggtttttccatcttggcttcatctacaccgagctcaggtcactggctgccttctcgcatgccctcgtagcagtcagtgggatggtttgtactaggtggtggtgtttaaagacccctttgaacaaaattcagctactgtggttttctgttgatagtaactgtttggtaacagagacctctacagagtaacagaagtttccactcacccgagtaaccagagccccccacttgagaacagtctgcctgttctgcgagcagatacttggatgtaacccagcataacccgatgttgtccattaggtgcgggagctcgaggcggagctggaggatgagaggaaacagcgggcgcttgctgtagcttcaaagaaaaagatggagatagacctgaaggacctcgaagcccaaatcgaggctgcgaacaaagctcgggatgaggtgattaagcagctccgcaagctccaggtatgtgccttcacccatggagtctctggatggcaccacgtgacctatgtggcttttacacagagtccagcagtgaagctggggggcacagcaccgctgtcagcgtggccgggggtggggcagcaggccataaagagagtgcttgtgtgtccgctgtgtccacaggagatacttgaatgcacttagcaacacagttggggtggaggcatcatgctggcctcctgtggccctgagagcctgtggcgatgcttaaaacccacccttcctcacctcgagaggagggtcatgttgacccagccccttagtgctgtagcttttgtgatctttttggtctgttttaatcgtcactttttctacccagatgatgtgccagttttcattaccacaatgacaagaagtgatctctgcaagagttcatggtgtgagcaggcaggcagggggccctcacctat

SEQ ID NO: 85169 - DNA, 3511 bp, Homo sapiens
aacatgtttgtgcttacattttagaagtcaatctggcaggaaatacaaaggacgataactgagggatgcctaagacgggagaggtgatcctagttcgaagggctgagggcctgaactaagacggggcagggggtggagaggaagggattccaggcgtgactgaggagaggcggggtgtggtgggggacgcaggaggggaggcctcggggatgcctggaggctccagcctgggcccctgggtggatggcgccgccattcgtttttcagagatgagtctgaagcagtgttggtgtgaagagcttttacaaagttatcgtgtgtgtttttaaatcatctgtgtttgttaatgtcactgggcgttctcatgcattgaggctgtctcttttgtacgacatgaattctttaatacaggtgtatttgttttggtgataaatgtaatggaagtgttgccctttaaaaaaaaaacacaggagcttcttcaggaggagacacgccagaaactaaacctgagcagtcggatccggcagctggaagaggagaagaacagtcttcaggagcagcaggaggaggaggaggaggccaggaagaacctggagaagcaagtgctggccctgcagtcccaggtgtgcgtcctctttaggaggccgcggtggcctcgatgtgtgccttcagcagatcctggccctgctgtgctgggctgtctcagctccatttgggacagttaattaggtcgtactaaattaagcccattaaatggtttttcttgacccagccacatgctggttataatgctggaagcccttaaaataaggacctaggactgtgtcaacgatgtaagatttcaatccagtcatcattttatggactattagctaagaaattaagtgacagtctaagactcatttgttttaaaatcacagtattgatttttcttctctcaaaatattaaaaacaaaaggttttttttttcttcaaaggcaaaaaccaattgagttcttttttttttttccttgagatagagtctcactttgtcgcccaggctggagtgcagtggcgtgatctcagctcactgcagcctccacctcctgggctcaagtgatcctcccacctgagcctccccagtagccgagactacagacaggcgatttttgtatttttagtagagatgaggtttcactatgttggcctggctggtctcaaactcctgacctcaagtgatcctgccgcctcggcctcccaaagtgctgggattacaggcgtgagccaccatgcctggccccaattgagtacattaatactgagctttctgtttgtccgtacacaaaacctagttggctgataccaagaagaaagtagatgacgacctgggaacaattgaaagtctggaagaagccaagaagaagcttctgaaggacgcggaggccctgagccagcgcctggaggagaaggcactggcgtatgacaaactggagaagaccaagaaccgcctgcagcaggagctggacgacctcacggtggacctggaccaccagcgccaggtcgcctccaacttggagaagaagcagaagaagtttgaccaggtgggtcggccacgtgtcgtttcctcctggcagagctcttgcttttgttcgtttggtttaaaataatcttatttaaaggcatttaaatgtgatacatgtttatatcaaaattggaaaaagggaaagcaaaaaaaaaaaaaaaaaggaaatacaagaacaccataatctagtggcagcactctagcgataaatcagccacatggtggaagagaaaagttgatgtcactgtttcggtttttcgtattcccccatccccttctgcacagctgttagcagaagagaagagcatctctgctcgctatgccgaagagcgggaccgggccgaagccgaggccagagagaaagaaaccaaagccctgtcactggcccgggccctcgaggaagccctggaggccaaggaggagtttgagaggcagaacaagcagctccgagcagacatggaagacctcatgagctccaaagatgatgtgggaaaaaacgtaagtcgcctggtgggctccacacttccgcacgggagagtatcccaggggcctgggccttcacacaggagcgggcgactcctcaggggagcctgaaggacctgggaatgcacagcccagcagcaaagccatctaggagtgttttggcctgtgcatgcgtacggggttcaggtcttctgggactgctgtgaggttttctgcagtcttcccccagcactggctggaggtgaacatgtttcttcttgtcctttcactgccctccctgctccagcctgcatcctggcaggagggcctttcaacaaaaggtttcatggttctgccgtcacaggtagttatcaaacatgaggtgagtggggacctggagaggaggaggagggaatggcagctccctctgacctggttcttcccagggaggccccactgttttctttgagagcttcagtagctttgggggcttatccacagcttggaagcttctgtggcacagtttttctttccattgcatacatcttccacaagagctgccatgatatttatttaccctacgtctctcccttagtgtatgacgtgttgaagatagcaaaacaaacccaggcctggtatcaaaggcaaggttccctggctcctccacaggcttccattctgaccatgggaagccacttaagcttttgaagcctaagtttccttatctgccagatggacattatacttgcccaatttcatgaagttactgcatctgctttgaaaagcacacaaagtcctctaaaaaggcaggatctcattttcatgtgctatgggccatctggccacatcataagtcagcgaaggtggtcccacctttctgctgggtctcctacaacttggcgcccagggactagccccatggacaaaaagaggccactgaaagtagaagtggccatggttacacagtgaaatgtggagagagaactctacagttgatttcatgttcgttttctgtagcatcaacactcacatgttgatcccacaaacaggtcttttgtgcctactgagcaccagacactgtagaaatggaccttcctcctgtcctaggattccccgcgcctgtccccgtgagaactgcagtggtcctggaccccagagggggtgcacagcagcaccaaggcctccctccaaaggctgctgtgagggtcaaagggcacaggaggtggagctctcagcacagtgcttggcgcagagaatgagggaaatggtgctgggggcatctttgtccagagaaagatcaaggcctgtgtactgtgccctgcttcttaggcccaagccaccctaataatcagcagtttccacatgtgcttttcaatacgaatgatcttctctacagcaagaagagatgtactgttgtacttgttcctcacagacagcaggcaaggagtcagtcaacagacaggttccctgacatggctgtttcctttg

SEQ ID NO: 85170 - DNA, 1027 bp, Homo sapiens
accagactacccagaacaatttgaagacccctagggatgtcaccctgtgtcttgataagccagacatggcatggaagttgcactggttgtttgtttttttggtttttttttaaagatagggtctcactcgcccaggctggcgtgcagtggcgcaatcatagctcattgtagcctcaacctcccaggctcaagcgatccaccttagcctcccaaattgccggggttataggcatgaaccactactcagctctctaggaggatttctgatatcacagtaatagacctgccagcctactggaaatagcacatcaagtatttattaagggaatttatgtaatatttaaaacaaaaacagtactttttcaaaaagaaaatgtgtttttaatcagtcagctaattctgatctctcttaaaaaatgtccttctctagtacaaaacgtgaacaagaagtggcagagctgaagaaagctcttgaggaggaaactaagaaccatgaagctcaaatccaggacatgagacaaagacacgcaacagccctggaggagctctcagagcagctggaacaggccaagcgggtaagggaggccctgccgtgtgctgtggcctggagaaagtctgtcgtcagagccactcccatcctatctgcccgttctgttcagtcatgtattgattaggctccagcctctgtacgtcactgagtgggctgctgggtacccagttgccaagacaggagcggctttcagaaaacacactgtctccttaggaagaaaagccagatgcaagtgcatggatccagccaccatctcaaaccacacagtcctccccagtgtctcttctcactaaacccttctcccagtggcttcactcaaaaccccgaatggtttgaaagtcattcttccctaacttgtctgctgccagtaagtcacacgtcctgccgatgttccccttcaggggttcctgacattcatctctcccttcttgtccttccctgcctgtgatctcacctcagccaccaaacacagtgttg

SEQ ID NO: 85171 - DNA, 1061 bp, Homo sapiens
ttccggtgtgatgaggaggtcactccttcatagttagaagcagatttttaactataacagcctttgacttcagagaaaatgttttcatattctaagggctaaagtaagagtgtcctaccttttaatggagaagcatggtcgtttggaaagggggctggggctggaatctagttctggctctgccaccattagctttggggccttcagcaaggcctctacctgagaacctcctcctgccctagcaggtgctgagcatctgcaccagcctcaggccccaggaggagggatgtggggctggggtctcgtggagaggtgctcaggggctggggctcgcctgagaaacaggccatccgggtgccatctctgagtgcctcttgcgcctgggtgttttaacagaggtgatgatgaaacactccataagaacaatgcccttaaagttgtgcgagagctacaagcccaaattgctgaacttcaggaagactttgaatccgagaaggcttcacggaacaaggccgaaaagcagaaaagggacttgagtgaggaactggaagctctgaaaacagagctggaggacacgctggacaccacggcagcccagcaggaactacggtgagtgtgggagaggaagcagggcccgggcgcctgccgacctctccaccgagcccgtgcagaaatgcctggtgtgcttgctatctttgggaggtggtgtgcttttccttgtgatggcaggtggaacggtgattaaatggtaatggttagaaacagaccagcctatgggtagaaatacctgtgcaggggtgggtgggtaaaccagcagactgagggacacagagggagatggatgtgatcggaaaagctgtggtcagtgatggatatctagggggagagagtgacaactacacagagcagggggcagtgaaaagagatttagatagataggaccagagggagaagggtaaacacaggaataggaggagatacccaggaggccaggcacacatgctggcagtgctaggtggtgtgaacggtgtaggtaaccagctgaaaagggaagggtgcct

SEQ ID NO: 85172 - DNA, 1159 bp, Homo sapiens
ttagaggggagggtggagaaaaggcctggccctctctgcccactcttctgtctcctctctcccagtactcgaggatggcagttttcttggttcagaacaggggttcccatggaaaagggaatggggtgacaggcagctacgattgctgccccagcacctgctgagccactttgcaaacctgggtacagtgatgtgtttgacatgagaggattccagctcccttcggctctcacagtgtggtctcacctcccatgaaaggacattcttaggacactcaacttcttccttaaaattccctccccacactaatttatctcccctccagatctcggtgggtttgaaatgactgagcagttgacatcagcgcatgaccatgtcatcagggcagtgacatgcttttgaataaaatggcttattttcaacttggatcagtctgtattttagtttattcctgtggtgagtcactcggtgtgttgaagagcttcttatgtcttaccttaaagaacgcttaaagaaggaagaaaagactcgtcaggaactggaaaaggccaaaagaaaactcgacggggagacgaccgacctgcaggaccagatcgcagagctgcaggcgcagattgatgagctcaagctgcagctggccaagaaggaggaggagctgcagggcgcactggccaggtctgcagcccagcagctgcgctgcacgggagcccatggggctgagtttcagcagactttgttatgttcgggagcattcaaaaaccctgggagagtgagatggggtttgcttgctgtttggtgtgacctgagaaagtgaaaagcccaggcgtacagaatttgtgtcaggacagcaagaaagtctcataaaccatctcaatatttatactttaaaatgacaaattatattatgaaacccttggaaattcacaccagaacaaattatttcactataacaaatgttttggtctctgtacattacagattaactgtagtatgttttatttattttttttttttgaatggagtctcactctgtcacccaggctggagtgcagtggtgcaatctcagctcactgcaaactccacttcctgggttcaagcaattctcgtgcctcagcctcccgactagctgggattacacgtgtgcaccaccacactggct

SEQ ID NO: 85173 - DNA, 1050 bp, Homo sapiens
accaaacagcaagcaaaccccatctcactctcccagggtttttgaatgctcccgaacataacaaagtctgctgaaactcagccccatgggctcccgtgcagcgcagctgctgggctgcagacctggccagtgcgccctgcagctcctcctccttcttggccagctgcagcttgagctcatcaatctgcgcctgcagctctgcgatctggtcctgcaggtcggtcgtctccccgtcgagttttcttttggccttttccagttcctgacgagtcttttcttccttctttaagcgttctttaaggtaagacataagaagctcttcaacacaccgagtgactcaccacaggaataaactaaaatacagactgatccaagttgaaaataagccattttattcaaaagcatgtcactgccctgatgacatggtcatgcgctgatgtcaactgctcagtcatttcaaacccaccgagatctggaggggagataaattagtgtggggagggaattttaaggaagaagttgagtgtcctaagaatgtcctttcatgggaggtgagaccacactgtgagagccgaagggagctggaatcctctcatgtcaaacacatcactgtacccaggtttgcaaagtggctcagcaggtgctggggcagcaatcgtagctgcctgtcaccccattcccttttccatgggaacccctgttctgaaccaagaaaactgccatcctcgagtactgggagagaggagacagaagagtgggcagagagggccaggccttttctccaccctcccctctaaaattctgcagtgatctctcagttagccctagtgatctatttcactgaatgatttatttcctcacaacaacctgtatgcctttgtgttctccaccaggaaccaatttgctgagaggatgagaccgagtgtcacaggctgatcaaacaggtgagtaaaaaagcacatgtgcttatgggtacttcctcagcagaagaaccatatactagtacaaatggtttatgaaagtaatttcatactgacatgccctcttttg

SEQ ID NO: 85174 - DNA, 1065 bp, Homo sapiens
taaaatggcacacctctattgggcactcaccatgaacggagcttgcaggactggaagctgctctgggtgagtcagtgagtgagcgctgagtgaatgtgaaggcctaggacattgctgtacatgactgcagactttatcaacatggcacactgaggctgcagtacatttattttaaaaatagagtaattgcactgtggtgttatgacagctctcgatgaagttttcagctccatgatcatcttaggagaccactgtcgtgtatccggttcatcattgtccaaaacatcgttctgcagcatgtgattgtgtacagtctgctgggggaggcagtgccgatagaacttattttctctcgagtcaaagttgacctttatgaggaatacagaacccaagtggtcattctgaatggcttttctgaagcagtcaatttttcctgtccaggaaaagaaactcatggaagatcgcattgctgagtgttcctctcagctggctgaagaggaagaaaaggcgaaaaacttggccaaaatcaggaataagcaagaagtgatgatctcagatttagaaggttagtatttggggctagagaaatcagggactaggacatgtgagtgtttagcttttactgtaatcagaacatgcaaaaataaaaaatatacatgatgattactaataataaggaccttcagtttgggttgacttattaaaataggtcccttggctgggcacggtgtctcaggcctgtaatcctagcactttgggaggctgaggcaggaggatctcatgaggccaggagtttaagaccagcctgggcagcatagtgagactccatctctacaaaaaatttacaaattagcctggcgtagtggtgcacatctatagtcccagctacttggaagctgaggcagaaggattgcttgcgcccaggagctcaccagagtgagctgtgatcgtggggtgacagaggcagcagaattgcttgtgcccaggagctcactgtagtgagctatgatcatgcaaccgcactacagcctgggtaacacagcgagaccctgtatttaaaacata

SEQ ID NO: 85175 - DNA, 1477 bp, Homo sapiens
gttccagatagaatcaccttgagaagcttttccagtccatgtgtgtcttgaggaaagccatcattctgatcccattgtatgatgaagtctggtagattttcattttttattgttaggagaaaaagggagtataattggcatccaagatacaaagttgattgatgtagccaggattcctcctttaatatatagccagtatcttttatttttctgattgaggtatagactgtatacagtgaggtacacagattttaaatgtgcagctcagtgaacatatgtatgtgtatacacccagaccaacgtcatgtcacatgtcaccctgatattttctgatgttttgaatagaagcctatgaacacagctcttacagcccttcctgttatctaataaatgctacaaattgacagtgacttaaagtacagaaagccagattctcttttgcgtcttaaggatatgaacattttatgggacatgaagaaaaatgaaaggtttctaaaacaccatgcttttgatttttctctgccacaacctcctaaacctactttttgacctgaaagaactaacctcatttttacttatgagaaataaagtagatctacagaaaacatcagattatcaccagttcatttcttgaacatgtattacatcatatctttaacatgtattacccaacattttattgcctcttagagcaaaacacacagttagtagatacacatcgttcacaaatttctacaaaatacttcttggaatattctcttacagatatgagatcctaactccaaatgctattcctaaaggttttatggatggtaaacaggcctgtgaacgaatggtaaggttttcttgatctttttctggcttgtagatttaatctaatctttcttgtagttaaaaaaagtaaataaactctttctctcttagatccgggctttagaattggacccaaacttgtacagaattggacagagcaagatatttttcagagctggagttctggcacacttagaggaagaaagagatttaaaaatcaccgatatcattatcttcttccaggccgtttgcagaggttacctggccagaaagtgagtgggtattcacgaattaatcgttcactgaggaagtgcttgtgctagataagcattgcattttgacctggggtgcaagagtgtgtgagacatagtctgtccttacagaagttgctttatagtggcagagatagtcaggtaaatacatgaacattctaagtaatgggatgttgcaatacaaaaacacacaaggaggctgggcgtggtggctcaggcctgtaatcccagcactttgggaggctgaagtgggcagatcacttgagctcaggagttcgagaccagccagggcttcatggcaaaaccccatctctactaaaaatacaaaaattagccaggcttggtagcatgcgcctgtagtcccagctacctgtgggagctgaggcgggagg

SEQ ID NO: 85176 - DNA, 1587 bp, Homo sapiens
ctgtcaaaggaaacaaatgaaagaaatgaggtgtccattagggttgaggagggcattaaaaagggcagttcagttgataattctgattgattttaaagtatttgagtaatgtgtttcattcatttaacttcttttcaataagaggatatgtacattatgcaccaaatgttttgcttgtggctggtgtactgtttatggtctcatcattagaagtactaggtctttgtggataatgtaaaactatcggttgctgtaacaagggaatgtctgacaagtttagccattgaacacctaggaagcttagtcatttatcttttcagaagagtccttcctattttgtgttcttgccctttagtaagtgttattcatgttttgagaagagaactgaagcttacacattgctaaaaatctgaactcctgtaatctaatcttcctgcatttgttcctaaaacttgaatgacttttctcactgaatatctaatgactaataagagagaattctggtccctagtccctgaggttatttgttaagtggatttgtacaatcagatattcttatatatatttttatgagccatttcctatttggaggcctttcacagtatcagtttgtatgtatcaataatgccagccaatgagttttcattttccaaataattgtaaatgtaacagtcagaatgttatccaagacagtgaattcctgaaactagcgcagcggaaggcatctgctggtgtgtgttggtgtggagctgtcaaagcactacagtatcctgccatataagtgtgtggctgttagttcccggcttgtgcagtgcctaagtatgctgactgccttacctatatggcatctcctgtcatttgttccacaaagcttgtgctgctgcactttcactgtgtcttttctttccctgctaacgagtgaggtttggcttatatttgttttctcctttcttctccccagtggaccgtatcgtgggtctggatcaagtcactggtatgactgagacagcttttggctccgcatataaaaccaagaagggcatgtttcgtaccgttgggcaactctacaaagaatctctcaccaagctgatggcaactctccgaaacaccaaccctaactttgttcgttgtatcattccaaatcacgagaagagggtacgtgctgagcaaaacatatgctagtatttaaaactgatctaggtcagatgctaaagattaaaccatgaaactattgtttgcttgattaggctggaaaattggatccacacctagtcctagatcagcttcgctgtaacggtgtcctggaagggatccgaatctgtcgccagggcttccctaaccgaatagttttccaggaattcagacagaggtattgctaacttttactttttttgcttatgtatcagagtttatcttgatatgaattaaaacagtgataaaataaggaaatctttttccttgtcccctacatagtttgttttcttatatagcaaacatatagtgaggttctggaaaagggacaatccttactaccttgattattggtaggaagattgagtgcctactttataaaaagggagtgtgcta

SEQ ID NO: 85177 - DNA, 1023 bp, Homo sapiens
atcaggattattatgactatttattagttactatatttttaaaaaaccacacacacaacactgacagcagattgtgtttaagaactgcccgtgtaggctaaagtactgcacaaccagtgtaattgatccttccagagtaacatggtgctcttcctcttttgttgtagtggtgatttgttcttctggtaaacttcgtgcaagttcacttagcagatatttattaaatagctactgtgtgcccagcaccaggcaccggccaacatctggggctgggagattgtctccgctgatggttggggggccagagacaccataggcacagctttcggggccctgagtatgtaagatgctggaaaaatgttccctggggaagctcagtccagtgagaagaagcacagaaacagtgtggaagttctgtcccagggatttgaagcctagagaagggagtggtgtatttagctttggaggcagggtgaaaaccgagcataagaagggttccctgaggtagctggtaaaggaatggagatttaaaagtatttaagcatttgccaagatgactggagcgggctgggcattccaggcagagagaaaaggatggaatgtgaagtcattgtgtctttgggaaaatgcaactagtttgtacagttggcctttaggggcatgtgtgaaagggacaagagaggtgccttcgttgaacacttgaatgtttttcaggctcacaactctgaagcgtggtctccttagctccatttcaagaggaggaaattgaggcttagagaaattgggtcacttgccccagaatcacccagctcatgagtgtggtgtgtctgactctgagtgaaggccattgctatgctgtactactgagctgagttatttggacactatccgacaggctgtgggagaaactcaaggatgttaatacttagttttgtcttttagaagtggctgctacattacacagggacaaaaggtgtaaatgaaggaaacatgtagcactacgggtagaggatgaaatggggg

SEQ ID NO: 85178 - DNA, 1016 bp, Homo sapiens
aaacgtgtggggggactggcagggtggccggggagggcgggggtagactgggggctggggtgggctttgggtttctgtttttgttttgctcataggcctgcatgaacctttcatttcatgctcagttttattatacttcaaggcaaatgtttgagtgcataagcaatttaattgctactgcctacacattgcttcttattttatgcatagcacttatagcaccgcatattaaaaggtatgccactaccttttccaatagtgccattgtgatacacagtcctctaaggaaattgttaagaactgatctgctaaatgacatctcctttgcttttgagtcacctttaaattttcaactctgaggaattccaaggaggatttttttcttgtatttaagacacattttgtagacaaataattacatagctacctcaggtgtgttggtctcatcattataccttttgtttggaatttgtgtgcctatctggctacttggccttttcttttcaaccagaggccctgaaactatctacaaggcctgatatgtgcaagttgagactaaaatagagtggaatgttgtcagaattatacattgaaccttaaattgagctccaaatgtttgggctttgtgatctgaatcctcagccctgtattacaatacagcctaactacagctacagagtctccaaaagcccaatataaaatgaagcccacccagccttccgaatgtttagtgaaactggcaagtagcgaaactcaaagataaatttatcttatgaaatttcctttatgatttttggaacatgataatgctgagatccaaatccatctcaaaagttatatttaaaatgttaaagggccatgcctattttaatccaactcaaaattcctgccatcacctctagttcacatactatgaaagaagtagactgcaagtatggagtgggaggagagaaaagattatgctagagacagcataagcaggaatgaaaattctacggaactccaaaggaagagat

SEQ ID NO: 85179 - DNA, 2017 bp, Homo sapiens
gtatataagatttggtgggcaaggatggaggtgggaggctgggatgtcatacaaattacagatcacagatgctatgtcttacaggtaggaccctgtctggagactccttacctgcacttttgtgtcttccatttaagagatacgggaaagttattgatttcattacagaaatgcttagaggaaactgtaagccttgctgagctccttcagccctggtgtgagccccattcatctgtacttagtccacagctctgactcacagatgccatgtttgcacagccctatttatggcccttgtctttccagagatatgccgttgggagtgcatttggccattcttgtcaaaataagccaagggatatcttatctaccccaggtttgctttggctctgctagcctctgctctggaatactcctacatgtttgctctcctgataatgctgctcttagcaggaggtgctgtcgctcttcagcttaggtggacagttagtttcatctgagtgacggagaagatctcagaggccactcactgttgggaggcactgttcttcagggtgaggagcaggcagagaagcagtaccatgtttgtccaattttgaggacagtttgtttcatacagaaagcagtggcaggcacagaaggttaaagagggttctaaggtggaggatttatcactgctcactctggatagagagatcgcaggataaggggagcaatttttctctagaaaaataaccctggaaaaacattattttcctctttttagagccacttaaatgcaaaagcagaaaacgacaagttgaacatgaatagatgaatatatgatatatgaatatagtttgcctgtgaaggtgcaacacctacagtatgaaacattttgtgttaaaatagagtttatggctgggcacggtggctcacgcctgtaatcccagcagtttgggaggctgaggcagaaggatcgcttgaccccaggagtttaagaccagcctgggcaacacagcgagaccctgtctcaactgaaaaaaaaaaaaagaaaaagaaaaaaagtagagtttgtgttagagttttagagttttctcaaggccaaaccaggagaaataagatttattggtggcagccctgccctagagatttataatgccctactttttgctaaaagatgttgtttgggatctctttaccagctgcaaaggacttcttggcacttcttaaagcttatattgaggaaaaaaaaaaatcctaaagattgcattttcatgtcaatgtacctcctaggatattttcatgagtaacagtatgatcaataagtataatctcgcttataattcaaaattattttaacattttgctacaacagaacttgaattttgttttccttaatggtagttatctgtcatatggtaatttgtattcaaattatttttcggaaattatatttccgaaaatctgtattagaagtaaaattaattacacagcagcgtaatttttgacagtaaaagccattgatacttacattcgccatagtgctgtgacttcactgcagtcatgccctaagctactaacgataagatatttttacgatagacaactcaaatagtgccttattcctcataaatgtcatcttgcatttacatgggctaatcatttgacattgatatcatataatgctcacaccgggagttgggaatgtgctcttttgatttagcattaatctattttataaagaactttatccaaatgtgcaaattctctaaacagtcatgtttgcatgggatctgccttggactagctccttttgtagcccgatttcaaagttgacttgtgctgtcaaatgtctttcacactaactgaagtgtttgtgtatttgctcttctgtcctgtttttgctgtttctctgctttagagattcagaatattcagagagcttctttctatgacagtgtttctggtcttcatgagccaccaggtgaatgtataaagcctgtaggtcttccaaaacagaagggttttaagccca

SEQ ID NO: 85180 - DNA, 1015 bp, Homo sapiens
ggatgaagaatgctggttccctaaagccacagataaaacctttgttgaaaaactggttcaagagcaaggttcccactccaagtttcagaaacctcgacaattaaaagacaaagctgatttttgcattatacattatgcagggaaggtaagagctcttatgttgaataactggattaaaatggctgtgtttgaaattttgctacatttttatgaaggtgtaacaaaggtgctgataaacatttataaacaaatacagtatatattacaaacatattgtctttcagacagcccattttggggactgttgtataaaagtttctggttgaggcttaaagtgtttttgtttttgcatttggttttgtgttctccatttcaccacttttggctttggtgcgggataggtggactataaggcagatgagtggctgatgaagaatatggaccccctgaatgacaacgtggccacccttttgcaccagtcatcagacagatttgtggcagagctttggaaagatggtaagaaagtgcttatctttgtaatcatgcttggctggaatcttttataattaaggtttatagatggttcttttacatatatatggatacatataacttcttactttaaaatctttctttccctagagcagggctgccgttatatcggaatttatccgttttaacaatacttgggttaagaaatgaatacagagacagctaccttcttggtcagatgttgtaggagtacagaaacattctaggcccggagccacaaagacgtacacgtatgacttaggccaccacagtcccaagtcagttgtaatccaggaacactggaacacaaaacccgagaaggcctgctcattccattttccctgtgtcaggcctgctgagctccgtccttcctcaccacccgcacccgccgcgacacccagtggctggtggataaactcaaattgcctgcatacagatcaattgctcttctttccatcagtcctcatagttcttttgttatatg

SEQ ID NO: 85181 - DNA, 1048 bp, Homo sapiens
gcttacagctcttggaaatacccggttcagagaaggaatgataatagagatcttgacattgaaggatgaagtggaaaaaatgaaaaggagacacagtaatgatattcatgatcatgctgtcaccaagtcatttagaaaaaaatacaaatttttatttgagatactgtgtcagaatttaggaaaattctcattaaaagtggttaagaatgtaaaagggtaaaaggaggatgtttttgttatattaatattaatgtggaacttcctttctcacagttgttgtgtgattagggtggattgagttacctgccactctgagctcctctaaagtgacctaatcccagttgcttcagattactgtcttctttttagctgatctgaaaccctgacaattctttcaggtggaggagccctggggtaagggtctccattgcagaagggttccctcagcttccacccgctggcattcagatcacccatccctttctctgaccactttattacactgtttcatttatatttaaccatagcctctagctacttttaaaaacagcatttgtgtgtattgccaactctttgccagtaaatatgaaagctttgtgagttgatgagaactgatcttagagtcttactcaaacagctgatttcatgagtgtgccctagaactggtacgagttcagttttgtatcacacacttgccatatttgcagtgtgacaataaatgatggcccagaagcactagaaaatagaccatcactatttaaatatcttatttagctttcatgtgtcatttacctccaaaaaggaagtcactccagacaatggtgagctctaggcctttttaaaaattgagacataattcacaaaccatgaaatccacccttttaaaactacaagtcagtgatgtttgtagtatattcacaaagttgtggaaccattaccactaccaaatcctgccacgttttcatcaccccagaaagaaacctcatacccattagtggtcactccacattctgttccttcaatccccggctgccactaatctaccctc

SEQ ID NO: 85182 - DNA, 1129 bp, Homo sapiens
tttccagactgggcagccaggcagaggggctcctcacatcccagatgatgggcggccaggcagagacgctcctcacttcccagacggggtggcggccgggcagaggctgcaatctcggcactttgggaggccaaggcaggcggctgggaggtggaggttgtagcgagccgagatcacgccactgcactccagcctgggcaccattgagcactgagtgaacgagactccgtctgcaatcccggcacctcgggaggccgaggctggcggatcacttgcggttaggggctggagaccggcctggccaacacagcgaaaccccgtctccaccaaaaccagtcaggcgtggcggcgcgagctttcaatcgcaggcactgggcaggctgagtcaggagaatcaggcagggaggctgcagcgagccgagatggcagcagcacagtccagcctcggctcagcatgagagggagaccgtggaaagagagggagagggagagggagagcgagtaaattctttaaaatgatcaaagtgttgaaagaaatagaaaaagaaagcagcaggcagtaccctgtagaagttaaatgtgatgtagacaagaataacgggacagggtgacctgcagaaattctctgcaggagagcaagagagccagtcacaaagaaagctgggagcatatttgcatatctgttataacgataaatagccctgctattttgagcactcctgagaaatattctttggctctcaagaatgcatttgtcaaaagagtaagttctctttaattcatgtctcctacggtacagtagtcagtgcgggtacctgttacaatagtctgctgcgccacatcacatcatcattctaaaggcaacttaaccaccaagcaagctggcttggagaaagtgtttcagggcctttgctgggctcgggacgtgcttggtccacatcactgtatctttagcttatgtccatggtagttttcatattcacttcatagtgtttgctgcaaactacttgctaagataggaatatagaatatgagtttaaaagctttccttcaaaaaagagggctaaaatatttaaatctgaaaacaatagagttttgtcatctggacaattgacatcatttcgcagat

SEQ ID NO: 85183 - DNA, 1075 bp, Homo sapiens
agagggcctttatttatttaagaattatattaaataatttaattcttaactgtctttgctcagaccttctggaaaagtctcgtgctgttcgtcaagcaaaagatgaacgtacttttcatatcttttaccagttgttatctggagcaggagaacacctaaagtgtaagttacaaaggtttttactattttatattcactggaatatctcttttaatttttttttgagaaaaaacaattttgggaaacagttttttacacacaaaacaccaaatttccagctggttaaatcatgaaaatcaaaatgaaattgaacttccatgccatggggtaagtactttattttaagcggcaggtattgtagataatataatcttttgtacttttatttcttttttaaaattttttaaattagaagacaaatgatgcgtattttacaactctgtttcaacgttttaaaatatgaaagtaagggaaaagaaatttacctaatgaaattaagtagaataaatatttttatttctagatttacaactgaatatatgttattgcttccactagtactagaaagagcctgtggtggatattgattgattgaatgtcagggatcacaaggactagaagtttagagttgggcaggtacaaaggagagctcaggtctgggtcagaattttgctgggttagaaatatattgagggagaggagaagatgtataactttcccatctcttctgattctcaaatttagtgtttctgcatgattattatatatattatctagatatcaaagtagacacatatacagtaaaagttttctcatctggcatccaggcttttgctaaccacagacatctgtgaaacctttgaacccaaaaattaatcagagaatgacctgcaagggaaaaatcaagcaacaaaaaaatagagttattgccaaggagagactaaaaattcaagatgatgcagtatgtaacactgaagagaagaaaatgctcaggctttcagactggcaataactgcaataggagtaaattctttttttttttttttaaatttattatttatttattttttattga

SEQ ID NO: 85184 - DNA, 1046 bp, Homo sapiens
tctagttttagttactatagatacattataatcaccccagaaaagattctagaaatcgatgtcaattcagaacaaacaaaatttttgaaactaattaagataattttcattttattttcttcagggtatgaaaatatcaaatatccgggtttccctattgcacattttgagtgaaatccttaacaagttatatttgattatatatgagagaattctagttgtctttgctgttgagagctctcacagtacacgtgtaatttcacttgtttctggattggtatacaataagcgttatcaaaatgtgtagctgtaattaatacacaaggtacttgtcacgttttgggggttttccatgcttttgtttttactggtgaagttccgattgaatattctaagtaccataatctgacctttatgcaaatcaattatggagtgggcattttcggcacagatttcttcacataatgtttaaagatagcgttcccacttaaaagtaaaactcgtattttccaatttagtctagatgtgtgtttcaataaaaatgttaattctgaaagtatttattatagatgtgaggagaaagcttttttaacttttaacagatattctctcccctcggcctgccgccaaggaagaaagaaaagtcacctttgcttatctggccaagtggccaacactcaagtgacgtcaggtcccatggcctgcatcttacctgatttgccagcgtatccaacatgaaggggaataatctaagtcctagatcacttggggatattcagtaaagtttttcatttttgcttctgaaatttcactttgtcaggttgtcaaagtgcttggctatgtcttgtaaaatatctgagtatgagtgtcatttagctagaaagttgataattttcaacttcataaggtttttgttttgttaaagtgtttttaaaatagaatacatgttagtgctttggcttataactgagatttattggttaccaaatatattttcagaaataccgttctcttttgcctccttccacaccacaggcccctgcagc

SEQ ID NO: 85185 - DNA, 1096 bp, Homo sapiens
caacagtgaatcctgttggttaaacatctagaaggtgtttcagatctgtccacatttcttctcctaactagctagttagtctaaaaccatatctgaggatatttcttctattattctctatcacagtatcctgtttatttccctcatggcacctatcacaagctgtaactaattactttgtgtatttattatctttcctagtagaatgtctaagatctttgtcagtagggactttgtatctttggttcctagcatagtgccccacaggtatatttatggattttatggaattcatttactgaaaatgtggcagacactacaaagtgccatacactcttccaggccctgggaatataccagtggtcaaaactaaggttccctagccctgtagagcacaccttcatattggtgttaactttaatatgttttcaacggcatgtcatgatgttgttgagctcggggaaggtagtgcatatgctagatcctctgagaatatgcatgcccccattttagaagcaagggtagagaacatgagggaggcagttgctccgtgggcaggccaggccttgggttgagatcaatgtcataccaagagtagtacgatgttaaaaaatgagttgtgtatacagtgaaatttcatgcagtcatatttataagctacatgcttacagtgaaaatatttgaggctataaactccataagctttagaatccatttggttccatttctttgatctgatatagacgactaatttcctgaagaatatcttttctttcaaagatactagcatatggtttatattaaagggattctttatttaggagagcattacccttaagaaaataatcgttcacagttagtccagttctctgtttatggagaagtaaaatgcgttccagatggaggagatttatgtaaaaagaatctctcataatgaaactttaaaaacagggacttcaatttcaaaatgattgtttggatcagcaggtacatcttccctcacagagttttagttagaatcactttctctatttccacaaatccttcttttctttccttttattttctttctctctctcttttttttttttttttc

SEQ ID NO: 85186 - DNA, 1060 bp, Homo sapiens
gatagagatagtatatgaaactccttggaaaactggaaagtgctacatcaatacagtggtaactgttaaattaactgccttaaagttttcaaataaggcagagttaaaataaacaagtattaatatgttcttaattgaagtgtcgtgctaaatttcatttcatgaaagccagtctgttttattttcaaaattctctgcctgatttacgtgccccatgcttaagttgatcttctctgttcagcgtgacatttttttctccttgtgaccactttatagatgctaattttttcctttagtggagtccattatcataaccaggattaagaagccaacaaaagttgctggatggcagacagaatgaaagaactgaggaaaagatgcagtttcttttttagaaatttttcccctgatgacttgagtaaagacattagattaacgtacatctgcttttatttgtgtgtgtgtaatgtcttttagggggaacttgaacggcagcttttgcaagcaaatccaattctggaatcatttggaaatgcgaagactgtgaaaaatgataactcatctcgttttgtaagtttcaaagcaccagaagcttttaattccttagatttctagttaaatgtttactgtgattaagcaaatgaattacttttcttcctagattttaagaagctaatagatgtagttctgtagacataatacaagctcacatgtaattttaaattttctagtagtcacatttgaaaagaaaaaaggtaatgtgtaagtaactttcatcattttatcatacagaaatgtataactctgtcttattttatggatatgtaatttaacctctctgagcttatttatctttgattgggcatgataataacacctgtcagtggaatcggagtagagaataaatggtgtgcacgctgagcacttagcccggcactatgcatagtaaacattcaacgcattagatgtggtaaactgaccttttcctaccttgctattttctgtgggatttggactttggaataatttgtcactactatgacttctctttaattttttt

SEQ ID NO: 85187 - DNA, 1027 bp, Homo sapiens
gtagcctcttgctactacccacagcagcttgaggggagggtagagatatgggaagaagtgatgacagaaaaagggcaagaatagaaatgtcagttctccttaatttttagacatgcagaagtggtagttaatacagcctgagagaacgccagccaacccagcttccacagttctcaactgcacattggcttggtgctttggaaatggcttactgctaggcaaagactcaaacttgctaacatttgcatttgtctgtttgtaatgaacagcaggaatcgcctaaaccagtgaaacaccaggcaagtgctcttctttatgcttcttagtcttgagtgtttgcactaatttctgtctgtagattgagtctctgctagaatcaaatgccactagttctaagtgaaatctgtcattaaaaaattttaattttgaaaatttattgcttagagccttattctttcttgagaagcgcatgccgttttgctttaaatttgttttctcaataaattttaatatttatttgcccttttatcatgacattgaactgcatgtttatgaagcctataaattatggtttcatatgtcatttactaggtggaattattttaatacttatcagacacatggaaacctagctttgtgccctacactacattttgaatttggggctgcccctttaaaaattatacctttagagctaacaaatttctgatctgttaaagttttatggcatggcatagtttatgcctgtatgtgttttaaaccaaaggcccaattatatttaatatataaaataaattagagctgggcacagtggtatgcacctatagtcccagctgtttgggaggctgagacagaaggcctgagcccaggtatttgaggctgcagtgagctatgatcacacaactgtgctccagcctgggcaacggagcaagacctcatctctataaataagtaaaataaaatcaattacaattttcttaatgctgggcaagtagtggaagactgttattcttcctagttatcagat

SEQ ID NO: 85188 - DNA, 1080 bp, Homo sapiens
ttgaggaaacgcaaacatgttcacgtttagaaactcctgatcttttgtgtccgaatgtgcttcaacagatgcaggacacctccagctagaagcctccttgctttgttcttgttagctttgtacttctaccactctctttgaaggatttcttctccaaaagagcacgatgctgggactgcagcctttccccttaaccatagtcctgtcttagaccagcagtgaaataaccagccacttaaagtgtaagactgcttcaccgttaacatctcattttgttgatggaaatgaggtcagattccctttgccctcactctttgaggtcttggcctgttgttcacttttctgaggagtctcctaattttcttagagagaagtctgctgagctttctttttggctctcttccctctgcttttgttcaagctgcttttagttacctcctctgtttccatctgggacagatgtgccatttctcattgttttttctatttttccaagatttatactcctttgatcctgccacctccttcattaaaatcagattttaaaaatttccattaccatcttcatcatcatcatcattgatcattatcataactattggtatcaccactaccatttattgagagccttttggcgaggacagtgctaggccctttcccgcattatctcagtcctgtgaagtctcattttaaaggcatataaactgagcctcagagaactgagtaacttgcctaaagctccatagctagggagtggcagaaggatttgaatctaggtaggtcattttgattctgtagctcaggttcttaaccactgtcctaactattgattcataaagtttagtaattcaaatcacctcatgtatagtggatgaatatatgagtggacaataatggataatgtttattgaatgtcatctatatgctttagttgagctgtattttttcttcaacaaccctatgtattaggagctattatccccattttatagtgggcaatataagacccataatctatcctcttgggagctcaacagtaaggttttgaatgtatctatctttgaagccatattttctata

SEQ ID NO: 85189 - DNA, 1400 bp, Homo sapiens
catctatggtgatgctctagactttgccatcttttagaattaactgacttttcagataatgtttcagtagttctaatgcagcatccttccatattggtagtccaatcaagaagattggacttcttaggagaagagagtccaatctcctaaatgtgttctttgacttcatgtggatccccagcccattacttgttttactttccccctatatgttaacaacacccttcactttctgccttgtataatttagatttcatggccatcttctacccatttcctaaacccctcccttgtcccgttgttcattggttattcttgtttggtaaaactcacgctggatgaatcaagatatttgtctcttttaatgctgttacttgggttgctgatgcttctggagttatgctcacataatggaacagataaataccactgtaatttcctgaccgtgagccctgattctacactcaactcttgctaatcctaccttggtcctcccactctccataatgactatttcaaacctctgcaggctccagatctctgggtccctccttgcccctctactccctggctgatggcttgtttcccattccacagaggcactgcagagaaactgccccagctagatgaacagatcattatctcttgtgtctactcctgtcaaaggctggtcttacctagtccttcacctctgatgctgatcacatcctcttaaccttcttaagaatctcatggtgttgattattctgggttgtgactgtatcttctgcttctctttttataggctcctaacattagcaataaattttccctattagctaaagttttacccgttactttaaataagaaagttagttccttccaccttccttttacagccagatttttcaaaacagtgttgcagatgggtaggcagatatggttgctggcaggagcttgtgaaaatgaagcagggtttcagctgagagtgaggaggagggaggagagattggtggtttaagatagaaatagtgtgatgtagtcatctaggagagacagataatacttacatgtacatcactgacattgcatcaaatatttaaaacagttgctattggaaatgtaaggagaatgtgaaccacagttatagagggagttttaatatgcttctctcagaatttgacatattaagtagggaaaaaaagaatattaaagaatgtgatttaatacaacttagcaagcttatattgaaaaatgtatgtatgcaagcagaaagcacatttacaaatgtggtgtctattccatatagcaggccaccaataaaaatctcagttcctgaaagaagaaatcacaggctacattctctgaccacagtgcaataagacaagatattagcaataaaaagatttccaaatgggtta

SEQ ID NO: 85190 - DNA, 1027 bp, Homo sapiens
gcgaaagaacgagactccgtctcaaaaaaaaaaaaaaaagattctgtttcttgcatgaaatgtatttatcatccttcctagtttcatatcatgcacaaactttttggtcacacatcccacatctttaagtgtattaataaaaaatattcaaaagtttttgctttttatgtgaaaaagcaggaagctagcttaattttttttaaattggattttaggggatactgtatcaaaatgcagttgtgtgcctggcacatagtagttgcttaataaatatttgttgaatgaatgaatgaaagcagagttcttagacgtaaacttgactgcaaaaaatcatacattcattaaaagcatggaatggtagattagacagaattggaaactagagcagtagatttgaagactagaatggagaccaaaaagaatcagatggtgcttatgagagaaggagtaggaaacatggaatgtatttgtagattcttgggttccatgaaaaaagtgatatttttgaaaaaggtcacctgaactaaagacacactcaggtgttcagataaaagtgctgggtggaaatagtgaaaggagatacgcttcatcttgcataccttggtggatagggcaacatgacatggaaagggagtcagtagcatcgggcttctcatttgcaacactgtgtgttaggaactgaatttaggaacaccgaggcctctaccttgcacataatcatctgaggtcacctaggagtacccacagtgaggctcaccaccttgtggcttgtcttcctttgttcctgatgcctcaccagcccagttccaccccaggtagcttccattcagcagcaggcaaccaacactgctaccaaccccggttgacctgggtagatggaaaggaaagttttgcttgctgtaacaatacctgcaggggccacttttttaggccacaatgaaaatttaagacatgagagtccaccatcttcatggaatcctggaatgaaattcactgtgtttccagtcatgttttcatttccataata

SEQ ID NO: 85191 - DNA, 1090 bp, Homo sapiens
tagctgggattacaggcgcctgccactgtgcccggctaatttttgtatttttagtagagacagggtttcaccatcttggccaggctagtcttgaactcctgaccttgtgatccaccctcctcggcctctcaaagtgctgggattacaggcgtgagccaccgtgcctggccaagaagagtattttaataccctttttagataattgtggatattcttctttgatactgtacccaaactggacaaatgctattttcttaaagattaattgcaatatggaatctgaaactgcattaacgagcttttcatagcttgtgtactcatgagagaatgaatgtaaaaaagtaaataacatattgattgtaccttatgatagccacgtgaagtcaggaagctcgcattatttctacttcatggatgaggaaattgagtccagcagagtgccacttaataagctatctgtgggagaactacttgtggttcatagtactaaattgcccattataggctaagtttaatttgggggatagattaattatccaaaaggtaaagatctcctgcttaaatgactctttggtttctgtctcctgattggaccctgattgataaatgcagaggttttttttttaatactctattttatttttattctagacttattctggactcttctgtgtagttataaacccttacaagaatcttccaatttactctgagaatattattgaaatgtacagagggaagaagcgtcatgagatgcctccacacatctatgctatatctgaatctgcttacagatgcatgcttcaaggtaattggaaatatttgaatactaaatgctcagaatttcttaaatgtaatttactgttttttaatgtctcaatgtattctacaaaagttaaattttatttttttaaaattaataaaaaagtaatgtttattgtagaaaaattgagtttttaagattaaaacagacaacacagccattttctgtaagtatgataagtatgtttgttgctctaaaacaatacctcataaatttgtatgttaaaaagcatctagttttcatatacatttgattcccaccacaagg

SEQ ID NO: 85192 - DNA, 1001 bp, Homo sapiens
agtaaagacccaatgaatatttgttccgtttaaaaaaaaaatacacacgtgtatgtagttttccccacaaaattgggaacatgctgtgtaattacacttttgtgttctactgggttttttaaaatactaaattacaagcatttccccatctagaaaaagtactgataatatgtaagatgtcccaatttgataaaataattttaagatatataatctactgcttctagacctgttctagaagttatttgttaaattattctaatttatagtcacctgctaaatttaagcatctaattacatgtccagtgtaaaatttaagaagtgtgtgcgtgtctactgacagcaagacagtttcctaagtgctctgtaggatatgcagtttacacctgataagaatagtaagagaaacttgtcatattttgttatagttgaatattttcttttaatagattctacccttctgaaaggtggagtgtgtatcctattatttgttctcaaatttacctgtgatgtttcccaccttgaagccatgcctcctttcttctttttttttaaattttttattttacttattattattattattattattattattatttattattattttgagacagagtctcattctgttgccgaggctggagtgcagtggtgtgatttcagctcactacaacctctgcctcctgggctcaagtgatcttcctgcctcatcctcctgaagaactgggactgcaggcctgtgacaccaagcccagctaattttttgtattttttgtagagacggggtttcgctatgttgcccaggctggtcttgaacacctggactcgagcaatctacctgcctcgccctcccaaagcgctgggattacaggcgtgagccaccccacctggcctcctttctttttaccagtgtgcaacgtttaagttggaaagagacaacttgttaatagtgttattagaccagtccctagaggcttttaaaactgttatgcagaatg

SEQ ID NO: 85193 - DNA, 2026 bp, Homo sapiens
ggcccccagccaggcctgtttggaactagggccttaggaaggaggttggcgactcggcgggtcagaccgggctggtgaggtttggataacgtggcctctgcctacagccgttatctctgtttctttagggcctctgcagctcccttcaagatcactgcggtggatggaagggggtggggtgggctggggtggggtaggggaaagcaggcggggtagatgcagactgcagatgaaacaaagactgctgttttcgctgaataatgtaataccaaacataatactttggctttgctgagattttgttttttaacgttgaaactgaggattctttgagtcaggtttaattattcttgatagtatctcactctggaaaactttataatctatttattgttttatctccttcatcaatctgcctttattaattattctttgagtcccttgcttttgatgtttaagtatgccctgcctgtctcgggttctggaaaagtggccattttatgcatctccttacttctgcatcttaaattcagttcttccccgtccttatctggagaaagcatatggtgtaattgtgcgatatagcacgagctttggcagcagaaggatgtgacccctgcgagcctggcttttcatttgggctccatagggaaatcattataacgaaggcagctgagatggaaggtgagatggaggaaatcttgaagggcacgttgtagggtggaagactatatgcttcagcggtttatgcactttatcacatgtgaggaattaaagttcctggtgttggatcctagttttggaaatattaaacacagtatagagatattaattgggagatggggcaggccataagtagcaatagtggccttttgtgtttggtttgtgtttgtgatcattgggttgagcaggattttgataaattagcagactcgtccagccctgtcatgtaagtgacctcaatggtagcagtacccaaattgggacagttctgttttagctcatctgttatagatggatgctctgtcatggataatttatccatccttcttgtttgcctttctatgtgcaggccgttcataaaattgaattgtttgcctctgtccacactcatagtaggtgctgggagggatttgaaaagtttgctgggtgacatttcattggaagtgaaaaatgacctgggggtggagccccaggggtgtgtgtgtcaaaccactgaaagggatggcaactttggctctgtagggggctaattcatacacagataaatgatttaattgtaattaggcagcaatttaaaatgacactaataaccctcagaccatctttatgttcgctaacaaaaagattcctgtttgtctttatttcccctaagttatgggtatctttttctataaaatatataaaacctttgccagatgattcattggttaagcctatactttttaagccgtaattgattgggtttttatttagtagaaaggtagtatatagcattgtacactacacacccttcaaaatttcctccatgtcaccttccatcattgtagtgtgtactctggagctgaactctgagtttaatcccagctctgctacttgttagctgtgtgcccttgggctggttattggctttctctgtacctcagattcctcatctgtaaaatggagatattaatagtgcctacctcatagggctgttgtgaggattaagagttgatgtatgtaaactgcttagaatagtgcctggccataattagtgatatatgacaatggtatctgctgttttaaaaatcatagtgttgtccttcctgcaaagcaaatcactggtgagtggtacactgttaaacaccagtattatccagattgggtaccaatgtattatggagtgaaataaatgtatttgacaattacaagtgaagaattaaactgaacaaaatatctccaatggtctcatgaactctatcaggtaaacaataatatgaacacttaacagctgcaaagccctctggtacaacgcagggtaggg

SEQ ID NO: 85194 - DNA, 1304 bp, Homo sapiens
ctaacgtcttcccttggagatgggcgcgcaaaccaaccagtgggtctgggggcggcggtgatgggcgtggagctggcccaatgagggtaggggtgggtggggcagccccgagcagcagtgctaaaggagcccggcggaggcagcggtgggtttgggactgaggcgctggatctgtggtcgcggctggggacgtgcgcccgcgccaccatcttcggctgaaggtgagaggtgcggctacccgggtccgagtgcacggcccagggctgggggacagtttgtggagggaggaatggctcctgggctgaggggtcccgggcggctctggaggacaggaacgggggaccgaagcgggagctggggaagacagaggggcttctgagctgtagggtttgtgctgcggggaccttaggttagtttgagcagggtcctgggctgggggcactgggacctcagtgggtggagatggagagactcccggaggagcggggaatgaagtccttgtgaaacccgcgggggtcagggcctgggtgtgcaggagggcgacccctggggggctgggggatggagatctgggggtggggacgtgaggaccaggttctcggtgggtgggatccctgggggcgcgaggtcgaggggctagtgtcccggcggaggtctcggcgtgccccgcgagccagtgtctgcctcccaggaagagaggggattctaagcggggctggaaagcgcagtcccggcggtagggtgggggggcgctgggcaggaagggcccctgcgtgggttgctgggtgggttaggcctggcgcgaccggtcccccgcagcaccagaggggttcaccatgggcttggaaggcgggcggcgcgcgcccgacccgtgggtggagggacaggagggcattggctctgcgcggccggggaagcgcgcggcgggtgaggggctccggagccggccgcgggcgtggggagggtcggactccgccggcgccggggaaggagcgcgggaggagggcgtcctgccgcgccctccgtggagcgcctaggccgggggtggacgccctgcgaggcccaggcggtttgagggggcgaggcgggaaatgtggcggggcgcgctgcagcaggacggccggggggagggtcagcactcgcctcgggatccctttattgtgtaagcgagctgggaatggctcgccgcagtctcttcattgccttctgcagttgggggtcacaccctgatcccataaaatcggactggaattggttcggagggaagttgaagccgcggagtcctggcatttgtgggggctttg

SEQ ID NO: 85195 - DNA, 1515 bp, Homo sapiens
cagctccggcccgcgccgcggacccgccggcctcggcctcggctcccgggaatcactcactcgagtgccttcgacgggaaagtcgggcgagagctggacccaggcgggggccgagggaaacggggaaactggagactcgggtgaaggccgcaggggacaaagagattgattagaaaatcaaacgcgcatctagaaggaggcgcaggcgactgctcaaggcgcggacggcggagctggggctcgggagcgtccgtccaaaacccccgaggttcgccaaagaggagggcccgcggcccagaccctccggagcgtgcccgaggcgacacggcaagcttctggggctcccaaattgtgaatggagttcaatgcacaagcatagatagtagaaacagggtcgacctgcacagactttttattccgagttccttgtgctatcagccccgtcgccctcgcggcctggaaggtgacacggtgtcttccccggcctcctgctcgccacccctgttgggaccctcgggtccgcctggggacatctgctgagcgggtgacggaggctttatcctttgatcccttctggatccggtgacgcgctaagtgttgggcacgtacggcctacggagtttgaatgctggggccttcctgttgcggcacccccagcccactggtgcagcgggatcgtgcgctcccgccgcagccctaatccagaggaccgcgccgcgccagcgccttcagccaggctgtggcgcctccagtgggtagggctggctcggctctagccaggtgaagctccagactctggattttcccgtcttcggggttcagcgtgtatccacctcacccggccgacttggccctgggccctttcacccagtggaatcctgccactgggagaagagaaagagctgtggctctatggcgaaatcttagctcggttgagaggcagaactgacacagctgggacgaaggggagtttctggaatggccagatgcgtgtcccaggtgtgtaggggagatggaatctccgtactactcatcaacttctgagtggaagtcatccctcccctctgtgtctgtttcctcatttgcaaaacaaggataaaatgagatcacatgtggccccaagtaagggggctctcagtagaaggatcccaggcaccgctcccaccactgaccaccaaccttgctgcacctcccccgcatctctccacgtcttcaccaacattctcctgggagctttagcgactcccagattttctctcaggctgcctccacccaccccttgtggctttcgggttctgatatccagctgtccttgaaatcacgctttctaagagttggaaacatccttccacagattctagagccattatacagatagtgatattgaggcctaaagtgacttgcagttgtcacccagctaattagagggcttgagccagaatggatttcatggcaaacagtgaatctcggactctgggcatcagacttccaaccgcccccaccccgacccaacac

SEQ ID NO: 85196 - DNA, 1039 bp, Homo sapiens
cttctgtcacccaggctggagtacagtggcatgatcatgcctcattgtaacctccaactcctgggctcaagctatcctcccacctcagccttccaagtagcagggaccacaggtgcaagccacaatgcctgcaaataatttattattattcttattatttttgtagagataggattttgctgtgttgtccaggctggtctcaaactcctggcctcaagtgtcctcccacctcggctccccaaagtactggaatggcaggtgtgagccaatgcacttgacttagactctgttcttgagtgatctatctgaccctgagctgaagtggatactttgtattgatatttactattcattctcattgtcttattattaatggcttattaacaatacattattgatgctcattaacactaaagcccagtgtctctgtggtgccagtcatcactgtcctgtacatgatctctgtttgccctgtagtaagcttggtgatggcagtatcactggatttgctggttctaggcaactttttaatttaagttaattaattaattagtttatttatttatttatttttgagatggagtcccactctgtcccccaggctggagtgcagtggtgcgatttcagctcactgcaacctcggcctcctgggttcaagtgattctcctgcctcagcctcccccagtagctggggttacaggcatgtgtcaccacgcccagctgatattttttgtattttcagtagagacagggtttcaccgtgttggccaggctggtctcgaactcctgacctcaaatgattggcccacctcagcctcccaaagtgctgggattacaggcatgagccactgtgcacccagcagtctatgcaactttatgaaaattgtttagggctttggacactttagggtcttctgcatatggttttttactcaatactcctgatatccatggaaggaagagagggcgggagaacaaggaaggaagattactatccacatttttcagaagaggaagttgatacttacagaggtgaagt

SEQ ID NO: 85197 - DNA, 1066 bp, Homo sapiens
tccaaattaggggcaactaggcaactaagctctccatgttactcatttttaattaattcaagttgaaattgaagtagctacatgtggtgactggctaccatattgaacagcacagctctagcccctggcctctctgtttcctcttccatcctgtcctgttttccttctttctttggcattgtcgccctggcccatcatatcagccacccactcccctttccttctgtcccacctcctggaaaacactctcaacttgagattaatccaactgtctctttctctaggtctatccaaaggctgctgggcgctgctggggaagagggcatgtgtgtctcatggccttgctggctgccattctttctcatagatagtcacaaacttcaataggccctttaattctgcccagcaagcattatcctcttctctctaatgacctcaagcctccagtgctcccagctcctcccccatcctcagcagatggtgtcacttcctatttcattgaaacaagagacacttggagaccacctgaccaccagttttacaagcatagttttatctgtcttccacctctctcctcctgctggctccagttcctatcaacatttaggcatggtcaaatagccttatcttacaaacaacaataaaaaatcccaaccttccctcaatcctatgtcaccttcctgctgtgaccctctatctttcctgccacttatattcacactttcttgaaagttgtctacacctgctatttccactttctcacctcccgttcactccacaaccccagacagcctggcttctgtccctaccactccctgcaaccactagtcaaggtcaccaatgacttccttgtagtttgatccaaaggacttgtttcagatcttatcttgacctttaaggcatgtgactcaacactgctcagcacccctccttccttgcaacgctcttacccattggtttctataacacccgagtcccctggttttcctcctcctcctctggctacttaaaagttttcttgaaactgccgcattctccccctcctagggtgatccgtctggcttca

SEQ ID NO: 85198 - DNA, 1072 bp, Homo sapiens
gcgcggtggctcactcctgtaatcccagcactttgggaggccgaggcgggcagatcacttgaggtcaggagtttgagaccagtctggccaacatggtgaaaccccgtctctactaaaaatacaaaaaaattagccaggtgtggtggtgggtacctgtaatcccagctacttgggaggctgaggcaggagaatcgcttgaacccgggaggcagaggttgagaatgcgccattgcactccagcctgggcaatagggcaagactccatcttaaaaaaaaaaaaaaaaaaaaaggctctgtggacagaaacaacattcaggaggaaggcttggaaagcacttctcaatccagtcttgtagatgctccaaaaggtaccccagtcagctgagcaccccaatttgcttcttttccattcctctttgctggaatgtcttttcctgacttgggttttgatgcgatgccatcagcttacattcagggggatcacagaaactgtccaaccgagctcactgttgtgactgttttggggatgttgtcagggacgtttgctcattaccccatactgtgttccctttctgggccacgcccccacaagaaattcctatctgattttagtaccaagaatagttgtaattcccttgagcagtaggtctgtttttatctcatggacactgggaattgtgtaatgaacatggtctcctcattttagctgcaggaaagcttagggacaaatttgtggcccactcagaagaggtgtagaggttggaactccagggtgcattggacctgtatcctcctctcgactttgtctcccttcttagcttttctttgttctcttacttcatattttactgtgcaaaactgagagcatacaagcaaagataaataaaaatcacctgtaatctcattattccgagataaccactattaactgtgttgtctttttatgcatactttttaaaaaattaaaatgacattatactgtgtgtttttaatttgcttttttcatattataatatgtcatgaacatctttccctgtaattaagtgttctctaaatgatttaaaatttctgt

SEQ ID NO: 85199 - DNA, 1152 bp, Homo sapiens
gtgcgcgtgtccagcacctgcggccggcccccggcgcgctactgcgtggtgagcgagcgcggcgaggagcggctgcgctcgtgccacctctgcaacgcgtccgaccccaagaaggcgcacccgcccgccttcctcaccgacctcaacaacccgcacaacctgacgtgctggcagtccgagaactacctgcagttcccgcacaacgtcacgctcacactgtccctcggcaagaagttcgaagtgacctacgtgagcctgcagttctgctcgccgcggcccgagtccatggccatctacaagtccatggactacgggcgcacgtgggtgcccttccagttctactccacgcagtgccgcaagatgtacaaccggccgcaccgcgcgcccatcaccaagcagaacgagcaggaggccgtgtgcaccgactcgcacaccgacatgcgcccgctctcgggcggcctcatcgccttcagcacgctggacgggcggccctcggcgcacgacttcgacaactcgcccgtgctgcaggactgggtcacggccacagacatccgcgtggccttcagccgcctgcacacgttcggcgacgagaacgaggacgactcggagctggcgcgcgactcgtacttctacgcggtgtccgacctgcaggtgggcggccggtgcaagtgcaacggccacgcggcccgctgcgtgcgcgaccgcgacgacagcctggtgtgcgactgcaggcacaacacggccggcccggagtgcgaccgctgcaagcccttccactacgaccggccctggcagcgcgccacagcccgcgaagccaacgagtgcgtgggtgagtggggtgcggcggcggagccggcggcgggtggggccgcgggcgggagctgctgggcctcgcagcggcgagttcataggagcgcgggtcgagggaacggcgggaggcgcgttcgccgatgcccgggacccgggagggctcagagcaggtccactcgctcgcgtggcgctcgtggtggacgcccgaatttgcgcccagtgctctctgcgaagccaagaagcagcaggagaaatgttcccgggagggggtttggcagaacatttgcagataggtctccgctaaccctggatccaaacgcaaacattcattgccttccccct

SEQ ID NO: 85200 - DNA, 4118 bp, Homo sapiens
agagttttgagcaagggaatggaaaacatgtcttggagggccggatcgccgcagaggcccagtcaggcgtcctggtctgaagacgccgggcctcccgcctcctgttgcaagggaggcctccatttttacgctcgtgtcccgctcttgcagacataattgtttgtcccctttcttttaaggatcagaactagtttccagtctgaagacacttttcaagatttcgcagagagagagagagtgtagttacactccgacttagtagtcttctagaataaaattcctttgatctgctcagttccctcggaaatgttggtttttcccatctcttcttttccccctccttcctcttttcttttcttccctttgtgcgtaaaagccctttattgacatttaaagggattcccagggttttgctatcagttttagtttgtatgtgcatatgaaagataactttgtcttgtcaccatcagggtctaattggacaaatgcaagtgaatacatttaggcgaataaacttgatgtggtggtgaaatttctctggcttgaagatttgccttagcgttggtattgttcagattcaccacccacccccaggtcttgccgtcagtttggatgtggacacgtaacctgcgtttgttataatgatggtcatgcacttgaaataatctctatagtttgggattttgtctcttgaccaaagcactaactatgcacacaaattggattgacctttttttttattggctaaattgagcaatcaacatattaacgaatgtaattagtaaccgtttttgttcaaaaagtttaattaggcttaataagtacataatctacatgacaaatgattggctaacaatatttttctgggttttactgaagttattttaattcccagtagttaaagtatctttaaatcttgccaattattcagtcatctcataaaagcaaagccaattcaactatgttaaagttatttatagtttcctttttgaatagatgttctgataccttgtagatatagctgggaacatcagattgaagttcccataaagtcttaattgaagtcttagtgatttttccatcattctgtaaaagagaaagacagcaaggacaatttaggggtgatttacaattaaaggttgagctttttatgaaaaggccctgtagtggagatatgtgaatgaattagtatttgacaggtgttctgagatactaaagggcactgtgctaggaaaaagcattaataaatccttcaaaagtaactttggactatcagaggctcagattttcctcccaacataatctcttcttgcgaatttcacgctgttgacatataaagtcaagctacccagagtatttacaactatggcaaagtcaagaagtatatattttttaattcccataatcagtcttaataacaatgagcctattactgtgctgtttggtctttgcttttataaaataatgatatgtgatttataataaattgaaatggtacccttccctaggttaaccctgtgccccaccctcccgcaaagaaaaccccctaaaatttaccaatttaccaatattatcatttgactgaacagtccttcgacatagggccatggtccttatagatgactaagaaatgcacatatcctatatgttttctttggtccagttttcttttcggtgttgtttcaaggtcaagctttctatggaataaaatgtgaacgttcataaagcccagttatactttaaatgcagttttggatttcttccggggggggggaacaaacaaccctcaaaacaatatgaaagacaagacgatgtataatgttacggccttgacagctctcagtggaataactaaatactttcttccgcccatatgtatcagcagtgttcacatgcttttatacacatgtgcattcacattcattgtgtaaagaagtacccatgcatggtggggctgtgtgtacattcaaggcaaaatgcatgaacagttgtaaaccacctgggttgctaggccccttcccccctccccgcccttcccttttttcaaaagagcatctgaagaccatattgtgtttcataaattatcgacatcagttttaatcattgtccccctgacgtcggagctgtgttagtatctagtatttagcatgacgaagcatgctgtttaatcttactgtggagttgtcagcatgagcccctgcctggcttgtgacaggtcgagcttatgaaaacttgttttgcgactcactctatggctttgcattgctcagctgtaacccaaaacccacacaaaaggtgtctctgcaagacgagcaccgtgctgggttggcctcttaatggtcataggtacctgcaacataatgcttgtgattgtttaaatgtggctgtgggttgggggtcgggggatgtcctcatgctgtcaatagctctggtgcttgggtccaccctcattcatccctggcaagagagggaggttatattggaggtgttgccatgagaaatccaatgccccactaaagattcttgcaaaaatcagaaagctgaaattatttgctgcttagtccagagcctggcacatagctatagatgagtgaatgtttttaatagtcataataattattatgattattgtcattatgatgattaaccctggaggacttactctttgccaagcgctcacattaatttagacatttaatcaccgtgactacgctaataatagggactgtaattgtacttcttttagagatgaggaaaccatggcctagagacattagatggtttaccctaagtcacatagctactgggtggtgaagctgggactccagcctgacgtttgtgctttgttttgttgtatccactgtgctgcttttccatagaatgaatggatgggtggatggaagaatggatgaatgaatgaatggcagtgatatatccatgtgtaggagaaaggctggaacaacctattgcttcttgctagaactgggcgtggttccctggttgtgttgcattatgtattttacatcatattattatattttattatattatattcatacatacttaacatgaagttgtatataagaagttttcttttatcttagccatcaggcctgctgggagctgggagttgggactatgaattaagggggtttagatactttcctgggggttcttggcatccacaggtgttgctttcttggccaagtctttcttgatttcagggcctgtagtctctttcaaaggtggcgaagctgagctgtgggtagtcagaacccctctttaagaaggccttcctccagcctggccaacatcgtgaaaccccgtctctactaaagatacaaaaaattagctgggcatagtggcgggtgccggtaatcctagctactagggaggctgaggcaggagaatcgcttgaacctgggaggcggaggttgcagtgagccgagatcacgccactgtactccagccctagtgacagagtgagactctgtctccaaaaaaaaagaaggccttctcttttcaccctagtgttcactatccctttgcttcactggaacgtattgaaaaaatccagaaagtggctgaaactattgttgacaaagagaggaggtggatgggggatggtatgtcccggccactggtgtggtgccgctaggtacagttgacatgagtcagcagcacagggctgtcattcatctctactggccccatggcagctggagtgaggttctctgctggggtcctcattagcacctggtgatcaggaacctcgaggcaaggaggccgctccctgctccacccagagcagggaggcaggttcgtcaggggaaaccttctggggtgggtctgcgtgtttccaggctctgccgtgctctctattagccctgcccagttttctctctgacctcctcctcctgtagaaaaatgagatcctcagaaaactatttgagactttatgtccagagtaaatattggaaaggcagtgggttgaaattcagatgttccctggaaggaatcccctcgttttctgctcacagctggtgtcgatatttccttcttgagatgagttgtgcttttcattaagtaaattttttgtcttgggattaaaccaacat

SEQ ID NO: 85201 - DNA, 2602 bp, Homo sapiens
ttgcctgttgtctggaagcccttgtggtctctgcaggctcagaaggcatggtgttggtctgggtggcctgggagctgtggagtttaaaatgtccgtccatggtggttggggggttgcgtcctgaagacagaccacaaactcctattgagtgccaggcattgtcctaggtgctttatatgtgctttgtttcaattaatcagattgccacaaggaacggaagcttttcaaagacagatgtcctggccatcaaagggcagcttttacacaaacgggactaagtgtggataagtctgcagggcacgtctcggcttattctgtgacactgttgcatgcagagagagcagggggtatcaggagcgtttgcttggaagactgatcacataaaagccgtgtcctattatagccaactcggagggacggttgttctgaatagtacttgaaagaagtgagctgcctgggccagtcctgtagatacagacgttcacctcaaagatatctgctctcatgaggtttgacttgcgtagcacaacttagtgagctcagtattgcattcctgtctccttactccaaaaatggatttctattgtaaactaagaagtagattttaatttgcgttttaaaagttatatcattggccgggcgcggtggctcacgcctgtaatcccagcactttgggaggttgaggcgggcagatcatgaggtcaggagatggagaccatcctggccaacatggtgaaaccccgtgtctactaaaaatacaaaaattagctgggcgtggtggcgtgtgcctgtaatcccagctacttgggaggccgaggcaggagaattgcttgaaccagggactcggaggttgtgatgagctgagattgccccactgcactctagcctggcaacagagcgaaactccgtctcaaaaaaaaaagaaaaagttacataatttatgtgaatttccccccacatcaaaaggccttggctaggtgtgtattcagccccaaatacattattttgtgccagttctcccctctgatggagagaagggactgtggccatgtgattgatgagatacagaatgtctcccatcagacccttttctttttctcccagagcttaagttcctgccccaagcacagttctatcagaggcagctgctggcactcagagcacaaaggaagatactctccgaggagaaaggggtacctatggttcaggagtaccgccaaggaatggaaagctgtgctccgctcttgcctgtgtcaggaccacccccagcaatccctggaccttctgtcattgggattagtgtactaactacagttagggtgaaatgaattcacactgcagtgcattggtgcatgtgaagaagacctagaagaaagatgattctgtggctggacgcagtggctcacgcctgtaatcccagcactttgggaggctgaggcagggggatcacgaggtcaggagttcgaaaccagtctggccaacacagtgaaaccccttctctactaaaaatacaaaaattagtcaggcgtggtggcacgtgcctgtaatcccagctacttgggaggctgaggcaggagaattgcttgaacccgagaggcagaggttgcagtgagccaagatcacgccactgcactccagcctgggtgacagagcaagactcagaaaaaaaagaaaagaaaaaaaaaagaaagaaaagaaagatggttctgtaagtgtggtagacctccggattatttaaagggttcaagtaaatttgttgggtgagaactttaaaagcagaaagtaacactccagttcacttctcaactcagctagtgccttgctgaggaaggtgctagaagtctgtctccctggaggattcaggaattggcctgtgtaaggtctcagctcgctgcacacgtggtcatattttagttgggaacccatctgtgccccctcctggctggtgctattgctagattttctagatttttcccgtgtctttttctgcctgaagatgagagattattggttgttgtgtccaattttcacacatcccagagactccacacttaattgagacaatctgtaggactacagggacctctaaaggggctggctttaaataactgagtcctatgtaaggaaatgaggtagatctctgagtttcctgagggcctgtatgctgtgctgcattccatatttgaagtccccaagtgagggacacttcctgcctgcttgattgccattgtcagggcttctgatttcgtctgtttctgctttggggcggccgtggtgagtacccagcaaataaatgtaccaccactcccgcattctaaaaccagggcagacattggcaatcaacggcagcatgctttcctcctaagtcgagaaatgatcttataatattagactcctcaatataactccttaggcagaattagcccatgagatgaaaactatctgccatttttggtccccttctgaagaccttccccttccccaacctgcagacagagaagtactttgtatacatggacatttctggagcatttactgttcaggtggctctgtttggtctgggcatgtaaagaaatgtaaagtagaccaggtgcggtggctc

SEQ ID NO: 85202 - DNA, 1523 bp, Homo sapiens
cctgtaatcctagcactttgggaggttgaggcaggcagattatttgaggtcgggagttcgagaccagcctggccaacatggtgaaacctcatctctactaaaaatacaaaaacaaacaaacaaaaaaaactagcctggcatggtggcccacacctgtaatcctaactactcagaggttgaggcaggagaatctcttgaacccgggaggccgagattgcaatgagtcgagatcgtgccactgcactccagcctgggtgatagagatggtgtctcaaaaacaaacaaaaaaagaagataaaaaaaaaaaagaaaagaaatgtaaagtggatgccctccctgcaggtgaaatatgtttccatcaaggaggctgtgcacgtgagaaggtgcagacgtgtccacttgcactaaccctgaacagggataggcgcccccagtgaggcactttgctgagtgtccggggtgcagggaggggccgagggtcttgagaggaagagcattttggatttggctcctgtaccacgaaaggattggattttagtccacatcacatttgcctgctgcattggttctgttgtagtgtatttgttttctcccatgccaagaatttgagagaccatggttccctgaaaagagtggtcccccaaggaatgtccgccccgacgtttctgggcaggtcctccagaactgccttggattttgaaacaaaagcttatcactgtccctacactcaaaagaaattatgccccaacctgggccaggaccctggtgcctgaggcttcctggggcttctcccacgtgaaggtcgttccttccactcagaaccacatctgtgtggtattgagggacgaggactcatctccgtcacaaaccactgccctcagtgctctgcttacgtttgggctggtgcagaaagtgccgaacaagaatagttccaatcccagcatgaaaaagaaaacacattgtgtttacagatacagaatttggcatctgaaacgtgaaagtacctttgggttgggcggccccagggcagagctgttggacacggcccccccagcccctaccctcagccctttggccagctcgttttcctctccccgaagccagacctcagaggtgggcaggtcgatctcagccaactctttattccgacacccagccctgtttcactctatggctcagaaccgggagagaattcacggtgagaaagtgcttggccttctgagctgccatgaggaaggaaactgcttcttgctccaatccacagaaatcaatccttttttttttttttttgacagaatctcactctgtcatcgaggctggagtgcaatggcaccgtgtcagctcactgcaacctctgtttcctgggttcaagtgattcttctgtctcagcctcctgagtagctgggattacaggcacccaccatcacgcccagctagtttttatatttttagtagagatggggtttcaccatgttggccaggctcgtctcgaactcctgaccttaggtgatccaccctccttg

SEQ ID NO: 85203 - DNA, 4836 bp, Homo sapiens
ctcctgcctcagtctcccgagtagctgggactacaggcgcccgccaccacacccggctaattttttgtatttttagtagagacggggtttcactgtgttagccaggatggtctcgatctcctgaccttgtgatccgcccgcctcagcctcccaaagtgctgggattacaggcatgagccaccgtgcccagacgggttttgattatttttgaacttggtataaatggaatcatattctggcttcttttgctccatgttacatttgtggtcttcatccatgtatagtagtagtttcttagtttccattgctggccagtattgtgtgatataaatgtatcacagggtatttctccactccacttacggcaggcatttgggctgttcccaggttttggctattaacagtagcactgctgtgaccatacttgtccatgtcttttgatgcacatctgaatgcacttctgctgggtgtgtatcaagaaggggaattgctgggtcctagggtttgggcatctgttcaatttcacttttatttttaacattttttgagacaaggtctctgtcacccagcctcctgtcatccagctttctgagctcaggcgatcctcctgcttcagcctcctgagtagctgggatcacaggtgcacatcaccgcacttgggtatttaaaaaaaattatttgtagagggttgggcatggtggatcatgcctatcatcccagcactttgggaggctgaggcaggtggatcacttgaggtcaggagttcaaaaccagcctggccaacatattgaaaccccatctctactaaaaatacaaaaattagccgggtatggtggtgcacgcctgtaatcctagctacttgggaagctgaggcatgagaattgcctgaacctgggaggcggaggttgcagtgagccaagatggtgccactgcactccagcctgagcaatagagcaaggctctatctcaaaaaagaaaaaattatttgtagagacgggggtctcactatgttacccaggctggtcttgaattcttgggctcaagggatccttccttctcagactcccagggtgctgggattacaggcgtgagccaccatggctggcctgttcagctttaatagacagtggttaaactctctatttagtggaaagtggttgtacaaatttatatctgtatacagttttacaggcaaagaaactgaggcacatggaggttagttaaggtgcctgaggtcacacagctagcaggtggcagaactggaattggaatccaggcagtgcagctctggaggcttgcttttcaccactgggccaagtcgtctcttatctttttttttttttttttttttttttttgtagagacagggtctcgctctgtcatccagtctagagcacagtggtgcaatcacgtctcactgcagccttgaacttctgggttcaagcaatcctcctgcctcagcctctcagagtgcttagattacaggcatgagtcacctgcttggcctgccacttatctttaatctgcatactccctgacaggaaaactagtaatactgggaagcaaaggtgactttgtacaagtgtctttacttctctgggcctcagttctctcctgtaaaacgaggggttgggtcacaaaggtcatgtaatgatattctgtaggtctagtggaatatactgccttcctgaggacttcttcagtcttccttaacgaactcaccccattccctgctcaaccagaagcagctctataacttgaatgatacattttccaaccctacccctccactggggttccctcaaaggactgctcaggctctaactggaggacctcacttgggcctaccctccaaccctactgacaatttccccacctcccactctccagctcttccacttgcaggggtggggacatgggactctccctctttgccttccagtgtgttcgctagctggtcttctctctttaaatcatgagtgttcaggtgtatgaattttcacaaagtgagctcacctctgtgtctaccactaacatgaagaaatacagtatttccagaaggctcctcccaaccccccagggtaaccaccattttgacttccaacacaatagatttaatttgcctatttttgaactttatgtaattgaaatcatactgtatgttctcttcaatatctggtttcttttgctcagccttatttccttgtaaatagtcttaaacataacttttcctatagtctttgttagtttgatggatgatctcaacttcttggggatactgatcctctcgcttattttgtctgctgacctttgctcatggtgaatgatttccttatgtgttttgtactttctgactgtgagcttatctttatttgggatttcgtggaaatcccactgctgttagttatggaaatgcccctatccatatgattttgcattaattctgccagacattctagaggtatcactggactaggaccaaattttccattaattaatcatcttgaaaattattatatcaaatgaggagtatgtacttggcctctaaaccttcccaggcctggggtttatttttctccctcactgaggactttttctgcctttacccagaactctaggtagagacaaatttttgctgtcaccttagcccgatggacaaagcttcttcgtccccttttgacccagggggcatttggaaggtccaggtttttctgctactgcgattacagctgcagtttcctagctggtctcccttcctttatctttgtccctcagcctccctggtctcttcttaacacagcagccagaggtaactgcctgtgtgttagttccctgttcactcagaggaacacccagaacacttacaacggttgcaaagccctgtgtggtctggcccctgcttcctctctattctcatctcctggcactttgctgctcactcagtctgttccagctcccaggcctccttgctgttagtgggtacacagcttatagccctggtacagcagctgagtctgggcttgagataggcccaaatatgcaaataaatgactccctaggttccttcaagtctttggtcaaatatcacttctgtgaggcttacccggactattctatttatactgcaaacagctcccctatttgtgtctatcggactctctctctctgtgtctctctctctttctctgtcttctcctctctttctctctctccacacacacacacacctgagatcacccttatcctcccctactaactccttttccccataacactcataccacctaagacactatttaatttacttatttattatgttcttaattgttttcccctcctcccatttgttcctttctatcacttgttggaatgttaaggtacataaggtcaggaattctcttttattcacagggggcctggcataagtaggtgcttattaaatatttgataaagaaagcaggggtcccatttgcaactcctgggcttgcaagacctgaggccttatctccggtctgtgtgtgggtgctaaatcctaagctcaaggcattaaagcctgtttccaggtctaataatcagtcagtctttcccctttctctatcctccctgctgttccctccctcctcccacacacctcatgatcactggggtctcagggtttctcttaacactttggctttcagatttttctttcctctagcacctggggatttccttttatttcttatgagatctgctattcattaaatttttttaaacttacatttcatctagtatttctagatgcttgcagtggtaggggttctgcattacctcagtccaccttgttgccagaactcgaagtaatatattttaatctttcacacatctggaattaatcgtgacatatggtgtgaggtaaggatatccattttttcatcaaatatttagccagttattcagtgacaactattgagaaacatcattttttgtcactgatttgagatgccatatttattaaatgcttaagtattatataaacttggatctgttctctggatttttccattttgtttcacaaatctgttttcctgccactttctatctgtttggatatttcagtatctggtaggttcagtattcactcattattcatctgttcattttcacttattctcattgctattcttgcttgcttgtttctttatatatttatttattggctttagatgagtttgtcaagtttcattacaaatgccattagtaatttgacagcagtgttgttaaaatgaacttggtgatagttgaaaacattgtaactgtatcaacatgtctcttgtatgtaatgatttgattatttaaatgtacccaatagggcttttaggatatcagaaaagtaggttttaagtctggtcaaaatcatgaattgtacttatgtgtttctctttgattcttccagatgatttttttttacagatttattgagatataattgttcagtaaattgcacatatataaaaagtataacttggtaagtttgacttatgtatacacctgtgaaaccatcaccacaatcaagataaataacatatccatcagcccaaaatgttcctgctgtcttggtaatccctcctgcccctttccaccatggtgccttctgtcattgtatatctgtttgccttttctagagttttgtgtaaatggaatcatacggtacgtgtggtctggtttctttcaccttccatgcttagttggattatttattcatccatcatgttaagtgcattaatagttcaatcctttttatttctgggggggtattcattgtattgctataccacaatttttccattcacctgc

SEQ ID NO: 85204 - DNA, 1042 bp, Homo sapiens
gccaatcttttagaaattttagccattccaatagatgtgtggtagatacccttccaattttaagttttacaatttggaagtatagaacatctacatttatttatgtcttcttttatgctattcagtaaggttcataaatttctttatattagcatcacacattttttcagaagagtttacttctatgtatttataattttgattactattatgaaagggattttttccttctcattttattttctaagtgggtattacaatgtatagaaaagctatgaactatatatacatttttatgtattttgcaaccttcagctttactaaactctttttaattcgttctcacagtgtttcagtttctctggacttcaactatatatatgaatattttagcccttcttttccaatacttgtactatttatttttcttgtcttactgcattggatagaatgtcaaagtaatggtatatataataatggtaatgtactcttgtattactactgatttaagtgagcacatttctagagtttcattgttaaatatgttgtttgttgctagtttcatatggatgttctttattgtactcaatggagagacctctattcctgacttactgggagggttgctctttcttacttttttttttgtttgtttttttgttggagagataaggtcttgattggttgcccaggctggagtgcagtagcatgatcaatcatagctcattgcagcctcaacctcctgggctaaagcaatcctcctacctcacactcttgagtagctgagactatgggtgtgcaccatgcccagctaattttttaaagaaatttttgtagagatgaggtcttgctgtgttgcccaagctgatcttaaactcctgggttcaagtgatcctcctgcctgagactcccaaactgtgctctttttttaaaaaatattcaagaatatgtagaatgttaatcctttagatattaatcaaaatgatcatatcatttttctgctttgactattaatgtaatgcatttctttaattgatttctg

SEQ ID NO: 85205 - DNA, 1496 bp, Homo sapiens
acgtggtgaaacttcgtctctactaaaaatataaaaattagccaggtgtggtggtacacatctgtagtcccagccactcgggaggctgaggcatgagaattgcttgaatccgggaggtggaggttgctgtgagctgagattgggccattgcactccagcctgggcgacagagtgggactctgtcaaaaagaaaaaaaaaaaaaagacaactaactgtgtttaactttttgaggaatgccagattggttttcaggcagttatactgttcctaggaccctagaacccaccagcaacatatggggatcctagtttctccatacccttgaaaacacttactatctatcattttgattatagccattctggtgggtgtgaaggggtatcttgttgtgcttgtgtgatttcctaagtttgaaatattccagcattcttggaatgtatctatttggtgatgtgttattctttactaacattttattttagatttttatgcctatattcaaaagtgagatttgagctgggtgtgatggcgcgcctctctagtctcagttctcgagaggctgaggcaggaagattgcacgagcgaggggtttgaggctataatgcgctatgactgcacctgtgaatagccactgtactccacaacatagtgagactctgtcccttaaaaaaaaaaaaactgtgaggctggcgcggtggctcacgcctgtaatcccaccactttgggaggccgaggcgggcagatcatgaggtcaggaattcaagaccagcctgaccaacatggtgaaaccccgtctccactaaaaatacaaaaattagctgggtgtggtggcgtgctcctgcagtcccagctactcaggaggctgaggcagaagaatcacttgaacccaggaggcagaggttgcagtgagccgagattgcgccactgcactccagactgggcgatagtgcgagactccatctcaaaaaaaaaaaaaaagtgagatttgtctgaccttttgtcactttatattgccttttgtatcaaggctgttttaaccttataaaatgaagtgggaagtttccattctattttatgctctggaatagtttaagtaacatgagaaatagctggtccttgaaggtttgttagaattagcccatctgagccctgtgtcatttttgaaagtagttatttgacaaccatttcaatttcttccatacttatgtgtttattcagaaatttttcaactgctttttgagtcaaatctggtaatttgtttttttttaaaaatcatttacccagattttcatttttcaagcataggattctatataataatcactaaaatattttttaatgttcatatatggctatatcacctttctaattgctaatagcaaacattttttctcactctctctttgcctaggtttgtttgctttttgtacatttgtgaaagtgataataataacatttgatcatatttaatgaacactcactgtgtcctagaccc

SEQ ID NO: 85206 - DNA, 1501 bp, Homo sapiens
ttttgatattccttttgttcctggagttatttatgaattgggttttcatctccaggaggttatatcctttaaaatatttttttaaatgtccaattttttttgctgtttccggtactttttttttttcctttttggggcggagtctcactctgcggcccaggctggagtgcaatggcgcgatctcggctcactgcaacctccgcctcccaagttcaagctattctcctgcctcagcctcccaaatagctgggactacaggtgtgtgccaccatgcctggctagtttttgtatttttagtagagacggggtttcaccgtgttggccaggctggtctcgaactcctgacctcaggtgatcccacctgcctcagcctcccaaagtgcaggcattatagacatgagccaccacaccccagcctctggcatgttttttagtttggtttttgtttgttttttagaataatctcatgtgtatgtaagatcacctcttgtcagtgttccgcaggaattgaagaggaatcctgtttgtagggcacaatgtttatatttattgactcaatctaattgggattttattctccagatactctatattcttgttttcctttttgcctgcttggggcaaaaaaaaatattcatggaagtctttaacatgtaactcgatcttccacagattaagtgacaaagtcattcaacttcttaaatattaacatgtgcaaaagtacataaggcaaattagcacagagtaaaagcggggggtcacaaaacagtatgcgaaaagtagaattcagagcagagtacattatacacaaagctaggttaatttgtacagatacaggaaaaaaatgcactgtcattaacttgaatggattatgaccccggcctcggactcctccttggtacacaggggaagttggcctctcagttctttcccgtgctcacactctaggatggtggttttggggttcactactaagtgctgccagggatggaattaactgggaataggattagaagcaaagaagaggccagaatgattcctagcctgaagctggagcagtttgagccgacagctggggctgagtttattgctttggctcactcccgtctgtacatgagcatctgcctcattgccttttggcctggcaaaggggatttgctgaaatagaaatcagtctgcaaggaaaggatggtgaggccacagcgactcactgacatggggtgccacctcccgtcatgaaatatgaccccaaatggcttggtttggctgtgggatatgccaacaccacccccgggagctctcagctctgtggaagagcatttccataggcagcttcctacagaaacgggcaggcgacccagcttcacgcctgcctccatttctccttatccttctgccaaggggtgattaattcatggaagaaagatgggatgctaaagagaggagtgtgtttcacagaataccagaaccatgagaaaggctgaaaattaatgagctaagt

SEQ ID NO: 85207 - DNA, 1422 bp, Homo sapiens
actgtatgctactaaattttctaagtgtcatttccgtatcatcattagcaaacccctggagaatttcaacagagtggtccatagaccacttgaatcaaattcttaggtggaatcaaagaaaaaacataaattggactttatcaaaatttaaaacttgtgcttcaaagatacaatcaagaaaatgaaaagacaacccatgggatgggggaaaatatttgtaaatcacgtgtgatgaaggtgtagaatgtgtaaggaatatgtaataaatcttagaactcaacaacaaaagacaacccagtttagaaacgggcaaagaacttcagtggatgtttttccacagaagatacacaaatggccagtaagcacattaaaagatgcactaaatcattagccatcagggaactataaatcaaaaccacaatgagataccactttacattcactaggatggctatacttgaaaagaaaggtaataacaagtgttggtaaggccatggagaaattgaaaccctcatgtactgctggtgggaatgtaaaatgatatggctacttttgaaaataatcccttccgaaaccccccaaataagagtccaggcatggtggctcatgcctacgatcccggtacttcgggaggccaaggtggaaggattgcttgagcccaggagttcaagaccagcctgggcaacatggcgaaaccctgtctctaccaaaaagatgaaaattagctgggcacggtggtatgtgcttgtagtttcagctactagagaggctcaggcaggaggatcgcttgagcccaggaggtcgagttacagtaagctgagattgtgctactgcactccagcctggttggcagagaaagaccctgtctccaaaaaaataaataaataaaaaagagaaaaaacaaaagaaaataatccctctgaaatgagttgtgatacgatccagcaattccattcctagatacacgaacacaccttacagatattataggttcagttccagaccactgcaataaagggagtatctcaataaagcaagtcatacaaattttttggtctcccagtgcatataaaagttatgtttacgctatactgtagtctgttaagtgtacagtagcattatatctgaaacatatacatatcttaattttaaaatactttattgctaaaaaatgctaacgatcacctgagccttcagcaagtcataatcttgtcactgttggagggcttttcctcgctgttgatggctactgactaatcagggtggtggttgctaaaggctgggtggtaatttcttaaagtaagacagcagtgcagtttgccacatcaactcactcttcctttcatgaaagattttgctgtagctgcataatagtattttacccacagtagaacttttttcctaattggagtcgatcctctc

SEQ ID NO: 85208 - DNA, 1246 bp, Homo sapiens
gcctgtcctttgaagctaggcattgacttctcctctgtatctatgaaatggcgtcttcgtccaatagaaagctgttttgtctacactgaaaatctgttgtgtagtgtagccactttttttttttcttttttttgagacagagtcttgctctgtcacccaggctggagtgcagtggcgcaatcttggctcattgtaacttctgtctcccgggttcaagcaattctcctgcctcagccttccaagtagctgagattgtgggtgcccaccaccgcacccagctgattttgtatttttagtagagatggggtttcaccatgttgttcaggccggtctcaaactcctgacctcaggtgatccatctgccttggcctcccaaagtgttgggattacaggcatgagccaccgcgcccggcggaaaatgcttcttaaaataagcatttcttagccttttcctggcttaatgaagtaaaatctctgggatggagcctagaaatctgcactttggtgaatgcattagatgaaacaagtgtacacagagttttaagaatcactgtccactgatttcagtagaattccaaataataattgtaaaaaatgaaatgaaagaaagaatggtgaaaatagaaaatcaccatttgacaaaaagttcgtggtaatagttggaggcaagaatcacaaggtctgctaaagttagggggtaaaaatatgatgaaaaatagaatatttgcataatgctagttagagtaccttcccgcaaccacagaaggaaaaagaataacttacagtgaagaaacctaaagatgccacctgaaccaactgatcagaattaacatcaccagtaatgggccacctgaaccaactgatcagaattaacatcaccagtaatgggccacctgaaccaactgttcagaattaacatcaccagtaatggacatagtgacatcatgtgccacctgatatgtgatatgatggcccaggaagaatactttgcttctgcaggattcttgctaacctgaatttaattttgaggaaatacgagatgatcccaaatgagagacattctagaaaataactggccattactctttaggactatgaaggtcattaaagacaaaaagagactgaggaattgtcatagactggaggagactaaggagacgtgagaccaaaaggcagtgtaagattctgaattggatctagacaaagacatgtgcgggacagttggcaagatttgaataaggtttgt

SEQ ID NO: 85209 - DNA, 1049 bp, Homo sapiens
gaatcgcttgaacctgggaggcagaggctgcagtgagctgagattgcgccactgcactccagcctgggcgacagagcgagactccatctcaaaaaaaaaaaaaaaaaaaaaaaaccctagctggactcccagctctgtcatgtaccagctaaatccagagcctctcagcctcgttttcatctgtgaaacggggatgaccatgtctatgtcctaggatcactggaagggtaaatgaaatgatgtatgtgagatgctaagtgcagtgcctgccttaccaggtgctcaggaaatgctggccctcccctgtggttcaagcacccagagatattttctccatgagtcagctcccagtctccctcttgccctggagcaaaagaaccaatcctgtccactaggctgtttcagcttggcaaggagccatcgaagccccctgtcctgttagctgagaaaaggtgtgtcctgggagagagaggattttgacccaggttgagatgggaggtggctctggcaggcagaggacaccctggggaccctcgggaaggcagcctggcctgggagctttctcacaggctctccttggcaggccacttaaagttacaccgacttcaaacaaaaagggtttgcagacacaaaagaaggctcaacctggccagtgccaggcctggcttggtatttgagttcagaaatccaactccttggagctcgcagacaggccccaccatcccggtaaacactccaggaatgccaagaacctgccttagagctcccctcccgggattgcttctgttgctgaccctgggtccggattcgttagaggtaaataagagccagtgctcccagagcggggactgtgcaacaggccaaggtggggctccttgtacctgtcttcaattccaacccctctccactttgcagtatgtgggtgtatgtgccgggctagttttcttaatggattatttttcctccagctttattgaggtataattgacaaaaattgtatgtatttacaatatgtaacatgaagttttgctatacatatgcattgtgaa

SEQ ID NO: 85210 - DNA, 1051 bp, Homo sapiens
tctaaagcaggtcccctgtggacgttgctgtagaacttctgaaaatgagtacttctcccctccctcccacctccagcagattcggattccctggaggacaaggattccgactgttatctttctgtcctcagggtctagcaggatgctggcacattgcagatgcttagtacatatacagtggataaatacatcagtggaaaatatgaaaaaagagacagccaccttcggcttcttgcttttgggggcagcctatttagagaccatgaataagaaaagaaatgaaggaaatctgtgaacccaaatgaaatgaccagctgtatgaagggccagcaaatggctcatggagctagtggcttcacaggtgaaaagggagtgtctagcctcccttaagcagggctcatgaaggtgggccatgcttcagccacaccaggtcaggcacgtagtccccctcactcaaggacatgtgcttgagtgccttgggctaccaagttgcctttcccagggactgggtggtctcacgtttgccttggcagggatccccgttgggtgcctgacatctgattttttttagatactgtgatagtaaatgcgaggctgccatgaaaaaggagactccagcctgatgggaacgaagggcggacagtgaacacgattctctctcccagagaaagaacctagcaactgggttagcatttccagaaggctttttgtctgattcacaagctaatttcagcagcagagtgattatctagaacaatgtgccacacagagtggatccccgaagagccgagatgttaacttcaggaggaatcacttattcaggcctgcccgaggcatggaaacacgagagcccgccttgggagaagccgcctgcccaggtcggcccgacctgcctcacggggaaattggcttccactttctctttgaacaaggatggagggtgaatggaaggcggggcagcgagggaaggattaaagccccctgtttgttctataatggggatattcatcttgccttgtagaggggggtcttttactggaatgaaaaagtt

SEQ ID NO: 85211 - DNA, 1069 bp, Homo sapiens
aagggagccaaacatgagagaggcagacagtagagtggtttaagagcccacaatctggagttagactacctgggttcaaatccagactcggccacttcctggctgtggctctgagcaagttctttaatgtctgtgcatttcagagtcctcctttcaacaatggagataatgatagtacctgtctcagagggctgttaggagcattaaataatttcatacacgtaaagtgcatagaatagcacctggtacacagtaagccctctatattatcattcatggtgatgcctacctgctacgtggccggcacatgctgaatcctgggtttaatatgacggtgactgaggtgtggttcctgcccacaaataaccctggggaaaatgcagcaggtacagatggaggaacttacgcaaatcctcaaaaatctgaacctagaattgcagtgtgacccagcaatgcctctcctaggtatttacactgaaaacaggtatttagaactgaaaacaggtattcagacaactacttgtatatgaatgctcatggcaacattattcacaatagccaaaaggtggaaacaacccacatgtccgtgaacaaatgaatggataaacaaaatatggtctatccaccctacgtaatatcactcagccagaaaagggaatgaagtacaacttatatatgctacagtgtgaaggaaccacagaaacagtatgccaagtgaaagaagccagacacaaaagggcacatatgatatggttacatttatgtgaaatgtccagaagaggcaaagcagattagtgattgccaggggcgggaggaaggggaaatggggagtgactgcctagtaagttatggaatctcctttagggaagatgaaaacattttgaaactagacagaggtgatggttgtacagctttgggaatgtactaaatgccaccggattgtctattttaaatgactcattttatgttttgtgaatttcacctcaattacaaaaaaaaaaaaaaaaaaagacccttgcagatgggaagactcaagagggcaagtctaaaccaccagggccacgtatgg

SEQ ID NO: 85212 - DNA, 1040 bp, Homo sapiens
ttaagagatcgagaccatcctggccaacatggtgaaacgccatctctactaaaaatacaaaaattaactgggcatggtggcgcgtgcctgtagtccaagctactcgggaggctgaggcaggagaatcacttgaacctgggaggcggaggttgcagtgagccgagattgtaccattgcattccagcctggtgacagagcaagactctgtctcaaaaaaaaaaaaaaaaagtaggcaacaaaggtttaggatgaaggtataatttaaaaagcatgaagttgaaaaaattactcaaccacagtgaccttggttgaatcaccttaggttgtttgctttgcacaggggaaagatcatcatgttcttttgtagtgatagagcattctgatccaaccaacagagccccatggtttctagggaggtggagaaggcctggtggaggaggaaggggagggctcagttcctttctagaacttgagtgtcagttgaaaatagagtgaggaaggtggcagttgaaaatagagtgaggaaggtggctgattctaggcaggtgagtggaatgagtgacagtggcccaaagggtaagggggggtctggcctttctagagaacatgtgtcaatgagacagttggctggaaccttggctcccagtaggagcataggaggagatggagcagagaccgggtatgggcaaggtggtggccaggctaaggaaggtggggtttatctagacaagtggttgtcacattttggcctgcttcagagtcacagattgctgggcccttcctcaaagataggtttggagtggggccctaggatttgatatctaacaagtgcccaggtggtgttgatattgctagtctgtccacatttggagaaccactggtaagcgatgggcatccaggagcagtttttttgttgttgttgttgtttttgttttattttgttttgttttgtttttttgagacggattctcgctctgtcgcccagaccagagtccagtggcgtggtcttggctcactgaaacctccacctcccgggttca

SEQ ID NO: 85213 - DNA, 1065 bp, Homo sapiens
caatggtgcgatctcggctcaccacaacctctgccctctgggttcaagcgattctcttacctcagcctcccgagtagctgggattacaggcatgtgccaccacacccagctaattttgtatttttagtagagacgaggtttctccatgttggtcaggctggtctcgaactcctgaccttagatgatccgcctacctcggcctcccaaagtgctgggattacaggcataagccaccgcgcctggcccgattttttaaaaaataggccttttcttaagttagacccttgggagggaacagtgtgtcatcctcgaatttccaaaaggggctctaagatgcaggaaagagagtggctggtggctggtgtccacaccatatggcggcagtacagactgacccacggctctcttcccagctggtgccttgcactcagcatgcatccacccctccatgagtacaggaatcagctcatctgctcttcaaagtatggagctgaattttcctatccttgcaaatagcctcttgcctcctagcctggcttcctccaccgttcatcaagacttcagtaccaggagcactgtattgatgaatttcacaatcccgtggggataaaagctgctaaaacacttttcccaactgctaaattggaaccttttagacaccgagatctcacttcccctcctaggaattttcctattaaaacattttaaaggtctattcaactagtttatagctatgggaattaaaaaaaaaagaatggaaattaagttctagggacatgtctttttggtcttctttaagaatcagtctaatttccacttcattggctttttgttatttcaaagcagaagaatgaacattttctcatttcgtatttcgtaatgaggaaaccttagcagaacctgtatataaactattttggtttgactatggattaatcactttcactgcgttaaaaacaaaataatgaagccaaggaggttatttccttttcaagaggaggttgaattttctgagcagctttctccctcaaacttctcagagtcttcaccttggaggcctcgccc

SEQ ID NO: 85214 - DNA, 1032 bp, Homo sapiens
gcttcacaccagccccctcccgggtggccctggagcctgggttatttgctgtttttttttttttttttcaagcgggcaccacacccgtggactgtctgccaagaaggaccattgttcgtgagaattcctccctggctccagctaacccttagatgcactattctgattttgtgggcttgaattcttattttcttaagcctcacttctacccctaccccccaacttattcttgccttctctcaacccggccttctcatcaaacctcattttgttgcccaaaaagctttgagaggtgggcggggatgtggaggtgaagcccttcaggaaaattgaaggtggctgtttgacctggtctccggagtagctttgcgtgcccgcctcggagaggaggcagggaggccccctgcattctgggagaggaggctgtcgggtaacctaagttggggaatgcagcggtgatgggaagtgagtgggaggcaggggtgggaataagcgggaggagaagataggctaaagaatgaaaagcaatatctctccccccagaattgagttgattaacctgtagaaagggaggccctgccaagcccaacttccttgtttccagaaaccttggcacggaggccccgtttctggcagaggcctctcctagtcggggaaccagcaaagcagctgctgtgattttctttttcctctcatttctggcaatccggaatgggactgtttacttttttcttcctctttccttccccaccctcctgtagcagggagttggttctggttaatgttgaagatcataacatgattaccccaaagtctcctgaaattaaatcacttttcttcaaagagaaaggggtggggggaccgtctggctggtaggccagcgaggacgagcggatattgaaagcagcctggcagctgtgattcactttgcacagcggaggcccggcaaggcccaagcagccatgcacaggggccgcatttgcaaacagtggctgggaggagtcgcgtatcccacctgggccccagacacct

SEQ ID NO: 85215 - DNA, 1056 bp, Homo sapiens
ttggccctctttcgcgcagtgagttcagcactccctctttgtggctgttttcctgggctgtttcctaccgtttttcattcaagggaatcagaggagtgggaaaccatgtggaagcaggatctggaagatgctcgattcttgttgctggtgtcccggtaccttgagctctttgtttggggccagtgaccagcctgggaggcccaggaatcagtggctatgttgagtgaagactttaggggattggtcttttggcgccaagagggcaccagttaggcagcagagggaccatttgagagaaggcagtggtgccggctctcgcgaaccagtgcgggagggaagcctgacaggggcgaggtggcttcctgcaagacggcgtgtaagctcagcaactgcatttttctgaggaattagggatgggacgcggccagcccgctctggttggagcttggtgctgtgactcattctcatcaagggtcactgagcgtctctctgcgcgtggccttgggctgaactcctcacctggccagccttctcgaaaatgtgtgtcattccttgtgaggcagagccatggagcgggtgagtgagtgtgcaaatcagtggaaattcatctgcaccactggaaaaacaactccaagttcatgacttgttggcttcagaggcgtgactgtgaagaatggagctgacatttttgtttttcactcaacacgcccaagtagacagatccagatgactctcctgtccactttaggagccacctggggaggtgaaacacttcttccactggcctggagggcccttttaccagccccgtggggaagtcagtcttgttactttacggcctcagtttttatccaaagacaacatcacctaggcatgatcactgagcctgttcaccagatttgacacccaagggttgaggctggatgcaaaagtcctatgcaggtccaggggctgaggagctgccactatctgggaaattcaggagtccccaagggcaattctcaaaggcaagtctcaggaatgtgttgggcccattggaatactgttggaataagt

SEQ ID NO: 85216 - DNA, 1026 bp, Homo sapiens
cactctagcaaattaactgaacctgaggaggggctctagggaaccttgacttatagctggttggtcagaagcacaagtaaaacaacgtggggcttgtgattggcatcagaagtgctgggggcagtcttatgcgactgagccctcaacagatgggatttgacactatatccagatacatagtgtcagaattaaattggaggacacccagctggtgtccattgcacaattgtttgcttggttgttggagaaaaaaattccctcacacttcttggtgaccagaggtattgattgttgtggggtgagtgtgaggagaagctgttttttgtacagactcatcttaatgactgaaacgtacttcctctgtggttatctctgtgccaatgaagatcacccaggagcccatcttaatctttgacgtctcaaccagtcacctaatcttgttgattttccccatgtgatgttccatttgcacctgtttcattccatttatcaccaacacccaagctctgttcacatggagaccttcatacccacccagatagtctcctcacctctcgtcctccacccccaaacccacctgccccacccgtccacacatcctgccatgaagtactacctttcatcacaacaggttaacgaggaagccgactgctgtcgcagagagagctctggcctcaggtgggcctttctcaatatcttcactcccgggaagaggagattgatgacagtcccttgcagatatgaatggcaggaggctgggggtcaggggtgggatagccatagaggaagcactttcatgccttaaggttgccttcaaccttaagttaatagttggctgcacattgaagaaagtcagataaatatttaaaaattcacttttaaccttacataaggcctggaagagcacttccatttgccaacttgctgcagggccaagacgttttctccgagtttgggtctgctgggtgggttctgtgttgtctcttgcacaaaccttgtctccagtctgcagttggtttcatgaaa

SEQ ID NO: 85217 - DNA, 1603 bp, Homo sapiens
aaaaaaaaaaattaaggacatatgttttggctattctccaatttctactttttataccttgttaaacacattagagcaatgtcctaggtgacaatttcttgttgataacgcacaagttttgccagaagactgtctcagatgttccctgttctctacccctggtgggtttttcactgctgggtggaacctaaatgttcattgtcccttctgagaacacctgctgtgtgcttcccctgcctgcaaaaaccaccttgaacgtgatgggtgctttcggactctcagggcccttctacctctgctcatcccaaacaccacggcactggagacaaagcttttcgttcgcagccgcagccgcttgcctgtgatcatctttttccagttgggggtttcatctctcttttacaacctggctcctgctaccgacctcctgcagtttctggcggggacttgttagagtggccaaacaaacttttttttttaaacaccaacaagctatctggacacagtagggtagttactaagcaaaattatcactgctcccttctatgccccagaagtcctgaagcccacagcctgtctatccttttgaggccaaagggagagatgggcatttgaggacatggtgggaaaggctgaggctggaggacgggctgtgggtatgtgagtggggaatggtgttgacgcctgtctcctcccaacttatggcattgatcatcttttggtaggagccgggctaccaaactcatctttttttttttctttttctttttttttttgagatggagtctcactctgtcaccaggctggagtgcagtggcatgatctcagctcactgcaacctctgcctcctggattcaagcgattgtcttgcctcagcctcccaagtagctgggactacaggcatgcaccaccatgcctggctaatttttgtatttttagtagaaatggggtttcaccatgttggccagaacagtctcgatctcttgacctcatgatccgcctgcctcggcctcccagagtgctgggattacaggtgtgagccaccgcgcctggcctaactcctcatctttcttacttaccaaagcaggtaaggactctctgtgactcactaagcaagaaagtcatggatgtttctggtcatttaggagcagaaagagggggatacagatgccggtttataaaggctgagagtgcaggaggcagccactcaggagaccttgctaaggctggcttcccgctgcttgtcttctctggccatttctctgcttgggtacagaaaccaggccaagtgcctggggaacatttagctttttgttgtgagaagggaagaattagaaagtcaaatgctcctatggactgggagccaagagaagggggcagggaggctggcagggccttgaggaggcttggccactctgagggtgggtgcccatctaaggcaagcctggagctgggtgggcaagagccgggcggccccgctcctcctttccatgtcctcccctccaccgggaccctcagcctgggcccagcagggaaacccagggcgtgtgaagccgaccaaagggagatggattgaaaaacagccagctgaggagggcactgg

SEQ ID NO: 85218 - DNA, 1021 bp, Homo sapiens
gagcgctgttcacagtgagctggactgcagaccctgggagctaagaggggacaggtgaatgccttaaggagcctgcggagcaggtcttgcaggatggctgggaagggtcattgcagcatatctggcctgtctgatgcagcaggtggaaacagagactgctgaaaccatggcactggcgagaacctcatctgtgaggttcctgtggcgtcagacacagccagaagctgttttcatatgatctggactggagcagactatgggaggatgctgggtgtttccagccacacctgcatatgaagaaaacaagcacccccagtagctggggtgtggagaagagagaggttagtgagatgctgctgggaatgtaaatcgtaggggagattatggtttttagggagagaagcgatttttctctcacttctccattggccaggacagcttttgtttttaacctctaatactcattttctttctgactccaaaaacaatgtgtattaattttagaaatttaagaaaatatagaaaaatagaaaaataataacctgaaatctttccttctagggaacacactggtaacattgagtatattcttctggtatatttccattttcgttttcctttgtacatgaatttttttaatgaaatggaagtatgctttgcatattgttttgtaacctgggcttttcatttgctatatgggaaacactttgtccatgttgttaaatattctgtaacattgttttaatagtctcattggccgggcgcagtggcgcacgcttgtgatcccagcactttgggaggctgaggcgggtggatcacctgaggtcaggatttcgagaccagcctgaccaacatgttgaaaccctgtctctactaaatacaaaaaaagttagctgggtgtggtggtgtatgcctgtaatcccagcaactccggaggctgaggcaggagaatcacttgaacccgggagacggaggttgcagtgagccgagtttgcgccattgcactccagcctaggcaaca

SEQ ID NO: 85219 - DNA, 1001 bp, Homo sapiens
aatccagtccagggcccatgacagcaacctggccaggtgagtggggattttagccttgtcttatacaacacagcacaagccaggatttcttcctaatccctgccttgccttcttattgggggattgtgaactgcacctaaaacataaggggtggcccagtgtggtggctcacaccagcactttgggaggctgaggcaggaggattgcttgaggccaggagtttgagagcagcctgagtgatagagggagaccccatctctacaaaaaataagaaatgtagccaggtatggtgctgtgtacctgtagtcccagctgctgggaggctgaggcaggaagattgcttgagcccaggagttggaagctgcagtgagctatgattgcacccatcactgcacgccagcctgggcaacgagagagactgtatcaacaaaacaaaacataagaggaaataataaacatgatctggtgctccactccattaatcatcaggaaaatgcaaattagagccacaaggcactatcagagtgcctaaaatgggaaaagacaaagaatatcaggtgttgataaaatactctgctggcaggagtataaacatatcaaataacagttttgtggctgtattagtccattctcacattgctaataaagacatacccgagactgggtaatttatgaaggaaagaggcttaattgactcacagttcagcatggctggagaggcctcaggaaacttacaatcatggcagaagggggagcaaacatgtccttcacatggcggcaggaagaagaatgagtgcttagtgaaggggaagccccttaaaaaaccatcagatctcgtgagaactaactcactatcacaggaccaggattggggaaactgcccccatgattcaattatctctacctggtccttcccatatccccataacacatggggattatgggaacgacaattcaagatgagatttgagtgtagacacagccaaaccatatcagcggca

SEQ ID NO: 85220 - DNA, 1056 bp, Homo sapiens
ggccagtcagcttttccccagttttttcctattataaacattgttgcaataagcagcattgtccatatctcctggggttatgaatgagatttctcaagggtagataccaagaggcataaattggtcatttccagctttactagatattgtcaaattgctttccgaggtgattgcagcaattcccaccagctctatgtggaaattttcatcggcctatattctggctaacacttggtattgtcagacttgtgtatttttgccattccgatggtgtgtggtttaaatttgcatttgcattgttgatttaatttgcatatgtctgattattgtgaggttaagcatcttttcatatgtttattggctatttaggtttcctttgctgtgacatgcatattcatagctagtgtgtgtcttttctcttgggttgtctttttcttatttatttgttggagttctttgtatattctggatacaagtcctttgttgtacatggtgccattattttctcccagtctgttcctgtccttttcccctgctgtccttttgtatcctctgacctgatttttgcttcatcaaatgcttaaacgagtgcagaatgatgcttccccaccaggtgcaacctgactcaaaacccagggtgtgtatccgtgagaaaacttgacgacatcccttgaggtgctgcctggtgaggtggggtgagcagaatttcatctccttcccctacctcctgcctcttttttttttctttttgagacagagtctcactctgtcgtctaggctggagtgcagtgatgcgatcttggctcactgcaacctctgcctcccaggtttaaacaattctcctgcctcagcctcctgagtagctgggattacaggcacctgccaccatgcctggctactttttgtgtttttagtagaaacagggtttcaccatgttggccaggctggtcttgagctcctgatctcaggtgatccacctgccttcttggcctcccaaagtgctgggattacaggcctgagccaccgcacccagcccctcctgcctcttttctatct

SEQ ID NO: 85221 - DNA, 1506 bp, Homo sapiens
ggagtcttactctgttgctcaggcaggagtgctgtggcgcgatctcggcttactgcaacctccaactccctggttcaagtgattctcctgcttcagcctcccgagtagctgggaggattaccggcacacgccaccacgcctggctaatttttgtatttttagtagagatggggtttcaccgtgttggccaggatggtctcgatctcctgatctcgtgatccgcctgcctcggcctcccaaagtgctgggattacaggcgtgagccactgcgccctgcccagcatgatcttttatcaagatccttgacttaattacatctgcaaagatcctatgtccaaataaggtcacgtttacaggcagttaggtcatggacatatctttttgggggtcattatttgacccactagactaggcaaatgctatgaatttcagagaatagctagcctaaaagtgaagtgtaggtgtgtgtggtggtggtggtaggagaggtgaagggggtgtcaaggaagaaaaatgcatctgggagaggcaggttcttctgggaggcacagttcccccagagaggagaggcaatgcagctgattcttaaacaacttagggggtttagaggcactgactgcccctctgcaataaaaaatctggatatttttgactcccccaaaacgtaactactaatagcctgttgacaggaaggcttactgataacatcgacagtcaattaacacatattttgcatgttatatgtattatatactgtattcttacaataaagtaaactagagaaaagaaaatgttattgggaaaatcgtaaagaaaatatatttactattcattaagtggaagtgggtcatcatgaaggtcttcatcctcattgccttcatgttgaataggctgagggggaggaggaagaagaggggttggtctcactgtctcaggggtggcagaggcacctgtaaatggacccacacaattcaaacccatgttgttcaatggttaactgaacattttagttgtctattgaactaaaattcagtggtcaacggccattgtggattttcacatttttcatctatttagagtccccagaaaacagataacgggtgttcaaggaagatgcctcttgggtgaacaggtacaagccaggcgaaacctagctgtgcccattgatctgccccactgctatgaagctgcgcctgtggctgtatcccctgcaagggagccccagtggggccaaggacaggacactctgtgaacagctgctgtagatcctgcctttttgaagataagtaaagagaaaccaagtacatttctacaattatggaatccacaaataatgaggttcagcaatactattcctttccttcacctattcgttacaatttgtgtaaccccaaaataaatactcagggccctttcatggtcattcatgatgggcacagagaggtgaaaaatttgagttacctggtgtgcatgttcccagcgagattatttcagctctcatactgt

SEQ ID NO: 85222 - DNA, 1370 bp, Homo sapiens
ttttggctgtaagttcagtgctggtgaatcaatgatacgttttgtatacagaattttttttatttttatttttttgagacagagtctcactctgtcgcccaggctggagtgtagtggcacaatcttggttcactgcaacctctgcctctcaggttcaagtgattctcctgcctcagcctcccgagtagctgggattacaggtgcccgccaccacgcctggctaatttttgtatttttaatagagatggggtttcactatcttggccaggctggtcttgaactcctgacctcgtgatccacccacctcagcctcccaaaatgctgggattacaggcatgagccaccgcactgggcctgtatacggtatttttaaagcagaaatacatataaaaaaagggtacatactgaccagtttgcgaaaatgttgtgactaaaggctcacaggaacttaaccctgtattttccctgggagcaatggttcattatttgctgactattcatggcagcttgatagaatgtgaataccacagctaatgagcatcaactgtatctgaaggagcccgcttctgaaaatgattatacagcaagctccgggagaacatgtcaggagattggcaccctcttattgcaggaagacactttctttgtgcaatccaagcagactttgctcaggagaggacagtccgagactagaaggcagcagaatgagatggaaatagagatgtcatatagggagagagtataggaaaaagccaactgcagaatcaaaatccatatggtacagagtaagaggcagattttgttcaaggatgttcactgcaatgttgtttataacagcaaaaaaagatgtccaacgatgggagatgagctaaataaactctaatgtagacataaaattaaatatatatgattcaggccaggcgcggtggctcacgcctgtaatcccagcattttgggaggccgaggtgggcggatcacttgaggtcaggagtttgagaccagcctggccaacatagtgaaacccatctctactgaaaatacaaaaattagccgggcatggtggtgtgtgcctgtaatcccagctactcgggaggctgaggcaggagaattgcttgaacctgggaggcggaggttgcagtgagctgagatcacgccactgcactctagcctgggtgccaaaaaaaaagaaaaaaaaaaaaaatatatatatatatatatatgattcagctattcagatattgtgtattatttattgacttaaaaggagtaagggaaaaaaaaggaagattcaagtgtaagtatgacgggtctgatacttttaaaaaatgtgcatatgcttacttagaaaaagctttgcatgattctattaa

SEQ ID NO: 85223 - DNA, 1035 bp, Homo sapiens
aatcccacactttgggaggccgaggcaggcagatctcctgaggtcaggagttcgagaccagcctggccaacatagtgaaaccctgtctctactaaaaatacaaacattagctgggtgtggtggcgggtgcctgtaatcccagctacttgggaggctaaggcacggagaatcgcttgaacccgggaagaggaggttgcagcgagccgagattgtgccgctgcactccagcctaggcaacagagcgagactgtgtctcaaaaaaataataaccataaataaataaataaaagtgggatgaaagatgttaccagtataaactgttgggcagcacttcttcctcttttctctcatagctcctggtttctactgacctgcagagtttatgaaactgctgttcccatctgtctgttcatgtctgtctttggattgtgaaccacccaagggcagtctgtatttctagaacctgacatggtgggaggcttctgtgagagaagatgctacctgcatttttcttgggtggatgagtggtaggcttggaagatggggcaggatgctggggcgccaggccgggggtgcagtagaaaattctgctctgtgcaaactcctgttcgtcagttctgtgacagctcccctctccttctgcctcagctccttgagagaaaggactgtgtaagtgggtgaatgaaaaactaatgaacttgagctcattcatttgggtgggccagacagcaccttaataccgattcagtaagttcaagcctttgagagagacttttgagttcaaggatgttcaactctttggggtgagcaaataggcaatggaggtggttttgaggtgttcaccaaagacccacaatgctggcgtcagccttgcatgtgttccccagggtctcccgggggtctcctgctcaccagttaaaggctttccttctcagagctcattgtcgggaagagaaagccgggctcctggctggaccagtgtcctcatccacgtgacgttcctggagctggacagatcccggctgaaatctggag

SEQ ID NO: 85224 - DNA, 1048 bp, Homo sapiens
taaccgggcgtggtggtgcgcacctgtagtcccagctatccgggaggctgaggcaggagaatcacttgaacccaggagtttgcagtgagctgagatggcgccattgcactccagcctggacaacaagggcaaaactctgtctaaaaaacaaaaacagaaacaaaaaccggttcagtggttttcagtatattcagagttgtacaaccatcaccataatagattttaggaccccaaaataaaacccatacccatcagcactcagtccccatttcctcccacccaccccctttccagtgctgaacaaccaccgctctactttcggtctgcctggatttgcctattttaggcatttcatagaaatgaaatcatataatatgtgaccttttatgtgtggcttctttcccgtgacataatactctctaggtctatccagtctcaaggttgtagcatgtatcagtactttattccttttcattgctgagtaatattccattgtagagatatattgcattttgtgtattcattcactggataagggacattttagttgtttccatttctttgccattgagaataatacttgctatgagtatttgtgtgtggacatgtgttttcatttctcttgggtatatgcctagaagtggaatagccaggtcctacataactttgtttaactttctgaggaactgctggactgtttttcaaagtggctgtaaccatcttatgttcccaccagcaatgtatgcgggttctggtttctccacatccttgccaacacttgttattatttgtctttttaaaaatgtattatttatttatttatttatttatttttcagacaaagcctcactcttgttcctcaggctggagtgcaatggtgcgatctcggctcactgcaacctctgcctcccgggttcaagcaattctcctgcctcagcctcctgagtagctgggattacaggcacacaccaccactcccagctaatttttgtattttaagtagagacagagtttcaccatgttggccaggctggtcttgaactcctga

SEQ ID NO: 85225 - DNA, 1060 bp, Homo sapiens
gtgtgatgtggtgctcattgtggttttggtttgcatttccctgatggctaatgatgttgagcatcttttcacaggcttcctggctatttgtatacgttcttttgagatgtaactatacagatgttttgcccagttttaattgacaagttagttcttagaagtgcttatctggccgggcgtggtggctcacacctgtaatcccagcactttgggagaccgaggcgggtggatcacgaggtcaggagttcgagaccatcctagctaacatggtgaaaccccatctctattaaaaatatttttaaaaaaattagctgggcatggtggcgggcgcctgtagtcccagttactcaggaggctaaggcaggagaatggcatgaacccgggaggcagagcttgcagtgagccgagatcatgccactgcactccagcctgggtgacagagcgagactccgtctcaaaaaaaaaaaaaaaaaagtgcctggaaggagtgccttgcccatgggaaatgctgtgcaacttactattagggagagtacccaagacttggcacattgggcttctctcccccacgttaaggattttgggggccctgcataaatgtccaagcgtgagggaacatggtgacttcacattttctttagttttcttcaaatagtcccctacttggggagagactgcgatggtttctcccccacacaggtcatattcccacctgaccccttctgatttgatttcccccaagtccctatggtggggtgcacctgctgcctacatctggctgcctttggtgatgacttcagtgctgcttagtatctggattctgttcatctgcaagcgcccccaagaggctgctggtggtagtgtgggttgatgtgggcagagttggtgggggtcccagggagtccccccagccccttcccagcgtcatagcgacatggtctggggcttacattacccccatgttgtttttgtacagcaggaagctgcttgctacccaggtggccattcgacttcatattaaggtctcctttccattttctttttgcttaaaaatactcag

SEQ ID NO: 85226 - DNA, 1030 bp, Homo sapiens
agtagctgggactacaggtgcccgccaccacacccagctaattttttgtatgtttaaagacggggtttcaccgtgttagccaggatggtctcgatctcctgacctcatgatccgcccgcctcggcctcccaaagtgctgggattacaggcgtgagccaccacacccagccctctgagttacattttttgaaagcagcaacactcccctaaactctagaatcctctacagtttggttcataactagcaaatggtgacttgaatgagaggctttgggattggggcaatgtctttatttcccagtgctcctcttaaccagattaaaggggtgctgtgaagtttgacctagtggaggggtgggtctcgggaagcattaaacaccaagcagtggttgggttgttaggcatcgcccagcccctcatcttgtgcttttgtttctgcttaaactatgttcttattgtatttttcatgtggcaaaggcaatatctatttggtgtagaaaaattataagatatagattaggacaaaaagaagaaaacgcaagtaacagtttatcccaccagccagagtgacgatgttaataccctgtggtgtgtctgttgcctggtggacctttttctatttgcgtatgtttccactatatgcagtcatacttctttttacttaatacattgtttccatctttccactttattaaatagtcggctttgtagttttgcatggttgcatagtatttgtattgcattttgtgggtgtaccatgactccgttaatcaggcatttaaatttggacattttgctgtttttcaggttttttccactctaagctttgttgggctgagtgctcttttaagttgatctttgtgccattctcagtgtccccttcagataaattcctagatgtgcaactgtacatcttcaaggaataagcacatgtttaagacttttgacgcgtttgtatcttgctctcccccaagtcataccagtttatagagtgtgaattttttttctttgtttcctcaggtatattgca

SEQ ID NO: 85227 - DNA, 1057 bp, Homo sapiens
agcacagatagagggaacaaaccaggtatactgggagtcgtggccttgagggcaccccactgtggaaagttgcagatatcagctcgagggggctgtatttggctgacttggcaatggggaaccaggatggtgtttgaatgaaggactcatgggctcattttcacttcgaggggagaagggaggctggtagcagggtaccacgtgtctcatgcatatcctggagaaggcctgagatagggcagccgtgcatggatcagggaggcggagggaggccctagggacatgggatcagagcagtgggcaggagtgagattgtggtagggccgggggggggcaggacagggagttaggattttattccaggtgtaaagggaagctaagggggtgtgtgttgagctgggtggtggcatgaacctgctatgttttaataagattgtcccggttgctctgcaggaggcaggggtagaagctgggaacagccaggaggccttggaagttttcaggtgggagatgacgggggcttggctggaggagaggtggtggtgagaagtggccccctgtgggatccgtgtggaaggcagtgtcaccagaactaggtgggttgtttgtgggagcgaaaagaaggaaagcaatgacccgtgagtccttctcaagggtttgtgtgactgaggagcttggtgccactcattagaggacacaggtcctgtgatgtaggctggcacgatggctgcctggtccctctttgtagcactggggagcgtggtgcaggctggagtgaaggacggttggagtggtggcaggtgcagagaagaggccaggctttgctgctgaggacccctggacacactcggtgtctactgggcacacttggtgttaaaagccacagtgggcacagggggctggagaggcaagtgaccaggtaccccaggcttcctgcagctcagacgggggaactagaaagtcctctgagaaaacatgtgccaccaccaatgattctactgatgggccagacatgagcggcttgggttggagctaattctaggatgcaggaagagag

SEQ ID NO: 85228 - DNA, 1145 bp, Homo sapiens
tgagtagctagaattacaggcacgcaccaccatgtccggctaattattgtatttttagtagagacagggtttcaccatgttggccaggctgatctagaactcctgacctcaggtgatccacccatctcggcctcctaaagttctaggattacagacatgagccactgcgcccggccgttaccgtcttttatatcgatctccccataatgaactcatccagtgcacaaaccctcctgtagagccatgtgtccagcatctagtaggtctcccatagctgcctggacctgctgtcaggagtgatcatcgtaacatcaactactgttcccctgggtcagccactgttgacagctgggcaccattactgtcctcattcctagataaggaaactgaggcatagaggtgatcaaacacacccaaggtcaagtgcacagtgctagcctgagacacacaggatttgaactcctgcatcggctcttgactcccctttgtcacctccaagttgtactgaagttgaggcttaggctcccagagggtgtgggccctgggctgagtgttttatgggccttatctcatctgataagagggtgcttgtaattactcttctttcactgaatagcaaagtggacaaggagagatcaggtgactggcgcaggccgcataggtggatggaaggctggaacaggccccctcttagcacctcgctccccggcctcccagcctcagtggggtttgctgacgaaacaagcgagcacatggaggaaatgcggtccagcttctgcctaatgaatcccgctgtttcagcctgtttgcatttgtcaagttaatttgccttccagacagaaccacagaccagtgtccctgcctcctcgagggtgggagggaccccaggaccccctggagaggcacacttgaggaggcagacacaccggtctgtggtctgtaccccacagctatctccagctccaggtccagggagggccagaaggtggagcggcgggggccagtggcgaggacagtgcgccaccccccgaggctggccggctccccagctgaggcaggcgcatgaaatccgaactctggagggaaatttactgcacaataaaggaagaatggcctgctttggggacaattaaatccacattact

SEQ ID NO: 85229 - DNA, 1036 bp, Homo sapiens
tgagctagggatttggcccgtgctattggctctcaaaacaatttggaggaggaaagtgaggggctaactcgccgcaggactctcctttcctggtcagtcccttgttggattcttgcctgggagtttcagagccagcgaggcactggggttgcttactgtccccatatgtggaggagatgtccaaaatactcagtagctggtgcttctgggtaataccccggcatcggtgttgagatgctggccatagacagctgccttgctacctctctgtggaagatcagtctgccctaaagcttttgaacccccaaaggcctgttcagaggatgttcagctatggagccaccatctctccatgaggaagagcttgtggctttccccaggctgttttccctggctgtactagataactcaggacatcattgcagaaggacaatttggattcttcccgcatttgcccacagggaagctctgctgcgcagtccctccccgtaaggactcagggtcatttgcagactggaaatcccttccattagctcacgtgtaagaatattaacaaggccatttgggaggccgaggtgggcagatcacgaggtcaggagatcgagaccatcctggctaacacggtgaaaccccgtctctactaaaaatacaaaataaatgaataaattagccgggcatagtggcgggcacctgtagtcccagctactagggaggctgaggtaggagaatggcatgaacctgtgggcagagcttgcagtgagctgagatcgagccactgcactccagcctgggcgacagagagagactccgtctcaaaaaagaatattagcaaggccaatgctaacctcaaacctgtaaggatctgacatcccagaggcaggaaatgtgtcttctaaggctctctgagttggaagggtctcgatcagtctagttccacctcctccccagagccggagtctcctgtaccgtatttttctacttgaaggtctccagggatggcaaagtcactgtcccccaggggtggcccattctagct

SEQ ID NO: 85230 - DNA, 1357 bp, Homo sapiens
atggcacagatcttggctcactgagacctctgtctcctgggcttgtcagatcctcccacctcagcctcccaagtagctgggaccacagacatgtgccaccatgcccagcgaattttttgtatttttttttgtagaaacagggtttcaccatgttgcccaggctggtctcgaactcctgggctcaagatatctgcctgttttggtctcccaaagtgctgggattacaggcgtgagccaccacacccaacctaagaaatatatatttaattcatgcactcaaaaaacaaaagcaggaagagaaaggaacacactcctatttctaccaaccacagttgctacagagatctttcctttcaggctttcattaacatttgttcagttgtggagctatttaattctttcctacaaacacggatcatacttttatacatctagttttgtgggggttttttttcataataatgaacattttcttgtgtcaaatactgatcttcacaatgtttaaaagatgtccgggctgggcatggtggctcacagctataatcccagcactttgagaggccaaggtgggcagatctcttggagccaggagtttgagaccagcctggccaatatggtgaaaccccgtctctactaaaaaatacaaaaattagtcaggcatggtggtttgcgcctgtaatcccaacaactcggaaggctgaggcaggagaatctcttgaacctgggaggtggaggttgccatgagccaccactgtactccagcctgagccacagagcgagaccctatctcacaaaaattaaaaactaaaaaataaaattcctctggcactgtgttgcatggctatgcatagtgggcctcttggagttggaagtggaggcatttaaaagaaggacctcccagggttgggcacctataggtcgtttcccatttttcactattataaatgtcaactacctttgaacataaaggtaaccaccttgaaccacctttgaacatatatatttgtgctctgctccaatgactgttgtagtgcaaatttctctagatggaattactgggttgaattttgaacctacatgtttttatatttttatttatatttatttatttatttatttgagatggagtctcgttctgtagcccaggctggagtgcagtggcgtgatcttggctcactgcaacctccgcctcccaggttcacgcgattctcctgcctcagcctcccgagtagctgctattacaggcgcctgccaccacacccggctaattttttgtatttttagtagagacagggtttcactatgttggccagactggtctcaaactcctgacctcgtgatccacccacctcggtct

SEQ ID NO: 85231 - DNA, 1031 bp, Homo sapiens
tctccctggcccagctgtgctcattccctggacacccttggcccatccatgttttcacctccctggatgtgagttctctgatctctcaggaccactcttgtccccaaatgccacatagaaattcctggaggattggctgggtgcggtggctcacgcctgtaatcccagcactttgggaggctgaggcgggtggatcacctgaggtcaggattttgagaccagcctgggcaacatggtgaaaccctgtctctactaaaaatacaagaattagccgggtgtggtggcgcatgcctgtaatcccagctactcgggaggctgaggcaggagaatcgcttgagcctgggaggcagaggttacagtgagccgagatcgcaccattgcactccagcctgggtgacagggcgagactccgtctcaaagaaaagaaaaagaaaaagaaattcctggaggatctccaggggttcctgtgcttgagcagaaaagactcctgatcattgagctccccaagttaacggaagttctgggtttggccagagcgttaagggcattttacttgaggaaatagtgtcttttgggctttttgttgccaggagagcacttatggggccgggggcaggtggcacggggatagtaaacaggtttgggatgcagagctttgaaaagcatggaacttggtgttattcagaccacagttcaggctccacctctggaggcaagacatttactctcagtagcctcagctttcttatctgcaaatgggaagaatagtccctcctccctcctagggctatggtgcagattaaatgagatgatgtggaggatgtccgggcatgtagcatgcgttccatgtatggcagctattatgattatttgtgcaagtcagagaaaacagaaacactagaaccctctgccattgtcagcacacacacaaagcagagacactttctttgaccctctggttgctttggttctttcggtgagtggtggccctcaggagaaccggcccctcttgcttgaagggctcagcccca

SEQ ID NO: 85232 - DNA, 1951 bp, Homo sapiens
tagctggtgcagatatcataaatatcgttcatgctggttattgcttctcaaaacgacagaagttactagacctgctgctagatcctgatttataatcattaataaagaagcactcgcgtaacgtaaccataccatcaatctgggtctttaaagatatttgggcagcagcatttcagtattattaatttcctttgtagacctgtatattttattttagcatggggaaatgtttgtctgaggaagggtccacaggcttcaccagtccttggcacaagaaatgttgcatagctctggctgtcggcactcagagtgtaccgagccctgccagatgccctgctgagagcatctcaggcctgcacccagagtcctggtcctgggatcacacaggacttttgtgtactggtacttggggtagaagagggcagaaagtgacagtggggcaccccagcatggacattcatgctggtgctggggactctttgcctcccccagaaaggactgtagcgagggatgggggagcttgcaaacccatgtggccccctgaatattttaggatacagactggattttggagagtattggcagtgcgctggaaacttgagggaagacagattcggcacttgcacaggcatggtccacagccagcaaacaggaaaggacagaaatgcgtttcagggagtgccagaggcagctctgggaaagccaaagacagttgagtcttgcgttgtttgcagagcctttagggacttttggttgagccccatgcaggggaaatggcgaagagaagggattgaaggaagcagcatgacagggagactggatgacagagctaaggtgggagatgaggaagctctctctgtcacagcacaattcaaaggaacatcctaaattacttcagctctaggggagagcagttttgaaggtagaagacacttaaatgaaacttcgattcttgctctctttgatgtgacatttgtccttgcctaactgagactcacctggacaagattttaaggctgtgcacaccgcggggggctgaggcttccgagcaggggctgtgtgacagctcatgcaagggcaagacagacctcaatgatctatctctccatctccgtctttgtctctcactccccccatttctctagtccttgtagcttgactttgagtttctcacaaacccacaaacccttgattttgaatttttccccttccaagtcagaaatgggcaaatggggaaaaatgtggaggggagggatctcatgaggtttctacataggctacaagaagctggtataaaacttccgaggttcttggctccgccagacaaaagattccggagcagccgcttataaacactggcagcctccttttttgaaatgtcttctttgagttgtttaacttttcggactgcttttgattttgttactgtttatttcctttcctcattctgaacctttaaaagcatggtttaaaccgaagcgagcagtaaataaacacccttataaaatatcttcctcagagagaggctgagtgagcaggttggaagcctgtagcaatgtttgtagctttgaccagacctgcgctgccctactctgggggtcctcggatgcccagggtgtctgatgctctccccagagaaccggagccatctctgggacacaagtgctggaccgtggggcctcctaccacagggaggctgggtatgccttgtctcagcgtctgagacattgcaggcaggaggccaggagggccccctgggaagcggggcccgggagctcagcgctctcaaacctgtccactcttgccgtgtttgaataggggaggcctctgtgccaggctgcctgagaaaagcttgtttacttttgcctgcgtaccagaggagaattaataagctgagaatttgttctgaaagctgatggacataaccttcccctgaactcatccccttgaa

SEQ ID NO: 85233 - DNA, 1085 bp, Homo sapiens
aaaaaatcctatgtagtaacatcctactaggaaagaagataaactcaagtatccactgaggggtgacctgaaaccaaagagacatggaggggcagccagtcaaaagccactgccttttacaggtgccagttaaaggggttctggtgagtgtggttgtttggctcatggagctggcatgaccagggccacaggtggtgagcactagagaacagttagcagagctcagacccttgggtcacaaggtagccagggtgagacagggcagacaaatcagctaatcccagaatgggtgagcataaagaaacccaaaacccccactggcaaagaatcagccgaagattgttagaactaataagagaattctataaggagccgttaaacaattaacgtacaaaggtcagcatggcctgtagtaagtactcagtgaatgcatatcagttttatgataatggaaacaaaatctcaactagaataccagtaaaaatatgaaacacagaaataaatgtagcaataaagtacagcacatatgtaaagaaaagaacaagacttttccaaggaacatgaagaacagaagaaaaggagggtcttgccacgttctgagaagacaagacccaaaattgtaaagctatcagttcgcccagaaataatctgtatattagcataattctagtcaaaatcccaattacatgaaacacgattcctaaattcagccagaaaaataaatgggtgaggattgccaataatttttttaaaagaagattaatggagggtgatttgccctaccagatatttaaagatattgtaaacaggattatttaaatgagtgtggtactggtgtaggaatagagagatcactaatgctgagtagaaagtctagaaacaggccaggtgcagtggctcacgcctataatcccagcactttgggaggccgaggtaggcagatcacttgaggccaggacttcgagaccagcctggccaaaatggtgaaaccccatctctactaaaaatacaaaaatgagctggacatggtagtgagcgcctgtagtcccagctacttgggaggctgaggcacgagaatcacttga

SEQ ID NO: 85234 - DNA, 1068 bp, Homo sapiens
tcccagggagccctgctcagctcagctgaatcacccttcagtgctgacagcagttctagtctgtgtccactgttggctctcgctggagaagcctatagagagccaactggttccctattgggacagctttgttttccctgctgaacacaaaatcccctgttcactgggagagctgacaaggagaccccatggggctggcccggtgggagcagataccaatgaatgcagcgcccgaatggcttcagcttattaaaggcgaatacacaggataactctgcccgccgagtgggagatagaatggagggcacagagctgttacagcggattagcagccgcagacggatggaggcaggtgcagccttttctgcaatttggaagggtttatgaaatactgatcctgtgctctataaatccttcccttgacctcatctgggctacaggctgaaagtgggggatttcttgttcagccaggcttgatagtagcttttagtattttccctgctccctgccaactcctagaattccctgggaattttgataagaggatttatgcatgtgtccatttattcattttctcttcattcattcatcactgacacatttaccaagagcctgggctaggtgctggggttacagagctgagtagaacatggagttttatcctcaagggactggtgtactgtgtgagaaagacacagaaatagaatattctaattcagattgttaattgttaactaaatccacacgtcagcagataccaacataacctttggtgggcctgagccagtggcaggcgtcactaagagactgctaagtcttctgcagcccaagtgaatgaagcctcaagtccaacaaggtgtcttgttgcctctctggatgggctgctgttttttttaatggcacagatggcagataatagaggacgatacttagaactagtggcatagctggaaacttgagttcctctagcaaaaactctagaaagttcatcttatgaggcagaatttgcatcttgaagaaggcgtaggaggctgctggcaggtgtttctctggctcgaatgcagattt

SEQ ID NO: 85235 - DNA, 1004 bp, Homo sapiens
cccctctgtcctgtgctggagtggaaggcagctgtgttagggaatgggcccccaccggccagtgactttggatgctgaacacttgtacctctgttttctcctgtgtgtaatggccatggccgtcctaataccacccgaactgcctcttcctatgtggctgtgcagcttactcgggacattgggtggaaagcactttggtgagagcttggcaggtgtagactcatcaccattccggttgctcctgccgcagacgggctgagctccaactggggcatgcctctgaggctgaggcagcatctgtaggctgggaacagggtgacccctaggtctgggactggtggcagagcagggtctggggtgacttcgcggtagaagcaatttcctcagcagagttgacactggctggggaggactgggactgagcagctgagggtcaagagaaaattctggatgtccaggagctggttcagccagctgaggtctcctgcctccagtcaggagggctttttgcagtcccaaatgctctgggcaagaggctttaatctaattacatgctttatttgagccaatttgttttccaatccatcttgttcagcaaaaagaaagagcctgctggggactcatttgcaccctcttgttccaagtggagaagaggggttgagctcccatctcacatggtcagtgcagcccccaacctctcccagcccggccaccccacccctgagccaggctgcagactgccctgccctcggggggagggggctggggcggctcaggtagaaaaagcctggcaggcttgccccctcccagaagtccaccccagcgtgcctctccgtgccttccctttgggggtcccggtgcactaggcaggaatgacacgggatgggcttccaggccaggcagcctgggaggggatttcatcctcaggaggtcacccagcctcggaaccttcctggctcctcctgtgagagctgccctcagaatccaatgccccatatttttaa

SEQ ID NO: 85236 - DNA, 1035 bp, Homo sapiens
gctgctaatttcccctgtgacctcttttgttgaggcctgaccccagccagaggctccgcaccatgaaagccagcgcctgacacagacccagggcgcggggtgacaatgaggcctctatcggctttaatcaggctccagttgagtcttaagaatagggagaatctgtgtggtgctcagaagccctgggtggcaggagccccccgagactctcacggaggccagggtggttgcaggcggtggctgagggattcgtcaggccagggagggggtgggtgggtcggacgggggccctttgtccctcaggcctctttagaagcgcaggcctttcctgaatggccgcctgcccgcccggcctggcccatgggtatcacaggcctctggctatttagggaggcggcctcctactctgcccgccagcctattcatcgccagcctaattagtttttgtctgtgctccccccccacccccctgcagactgcgattcctactgcaaggcctccaaggggaagctgaagattaacatgaaaaagtactgcaagaaggactatggtgagtgagagtccccttgtctggggaggatgggagggggccacgtgaccagcgaggtgctggggctggggtgcagctggcccccgatgggtgttggtcgtgaagaccctgtgaccgatgggaactagccggacggatcccacgcctgggaatttctcatcttttcctccttggccctcagagacgggggcatgaggagcccagtggcctggtttctccccttcaccctcctgaggctgggacacccaggctggcctctggctttgactctgccgctgatgggctgtgtggccacagaccagtggctttacctctgtggtcttctgtgtctgcatcatactgcggggatttgacccgagtccacgtggctcaaagggaagctctctgggcatcagacaagggctgggagctccccggtgcatttccagtgttccgccaggctgtagcggggccgggagtctgcgctgtaaacggctcaccactca

SEQ ID NO: 85237 - DNA, 1049 bp, Homo sapiens
gacagagtctcactctgtcgcccaggccagtctggagtgcagtcatgtgatctcagctcactgcaacctctgcttcccagattcaagggattctcctgcctcagcctcccgagtagctgagattacaggtgtgcgccacgacgcccagctaatttttgtatttttagtagagaccaggtttcatcatgttggccaggctggtctcaaatattcaccctcaggtgatctgcccaccttggcctcccaaagtgctgggattacaggcgtgagccaccacacccagccctgagctcctttcaaaacaacccagggcccctactttcctggcttggagacgcacttcctttatcttaaagtaattgcaagtttcatttctaaatctaggtttattttcccgtgggaggtggaagtttctgcactgccctgggatgtatacagcttaacgcagcttttaggaattgactgtagacccctgaagggccttgaactttgatgcccatagcctggcagcttctgaattgatgcataatacctgccagctgctcttcttcaccctgtagaaggccagaaggcctgtggggaatggggctgaattactggggtcttaccctggcttcagtgtgtgcgtagggagtgtgcgtatgaactctctcacatacacacacacacacaataaacgagaacattttagaagttctccagattcctttagatacctttgggcctcgtcattcatttcactgtgctaaaaggtcctgaccactgtccttattaaagaagaaagccttgttcaagcagctggcccagttaggatctccatgaggtctgggtcccagggtagggctgccggacccccacggggtcagggaagggacggagctcagattctggatagtgaggcctcctccacaggtggccttcgcttctcacccctcttcttccaccgccgtttcctccctcctcctctttcctcaccagcttcctttggacgcagaggtcactgtttgctgggagcctgttaggcacccgtgctctgtcctccccgtata

SEQ ID NO: 85238 - DNA, 1052 bp, Homo sapiens
cctccaggacctagcaggggaaactgaggcagcatccacactgctttcagttctgagagagagggtcatcctgttctgtctttggttgaggggaaaccttcagccagctctacgttgggtgtcctcatgttgtctaagtcctggggcagggccccggtggcaggcacatggcaggagatccctgaggactcctgagggcagcggtggcagttgccaggcctggccacagtgagcctccagccctctgccttgtttgatatagactgggcaggggccacggtgaccccccgtcccgggtgtggcggccccctctcccacactccccggcaaggagtcaggagagggcagatgagcatcactgagaccaagccttggctctggcggcccttcctcccttcgcagggcctgggaagcatgtgctcagagctgcatttcaggaaagcagctgcagctcgtgacacgctttccacagcgggagatttatggggctgtgcggctttcatggtttctgtggggttcctattctccccctcatttgtcctggccgctgtctccgaggcagatgggtgacaagcctcccctagctggaccggcccaacaggaaggtatggctgtgtaggggaggggagaggctgaccacctcagcctccttcggagggggaagctgctgggagccactgggggcccacctcgagcagcccataaatctgcgagacctccaggaggtaggaagcctccccgcggaggtgtcccacacacttaggccttgccagggaaaggagaagggccagcagcccccagagtctgtgctgcggccactcccccagggcccagcctgcaagttgtttattcggggctgggcctttcccgccctgtgtcggttcccaacaggcagatgaatgggcagcatctataacttctgcaccggccggacagctttcctacaacctggcccgggcggggagctttgatcccagcaggaggtccaccaaatctgcaaggaggggcatccgtcagttcccatctactcctgccaccaactttctggggtg

SEQ ID NO: 85239 - DNA, 2054 bp, Homo sapiens
gtctatgccagtgtggtttcttcaccctgcccagaagggctgtggcagccccacgatatcccaccctgggtctgggtctcacgggtgtcctgtgaggggcttgcatttgtggtggtctctgaggccacctcagcaacggagctggcgacacgccaagcaacaaggcatcttgcggaaaattcagccagtgtcctgcccctcccttcggctcagcaccccgcagggcacaggctgtccgcccggtggtctggcccttggggaatgcgtcagggtgaccagatccaccatgctagcagccaggtcactgttgggattgcacggtcgtcacgagctgcctttcctatccacacacccagccaggacccagcccaccactcccgactgcagccccggcctctgcggtgagcaccatccttgggaaagcacccctcctccactccggtgccccactccaaggagcagagggaaatgggaattgaggtgtcccggtttgtacagttaggaagggatgtaaaacggaactagattttgattttgaagagtgtattaaccagaattgtgctatgtaggtgtttgtttgaagaaaaacataccagattagtctttgtttttgaaacagcttccccagttgtcctttttcttaccagctgggtggtctggtgcccctgacagctgagtgcctgctttacggacacgcagtaatgccgaagatttgcgggggaggacatagggctgtccccgggattcacctgctggctgtggtctctgcccactgcttctgtccttggaaagcagggcaggaggcagcatccccaggggcctctatgtgggagggagggacacctggggtcacaacccagggagggagggtcacagcccagggaggctgggagctgctccaaggccctggaactctgcctcagtcgcggcatgctggagaggggtacggacttactttcttggagttgtcccaggttggaatgagactgaactcaagaagagaccctaagggactggggaatggttcctgccttcaggaaagtgaaagacgcttaggctgtcaacacttaaaggaagtccccttgaagcccagagtggacagactagacccattgatggggccactggccatggtccgtggacaagacattcctgtgggccatggcacaccgggggggatcaaaatgtgtacttgtggggtctcgccccttgccaaaagccaaaccagtcccactcctgtcattggacgtttcttcccattccctcctcccaaatgcacttcccctcctccctctgccccctcctgtgttttggatttctgttcactcagaattgtaaatgtttagttgtgaccatgacgtattgtttgggtcaatgtccctttccaatgcatactaatatattatggttattatatatgaatatatttaatgacatggaaaaagttgtggattttctttctttccttttttttgggggggggtggggggttggttagagttgtaatggacccagatggaacttgtaatgtgggccccacatgatagaactaaattcagatatcattaaataaactcttgtacactatgccgtctcgcagtcttgattggtggcctgggctgtgggaggtgggcgtgtggggaggcaggggaaggatggagttttcggggagtttgaggaatatggcttcaggccgaagaactcccctgcaagtcagagcctgggttttacccagagcctcagagacagagccctaactaactcccccgagaaggcaggagaagagcagttttgcttggaatgtcctagggccttgctggccgtgctgttttgagctaaaaggttctcgaatgggacagtctgtattgcaggctgcaggaaaccactccagggacccatccttgccattccctggagttccaagacagagtggggggaaaggggtcccctcccactttgccttacctgcaacccccgggtgggcggagagccacctttgaccctccccatttgattcagaacctgcaggtagtttctgacttttacataactgg

SEQ ID NO: 85240 - DNA, 1085 bp, Homo sapiens
acccaagtctaggcccagtgggccagatgcctccaagtccacatcttggggatcctgtcccatgcttccacctagtgcaataggacagactgttgtgaggatgtgagcgtgaaccagggcccaggacaagggctctcctgtctctatggagcctgatccctgcttccagagaagctgccaacacatgcagacccaggctagccttgggatgtcgaggcccttgaagcagagttagaagaatgaaacgggctgcgtcgagacaggaggtgcaaagggctgagaggatgaggagcaggggcagcagtgaggatgagccatactgccgaggacctggattgtcacaggaaggagaaggaaaggaagcgggcttgttgtaggtgcgtgtgttcctgaaggagaggagccacgctggacaggggaccaagggctttctggtaaggcgccctgggatgcgcctcctcgtcggggtggggtggttgctaacggatcatccaacggacgatcaagaatctgcagagcctcatcttccagtcttgtgcgaaaccccaaatctctacaaacagtgtctccttggagggagccccccactttggggctcgggggaggcggcattgacagtctgtttgactttctcacctcctctcgacttgctcagcacggagccccggcaactcgtggggcgtctttgaaccagagccacggagtcctggctcagtcagactgaaaggccttttcaagcaaaacactgagccgatgtctgcacacagcggcttctgttcttttggctgaatgggctctaggcccgaccccagcactgctagctgtgtgaccctggacaagttacttcatttctgtggacccacaggcagggcagggtggataaaaagctacccaggaggttagaatgcagggacctgccgtctaggcttggggcagcgcaggccacacagggtggggacgggccgggtaggaaaaccccggctcccctttgccttcctcaaggggtgggtgacatatgagacccccaccccaaccaggccagaagtggcaagcattacccaagtggctgggatgtgtcccttttg

SEQ ID NO: 85241 - DNA, 1023 bp, Homo sapiens
agacggaggttgcagtgagccaagattgtgccactgcactccagcctgggtaccagagcaagactccgtctcaaagaaaaaaaaaacaaaaaaacaaagactcagagctctggagagctgcctagagcactgggcccagttgtggccctttgagttttgactttggtcattttcgtgctggccggaggtccctcggggtcccctacctcatggtggccagtgggttctggccaccccgcagtactctgggcatcctggggacactggattaataggcagtttgaaaccttgacgtctggcctgcttgtggaagccacatgtctgtgtaggaaatgggtgtatattcaaggccacgtgtgtccaggtagcggggaaggagtgaggtgagggctgtgcggaggagccacacaggcctgtgtctgagtgtgtaaccaccaccgtgctgctctgccccacccgagtcaccccgccaggctcagcactcctcctaggggtgccagcctccacttcacaaaaatattcctgtgggaactgctattagccctggaagcgcattctttttcatctccttggtgacaatcaactctcatctttcagggctgacacatctttataagcagccagaatcaagtctgtggaataaggcaggtggggcaggaggtggtcgggctggaaagcactgtggagggttcagagggatgagattaccgtggcgcctcacctggctccgacagagccctgtgtgttgagtgtgcgcagcgcatgtgtacgtgtgtgtgtctcagaaagggcagacggatggggcaggcctgcggaggacgccaggcccatggatggctgagttcgtgttagcaggggtcagggggccaagcaccatgtgctctctcttatacgtgtggaaagcaggctaggccagctggccttgctctgccctccaggacgaaaggggaaagaattagggttgatgatgggtgatttccaaagcacaagatttcactgagaagaaggtaggggattcacagc

SEQ ID NO: 85242 - DNA, 1050 bp, Homo sapiens
gatgtccatcactcaagttcattttcatttatttatttatttatttatttatttatatatttatttatttatttatttatttattttgagatggagtcttgctctgttgcccaggctggagtgcagtggcacaatctcagttcaccacaacctccgcctcccgagttcaagtgattctcctgcctcagcctcccaagtagctgggactacaagcgtgcaccaccatgcccggttaatttttgtatttttagtagagacgtggtttctctgtgttggccaggctggtctcaaactcctgacctcagatgatccgcccgccttggcctcccaaagtgctgggattacaggcgtgagccacagcgcctggcccattttcattttttatagataatgtgtgccctgtcatgcctttcctggggcacagtttgtctaattcacagcatctgtggtagaaaaattagcagcttagccaccactgtattaataatagttccactagacccacccaccatgcgctaaaactgtactatgaaaggtctctgcagctcttctgtggaagagcattcttctatcttgtctctgtagtattgtgggttggcattggccactttttgaattttcttactcattggccttcttgccacattttctcagcttctccctctctgctgaccactccttctatgcctctcttgactcttcttatcccttccaaaaattcaatacatttactcatttgttttatacacacacacacacatgcacacacgtgcgcgtgtgtgtgtgcctctttcctgtgccaggctctgttctaggtacgggggatatggcggtgaacgagaacccacagtccctggtgtagatgttcatgtgtccaggagagacagacagtaactgagtacctaaataatgattcaaggccgggcgcggtggctcacgcctgtaatcccagcactttgggaggcccaggagggcaaatcacttgaggtcaggagttcgagaccagcctggccaacatggtgaaaccctgtctctactaaaaatacaaaa

SEQ ID NO: 85243 - DNA, 1073 bp, Homo sapiens
tcacccaggctagagtgcaaaggcgcatctcggctcactgcaacgtccgcttcctgggttcaagcgattctcatccttcagccacctgagtaattgggattacaggcacatgccatcacgcccagctaatttttgtatttttagtagagacgaagtttcaccatgttggccaggctggtctcaaactcatgacctcaagtgatccgcccgcttcggcctcccaaagttttgggattacaggcatgagccactacgtccagcctgaagttgcatttctaacagtctcttcagtgatctgtgctcctggtcccacgtcacactgtgagttgccatgctgtaaacacaaacatttctgtcgttaggtgatttttggtaatgtcttgagaatgtctcccaatagagggtgacaaaaagttacaaggaatgaatgaaacatgaactgaggcgatttgattcaatacaaaatgggcccagttgtctgaaattgtgagtctaaaatcatctgtgataggaacccatgagcatctggtaaaatcccatcatttcactacaatgcaactctgttcatttaattgcaaagtaaatacagaacatattctcctagaattttaaattcatatcactaatggagaatatattgattttgaatttagcaataccaactggacttactttactggaatgctttacagttctttaaaaccactactccttgattacctattctattgataatttgtatgctttcattcgttcatttcttcactcattcattcatttctttaacacatatttactgagcacttactatgtgccaagtactgttctagctgctggaatattcccatgttaactaccatcaagtaagaaagtcctttgagactgggcacggttgctcacgcctgtaatcccagcactttgggaggccgaggtgggcagatcacaaggtcaggagatcagaccattcctggctaacatggtgagaccctgtctctactaaaaaatacaaaaaaaaaaaattagccgggcgtggtggcgggcacctgtagtcccagctacttgggaggctgagg

SEQ ID NO: 85244 - DNA, 1110 bp, Homo sapiens
gtcttcacccagctttatttacttttagatctcaacagatcacctcatcagaaagccatatctgaccaccccattaaagtaactgttgtcataacatcttgtttatttccttcttaatgcttctctatgatttgtaatcattttattgtgtggttgtttgaatgtctgactcccccattagcctgtcaattcctcaggcacaggtatcatgtctatcttgacccttgttgtattcccagaacctaacatggtacctggtacagagttgggtagaagcagatggaggctgactggcttctgtgtattcagcctagatgccttcatgagccattgagaccctgccttcactcattgagaccctgccctcactcattgagaccctgccctcactaaccttcacccactatcatttccagctatcccttctcttatacctccatccacaccccgtgctccagagaacttcaggtcctctcatttgagaaatagcggtagggacattctccagagtgacaaggaagttaaccagaaaaggatgtgttccttactcatttttaagtcatgaagatgttcatccgcattaaacctactgacgctgtaaactctagatttgaaatagccatggatgttaaaaggtgattctggctaggcacagtggtatgcacctgtagtcccagctactccagaggctgaggcaggaggatcgtttgagcccaagagttcaaggttgtcgtgtgttaatgatcacacttgtgaatagccactgcactccagcctgggcaacatagcaagatctcgtctctttaaaaaaagaaaaggtggctgagtgcagtggctcacacctgtaatcccagcactttgggaggccgaggcgggcggatcacgagatcaggagttcgagaccagcctgcccaacatagtgaaaccccgtctctactaaaaacacaaaaaaattagccgagcgtggtggtgggcacctgtaatcccagctactcaggaggctgaggcaggagaatggcttgaatccaggaggtagaggttgcagtgagctgagatcgtgccactgcactccagcctgggtaacagagcgagactccatctcaaaaacaa

SEQ ID NO: 85245 - DNA, 1014 bp, Homo sapiens
cacagttaggatactcacagtagaggtgggtctgcacccagccccccacccaaacaggaaaatttcccctgtggctcactacccaaaagacaagttctctgtaatcccagtggaagaaaaccaaatatcgtgctgtcaaaacttgctcgcagcaattccaagatttctagaactaggctcacgatcttctccagccctgcttttcttctgttttctatctcaatgagcaagaccaccaaccactccatttctcaggccaaatacccaggaatcatccctgcttctgctcagcccctacatctcgtccgatgccagttttcaccaattccacctcctgagtgtctatgaaatccacaacactgcttttccttcccacagcctcaccttgacttcagcctctgtcatcttctggatcactcctgtcacttcctgcatcgccttcctgttccagttctgccccctctagtccattctccacgttgaagtcaggaggagctttggaaaatgcagatttgcgtctgtgaaccctccccctccaccattacttcttcccgctgaaacctctcagagcctctctattgcccagattccttgtcacacctagggccctgtgcaatccactctcctgcttatctgtggcccacacacatagacacacaactctgcatccaacatctttgtaattgttactgaggtgtgccctactgtgcctccacatcaatttccttacgacagattgtgctttcttaacctgtctaagccttagtttccttgcctgcagattgagaatagtcctagttgcctcacagtaatttggcaggttcctgaaagatcctgttgctatttgagttaaatgtttatattaacatggagagaactgacaggcacacagctctgagtcttcccatccagaaatatggtatggatctgtctttgttcatattttcttttacggttcctcagtaaacttgtggaattttcaaaaagtcgttctgtccatttttgttcattcct

SEQ ID NO: 85246 - DNA, 1038 bp, Homo sapiens
attgtttatctccgtatctccagggtgcagaccattgccttaagtgaatgctgtatgaattgagaagaaaatattttattttctccgtagtttattttctttagctaagacgatcagagttaaacctaaccttttttgcttatttgttttggtgagccgtcttgtagttgatcattggtttattaatttgaagatttacacaaggcaagatgctgattttttaaaaaaggaaaacttagagacaaaccatacaattgtacatatctgaaaagagctgtgcagatcccctgtatcctgctgaggaaatttcattgcataaatgggttactattagttgatggaaaaattaagttaactggaatccccagttcactgaccatgccagttaactgaggtatgagtgtcctgtttaaactctcagagctattaaattaaacgatcatgacatgaaacctcagaaaagtcttattgttgtctagaaagattgtgtacaggtgttgctagcctactttagaataaaaaaggcttcagtattctcaaaaatcatttcctctcccgaggaaatacaccacagtaaaacagccttttccagtactgtaattgctggctttctgcttcaaaagaaaatcctcgaatatgattcaggttacaatttccatcagacttttctgagtagactataataattttgtgtttgattaataaaataattccagaaatgaaaagaaatagaatttaatccatagagaccaaggttgttggaaacatgcagttattgaaaacattgcttttaattttgaaagatgcatacagttcaaccttattaaatgaaaagaatgtcgttctatccattgcgaaagctccacattccaagttctcatggtacttttcttgagtttatactttaaccccagtgacatgaaaacactgagaattctatttcttttatttgtttgtttgtttgagatggagtctcgctctgtcacccaggctggagtgcaatggcatggtcttggctcactgcaacctctgcctccc

SEQ ID NO: 85247 - DNA, 1091 bp, Homo sapiens
tttatccaagcctggtagtcccaaacagtgatcaccctggttaaataaatacaaaaaggcaaaacatcttttggaattgttacatgctggttatatcatgcctgaaaattgcaaatgaaactagtacatgtaccaatgcctggtcataaatgaacacattgtttactacaaattctgctgaaataaacctgtcttcacatacagttgctaaggcacttgtgcttagaaaaacaaatactttaaagacaaacaataccttcacattttcccttcaaaagtgactaatttactcaatacttctgaaaaattgtaacgaacttcttctggaatccccatattaccgcatcccacacttgccaataactatatggagcgctttggaaacgccgagggaaatagcagacttggtaaggcttaaaaaaaaaaataaggcaagatcatagatgggatgaaaaactcaacttgaatgcttccccgtgaagtcagtctacgtttgatccaaatggttgaactccaaaagcacctcagcagttcagctctcttgatttcaaacccctgcccacatggctcaaatttgcaacttaaatattcggtatgaaaacgaaagttatttaactgttagcacaggctctcttctccaaaagagagtaggaagggcatacgtttcggcccacacacatacgccgatctttgacttctaaatatcagggcacaacacacacaattattttggctttgggagacaacactgtctgttatgttggggtgggtagttacaaaaaaatattgtcttgaacactgccagagctgacgattttatgcatgtgtagtacaaacggttctttttcattttggaaagaaaaagcacttaaaaaaggtttggtagggaggctctgcagcgatatttcacctcaatacatctttcaagtttgatagcttgtaagctcacggctttggttcttgtcttcaaccttcagacaactctaagctggctacagcagctgcagaggctgagtctttaaatgaaataaagaaataattgcttcagggaacaaagggaagcaaaaaaaaaaaaaaaaaagtcctgttag

SEQ ID NO: 85248 - DNA, 1024 bp, Homo sapiens
ttttttttttttttttttgagaccgagtctcactcccatcgcccatgctggagtgcagtggcgtgatcatggctcactgcagcttcaaattcccaggcttaggtgatcctccctccctcctgagtagctgggactacaggtacccaccaccacacccagctaatgttttgtgtttttagtggacacgaggtttcaccatgttgcccaggttagtcgtgaactcctcggctcgggtgacttttcggcttcggcctcccaaagtgctgggaggtgtgagccactgcgcccagccaaaacatactttttaagaaaggcaagctttttcctgatactgaatatttaatctcagtaattgaagcatataattctacagtgattttatacaacacacacaaactctatttggttgacagtaatatttgttcgggttgattctacttctggatcctcatttcttcctagaacttgttccatgttcaccatggctatgcaacattccctttttgaagctgaccttaggtagtgcggaaacccccaaagggttgtctttttcagcagaggacattagacaagaatgagcctcccaggggacagggttactgcaccctaataagaagcatgtacgtcctggactgggtggcaatgtgtgcctttccccttttccaaacaggagcttttggtagcatcctcagggcatttgtctacaggtatatatcggatatattggaaataactaaattacttggtcataatatggagaactatttatgaactgggttgagaagatgaccattaaccagagatctgggacttgtaccacagaggcccctccttccctcgctatactgtagcaagatgtgatttgagatttttctcccgttgggaaggaagtgaatgcagttttggttgtgcttgggataattatattttgataaatgtatcaaatttgcttgaaattgtatatacctgtgtgtgtgtttgtgcgtatacgcgcacacgtgcttgctgagcagccaagaggaga

SEQ ID NO: 85249 - DNA, 2613 bp, Homo sapiens
ctctgtgctcacgtggcctttcctctgtgcatgctcagagtatgcaagttcagagaaggaaagagccctctggtgtctcttcctcttcttataatgacatcagtcctattggactagtaccccactcttatgacctcattttcattttcattacattttcaaagttcctgtctccaaatacagttacattgaggatttgggcttcaacatatgaatgttggggtgatacgattcagtccataatgcttaccaacactagagtttccctggcccctagttcttccttatgtttcatcaatgaagtaccctcctctgcacacaccttcttaagaatcctttcccatgcattcttcccatccctggaagtctctaaggagcgattcctgattcctgtctgctccttgttgtctgctctaaagagtgtaagactgccaaagctcctgtttatgaaacgcctggcttcagatgttccaccctcactcagagctgatcctgatggagaagcaacagttgccttccatgcaggaatcttctctttcagtgattctgttgtatttccagctttcctgagccattgaggcccaccatagggttttgcacatagtaagggctcagaaaatacgagttctcttcctctttcactttatcaccattaggccttccagccagacttcatatctttcctttccttcctatcttgtgttacgccatctctctcactaagagttctttgctgaccctggggccaaattagcaagatgtgaccaacagcactgcaatagacatcagaagacccaaaccctaggccacctctaggctagccgtggaatcttcatcatttgcttcatctataagatggagaaaataagacttgggccaggggcagtggctcacgcctgtaatcccagcactttgggaggccgagacgggcagatcactaggtcaggaaatcgagaccatcctggctaacacggtgaaaccccgtctctactaaaaatacaaaaaaaaaattagccaggcgtggtggcgggtgcctgtagtcccaggtacttgggaggctgagacagcagaatggcgtgaacccgggaggcggagcttgcagtgagccaagatcgtgccgctgcactccagcctgggcgacagacagagactccatctcaaaaaaaaaaaaaagtactataaatggtgaccacataaaaagttaaacatgacatctggggttactgcaaagcttaaaatggataacatatatgtcacggttctttgcaaagtacaaagtgtcgtattcacttcaaaattaatgacagtattctatttttatggtaacattttctgggtagaccgccggaccttcttacacctcctatctcactgtcatcacttatccaaggaccttaatcaggtctttgagaattcttcatagctacctcatgcccaagttataatgttctcattaaaaaaaaaaaaagtctctaaaattccacatcttctgtgaggtcctcataagctgattacaggtaggggatgacttccccaggaagccgtgtaaggcagtggctgcagacactgttttgaggggtctacaatctgactttctggattggaatccagctccattggttaccagctgtgagacctcgagcatcccttagatactcctagaatactgcctagaaactagaagtattcatgggatctacccaacattgggagatttgtgagggtgaaatgaattatagcatgtgtattcttcagaacaatgcttggcactttgtaaatgctctcactattcattattatttttctttatctacctaggagacatggaggtccctggctgctgtgtcccagtggttatttagtgattgtacccaattcaataatattggtgaaatgaatttaaatttgcttaaccaaccagtatccatgatgataccggatattcatgttttgttctattttctgtcaggttactttaatctgtcttgaaaataatcttcctagagttgcttgctggttgggtgtaaggccttgtgtttggagagaagatggggggcatgagagctgaatagctagtggcatctgaggacttggggcatgggaactgcagagcacattcttagaaacagccagagagcattcagcgaggggaagacttgttggctcaagaggaaattctgctgcttccaaaccagcttggtgaagcaagatgattctgcaagccctagtaagccagggccaggactgtgagctgtgctgctgaaggggttcaatgccaaagtaaagaaaggggattctttttagttggaggtgagaggaggaaactccttcctgtaggcctcagaataaagcatgctcgagattagccattagcaggtagctggagaaatatgagtgcctcctctttattttgtctgctgtaaagttatctttctgaagtctgtgttgtgttatgaaagagacaagtttaataaacagattctatttttgttcaagctgtggcttagaaaagcaccataaatctctgaactgggaacccactgggctctgtatgcctgtcactctcccttccaccacacggtggtgacacacctaagctgcaggtctcccacg

SEQ ID NO: 85250 - DNA, 1028 bp, Homo sapiens
gtgagactcttgtctcaaaaaaaaaaaaaaaaaaaaagcgtaagaatgaagacggacgcaggcaatcccctcttttccttccaaatcatcgaggttttgtggctgaaatacagttcctcggtttgcttgggaaatgacatgcagacacagtaaggctcagcattctgtatagcatagattgggaattaaccatgtgaccacatttgcaccatctgaagttggaattcacaaaaaaaatgtggaaaactatgatgagctatgcatccgggagaaaaggtcactgtgcctgcgtgagtgtgtgttggagaaggcttgtgttggtcaccagtgccatctgaagtccagaagcagatgtgaacccaagatggcctcagactgcaaactcctaggccaaagggaaatgaccttctaccaacagagaatcaaggaaagtgagagagggctcgcaaaacaccgacaagagaaaaaccaggtgggaaggtgagtgcatctggctaattggtcacagactgtaaattcccctcaagcatcttgttttaagccacatctgctgctgctacttagaagagcctggatcttctgaggagttgcaaaggaatgcttgcaaggacagatgctactcaggtttggtttggttttgttttgttttgttttgtttgtttttgagacagagtttcgctcttgttgcctagactggagtgcagtggcgtgatctcggctcactgcaacctccgccttctggtttcaagcaattcttctgcctcagtctcctgagtagctgggattacagatgtccgccaccacacccggctaatttttgtatttttagtagagacggggtttcaccatgttggccaggatggtctcagtctcctgacctcaggtgatctacccaccttggcctcccaaagtactgggattacaggcgtgagccaccatggctggcccggtttttttggtttttaaagtggaataacagaagtacatttgctcacagagagttacttggaagagggaaagacaaagca

SEQ ID NO: 85251 - DNA, 2150 bp, Homo sapiens
aagccaacttaaggaatgcaggacaaactaagaggtcagtgcatttgaaagcatataaacagtaggtttattaataaatataaaaactatctatttgaaaaggcagattaaataggcaaatgtctgccaagtattttggcaaaaaagaaaaaaaacaaaaccaccatattaaggatgagaaggggtatataaacacagatgctgagttaaaaattagagaatactatttataaatttatactaattaacggttcaatgatcttctagaaaacttcaagttcccaaaatagtttaaagagtaattagagaacataaatggaacagtaactgagaaagaaacaggaggagtgtacaaagaattatcctccccaaaatactctggtactaggcagttttatgggcaaactatttcaaactttccaggaaaaataatttctatgttatataaactatttcagaatacagaaaagaaggaaggcatcctatttcactatatgaatttagaataactctaataaccatacccaacaaagataacatttacttacaaatctggatgccagtctcacttatgaatatagttaccctaaaatgccctacctaaaacaatagcaaaataaatctagttttctatttaaaaagtaaagcactggccgggcgccgtggctcatgcctgtaatcccaacactttgggaggccgagacggacggatcacgaggtcagatcaagaccatcctggctaccacggtgaaaccccgtctctactaaaaatacaaaaaaaaaaacaaaaatggccggacatagtggcaggcgcctgtagtcccagctactcgggaggctgaagcaggagaatggcgtgaacgcgggaggtggagcttgcagtgagccgagatcgcgccactgcactccagcctgggcgacagagtgagactccatctcaaaaataaatataaataaataaataaataaaataaaaattaaaaaaaagtaaagcactgtgcccaagccaaattaatctcaagtgtacaaagagaggttaatattaggaaacatattaacatgattcatctcattaataaatggagtaaagccttgtaatcaccttagtagatactaaaaaggcatttaatagagctcagtatctgttcttagttgttgttgttttttaaaaattactcttcagaaactaggaattaaaggacacacactgtattatcatgctaaataataactatcacaaactaaacattactaatcattttgcctaatggtgaaaaactagaggatcagatcaagaacaaaataaggggccaggagtggtggctcacgtctgtaatcctagcactttgggaggccgaggcgggtggatcacgaggtcaggagatcaagaccattgtggctaacacagtgaaaccgagtctgtactaaaaatacaaaaaattagccgggcgtggtggcaggctcctgtagtcccagctactcaggaggctgaggcaggagaatggtgtgaacccgggaggtggagtttgcagtgagccgagattgcatcactgcactccagcctgggtgacagtgagactccgtctcaaaaaaaaaaaaaaaaaaaaaagaacaaaataagaatgtcccatctcataactaatacatatcattaatttggaaggcacaacctctgcaatatgcaaaataaataaagaggaaaagccaaaattaacatcttacttgcaaatatttccagttgtctacttggaaatttcaagagaatcaactgaaaaactaagaacgccaagtcctttgccagatataaaataaatatacaaaaattgtattctcatataacactcataaccaggtagaaaacatcacagatggagaacagattgcattcacgatagctataaaagctcaacaagaagtagatctacgaagaaaactacaaaacatttctaaggttcaaaacccaactcaaactagctgaagcaaaataaaagggggaggggagtttaccataattgtgatttggggaggtcatgactcacaggttttttaaataattggggaattttctttttctttttctttctttctttctttttttttttttttttgagatggagtttcgctcttgttgcccaggctggagtgcaatg

SEQ ID NO: 85252 - DNA, 1053 bp, Homo sapiens
cacaccaccacacctggctaatttttgtatttttagtagagatgcggtttcaccacgtgggtcaggctggtctcgaactcctgaccttgggatccgcccacctcggcctcccaaagtgctaggattacaggcacgagccattgcacccggccgactcctcctctttcaaaatcttcaattctgttccatccaggaatgtctactcccataagtgaagtacagcaatttgagatatcaaactaggattgtgttctctactgtcttccaagataagtctagtatagtatttagactttgggttccaaaatcagtgtagatctgaatcccagctctaacatcgagaccttgggtaagttacttaacctctccaagcttcaggtatttcatttataaaaattggaatagccttactataaatcaaatgagaacagatctccgtggaccacccctccccaaccccacaagattcatctcagcccatcctgtcccactctcctcccaaaacaggtgcacactctttgctcacatacaaaagcagctccaagaattttgataaattatagcctttactgaaggttttgtattgagacaagagcaggttacattgtacctcacaaagcagatcttcactttaagcagacaggtgggggcaagactgaattcctccaggtagtgaatagtctatttataaggaagaagcagatgtgttttattctatcaaaaaggctcagctttacttagagagttagcaattcctcgcgtatttccaagagcgattttaagtgagtgcactgctgtattttggaatgcctgaggttgcaatctgaatctgcaattcagtagctgggagtagaaagtcaacgctgatactaacagtctccaccacgaagttctcttattaggattttggttatcagggtgcctgtttttttgtgtgtgtgtttgtatgttgttttttttcccccttttgccagaaaaatgagggttcattttctgtctccagctcatggttacattcatttaagttactttcctagactttttctttccgaa

SEQ ID NO: 85253 - DNA, 1099 bp, Homo sapiens
ctgagcaaggggcctgcacaccttcaccttcctcttagctatgaccagctgcaccctctgcctcaggatcagcacgcttcggggtctgctgcttccaatctgaccctaggccctctgagccctctccctcccctccaccctattgcccttacaggatccaacctcttccctcccaaataaatgacagctgccttattccctcatctctgcctctttccctgctctatcatgtctggcagcccttggccaactctgtccagttgccatttgcttggctgtgacgggctcctaccgctcactttggcattactttgcctcaggcaggcagctccagctgcaacggcctgagtggtccgatgggactcgaagtggctctgcatcctcccccatttggcaccgaagcttttctgcctctgctcacatgcctgccattcagacccaggtgggtgggctacattgtgggctttccaggggattcttcataattgggtctttctgctcttaacacgctcatggccctgtcctggatccagtgtccctcacccagtgactggaaaatcacccagccagccaagtggcactgtagaaatagccgtgatgccagagagcgagtgatttagtttcagccaggagttcatttcaagtgttggaaaatgagctggtcctgactctcttttctcttccttcagcccttagcaaaatgtagaatattgttgccattgattgaacatgcctataaaaggaggtgaaagtaatttcctgtagcatcctcaatgcagatgtttggcactttggttgtttttggttttcgtgttttgttttcgctatggccataatgtttctgtgggaacttttctaggtagtctgtagatttcagaatcccagagcaccttagtcccattatgctctgggaattcattagggactcagacaccatctttttttttttttttttttttttttttttttttgagatggaatctcgctcttgtcgcccatgctcaagtgcagtggcgcgatctcagctcactgcaacctccacctcctgggttcaagtgattcttctgcctcagactcctgactagctgggactacaggt

SEQ ID NO: 85254 - DNA, 1152 bp, Homo sapiens
gagactcgatctcaaaaaaagaaataaaataagagatggcagaggagagtaagtggtccctaggattttgaggagtatactacttggctcatcctctatcccagtatggacattgaaataagttatcaacctcctttgaaatactaatgagctctttttcttccacaactcaagcagtgttttgtattctgggaaaaagccttttctctttaatttttgtgcttcaaagtttcttttttaaatggatgtatattttcctgtggaattctcaagatagtttttcatgtgtgtttgtagggacgacatgttttagaaatttctttccaatcctcttaggcattgtctgagagtttttctgacgtgtaaagctctcagttcccttttattgtttcctgagctgttaggactacctcattccattttactttaaacttaacattttccagggaatgattggaattgaaataggcattcattcaaatgttcagaacttcatttctcctgcacccacttctggctgtggccttgtaggaataagaatggaaactaacaaaaagtgataataaaaggggaagaccttggtgagtaaatatcaaacataccatttcaccctgaagctttttttttctagctatatttactacccctctaaatacccagttagaaattgaaagtaggctgggcacggtggcttacacctgttatcccagcactttgggaggccgaggtgggtggatcacaagatcaggagttcgacaccagcctggccaatatggtgaaactccatctctactaaaaacacaaaaattagctggacgtgttggcgggcgcctgcagtcccagcaactcgggaggctgaggcaggagaattgctttaacctgggaagcggaggttgcagtgagctgagatcgtgccactgcactccagcctgggacacagagtgagactccatctcaagaaagaaagaaggaaggaaggggaaggaaggaaggggaaggaagggaggaaggggaaggggagaaagaaaggaaggaaaggaaagaaaggaaagaaatctaaagtattgtctattttcctcattcctggcatggtcgttttgcacctatccacctgtgaagttgttcttggcagatggatcttgatcattcctt

SEQ ID NO: 85255 - DNA, 1067 bp, Homo sapiens
attttctggaaaatcaggagttgaatgttccatcctgtgaatttaggatttaaatgatagaaaaccatgctagtgtttatcatgttttccttttgcagataaatttaagtactataaattcccgttacttaacatagccagatgcctttaatatcttctaattttcattttgtgaaaatgttcagtgaaacaaatttttaaatggcattttcccagatcgacattagaggacaagtctgtttgagagggctattaattgctcagagagtctgcatgttggggaaaatcacagccctttccagctttgataaatgagagaaggtcacctgagggaaaggagcagctgccctctttgataggctgagaaaacaggagttactggcctcggcaggtgtttggagaattcccacgcaggtgcacattccaaatgaactatttattacacgtgggcttctgtgacatggtcatctttcacccattcatcacatttttattgaatcccttcagcaatgctgtgctatgggaggatcccgcggttgcgtcagccttagagtcctaccttcaagttgcttaaagtccagcaggagagagaaagaaacaccacaatcatgctcatacaagacagaatctcatcagtgtttcttagctcctaaatgaccaacttaaagcattcataataatagtcagagtaagcagtatccatggcgctttcaaagatacataatgtctctttcggtccttacgccaattctgtgggaaagtttgattccagtcttgtctgtcttatatatgtgatgacagaagccgggcacattcctgtctcataaagaaaaagccctttctgagcataggccaatagacagagtacacagcaggaatgaggagtccttttttttttagatggtgtctcactctgtcgcccaggctggagtacagtggcgcagtggcgcgatctcggctcactgcaacctccacctcctgggttcaaggaattcccctgcctcagcctcccaagtagctgggattacaggcacctgccatgacgcctggctaattttttgtatttt

SEQ ID NO: 85256 - DNA, 1394 bp, Homo sapiens
gcatgggaaccagctgtgaaatgataaatcaagacctctttaaggtccaggattattttggcatctttcacatgagaggctttaagaagcaggaatatggctaaaagcatggggtttattttaagagagaaaacagttacaatgatcagtttggctgtttaaatagacgtagcttcatcatggctccaatgtggctgttttgcacctagcagtagagagaacagttctaattaacccctttcatctgattttactgtctctgggtaaactgagccccatccatcattccaaaggctctataaaaacttggagtggttgagagtacccggggcaacagtgtggtttggtttctaaggctacgtatcgaagaatcacatctccactgcttcttgaactggagcagaagcatttctgggttttgtggtccagatcctcttggggcatgtttttcttagaaaccttctccatctcctggctccagctgtccttaccactcagtgcatcctcacatttgcagctttttttttttttttttttttttttgagacagtttcactcttgtcaccaggctggagtgcaatggcacaatcttggctcactgcaacctccgcctcccgggttcaggcgattctcctgcctcagcctcccaagtagctgggactacaggcacgtaccaccacacctggctaatttttgtatttttagtacagacggggtttcaccatattggtcaggctagtcttgaactcctgacctcatgctctgcccacctcagtgtcccaaagtgctgggattacaggcgtgagccaccgcgcccggccatttgcacttttatctgcacatctgtctcttgatctccctgtcatttcctggcactcaaaaagtttaaaccaaattcatcatttgcaacccctcaccccactatcataaacacacgcgccacacacacttgaaacccagacaagaagccagcccacaccggtatttgtgtttggcaccactgttcttcccgtagctctggctggacaattcctttcctatgtggagctctttctcctcctccagtgcctactgcccctcaggccatagcatgtcttgcacgcttagggctctccctttgcattttctctgtcaccattctctgaagggccccccactggatcatcctgaaacactactcttatcttgccaggcccttgttagtgtaaaccttggagagctccaacctggctctggagcaggggtccccaacccctgggccaggactggtaccggtctgtggccttttaggaactgggccgcacagcagcaggtgagcggtggttgagcgagcattaccacctgagctccgcctcctgtcagatcagtggcagcattagatataggagcgcaaa

SEQ ID NO: 85257 - DNA, 1031 bp, Homo sapiens
aggcaactgaaataatgtggatgaggattttctgagccttcaaatttttttaaaggacttctcagtctggaaagatgaaatttgaatagggatagaaagtttattagattatgaatggtttggataggctatacattggttcccatattcttttttttttttttttttttgagacagagtcttgctctgttgcccaggctggagtgcagtggcgcaatctcggctcattgcaagttctgcctcccagattcatgccattctcctgcctcagccttctgagtagctgggattacaggcgtccgcaccacgcctggctaattttttgtatttttagtagagatggggtttcaacgtcaggatggtctcgatctcctgaccttgtgatctgcccacctcggcttcccaaagtgctgggattacaggtgtgagccaccgcgcccagcaggttcccatattctacaatgttcatatgtaaaagaaataccacctgtcacacaggataaattccttcagtttagtagcttgcagttacatactatccaaccaccattatttatttcacaaaagccttcacacacaccatacaatggaatattactcaaccacaaaaaaggaatgaagtagtaatccatgctaaaatataaatgaaccttgaaacattatgccaagtgaaagaagccagaaacaaaaagctatatattatatgatttaatttatataaatgtccagagtaggcaaatctatagagacagaaagctgatcagtgattgccagggactggggagttgggagaaatggagagagactgcttaatgggtatgaggtttccttttgggctgatgaaaagttctagaatcagcctggccaacatagtgaaacccagtttctactaaaaatacaaaaattagctgggcatggtggcaggtgcctgtaatcccagctacttgggaggctgaggcaggagaatcgcttgaacctgggaggcagagttttgcaatgagctgacgtcgtgccactgcactccagtctgg

SEQ ID NO: 85258 - DNA, 1051 bp, Homo sapiens
ggcagatcacgaggtcaggagttggagaccagtcaggccaacatagtgaaaccctgtctctactaaaaatacaaaaaattagccaggtgtggtggtgcgcgcctgtaatcccagctacttgggaggctgaggcaggagaaacacctgaacctgggaggcagagattgcaatccagcctgggtgacagtgtgagactccgtctcaaaaaaaaaaaaaaaaaaaaaaagacaaggaaatcactacattattatgacattattacatataaccacattaaaaacattcattattcaccatttaacattggcctatatagatgttcattatactatcttttcggcttttctgtcaggttgaaatctttcaacataaacagttggagagaaagatggaaagtatagacgatgaagctgcccatgggttagtgccttagttcccatgttaatatttttaatatgtctaaggagtgaaggaatgcctgatgaaatttctttctaggtctgctactaatcagcacttttatatctcatcctgaaagataggaagattttaaaagataaaaacattttaggctgggtgtggtggctcacgcctgtaatcccagcactttgggaggccaaggcgggtggatcacccgaggtcaggcattcgagaccagcctggccaacatggtgaagccctgtctctactaaaaatacaaaaattagccaggtgtggtggcgggcacctgtaatcccaggtactcaggaggatgaggcaggagaatcacttgaacctgggaggcagaggttgcagtgagccgagatcgtgccactgcactccagcctgggcaacagagactccgtctcaaaaaaagaaaacaaaaacaaaaacaaaaaaaaaaacactttagtgtgagcaagatgtcgcattaggcaaatatgatagatgctaacttctagggtcaatcagaagagcccagctactcaggaaagcaacaccaactgctctcattacagtagttcccccttggtcttgctttccacagtttcagttacctgtggtcaaccac

SEQ ID NO: 85259 - DNA, 1053 bp, Homo sapiens
caagattgcgccattgcactccagcctgggcaacaagagcaaaactccatctcaaaaaaaaaaagaaaaaaaaaagccttagttccactgagaggatgctggatataatcccacccaggtttccctgtagcactggtgacccccaaggggctggggactattacatgtaagccaatcaaatacagccataatgttcccatccttaaatcacatctcctgccctggggtattgggtgctcccggagtttcctgtactcatcctcacttctctctttgtaatcttttccccctactctctcctttcctgttttctctcagttccagtcttcctcccttaattactgtcctctctatttatcatcttggtcaagaatatgccttttaaaggcctcatgcccaagctgcatcccacccttcagccagcattcctagcaccctgccatcctccggtttcttttgtgtggcctcaccagccgctttctctcctcaatgtgtcaccgaacatggggccatctggaagtgtgtttagaagataacggagcacaggaatagtcccaagaagtgcatttaaaaactgttactgtgtaataactttatgatacattctgccgcatcctcttaaaaataccttttgtatctgttttcttgtcatttccattatgccttttaaagtgggttgaagaccgtgaatgaacaactgagtggtgtaccatggctgcccttttgcaaaattgaagacctttttttcccttctgtttagagacagggtctcgctcagttgcccaggctggagtgcagtggcatggtcatacctctgtgctaagctatcaggaggatcacttgagccctggagttcgtcccctgtagctgaaactacaggtgtgcaccaccatgcccagctaatttttttgtttgtttttttggtagagatgaagtctcgctttcttacctaggcttgtcttgaactcctggtttcaaacgatctaccttggcctcctgaagtgctgggatttacaggtgtgagccactgcacctaaaaattgaagactgaag

SEQ ID NO: 85260 - DNA, 1009 bp, Homo sapiens
acctttgctgatcctctcctatcatacagggtggccgcatcaagttaaatacatgcagagttaaatcatacctgaatagagacttttaccttcagtgtgtttttattatttgaatttttttttcaaacatatatagtttttctcattggaacaaaacaagaaagagattatttatttatttatttatttatttttttttttttttgagacggagtctcactctgtcgcccaggctccaggctggagtgcagtggcacaatctcagctcactgcaagctccgcctcctgagttcacgccattctcctgcctcaacctccctagtagctgggactacaggcgcccgccaccacgcctggctaacttttttgtgttttgtttagtagagacggggtttcaccatgttagccagtctggtcttagactcctgtcctcgtgatacgcccacctcggcctcccaaagtactgggattataggtgtgagccaccgcgcccagccagagagagaatttttaatggaagataaggagaagatttggcaggttttagtatgtattagggcaggaaaataaaggaatagaattacagagaatctttacttctgggttctgtgttcaaaagtaattggtagatagagattccttatgtttttctcccaagttggcattatagctctagggctgtttttaattacatgtttgtttgtttgttgagacagagtctcacactgtcatgcaggcccgagtacagtggtacgatctcactgcaacctccgcctccctggttcaagcgattcttatgcttcagcctcctgagaagctgggattacaggcatgggccaacaccccggctaatttttgtatttttagtagagacggggtttcaccatggtggccaggctgatcttgaactcctgacctcaagtgatctgcccacttcagcctcccaaggtgctgggattacaggcatgagccactgcgtccagcctagttacatgtttaaaagtgagct

SEQ ID NO: 85261 - DNA, 1046 bp, Homo sapiens
acagaaaaatgtaaaagactgtaactttgaccatatttatataaactgcaacccccagagggttatagtataataatatatcaaataccggccaggcgcggtagctcatgcctgtaatctcagctctttgggaggccgaggcgggtggatcacctgaggtcaagagtttgagaccagcctggccaccatggtggaaccccatctctactaaaaatacaaaaaaaattagctgagcgtggtggtgggcacctgtaatcccagctactcaggaggctgaggcaggagaatcgcttgaacccaggaggcagaggttgcagtgagccaagatcgcgccgctgccctccagcctgggcaacaagagcaaaaaactgtctcaaaaaaaaatataaacaacaataataataacatagcaaatatctacctagctatcattattacaaagataaataaggcaggtccctcttcttaagttgttcttattattatttttaaacatgtcttcttcaatcagtttaaactgttcccctccccagacatacctggagtattttcaataaatgacttctccatcatgaagataatatatactaagtagtgaaatggtatagtataaagctcttaggagacctgcttctgtaatctaagagaatactgtggcactttgatgaatatattggcattgctggatattcatttcaggagctaaaatgtatgactcgctgacctttctttctcttggtgccctgaaagattcactctatcctgtaccctgcgattgctcatggggtttggataatgcgcgtgttaagtgtttgtggtcagaatatcgtttatatgtgaccacatcaatgttgtctgctttgattttgagttcctactgtggaaaagcctgtttttctgctaacagcatttatttggggagtgggaataggagcagtaagttcaaacgttgacgcttcagcttaatccaggcaaattgaagcctttgagagaagtgcaaaattggaaaacctttatttataatagaaggtggttgatagggactg

SEQ ID NO: 85262 - DNA, 1076 bp, Homo sapiens
tatatatgaacacatacaaatgcataatcaaactgcaagcaaggtgtactttaactatagggggtgggaattaagcagcccagtggagtgtaactcaattaccattcacagggcaattctatcactgtttaagaggacttgggtgcagtgtggatagcagccgccacatcatcattttacacaaaggagtgtaaaaataggttgtgaatcatgaaatggccttttgtttcgctacccttggcatatcttccttgatgggccgatgtatcagtcatagatgcttgagcagtgagagaatttctagttatgaatacagactgaactgcaaggggccacacaggagagaggcccgatgatgaatttgtttgttcagttcttaacaagggattcaagtacctctttgtgaacctttcactcaggagcacaggctttaaaatttttaccgagatttttgtgtggattttcctcccttttcctccctcaaccccaccccaatgatagcatcaagtagaaaacaatactgtttttttttttttctagcttctaaatgcaaattagactgatatttttccactggtacctctatgtattttcagatctgttacttccattaaggacatttacataaaagtaggatctttgtaattgcagtttaaatattcagtgtgcttggtcctcattagaattcaaaatagagccttgtctgagtctgacagagggcgccaattgtgaaagaccagactaagaattctgaatgactcgggtggatgtacagtcttgcttctcagcatattgactattacgtaatgttgtctaagcacgtttattgtgattttagtagtgtttcagtgatgtggttagaaatcaacccagctgacattgcattaatgctgtctcaatcgacgaccattggatctgccttcagctcatctgaatgtgatcttcttagggaggtggggcaggaccctggttaagagtagtagcatgcagcacaggtgtggcgtccgacagtcctggggcacaatttgggatctgccacttacagcctgggtgacttagagagctgcttgccctct

SEQ ID NO: 85263 - DNA, 1503 bp, Homo sapiens
atttgctcctgtgaggccgggtgtggtggctcacgcgtgtaatccctgcactttgggaggccgagatgggcggatcacctgaggtcgggagtttgagaccagcctgaccaacatggagaaaacctgtctctactaaaaatacaaaattagctgggtgtggtggtgcatgcctgtaatcccagctactcgggaggctgaggcaggagaatcacctgaacctgggagacagaggttgcagtgagctgagattgtgccattgcactccagcctgggcaacaagagcaaaactccgtctcaaaaaaaaaaaaaaattgctgctgtgattagttacaagtcactttaagtgttgattttgaaccaattttagatttatagaaaagttgcaaaaataatgcaaagagctttcttatttccctcaccctagtttccctaatattaacatcttaccactgtgttccttggactatgtatttgtgtattttttaatcctccgtcaactcaagttgactgaatactcactttttactactaggactttaatatttaattgaataatgacaaagatatttaacttttgagacttttgagttccatgtacttgtattcttttatagcttgtctataccacttttagtacagtgacttccaacatttttagatcatgcatcccattagtaggaattatgagcaaccctctcgaatatttttataattgtatctgaaaaattatatatactactgttctatatattaggttgcttctaaaaaggctgagagattaagaagtaaatgcagcatattaatggaaattttagtattttctttccacattccagtgaatcatcttgtacacccaagtttgcagattattggcttgaattacgattttggcttaaaattctccctcccttcctgacagaaatggaacctagtgaggaaacgatcctgttatgtatattgttttaacattgattatcccggactatgtaacataggaattttccgatgtgcaatttggaaacagctgaactgcttttgagaattttacaaaccaagtttacttgaaaactttgtgattaattaggcaaaacaatttctcttaaagcaaagctatggactgtgtttttcctggtgttgagaacattcgttttatagccagggattttagagtcttcatgctacaacaaaggcttttttcagatctaagcacagtatgaaaaataagacactttgcaaggtgcttgggaaagttctaagcagctcccaagtggggaagcctttgttctggaggaagaggcctgaattcaagggttaatcagagagacattgagaacatcattcactgctagtataggtcagagagaaaagttcacatctgggtgttactgaccaccaagcactttcttgtggtcctttcagaagtgatatattgttaagtatcccaagagtacaaacctctagggtagatttattggaggaaaatgctccttgtccacatgataa

SEQ ID NO: 85264 - DNA, 1740 bp, Homo sapiens
ccctgaagtactctgtgtattccttaagagaaggggccacattttttcccattcttttttcccccacatacaaaaaatggtaatatttaatgcctacaacatgatgagtttggagataggtgtacatccatgaaaccatcatcacaatctatggaggaggaacttcttatctccagtagggccaataggtagtttttgactgaatgaaagaatgaatggatgcttttcatgagtgatattgtgggccgaagagattgagaaaagcttatagtgatgaaggatctttgatttcatcccaaaccactaattgagcatctgtgcaatgcaagtgctcacgacaaagctatgaagtggaaattactatttccgttttgctgattttgaaactaaagacttgggttatttggttaagaccgtctagctcatcataagtgaaggagacgtgatttgaacccacactggcctggggtccaggcgtatgccttgtcttccacatcaaaacgctagtgtcaaagaataaatcttaggagtgcattatgacgatggtgattttgagattataaagcatttgggagctcacaaaggaagcctgtggttttgtagaggactagaactattttcacaactggtttccctgactgcatccatatctgtgtggccttaatattgtttgactcacaaaggaaacttgttgatccagagtgaaccagttcaactttcttctcctcaatctcaagagtattccatggaggaaaatgttctaaactgcacctgagctataaacaatttactctgaaggtaacagtgttagtattccagtacgtaaacctttagctaataacaatcaaagtagcctaatttggaaagtacacagaaggttagagggaaagcttgtaaatgttttcaaagactctgtatttaattctatcaccagctagcaaaataaataggccagctgctagctctgaaacagacacgtggtggaaatgaaatgttaatagttgaaatgccttgctcattcgaaaccaaaaggaacatgaagtacactttctagtttatgagagacaaggtgaaagttcccaaaacacatttgtggtgactgcatttaaaattgcttcctcatcttttattttagtggctaatactttagtgtggcctatgtgtgactagagggcattttttttttcttccgatttagatggaaggtttggaaataaatggagagtggaaatcgggagatgttaaattctacttttccatgtgtctaagttgtttgctctagtttgtaagctgcaggccagacttttctgaggaatgggaggttactttcaataatgtgctaagattgacctgagatatttagccagcacatctgcttgcaagctctggccgtatgtgaggagcttatactggaattaattaactctgtttggtattctgaaatgtttgctccacatcttgttttaccatcacaaaacttacaaaatcaattggaacttttttatttttacttaagaacttaaaaaaaaaagccaggtgaaaaagagaatctgaaaagcagttgttttcctgcttgaagcaaactttcaagaacgagcattagaatcagaatttattttttcaaatacttctttttaacttaaaatgatggtgaagtgtaactctttcatccattacattaatgccatttttgaaatgtttgattttattagaaaacaaggagattgaagtgagaggggt

SEQ ID NO: 85265 - DNA, 1090 bp, Homo sapiens
acagtggcttgttcctgtaatcccagcgctttgggaggtcgagttgggcaaatcccatgaggtcaggagtttgagaccagcctggccaacatggtgaaaccccgtctctacaaaaaatacaaaaaattagccaggcgtggtggcacatgcctataatcccagctacttgagaggctgaggcaggagaatcactggaacccaggaggcggaggttgcggtgagctgagatcactgagactgcaacactgcactccagcctgggtgacagagtgagactccatcttaaaagaaagaaactatggcttgggagtaatgtagatgatggataggagcggggttgggatggtagacagggaaaccagtcaggaggtggcttgaagtagttcagtcatgacatgatgttggcctagactggagtggttaggatgagaagatagggagagaagtggatggatggaggggaggttttaaaagtagtaggaccagtgattgattgggttctgcctcaggcagctgcatagatgacaatggccttgactgccatagggcacacaggaagaaaaacgtgtgtggcggtaaagtgagaagacactgagttcgaagacacgtggggtgctctcagcttaggtgtgtcagaaatagtatgctgcttttgaatctggagctcaggggagacctataaactggaattttagatctgagagtcagcctgtggatggtaatcaaagccatggtgccaggcgcggtatgtaatcccagcactttgggaggccgaggtgggcggatcacgaggtcaggagattgagaccatcctggctaacacggtgaaaccccgtctctactaaaaatacaaaaaattagccgggcgtggtggtgggcgcctgtagtcccagctacttgggaggctgaggcaggagaatggtgtgaacccgggaggcggagcttgccgtgagctgagatcgcgccactgcactccagccttggcacagagcgagactccgtctcaaaaaaaaaaaaaaaaaaaaaagccatggtgctgagcatagatggagaagagctcagcgtcttagggcagcgccttggggagccc

SEQ ID NO: 85266 - DNA, 1051 bp, Homo sapiens
aataagaaagaggaagcaaaatatcaaactcaaattttctaagcagtgaaacttttgttccgttttctaagaattcatggtgtccatctctctctctctctctctctgtatatatgtatatttttgtgtatatatgaatatatttaaattgcacatttgtttatgaagtattcaaaaataatcatttttggaaaaatctagcaacttgggtatttttctatttttctttaaatattcattttttattgaaaggagaacttagagatgggtttatttataaagttataaaaataatttggacatatatatcataggagttaaattatatctcttggaataggaacttttactgaatgcaaagtatataatattttcacttcattagacaccacgaaccctagcaggggtcatagctacatcagaggtaccattttatttagaaaaattttaaaaactatggtttccaaagggaattagtgcttactttggaaagttacattaaacgtggagatgatgccttgtgtaagttctcgaactgagatgtctgtcgccgtagatcacacacttagtaacaaagtgtgacatggaaagatgagacgaaatggcattgacttatgggatcctgttttttctccacagagagatacatatatgtggaatcaagttctgaccactccaagtctagcttgaagaagttgttaatgggattatggtgtggattagatctggaaaaagtgaataattcccaagataaatgctggaagggagggacggtataaacaaaggagataattttaacatatatgccagaagatttgagggcttaagtttgtgtaagcaccattgctttaagatagagtgaggaagtgatataagtaaggctgtcttattcatttttgtgttcctggtactgagcgcagggcccagaacacagtccatgcttggcaaatcttttttgtgttactggacaaaaaggcaggacctcttatggaggaaggctgcaaaagaggccttgtttcaggatgtcatttggacttcctgcattgctggt

SEQ ID NO: 85267 - DNA, 1052 bp, Homo sapiens
ggcaaagccctcattgaggctggaagagcacagagattatggtaggcagaattatagcccccactagagatatccatgtcctaggctctgtaatctgaagatgtgttactttacgtggccagagactttgcagatgtgctaaggaagggtatggccttgagatggagagagagttttggattctctgatgggcccagtgtaaccaccagagttcttaaatgtggaagagggagcaagagagtcagtgttagagtgatgtgatgtgagagactcgagcagtcattgctggcttagaagatagaaggggccacaagccaaggagtgtgggcagcccctagaagctggaaaggcaaggaaatggattctcctggagcctccagaaaggaagacagcctttctgacacgttgattttaacccacggagacctacgtcagacatctgacctctggacctataagatgataactttgtattgttttaaggcactaggtgtgtgggaattggttatagcagcagtaggaaactagtaacgagatggaaagaatgatggctgcttgatgactttgcagaacctcagcattagccaactctagagcaaccctgcatttcttaccatgagagacacatttctgtgatgtttaatccagttcgagtctcattttctgctacttgcagccacagctgtcctaagcaagatgcatacgtacttagcagagttctgtgtctaaggcggactctaaatgagtgtttgctgaatagtgaaaaaatgcaggagaaaaaaaccccagaatccacatctaaagaagcagggctgttttccgattcatagtaagtgtaataacttagaactttttttttgttttttaaaaataaaagacacaaaagatgtttggaaagatggataaattatttgaatgctgagatggcctagaacttcagcaggtgcactttcaaattgccagattcatttcctatagtgacctccaggcattcagagtctcttttctgaaataacatttcagcagattctgtgaacatgccaagaagtgat

SEQ ID NO: 85268 - DNA, 1058 bp, Homo sapiens
tcttctgctcccatgataccttagagttctgtttttaccctctcacctagttaacaactctatgtcttgttaatggctctctctgccttaaattctttctgttaaaataactggagtgggccgggcatggtggctcacgcctgtaattcgagcactttgggaggccaaggcaggcggatcactaggtcaggagatcgagaccatcctggctaacacggtgaaaccctgtctctactaaaaaatacaaaaagcattagccgggcgtggtggtgggcgcctgtagtcccagctactcaggaggttgaggcaggagaatggcgtgaacccgggaggtggagcttgcagtgagccgagattgcaccactgcactccagcctgggcaacagagtgagactccgtctcaaaaaaaaaaaaaaaaaaattaaataactggagtgatttctgtcgcctgatcagaccctggccgatacgcctatataattcaggcctctgctgtttggcttcagcttcgttcatcatatgacactgtcatctggaagagcagtcagtcctctaagcagcctctctgatccatacttcatattgcattgggagtgctggatttctttgaggaacaagagcacgagagcaaactcgaagttagaacctctcgtatattttctagcaagtcatgcattggtcttctcaaagtcatgattacttttgaattattttaaaaacttatttgatgtgtttttgaagaatgtggtagaaaacaacagatttcaactcaactctcctgtgcttaagagccagcatattggcagggcacggtggctcacgcctgtaatcccagcactttgggaggccaaggcgggcggatcacgaagtcaggagatcgacaccatcctggctgacacggtgaaaccccatctctactaaaaatacaaaaaattagccaggcgtggcagtggtcgcctgtagtcccagctacttgggaggttaaggcaggagaatggcgtgagcccaggaggcggagcttgcagtgagccaagatggcgccactgcactccagcctg

SEQ ID NO: 85269 - DNA, 1230 bp, Homo sapiens
agacggagtctcgctctgtcgcccatgctggagtgcagtggcacgatctcgcctcactgcaacctccgccccccggcttcaaacgattcttctgtctcagcctcctgagtagttgggattacaagcatgtgccaccatacccagctgatttttgtatttttagtagagatggggtttcaccatgttggtcaggctggtctcgaactcctgacctcgtgatccgccgaccttgacctcccgaagtgctgggatgacaggcgtgagccaccacgggcggccctttaggcaagtttatttacccgaaaggcttctttcttgagtgggaagacaggctgtgatgtgtactctgtgtaaatgggcaagatatgccagtcggcaggtttctttctaggatatatggttaggtaaaagagggcacaagccgattcaggaccatttgctataacaaaactaataacataaggagaactccaatcttggggtgacatcttttatatgttttatttctttttacccctgtgtctatcctagaggctcttctttgactcattctctagcctggacaccaacaccatgcgcactcccaggcaaactttcctctccagagaaggctgttccgggggttccagctgggggcaagtactgcagactgcagtctacacagggcagggctgtgggcagactggctcagctgttctgtagacagctctccactcagatgccctgattcctgccttataaccacttctttgtaggccattctgtggctgccaatagccattgactctaagcttggagcctctccagggttctgtcaaaaagaaagagcttcttatctgcagcctgatgtatttccagctgtatttcacccattccccacccccagttttggtttattggtcaatacagtcccaactctattcttgaagagaatctccaaaatgatgtcttcattgataacgcttcttcgtgtcttcagtgccaccatggatttattctttcaaaaatagcttgactgccatttcattgtgctctttggaatgaaggaggcaaccatgtgtgctttctctactgtttggagctcaaagtctctctcttttgcatttttttaccaggtcatagtatctatagaaatcattttgctgaaacagctggtgttctggaggcttcagtaaaacaagttttttttgtttgtttttgttttttgctacagagtcttgctctgtcgcc

SEQ ID NO: 85270 - DNA, 1043 bp, Homo sapiens
aaaaaattagccaggcatggtgttgtatgcgtgtaatcccagctacgcgggaggctgaggcaggagaatcgcttcaacctgggaggcagacgttgcagtgagccgagattgtgccactgcactccagcctgggcgatagagtgacaatccatctcaaaaaaaaaaaaaaaggaaagtaagctttatagaaaatctgcctatctggtgtacaattgttcctcatcccaaggacatttagcctattcgatgggtgagactagagaggactctagccaccaaactgatgatcatgtgttgtgatatacgtgcaggtaagctgcagtgtctgcgggtggatggctaacaagtgatggtgctttacatgcataatttggtgggatgatttactaagttcccatatgaaagcaccgtttctttgtccagcataaggcaatcaagccgcacgtctttatcttgtctttcgtctggtttagtggttatcatactttgctgcatattagaatcacctgggctgcttttaaaactccaagagcccaggccatacctgtgttagttttcttttttgttgttgttttcattttttttaatttgatttttaaaattagcttcctcaggttgaagtgtgttagttttctgttgctgttgtaacaaattaccaccagtttagtggcttaaaacaacacaaggctgggtgcagtggctcacgcctgtaatcccagcactttgggaggccgaggtggatggatcatttgaggtcaggagttcgagaccagcctggccaacgtggtaaaaccccacctgtactaaacatacaaaaattagccgggcgtggtggcaggcgcctgtagtcccagctacttgggaggctgaggcaggagaatcgcttgaacccaggaggcaggggttgcagtgagctgagattgcaccactgcactccagcttgggtgactgagcgagactctgtctcaaaacacacacacacacacacacgtgaccgagcgagagactctcaaaacacacacacacacacacacacacactct

SEQ ID NO: 85271 - DNA, 1035 bp, Homo sapiens
cccatagccaatctgttcacatgtatatgccatcccgtaacctacccatcctacccagcccctaggttattttgggagcaaatcccagacatcgtatcatttcatcagtggatatttgagaatatatatctgaaatatgtttggaaaagataaatactgttttggaaaactatagtcacatgccattatcatccttaagaagttaacaatatttcctgaatctaatcaaatactcagcattcaagtttccctgattgtgctgtgatgttttcttttaggtagttcaattcaggatctaaatatggcccatacattgcaactagttatgtctcttaagtttctttaatatacaggttctttttccaactcttcctttttcttctatgcagtttcttcattgaaactgcatttgccctttagtttcccactatccagatcttgcatttctgaatgtctacagataggaaatatccaaacacctaatggtttcaaggggatttttaaaaaatgattgtattagttttctattgctgctttaataaattagcacaaacttagtgacttaaaacacatttatgatcttacagttctgtaggtgagtagtccaatgcaggtcccacagggctcagatcaagcagttagcttgattcttttctggaggctcattctggagaattcgttcccttactttttgtagcttctagagggctcccacatctcttctttcgtcttcaaagccagtaagttatctctctctgacccttcttcatactccctctgatggcagctgggaaaggttctctgcttttcaggactcatatgattatactggatccacctggataatccaggctaatcccccgtctcagatttttaaccttaatcacatctgcaaagtcccttttgccatgtaagggaacatattcatagtttctggggattaggatatggacatcttaaacatgggggatattattctatctgtaacaatgatccatccatttttaaaaattcaaatcattgtaaaatagaata

SEQ ID NO: 85272 - DNA, 1011 bp, Homo sapiens
ctacactccagcctggcgacagggcaagactgcttcaagaaaaagaaagaaagaaatgccatattcctctttgctagcgagctgtttttcaaggacaaatacaaaaaatggaagtaatcttcacacagaacccttattagccttttctctgcctcaagaatcttgacaatgtgctgaagttgctatggctttgtttgcgtccttgccaggtcctgcattaaatgaaaataaagagccacaaaaggtcatttctgacttcctttagcccgtggaatcccttagccattctgcactctagctgacccttagaaactttgaaaatcatcccaaaattacagtttactggtagaacatagactgaagggcagggaatgccttccttgcctaacctagaagtgaagcctcatcgtaacaaattagccaatttggcttctgtgccccttcagctgtaatttgaagcatgaaatgggcattaggcagaagatgggtgggtgatgacaatcacttaattgcctcaaagatccctgagatagaaggaacaagggtacttgtttcttgtttcaaaatgctttggttattatacacccttgtccctgagtgggatcgcagaccttggagaagtatgaagtgtcattccaccttcacccaggaggtctttcttgatggggtttcttcatcagcttcatctagtcttatgaattttctatagatgttctttctagactctagcaggaaattgtgcaatcgttctagatttctgcgttcttaggtctcttggtgtttgcatgtgaaatggggctgtagaaggtggctagccagactccatttcacactggggaatcttagtagctaacctttgaacccttgcagtcacagcttcacagaaaactttctttgaagataccctttcttgtagctgtcacctagactagaaggattcctttcctaaaatcttaaaacaaaaataaaaacatctattcttaaacttgctctgagtcttctaacatagtg

SEQ ID NO: 85273 - DNA, 1059 bp, Homo sapiens
aaataatatttgtacctttggggtcacgtagcctctgagacaaactttgtcctaataaaaaggccgctgttcggccttctgtttttgaaatttaagaacctcatttattaccaacttcttttaggattattaactcaaacatctcttggaggattagtacaaatattatgttctcccatcatctctataacaggctgtaattctgaggaccaagcttgtgccttattcatccttgtatctcgtccagcactgaatacagttcctggcataaactaatgatgcaataaattgtgtttgaattgaattttcaaagcattcaaggctggccacctctgcacttgtgggagtaatttgcatttgagctgcatgttttgagatatatcatgcatttaatattgttctttaggtccagcctgatgagtgaagaggctaagcgaggagcacccaacccttggctctttgaggagccagaggagaccagaggcttgggttttgatgaaatccggcaacagcagcagaaaattatccaaggtactaaatatcctgaggagtgtgggctcagaaaccttgccagaatttttttttttttttttttgagacggagtcttgctatgtcgcctaggctggagtgcagtggcgtgatcttggctcactgcaacctccacctcccgggttcaaacgattctcctgcctcagcctcccgagaagctgggactacaggtgcgtgccaccatgcccggctaattttttgtatttttagtacagacagggtttcaccctgttagccaggatggtcttgatctcctgacctcatgatcttcccaccttggcctcccaaagtgctgggattacaggtgtgagccaccgtgcccggccaccagattttctactggagccttgtttgttcctcatccccattgaaaattggagtgaaaactgctggtcttttaaagcttttggtgtgtgcctcaggatacctgaggaatagacagttgctgtcactcatctcggtggctcatggaagtggtgattttccattgggcaagagcagagagagca

SEQ ID NO: 85274 - DNA, 1073 bp, Homo sapiens
gaagtgattgtgaaactttttggttaaatcttgataagacaagatatctaacgtatttactgatgtggcatttatttgataagtttcatttatttgaaaagtttcatcttgaaataatatggatagaaatcatttattaaaaaaattcaagtctgttctaagctcagaagcatagtatttagcatttcctttctttaatttcctttgcagaggaaaaatgcctcttacttgtcatttccaaaagtgaggctgagctacaaggtgttttactgaccaaattccctttcaagtaattctctccatctgctcaaacagtatcagtctttgctgctgaagtcttgaaggcaggtagcagttgattaagttttgctttgcttgatttttaaaaaacatttcaagataaaaatgttaaatgcttctctcattttgtttttaagaaagagagcttaaaaacctcaatggttttcctagttctggttcataaacatttactgaatgcttatgctctggcatattccgaggctctgtgttttggtcctggggatataaacataactgtcatgtggcctcttccctcacagagctcataatttaggaagggagacagatgagtaaataactaactacaatcccgcttgataaatgccacgttagaggttgtgaacatagcaccatgggaataccagcgagtgattgattcaagggaagggggatggggctagggatcaggaaagcctaagcagcagaattgacatttgagttgaaccttaggggaatgaatagaattttgccagatggacaaagggggtgggggtggggacactccagactcatgcaaaaacatgagagtgtgaaagttttgcctttgtctgagcggtggggagcagtctggagggccgaagtagggtgtggaagcggggatgttgaggagatgatgtcgtagagagatcgtagccatgttgtagcttctggggagtcagggaagtttttgaatagggaagtgatagggtgagatctctgttttaagaacaataattcttgcagcagagtgtaggatgatttgaatgagggta

SEQ ID NO: 85275 - DNA, 1026 bp, Homo sapiens
caggaggctaaggccggagaatcgcttgaactcgggaggcggaggttgctgtgagccaagattgcgccactgcactccagcctggcgacagagcgagagtccgtgtcaaaaaagtcaaaacataccaatgtgtaactcaaaagttcatactctctctccctttctgcccctccagtgcctttctcctcaagtaaccaggattggctgtttggagtttcccttccccacatttatctatgcttatacaactataaatttacaaacatacatacctaaaaaaagttttcctttcctatttttaaagaaaacagaactgtactatacattttcctctgtaattttacttttcttcacttaaatttggacattcctccaagttgatgtgtctgacaaattcgtcagttgtattccacaatataaatatgcaggcatttttccagccactccccatttgatggacgttgggttgtttagttttttgccattacaacgagtgctgcagtaaatattcttaaagaccatggcttctatttctttagcaatagagtcctcaaagtggggttactgggacaaaaggtatgagtgttaaagatgtaataggtaccaccatgtctttttcttaaaagttgtggcatttacattcccttcagcaatctgtgtgagggcccctttccttaaaccttagctgtcagtgggcgttacagaacttgatggattttgttttgttgctctgatgggtaaaaaatggtatcttcttttgaattgcagcccttaactactggtatagttgtgacttttggtatggaaaataaaaacattctttgcccctgcatgtattaattttaagtctttaaaaaaatcatttgagaattgaaaaagaaggaaaactccagtttctgaataaacgggaagaagaaagtagaattacctaatcacgctgtattttagttcattatgttaattttaattttaatttttttgagacagggtctcgctctgtcacccaggctggagtgcagtggtgag

SEQ ID NO: 85276 - DNA, 1035 bp, Homo sapiens
tgtgtgtgtgcccttccagaaggattctacacgtatccaaggatacatgcacgggcccatatccccagtctctattccaacttgtttgtgttttttaaaaaaacaggaattataatataatatgcattctttactgcacgtcatcttttttacttaacagtgtatcttggagatgacgaagtagaaggcttaaagtaatactcttaagtatcttgaaactaccttcgaacttgacagagtagctattcgaagtttttaggttatgtatgttctcacaagactgattatcgccagaagagatctctgtagctacttagtccggatttttttttttttccctcaccatgggataggaaaggaagctctattaacagcctgacttccaaatagagactaaatgtaaagaaagattatctctttggatgactgatggagcaaagaaaaccagagaccttgagatctgaacaaatggtcattgcaactccatgtcattgatcaagtcaagaaaggtatccagccattaccatgtgaaagaaaatgaagcacagcctgtccacacgtggttagcagtagcaacctggtagtttctctcctcagaaggttttaaaagctagacaacaaagaaaaatcaaatgaaaaaattttaaggctgctgtcatagtactttaaaaaaaaaaacatgaaatctgtagaaataagtaaaatgaaagatgtatgagacttctacactgaaaactataaaacattatttagggaaattaagtaaagctgaagagataaataaagagtagtcccctgcttaagggcagaggacacattctaagaccctcagtggattcctgaaagcttgggtagtactgagccctgtatatgctatatttttacttgtgaatatatacccatggtaaagtttaatactgtaatggaagttatgagaatgtggtctctctctctctctctcaaaatatcttattgtctataatattttcggagtgtgggtaactgaaactctggaaagtgaaactttgagtaagt

SEQ ID NO: 85277 - DNA, 1052 bp, Homo sapiens
cactcgctggccttttgggttgttttatttaggctcaagtgaaccttagtcattactttaagtcttcaattcactttttaaagaagctgggatgtttacacctatcacttgtcttcctgaagaggcttaggagaagtacttttgaagtgcaagcggtttttttgttttgttttgtttcgagatggagtctcactctgtcacccaggctggagcagtggcacgatcttggctcactgcagcctctgcctccgaggttccagtgattctcctgcctcagctcccaagtagctgggactacaggcacatatcaccctgcccagctcatttttgtatttttattagagacggggtttgaccatgttggccaggctggtcttgaactcctgaactccggtgatccacctgcctcggccaccgaaagccgtggcattacaaggcgtgagccatcgtgaccagcctgcaagcaattttaacgtgacacattgatacagtttcatagagctggtttcttctgcagacagataatcttgtatatattttgttaattcttgtttaattctattttgagaagtagtagcttctgactttttctacacattctggtgaaatgttaatagataatttggtgcaaggactgatagaatgacaaagggagtatttgaagtaggaactgataaaaaaaatttggaatatatgttgccttagcacatttttttccagtctttatgctgcatcatcttttttttgcttcacagtatatattgaagacgatgaagcagaatgtttagggtaatacgcttaactaatggtctgataccagccatataatgtgtacagtgaccatgtttttcttggagagagaaactagatatgtcatatgatgaggtattttttgggactcttcttggtggaagagtcggtttggttgatagtgttaggtcaaaatgttgaccattccagtggtttatgggaatgaatatttgtttttgaagaatgttttttaaatataaatttatttttaaagtaatttgttacattgttaaactgtacaa

SEQ ID NO: 85278 - DNA, 1625 bp, Homo sapiens
cacctgaggtcatgagttcgagaccagcctggccagcatggcaaaaacccgtctctaataaaaatacaaaacttagccggttgtggtggtgcacgtctgtaagcccagctactcgggaggctgaggcaggagaactgcttgaacccgggaggcagaggttgcagtgggccgagatcgcgccattgcactccagcctgggcgacagagcgagactctgtctcaaaaataagtaaataagtttggtcacggggaggaaagtaatatttacctggtatatttctcaatgaaaaacttgtgtcatgatccacgtcagtgtttataagtgcctctgcgatggtcctgccaaggtcctttacctgacggcctggtgaaggtgaaggtcagagcaggaaaaacgcaagagtggtgcgcatcccttctgggtagtagtgattacagtctgtaaaagccacaactgacttgaagagctaacttaataatgtaatagttaaaacgaggtcatttattcaccattgaaccttaacaagatatctgcagaacacagcttgaaggggaccgaagacagaacctcttggatgatcttgtaactcgagagagactacttctggcatcctttaagaatgagggtgccgaaccagatctaatcaggtaggatgtttttatttacagggattacttggtgggcgaagacttctttgcagatactacagctgtttcctgaatggcttactttaggaattaatcaaaatctattctattcatttatggtgtttgactataattttctactcaatttagttttcgttaatttttgtttgtttgtttgagacagagtctcgctctgtcacccaggctggagtgcagtggcgtgatcttggctctctgcaagctccacctcccaggtttccaccattctactgcctcagcctcccaagtagttgggattacaggcgcccaccgccaccgtgcccgactaattttttgtatttttagtagagatggggtttcaccgtattagtcaggatggtctcgatctcctgacctcgtgatccgcccgccttggcctcccaaagtgctgggattacaggtgtgagccactgcgcccggccagttttcgttaattttctgggtttagtaaaccaggtatgttcagctgaatcccatcttgggtggaacatactaagggagactgtgggtgaagtcagaacatttctttggcattctttggttgagttttctgctttgttaactgccttctaaactcctgaggtcactacttctctgtgtgggcaaagcagttttttgtttttttttttaattggcatattgagaacatgagtcctaataagactggtccggggctcacagaggcaaaggagttggatcctcctccccattcttcgccagtgagtgattcacacttcaaagagctgacagctgctctgagcccggttctgctggaagacctggaggacgggtcgggctttccaaggctgaggttgatgaaccgtaaattgctacctctttagaattggcctccccctgtttctagaacttccttagcttcatcgtgggaaccatcacagaaggcaatgagcttgggtggaaacccgcctctcctcatc

SEQ ID NO: 85279 - DNA, 1014 bp, Homo sapiens
aaaaatgtttgttcataaatcaccaatggagtgactttttaatcctttttttgaggcataattaatgtttggtgacttttttaatgtgaatatttgaataccacatttccttactgtgctggatagttgagaatttatgatacttaataaattgatgcctttctacacttgtgaacttgtccaaagaacactaggagttgccagaaaagtcctgtgcaaatgctttctaaacaatgaaattcatggaattaaggcatgagatgttatgctctctcctgaaaaagtatttttctcctggcaagaataaaagtcaagttaaaatggaagttctgtgcttttgaatccattagcgtgcaattaataaaccgaagtcttgcagtcagagagtttaaatttctgaaagaccttaacatctgttcacagtgtttctttgagataggaactataattgtcttaccagctgagaagagggttatgctgtgggaggctgcatatgaaattccagatagtactaaagatacttagtaccatcttcttagagttggcttcacatgaaacttatccttttgttggcatttcacaggaggcagcacctttacttattttaaagagaataaagaaaatctctttacagaggggtttgatgtcaaaaagtactttggtgtcttgggagaaggcctttggaaataagttttaaaaatctataaataaattttctcatcccaggcactttgggaggccgaggcgtgcggatcacgaggtcaggagatcgagaccatcctggctaacatggtgaaaccccgtctctactaaaaatacaaaaaaaattagccgggcgtggtggcgggcgcctgtagtcccagctactcgggaggctgaggcaggagaatggcgtgaacccgggatgcggagcttgcagtgagccgagatcgcgccactgcactccagtctgggcaaaagagcgagactccgtctcaaaaaaaaaaaaaaaagaaaaatctataaataaatttt

SEQ ID NO: 85280 - DNA, 1021 bp, Homo sapiens
tgttacagcacagttggtctatcatataaagggtttttattttacccaaatcaacaagtcctaatatactcactgcaccattgtgcccagctaatttttttttttttttttgagacggagtcttgctctgttgcccaggctggagtgcagcggtgcgatctcagctcactgcaagctctgcctcccgggttcatgccattctcctgcctccacctcccaagtagctgggactacaggtgcctgccacctcgcctggctaattttttgtatttttagtagagacggggtttcaccatgttagctaggatggtctcgaactcctgacctcgtaatccgcccgcctcagcctcccaaagtggtgggattacaggcgtgagccaccgcgcccggcccaatttttgtatttttagtagtttcagatgggcaggactgtttcctctgctttcggtactaagcactgggaagtctacacatggcaaggtgtgtaaattcatgttagtgttacctaaaacacatatattagaaaggtaactacatattgtttcatgatataatatgcatttgcttccattaaggtaacattattagtcaccttatttatgtgctaaccctatagggcaagaaaaatatacaaattaagagcttttacttttttctattaataataatttctgctagttattagagagtactaagaataccacagttataattgactttgttctcctaaatgcttacagtctgaccatctgttgaaatcttgcagatttttggttttgtggtcgtcccagaattacttcccaaattactgaattaagcagtaagcatcaaaaacactgaacaagagttatttaaaacattacaaaaatatttaggggtcttaatgtggataatttagaatttaccaggagacatcaaaaattcaactggaatacaacaactttctttaaaattctatttattttttcaaataattgatctatttctactgtaacaacctgcagccagtactagggatggc

SEQ ID NO: 85281 - DNA, 1051 bp, Homo sapiens
ggtgagtcccgggtgagggcggcggtgcgtggagggaccttcggggaggccgggcttccggagagcaggcaatcacttcgcattgccgctggtggcctttcgggatgaggggaggggcagcgagacctttcctttactgagggggctcagccacatcccgccacacttggtccttgcaagggtggcccgggaaggagaccaggtggtccgctggagagctgaggacttacgccaaatctctgaatattcctttagcttttctgggctgcatctcgttgcggggatttcccgcccatcctggttttggagctagctggctggtgcaggcttccctggactcctataaaagtgaagtcgaaataacgtttttgtagcatgtcagtccatcccggtaaacccccttatttcacaggtggagaaaccgaggttcagaatccatggccaccagccagttagtaaccagctggggctaagacctagatcttgggggcccttccagatacaggaacctgggagggaaattgtgcacttgtttataaggcattttgcactttcttgagttaatatcatgaagtcttttcctttagcagtagcttctgcagtaaaacaatagctgataagggtgatttatttagcagttaatcccaaggactgcatgatgaaagatgcaacttttgatcccaaggaacatattgtttgatcccaaggaacgtattgttattgaacatagacttgacctttctgcttaataattaaaaacatattacagctctataacgttcttgttggaatatgtgtcttatgttgttatttctaatatagtttataattgtttaagttgcccacatcctggatattagaagaatggattccaagaacaaagttgagttacctggaatctaggttatttgggccaattatttaatttagcatttacttttttaaacctaattttaggccggacgcggtggtggctcacgcctgtaatcccagtactttgggaggccgaggcaggcagatcacctgaggtcgggaggtcgagaccagcctg

SEQ ID NO: 85282 - DNA, 1053 bp, Homo sapiens
ggccagaagaatggaatattctaattgggtgcagctgggttgcatgcctgtgggggtgaacgtgggccaaggagagcttttatagaaatggaacagtttgcttccccaaagaaaggaatgctgagcagataaacatatgtctactatactgtgtattccacaagtttatagtgaacacattttgaaatcagaaggatatattttttaaaaagatactgtttgtcgaatgtttgttatgtgccaggggtgtaacttgatgctttgcacaatttatttctctacctgacacagagtagacaataaactcttgaagtgattgactaaattagttatcatgctttactattataaggataactcctattttacagttaatggaaatttaggttaagttgctcaaggtcactcaacttctacttggtggagatagaattgaacctggctttgtctatttcaaagccagtgtgctgggttccttttcctaaagctttcctcatgctttctcaatttcccatggcgggagagaggagacttagaaataggtggtacctctttctgctggctgcgtaggaaaagccctcttatcctgttttttttactctctcctctccctggctgtaccaggcaggtcttcctacttgtaaggtaggtgggatagatagcctttccattttccttttctatctcttggtagcaggaaaaggcattgattgggcttaagggtggagaagatccccgagaggttaagtaacttgccccaagtcacacagttattaagtgagagaactaggacccaaatccagcaaactcaactctgtaacagggttccttaacttcaacactgttggatgtttgtggccgtttgattcttttctgagaacggctgtcctgttcatggtagcattagtagatgccagtctagatgccagtctagtaggcatctagactaggcatttgactatttgtgatagccaaaaatgtcttcagagattgccaaatgtcctttgggatgggaatggggatggtgacaaaatcaccattcccctaacccag

SEQ ID NO: 85283 - DNA, 1034 bp, Homo sapiens
attttttgtatttttaatagagacggggtttcaccatgttggccaggttggtctcgaactcctgacctcgtgatttgcccacctcggcctcccaaagtgctgggattaaaggcatgaaccaccacgcccggcctgttttttttcccccgtttattaataatctatgggttaaaaatggtttttacaattttaaaagtgggagaaagacacgcagaatatgcgacagagaatatatgtggccatatgtgacctgcaaagtctcaatatttgtcatctggtcccttatgggaaaagtttgcaaacttccagattactgggttatgctgtcatttgctgacacgtagagggcaaggaaacggatattttgttgtcgttacttgagaaatggtgagaatatttatgaattttccttagacgtttgacttcagttcttagaaagaggtatgccataagcccaattgtgattctcatcttcacttttattgcatgcttaatcagagatatgcattttgaagcttctcagaagaaatggggtgaacgctgacattattgtttggctacctaacttgggagctcccttttatttgagattttgcctgatgaaggggtagaatattcaacttaaaataacagcactcttggccgggcatggtggctcaggcctgtaatcccagcactttgggaagccgaggtgggtggatcatcttaggtcaggagttcgagaccagcctggtcaacatggtgaaaccccatctctaataaaaatataaatattagccgggtgtggtggcaggcaactgtaatcctagctacccaggaggctgaggcaggagaatcactggaacccggggggtggaggttgccgtgagccgagatcgcgccacttcactccagcctgggtgacagagcgaaactccgtctcaaaaataaataaaaataaataaataaataaaaataataacagcacttgttatagtaagaatccgagggtataacttactgatcttttctgattccaaaaaaaattcatttct

SEQ ID NO: 85284 - DNA, 1098 bp, Homo sapiens
tgcggcctcctttgtcccataacctgaagttaagtcacatcccctgtcgggacctccgtgcactcatctgtcaagtgggggcgcttcccttccagcatcacctgcagcagacgggctctcgggagtcgtgggttccaggcagctgtgtggacccagggacagacattcaaagggacgccagccatccttagtgacaggggccccaacttagcatcccttcccttccgttaggaaggagatgaccggaagcaaccccttcacagacacgagcacatcggcaaaccctatgaaagtggaattttctaacaaaataaacttgcttgtttgatctgttttctgtaacttttgctaaatactttatacatttttcatgttaaagagccgtgtctcccgccagcactcctcaccccggtatgaatgtgtttcctccacattgtatatccttccaccctctggctgcctagatcagtaaataaaattgatgtaatataatttataagtaacactgttgaaaccctgatcccagtggaggctgtaacccacctgcccccgcaccacccccctgacccctgttaccgcatttgtgtgtattaatgctgaagaattaaatgtttaaagagtttaaattttgaaggcgtttgctatatacagttgtcctgcattattataaagagttttcaggaagttaaatcccatctcgttttttttttcttctgctctgtgtgtatcctcgagatgcctagattcatcccatgtaaaataaactgtccagagacactaggtccccctaggcgaccctctttcctggagggctgccacattcttcatgtgacctgtcttggcatccctcctaggctctcgagattggtggtgatttcacctccgatgacttagcgggagacaaagggcatctggacactggcacccaaatggatgctatgctcctggcctcaggcccctccccctggtgacttcctgtctctgtgggttccagccctttgcctccctctcatctctggagctcctggctgtttcttttctcatccatccatccatccgttcatttatatatatatatatagagagagagagagagag

SEQ ID NO: 85285 - DNA, 1035 bp, Homo sapiens
ccgctccttctggacattccagagccctgcaccaaacccttacttggtgtctgcacctcctttccctctctccatcttccaatccctggaaaagtctggtctgagtgtgacttgggaagctttcagtgctgctgtttggcccagctcattactttctccctttctctaccacagcaaacacattctccaccatgtcagtctaaagagtctaaaggggccgggagaagcatgagcgaggggcagattctagtcgggagcccatgccctggaaatccatctttcttcatctttcccattgaccactttgggtttgacctgcacatctgcagtgagggcagaattcaacaagcacaactcactggtctttcagtcaacgtgctagaaaccgatgacttattaatctctaattttttggcgcctctttcattgaatgagaattgctttcgtatagttcacattagaaaaatgcctaatatactaaagtaaaccaaacgttgtcacttttctcttgttcttgaaacattgcaaccaaaaaggtcagcacaaaggccttcacctacgtgaagacctcctggtaggatctgtccatgggatggagaaccactctgtccagatctggggttgggtcatgacaccagctaccaattttagaatattatttcttggtttctttatgaaaaatgggtgctagtggtaattgctttgtggcttagtaaactactctgtggatgatttccaaacattcaaagccaatagccttgttattaacaagatattttgagtacaatatggctcattgacttttccattacatctgaggattccagagtcctctgttcatccctgggatagagtgagccctcttgcgtcttccagggtagctcaggttggcccagtttgggccagtccatttttggaggtcactctttcccccctcatcccctcacctccttctctttacccccttcacgtacttcctttctttcttccctctgttattcattcatcaagcaggttaaagccattgtgctaaga

SEQ ID NO: 85286 - DNA, 1039 bp, Homo sapiens
tattcttagcaccaaattgtgtgtgacatgttttaaccaatctggactccccagtgtaaaataaaactgccatctttagagagggaagcatttcttgggctcatgataggattgggggtcctaggaataccctagacacacacacacacacacacacacacacacacacacacacacacacaaaatgagaaccaccatcctgaatccttggtatctggggtcaggcttcagggggacacctgagctgggttctcatggggctgggttgcccccttccttccctggctctgctttcttcttcttcctactgccatcccttttccagctttccagcggccaccatgaccccagggggaggagaaggcttggctgtggggctcagggtggggcacagagtcatggtgaggataggatgcttcatgatggtgactgtggtctttttccaggagacgacctcatgcgctgtgtggatctctacaaccaggcccagtccaaatggtttgaagagatggtgaccaccacattggtaagcgggcagggatgtgtggacatggcagtacagaggctgacacagagcagcccctggtggttgttggtgggcgcggggatgatggggtggagtgaccctggagatggtcatcaaatctacttcagtgttggggtcgaaacctcaatgtgagccagcttatgtggattcagatctctgctccagcgcttcctagctgtgtggatgtgggcagggttgggttggatatggctacatccttcttgggctgtcccctgagaggtcagggtcaactgaggactctcctcaactaagtggacaagggcctctttaggaaaaatagccaagctataggaagagaggaccgccccacacatgcacacacacgagttgcaggtccttggtaggagatccttgcaaagtggatggatgggtgaggatggagctaggcagtggggtgggggaggcctctcaccaagggtgaacaacaggcggcagggccgatgatgctcttgagtatttcttgtaaagggg

SEQ ID NO: 85287 - DNA, 1029 bp, Homo sapiens
ctgcctcagcctcctgagtagttgggattacaggcatgcgccaccacacctggctaatttttgtattttttgtagagacaggatttcaccatgttggtcaggctggtcttgaactcctgacctcgtgatctgccctccttggcctcccaaaatgctgggattagaggcacgagccaccgtgcccagcctaggaagacattttatgaatgaagttggaaatgagagattatgaaggggaccaagcaagagaataaaaaatctagggcgagcagacttattagtcaacaggtatgaagcaccagtttcgagagggatcttaaaacccatcctactctgcctttttttctggggcttttatgtgtgtccaacattagcgcaggaagctctgccattctggggcttgtgtggagcctgtggggtggggtgtgggaatgggaacctgtggtgcggcgggaagttttgggctacagggaggatctgtctggatggacataaccagagtgagcttttaaagggttaggtcccagcgagtcagtgaaactcctagtatgcattgaaatgatctgtaggttatattctaataagtgagtgggcaaggaccatgtgaattgattatcaagtaacaagtatttgctaaataccttccctgtgctgggctctaattaaccacttggatggcttcttgcgggggtggtgtgggcgaacacaatgcgaatggcttcttgtttgcaaagacagaatgcttcctgaagtggatatgagattgttaaaatgagactttcctttgggttggagttcatttcctttcctgcctgagtattgtgctgaaagtcctttccacctctaaacaccctacgaggctgtgagttgccactcctacgagctcatcacccaccagtgtttgagacggtgcctccctatgcaaagctggcatgaggtcccatcgatgagattgttattgttggaggaagaccttggagtggggtaatagcttttttgttacttcattctgagttggattccaaagta

SEQ ID NO: 85288 - DNA, 1065 bp, Homo sapiens
agaggatgtaatggcaggtcttataatttcaaagctttaaggtcaatagctcaaaaattgtttggatctcagcatttttgctattaaaaaaaaatacgcatgcactctgctttcaacttagctgaggctaagtcaaagaatttggggcggccgggcacggtggctcgcgcctgtaatcccagcactttgggaggccgaggcaggtggatcacgaggtcaggagatcgagaccatgccggctaacatggtgaaaccccatctctactaaaaatacaaaaaattagccgggcatggtggcaggcgcctgtagtcccagctactcgggaggctgaggcaggagaatggcatggacccaggaggtggagcttgcagtgagccgagatcgcgccactgcactccagcctgggcaacagagtgagactctgtctcaaaaaaaaaaaaaaaaaaaaaaaaaaaaaaagaatctggggcttgtactgttttcatttgtacattctgcttagcaccctggcatccggacaagatgaacagcattcctgccttcaaggaacctagagtctcgtgtgcagcagttcaggccttggaggtttggaggagttgtaaagtttcttctttcatttttctcttctatggagatctttagactggggcatcctaatttgcctctactttggttaggatgagtgtgctggcctgtagtcacttgtctctttaccattcattacatggcagagcccagtggcttagtggagtccaggcactaatcccatagcaggatctctaccagtcattagatcaaccagtactcgttaattacaggccaaaggaagtacaggtccactgtgcattgtgtacctatcaggaatgacttttgcttgatttgaactctttttgaaaagtgctggtctgtgattactggactcctagggaaatggcattataatgttttggggatggcagggaggtggcaggcaggcaaggtcaggacctctggaatccaggagagctgtcttgcaaagacacagggagggtagatgtcacttgctggattgtcattagactaga

SEQ ID NO: 85289 - DNA, 1363 bp, Homo sapiens
tatgtgtggctgaagtctcaggtatggtttgtgttaagcctctgaaggacagagcacaatcccaaaatagttttcatgggaatgaccaaggtagagaccattggtttggacctataatatcagagaggccacaccccgattctttacaaaacgtaacagtgaccacacctcagtggttagtgtcaaggttaaggaatgttgatatcaactttcctccgaaggacctgattcagttatgtatgaatctatttctcccggtctgagcctctgtttagacttacaggagatggttgatggtctccgatcaggcccaccctgaaccagggctgggcagggttaatggagagtgtctgggatgtattttcaaagaactgtcatggtgtagggggactaggacaggtgtttgcagacattcctagcttgaggttggcctgattattctgtgtgaatcaccaggcaggtattcagcattggtcctattggtcttccttctgattaccccctagccagagggggtgggggtatagggctgaggtaagctcagaaatggggcacttggccaggtgtggtggcgggcacttgtaatcccagcactttgggaggctgaggcaagatcacaaggtcagcagttcgagaccagcctggccaacatggtgaaaccccgtctctactaaaactacaaaaattagccaggtgtggtggcatgcgcctatagtcccagctacttgggaggctgaggtaggagaatcacttgaacccaggaggcggaggttgcagcgagccgagatcgcgccactacactccagcctgggcaacagagcgagactccatctcaaaaaaaagaagtgggacacttgtctgcatgaagaagtgaagggagttggaataaaatggaaggcagaggagcctctgctgtggtgggctggaaactccactcccgccaccccatccctcccccatatttcatcagagccttttgtaaaggatggcagaaccatggagctgggagaaggagctatcacttgcctgcagtgtcagcaaagagaggccaatttttaatgctttgtgtacattattaactcacttgatccttgtaacaggtattattattaatacttacatcatcattattattttttgtcttcacgggaattgctgacttgagattgtccagctagatcaagcaacttgtcctgggaaagcatggatttgaacccaggcagtctggctcccaagtctactctcttcaccactacactgtcaggacttggtgacctagaaatgctccccctgactccaaaattcagtgaccccaggagccaatccaagcagagaaaggctgtcctgatgtcctgcagaatga

SEQ ID NO: 85290 - DNA, 1048 bp, Homo sapiens
ttctttctttctttctttcttttttttttttttttttgagacggaatctcgctctgtcgcccaggctggagtgcagtggcacgatcttggctcactgtaagctctgcctcccgggttcatgccatccttctgcctcagcctcctgagtagctgggactacaagcgcccgccaccatgcctggctaatttttattttttttggtatttttagtagagacggggtttcaccgtgttagccaggatggtctcagtctcctgacctcgtgatccgcccgcctcggcctcccaaagtgctgggattacaggcgtgagccactgcgcccggctggtatggttcctctttcattctgtctcccagcaggcctaggggatggaggtggggaaatcgagatcctgagaagttggcttcgtggctgacactcccaaggacaggtgtccacactccagaactctgggctgtgggcttggtctcccttgggctggttgggtgatgtgtcactcagggttctttgattataaatattagaaactgattctggctgatgtaagccaagtggaatttattgcaaagacactggaaggttatagactgggcagagaccggggaaacctcctgaaaacagatagaaaccaaggtgctcagcagtgtgaggccaggaagtaggaataataagaacagtcttatagcaaaaacagcatggtcaggcctgtgggtcaggatggatgacttccatgcatccctttcttgctcctcttacccataatttaaagtatcagcacgaagtgtcctgagggggccatcggtcacacacctgtaccctgtgaaggagccaccggggaccgcttggcgtttgttgtggagagctggcacctggattaatagccctacagagaaagtgcccagcaggggagagagaatccccttaaaaaagagcgggctgctattaagatatagggaaaggggccgggcacgggggctcacgcctgtaatcccagcattttgggaggccgaggcacgtggatcacctgaggtcaggagttcaagacc

SEQ ID NO: 85291 - DNA, 1189 bp, Homo sapiens
gggatttttacaggcgtgagccacgatgcctggccagatttgaggtctaagaggtcaaagagggtcagataatggaggaatttgtgtccctcccactgtttttttctaagcgtgaagggaagcctttggaggctggtgagctgtaggcgacacaatcagtcttcgtgtcttgcaggatcacgctggctgccccatgcagaataggttgaagctggttttaaattgaggcagacggacagatgcgaggggtcactcagtctgggatgataacagtggagatggtgtcatgtggaggatttgagtccctttttgcaggaggtgctgtctggatttgcagtgcattgaagatctcatctttgggacagctagttggcttttcctgtgagaagaaaatgcatcagccgcgctgccttccccagtctggaaaatctggcttgccttttccacagcaccgttgatgcggagttgggagaaaccccgagcttagccccagcaactctccaaacctctggctggactaagtgtcaaaaataactaaagggtttggatgtccccaggagaaattcttttctgaggcccaacccagaaacagatttcatggtttgatctgatacccagaggaagtggctccccactcacccagcctcccccgtggatctggggaggcttgttcagaaaggaagatgagcaagttggcctcatgccacacagttacagtttgcattagtcataggacacttcgccatggggacattgtgattaattaatagaagacggagacaacatttgggaggcatttgtttttattcggagtgtctggtcccttcagacggtccttggtgttgttccgagctgaaccacccccctgctcagtggggccaactcgctaagtcatgctcttgttctttaaactgtctccccacatctgaactccaaaaagtctcgtcttcatctctccctaatattacagcctcaagtcttcccctactgttttctgctaagttgagttctctgttgatcttctgctgacaatttatttccttctcagagcataggcatccaggcctgagcattgaaaacatcctcctttgctggtgggtacccccctccccccagttcggaggtctgtggatgtctgcagtgggtctcataagcttattggacatggagctcagaggtggtaccagag

SEQ ID NO: 85292 - DNA, 1457 bp, Homo sapiens
tgatactaaccaggaacataatatctctacataattaagttagactctgtcccctggacaaatggtttcttcacgtagggcttgtatgttccttgtgttaggtttattcttaggatgttgataatttcttcttgttattgtgagtgaaatttagttatgttttaaaattggttatagatgatacatggttccagaatgttgctaataaatagctgtgttcctgtctttagtgggaattcctctggagtttcctcataactccgatactggctgttggttttagatagcatttatattttctatttagcattttaatgtcctttttgtgtctgtttttcagtgtcttcctggagaatataaaactaggctggcgctaataccaagaagaggtatttttaaaggcacaaatagatgtgggattttatcaaatgatgtcttgtcagcatctctcaagatgatcatatatttttttcatttttgaaatattaatatgattaacaatatgaatagactttctagcaggatagaatattgaaatccaaggtgacttgatggaaagagcataggacagagtacctggaaacctcgattctagttctaggtttgttttttttgttttgttttgtttttgtttttttttgagacggagtctctctgtgtcgcccaggctggagtgcagtggcacgatctcggcttactgcaacctccacctcccgggttcaagcgattctcctgcctcagcctcctgagtagctgggattacaggtgtgcaccaccatgcctggctaattttttttgtactttttagtagagacggggtttcaccatgttggtcaggctggtctcaaactcctgaccccatgatctgcccacctcggcttcccaaagtgctggtaatacaggcgtgagccactgcgtccagcctctagtttggttttttaatttcaaatttgacctggacaagccagtatgttttattattccctttaacaaatatcccacattcatatttccttttctgtaaaatggcgatagttatgcatgtcctcccttccttactagggagttggaaggataatcatgagttaagaagtccttcctttacatttatttaagtgccttcacatctgtaaaagaactttggccggatgtggtggctcacgcctgtaatcccagcactttgggaggccgaggcgggcggatcacgagtttaggagatcgagaccatcctggctaacatggtgaaacccggtctctactaaaaatacaaaaaaaaattagctgggcgctgtggtgggcgcctgtagtcccagctactcgggaggctgaggcaggagaatggcatgaacccgggagatggagcttgcagtgagccaagattgtgccactgcattccagcctgggcaacagaagcaagactccgtctcaaaaaaagaaaaaaaaaaccttgaaaaaag

SEQ ID NO: 85293 - DNA, 1088 bp, Homo sapiens
aaaatactttggtgtccagggcttgcagagagcttgtcctcagtggctgtgtctgaactccactattgagggtgcctggagggggatcttgattgggaaggcagtggggagtttgaaggaggggctgtttatagaggcttgagcagggtagaggatggggaagcacgcccagagaggggaaaagggagggaggcctgcagcaggagggggccgactgctctaaagaagccactgctactcccaaccccagcctgcagcctgcagcctgctaggagggaactggtgaaaataccccaacctcgctttcctcatgaaccttcatctcctacctatgactttcagtggccaaattgtctttcactgtagccagagggtgcgagggtccctggagtccctgtgggtcagccttctggtgcaggagctgcaggagaagggccaaagctagctcccgacaggcaagtggagagtcaccagcccagagatgtttctagagctttgtcccatgttaaaacacaaaattatttgctctgggagaatatatttaaaacttctcttgacgagtttggaagagagctttggcctaggaactgatctgaaattaaatgcagacatatggggtgggggatcttgttcataaagatcctcctcctgcctggcttgagtcaagaaacaggcgaagggcacccatggctgtggcatggagggctaggacaacagagacactttgcaggaacatgggtttaggaggtggaatgccagaatgggctccccagggtagaggtttggagaaatctgcttacgaaggaaatattatcaaggaccaaaaaagtgatggaaagagagggacattgtggcggagctaaggatgggtggagcaagaagaaaaagtcagagttgggaaagaagctaggtcggagttagagaatctcgtctctaggctggggcaatggaacaagtaaggaagtcagttgcatggttggaagagaatgtattcccttcgaacctgactcttggtgagggttgctcatccatgcctgtgtggcatagtggttcagagagtgcggggtgtcaatgccagctgtactact

SEQ ID NO: 85294 - DNA, 1094 bp, Homo sapiens
caaaaaccgcaaacaaacaaacaaaacggagccgcgacccttgttcaagtgcttggatccatctgcaactgaaggccagacactcttgaacttccaagttatatgagccaataaatactgccatgccttcgtctgtgtgtgtgtgtgtgtgtgtgtgtgtgtgtgtgtgtgtatggtttcaatttctatggcttccaacttactgcatcctgtcaaaaacagccatattatgaccaggtgtggtggctcatgccagcagttcccgctacttgggaggctgaggtaggaggattgcttgaggccaggagtttgaggttttagtgttttatgattttgcctgtgtgaagccactgctattcagcctaggcaacatagtgagacccatccctgaaataaacgacaagcaaagcacatacttccttaactttctatattatagttagaggaaaatgtcatattgcgcacctgtgatgtgatctgcctggtggcaagggtgagcccaggcagtcatggtgagattacagaggtttggtatgccgtggagagaccactagacagggagctgggattcacaggctctaggtgcctttcttcttcctggctaggtaacctgggcaagtctcttaagctttctcagcctcagctctcaacatctgtaaaacagaggaattaaactaggtgatcttcgaagtcgcttttagctctatatggtcctgtaactgttttatttaatatctgtgttttaaatgggcagtagaaatagggacaaaatcaaagagaaacaattaaaaataccccctagatctctacgaattgcttgaagatccacctttttttttaatacaatttttagtgtaaattttttaagttgaagtgtaacctacatacagaagaacggtcatacctggccagacagggtcgctcatgcctgtaatcccagcaccttgggaggctgaggtgggtggatcgcttgagctcaggagttcaagaccagcctgggcaatatggggaaaccctgtccctacaagaaattagctaggtgtggtggcacgcacctgtagtgccagctactcaggaggctgaggtggttggat

SEQ ID NO: 85295 - DNA, 1065 bp, Homo sapiens
tccagcttcatccatgtccctgaaaaggacatgaactcatccttttttatggctgcatagtattccatgatgtatatgtgccatattttctttatccagtctatcatttatgggcatttgggttggttccaaggctttgctattgtgaacggtgcctcagtaaacatatatgtgcatgtgtcttcatagaatgatttataatcctttgggaatatacccaatattgggattactgggtcaaatggtatttctagttctacatccttgaggaattgccacactgtcttccacaatggttgaactaatttacactcccaccaacagtgtaaaagtgttcctatttctccacatcctctccagcatctgttgtttcctgactttttaatgaccattaggggatcttgagttcactctagaatgattggcccatgagtccatgagagaagcctgggagaggagatttgaattctgtgttcctttcatcctactcaggtgcgggagctggaaaatgagcttgatgtggaacagaagaggggagctgaagccctgaagggagcccacaagtacgaacgcaaagtcaaggagatgacttaccaggtaggggtcccaaaaacctcctcagtgaatgctgtatggaccaagccccatcagaagtgaccataggtttgcgggcccctgccacgtgtactctgtttgcaggctgaggaggaccacaagaatatccttaggctccaggacctggtggacaagctgcaggccaaagtgaagtcttacaagaggcaggctgaggaggcggtaagcacaggaggtccccggcagtgcccacagacagacagtccctggggcatcctgggtgtccccgccatcctggttggtaaagtcccctgagcctcaggcctgagtttgtatttgcaggctataaacacagagacaactgccctcttcctctcctggtccatgttaagccttcacgaccttcaccatctctgtgccctcttgcctcaccctacttggccagccccctccatccccttcatcctgcccaccgtgactcacttgacaccc

SEQ ID NO: 85296 - DNA, 1009 bp, Homo sapiens
ctgctccgttagagaagacccttcagtgattctgtctctaggtggctttgtattcttgcacatgccactgaatcccttaggacctcagatttctgatctacaaaatcagaagaccacacccaacactttccaaagccccttctggttctgcagactatgattctatgcgttttccccacagttgttttctctggtcttctctatgaccgttttgtatatggtacttttgaagttttaagtttctattctttacttgtggttcctgtctgcctagtgcaggtgaggcaacacatccctgtcttgccaacacctcatctgaacggctgccctgtattctctcctgtataaatgtcatgaatgaatcgcccatccctgaattgcctggcaaatgcctatactataaactggagcctgttgaaacagcctaaatcaagcctgtcctttgcagaagagatttccgacttaactgagcagattgcagaaactggcaagaatcttcaggaagcggaaaagaccaagaagctagtggagcaggaaaagtcagatctgcaggtcgccttagaagaagtggaggtaagtgtctaggatatgacattcagaaattcaggaggacagggaactgaaagaggctgcccttcaccaccccatggggcctttcctgccaggagaccctgagtctccattgggagtaacattcagccatcccaggggctgaaacatccacgggctgctactttatctcctaggcgttctctggcacagttcccctttgaaaataaataaatgtgttcattatgttcttcaatgtcttcctctcaggaagcagaaaatcaatcacctaacatcctgagagcagcgcagaatctctcagttatgtttaacatagaggcacagacaatcatttttggctatcaagaatcctgtataatccaaacacacccagcatctcccgatgcagtaatcggtggtggtcaggatggctggtggtttctagggaaatacgaaccga

SEQ ID NO: 85297 - DNA, 1036 bp, Homo sapiens
tatcttatcattttctgtctccccagatcttagcacagtgccctacacataatagaaagttggtgagtgaatgagtgaataaatgaaatgaaactatttccttctggacacaggtgagctgagtcgtcagctggaagaaaaagaaagcatagtatcccaactttccaggagcaagcaagcctttacccagcaaacagaagagctcaagaggcagctggaggaagagaacaaggtacaccattgaaggaagacttctttgcccttatttttaaatatcacctgtaggaggaaaaaataaaaggcaacttcattcagaaggtggtgatagaagggacacacttggattgtatcatgcacctggcactaaatatatcaggtgctcttctctttttaacttctgcaggccaagaacgccctggcgcacgccctgcagtcctcccgccacgactgtgacctgctgcgggaacagtatgaggaggagcaggaaggcaaagctgagctgcagagggcgctgtccaaggccaatagtgaggttgcccagtggagaaccaaatacgagacggacgccatccagcgcacagaagagctggaggaggccaagtgcgcagctctgtttgcttttagaagaactacttaggaatgaattcgatgaatttatttttattactaggcgtttccccatctcatgtgtctttaaatgcggtgctgggccattagagggacctggcgttagcacattttattaaaacaaacagctttgatcttggtcagacacaaggcaagttattgatcccagattttgagtagacaggaaattctcctgggcgtataaaaacacatgggtgtctgaatcacatagattagtgattccaacttgatgaatagtgatgttcaagtggatggaaactgaaataacagctgcttctctttcatattctttaaggaaaaaacttgctcagcgccttcaagattccgaggaacaggttgaggcagtgaatgctaaatgtgcttcactggagaagaccaagcagaggct

SEQ ID NO: 85298 - DNA, 1079 bp, Homo sapiens
ggccatcccatcccatcaggggagggagcaccggccccaagttcagagaaaggcatcccaagctcctgacattctgcggtcggaaaatggtgatggatcctgctcatttctaattatacctttcccttggcaacgacaaagatacgtgtggaagaagctggttctcggcttgggggggccactcatcctcttgccaaatatagagaaggaatgagccgcgggggttaccaatggcctataaaagccccggggagcagccagccctctgtggctcgcttgtgggcggaggtaagtcacaggctcctcttctaggtctcagctgcttggagcacacccacccggtgagcacatccacaccccgtgcgtggttccctggccctgcctggctctgctgaggtggcgcctcatgcctttctgagttttcttaggataagcaaggtgtagagagcgaggttccctgggcccaaacacccagcaccctctggctccagcacctcccccaagcaggagccctgcaggttctctctcctccacacactctcccctgtcctcctctccaagtgtcctcttgggcaggatccttttggatgccccgtgagcccagctgccatggcttgaccttctcccattgcctctgtgacccatgaagggtcaacaggactggggacctcactctgccctcaccttccccacctgggctgtacatctgccaggtgtcttgtcctctcaagaccacactggctgtgggcattgcgtgtaaattaatctcagagatattgcctgttcacagacaaggagacctgcccctgccctcgaactgttgactttaagcagggatgcggtccctgctgtccgattctaaatgggagtgaggaagactgaagaaggtgccagtgcaggctgagagaaaccagatttctgcacagctgagggtttttcctccctgcctggcttcctgtgggtcacgtcccatctgctcttccatcttccagcctgcctctttaaagtattagtcttttttttttttttttttttttttgagacagaattttgctcttgtcgcccaggctggagtgcaa

SEQ ID NO: 85299 - DNA, 1009 bp, Homo sapiens
tttagagcttgtattaggtcctaacgtgatatgggtgctctcttaagggaactaaaagaaatgttgaagggaatatttcttttctgtctcctggaggtgagtatggatgtagttatatagatagatgagtacattggtcactgcaaaagggaaaaagcaaaattgccccctatttcatttccacacagttcctcctgtcaacaggtctgggtgttgacgtaggaactgcaagttcccacgtccacccccgccacacccacagcctgccctgcatacaccactgctggagatgtagccaggacagcttgccctgtcccctgaccccacggaccttgttaacaccgctgctcccctcggtgatatttacctgtccgtggctgtcctgaccaatactcccaaggagacagtgcatcactgggccaacagggcagagccccaggggaccactccctttacgacatggacggacactttaggagtgacggttaccctctccttggatgaggaggggctccaaggatggacatgtcagtctcacctggagggagaggggcagtgggtgggggcaacgctcagtggctggtggacaggcaaggggtgagtgagccctgcccaactgactccattggcggccactggccttgcctggcattcacggaacaggcgcttcataaacttgttgcttcaatgtgaaatcacctcaattttgtaaatgcgtctgtagcatccacaggactcatcatctagaattcaaacccttaagggtaaaggctgcgtcttctgtttcctctgcgtcttctcgaagcactgtgtgtaagggccagagcacagaggatgtttcatacacgtgcctttgccctgagaccgcagccctgcctccccggtcccacgcagacctcatggagtggcctccacttcggggcttggtactgctgtgtacggaaggggcggtttctatgggaaacatggacaaacagttctatttggaataagcaaccacagggtgccc

SEQ ID NO: 85300 - DNA, 1611 bp, Homo sapiens
ctagattattttggccagaacaagaggaagggagaaatagctgcttcaattgccacacacatgaggccatacagaaaaaagagctagccaaagcagtgttgctggatgcagtattctcttgctaagaggaaggaaactgtctcgcataggagcctatataaatataaacatatatacgtgcactctacagaatggccttcataccatgagaacatttctgttttggatggggatgttacccttgcgttcaaccaaaattgattcttggaactgtaaagattacaacccaaagtctcccaggaagctgtggggagaccagaggatcaagctgaagtgaagccagtgaagagcccacctgtggaaggacatggcggggcgaggcacagccagtgcattcctgcctgcggacaggccctcccagcagctttgccgcctctccatcgtcttgggcccttgctcaaatagctgtgggactgaatttcacagaaaagaatataatttccatagtgctcttgcttgcctcttcttgagttctttgctcttctgagttcttggtggctaataacagtcagattagggtctctgccattcagagttgatgcttgaaaactttagttttccttattaatgaatatcactatcagatttgactaatgaagaggaaatctattgtttgggggaaaaaaaacatcagtttgatttctctaggggttcttttatgtgatttttagctaagtggtgtgccaggttttcagtgacataccaaatggaaataagaggatattgatcacgagtgtgatgctgagtacctttctgcatatactggattgtactttgtgtaaagtaaacatactcagttttgctgttcagacaagcgtgatctttttcatgggtgatgagtgggtacatagatggctgcacacagttctcaggaaagagacccacaggctccagcgggcaggtgggtgggacgcttgctgaagtgcagttccccagacccagagctgaattcactgaatctgcagtatgatgcagagacctgcttccatgacagataccccaggtgactcggatgctggcggactgggaccatcccttaagaaagtgttttttggggaaataacttgcctggcacaatggctaatgcctataatcccaaaactttgggaggccagggcctgaggattgctagaggttaggtattcaagacaagcctgggcaacatagtgagaccccccccccccgcccccatctctacagaagatttttttggcatggtggcacatgcctgtagtcctggctactcaggagactgaaatggagtatcacttgagcccaggaattcaaggcttcagtgagctataatcacaccactgcattccagcctgggcaacagagtgagaccctctagatatatctatgtagagatacagaaattaaaatgaatttaaaaataaataaatttgacccttcttttggtgtgtcagccattgaagaaaatgattattgagtgatagaatgaatcttggcttttgtttctaaatttaactgccctagaatcctgggtttggcctttttctgccagaagctgctgccctaggggcaaagttc

SEQ ID NO: 85301 - DNA, 1015 bp, Homo sapiens
attaagaacactcagaaaataagtcccacatactgtagtttgttttttttaacagagaatagagaaaaggaagaaatagggagaaagagtgatgtaagctacagagtaaggcttgaagagagaactggagacttaattctgatttctgtatcaaatatgtggagaaacgtagccccccgtcttgctcctgcggtgaactatcccacagcacttggaatccagttgttggcgctcttttggtgtacattctttccttatgtgggtaggcaagtgctctttccatttgctatcttaagaatgtgtgtataaaaaataataccctcacagacatatagtgcgtgctggggtatgtttgggaggtgtctccagtttggtatttgtagtcacattcctgtctttctttgtcttgccaaatagcagtcaagcctgcaataaattccaaggactctaagtgccaaatctcacttaaaattggattttatggaagtgtctaactaaaaaatctgatgactaatctaagttaaagttagagctgggaccattttaggactttgctgggaaaatggatgctgagtttacgatgactctctggttaggggggcagcatttatgctcccgaggatttgctttccaggtgatggattgatttcagataggattattcagtggaggagacaaaaatttccttggggagaaaaatgtttcttttcctgtttctgtttgaattactaatattaaaactaaatattgttcaaatttatagattatttaaactaatgattagttttctgatttcttctcataaagcgtggtaagcagaattttggcagtaatgaatgacaaccagttctttctaaaacatgaataaacccaagaacttactaaagaaagcagtttttcaccaacacttaattccatgtgatgtctgtttgtaacatgtttagggtctgaggagatatcttactcaaaaatgaaggtatttttcaacaagcattgctattccacaaacattgac

SEQ ID NO: 85302 - DNA, 1048 bp, Homo sapiens
gcgggaaaattctagaatatggaagctttttttgactttagtttggaatttcaagtgcaattctaacgtttgttttatttaaaaaatgtattattaaataatctgaaaagtcttcctaaataatttgagagtatttatttgctgacatgttgcgtcattagctccaaacactttttggtgtatttcctacaaacaaggaccttttctagcataaccacaatacaaccatcaaaattagaaaattgacgctgataattttgctgctgttcagtgttcagataatcttcagggtattgtttatttgtttgttttttgagacagagtttcactcctgttgcccaggctggattacagttcagtcttccaagttttgccacttgatgtctttcagagcaaaaggatctgtttcagaaccataccaccttgtatctagttgtttaccttagcctccttcatctgtaacagtttcccaggctttaactgactcccacaaccttgacagctttgacagttacaggagagttattttgtagaatgccccttagcttggatttgtctgatgtttcctcattcaggtcattcgggttgtgtacctttggcaggaatatcacaaaagtgatgctgtattctccgtgcatctggtcagataccacatagtaccagttgtcccattactgataatgtccagtttgatcacttgattaatgtgtgtctaacaggttttctactgaaaagttactcatgtaattaatggtgtttcatgatttgtattgacatacgtatacttacatattctgttccccatcccactatcaatgtattcatttatttatatctgtggacttgtttcctatatattcattcagtttaaatccatattctctttattttgatgcccaagttgtcccagattgatcagcgggagcccccttggagcaggcttctgtgtctttgacacgtctccaatattctctaagttctgctttccttctgccacaacaagaggttccagcctcattttacactttctttgccgcaaccctggtat

SEQ ID NO: 85303 - DNA, 1030 bp, Homo sapiens
gaacttgttccagtggaaggtgtatttgagaggattttggtatcaaatgacagaaaatcaatttgatttagctttaagcccaggagaatttatgtgctgacatgtgtaactaaatgaccagtgttctagcagggacaggtgaatttaggtattcaactaatgttttcagaaatctccatctttccatcattcagaattgtttctttctatgttggatttcttgtcagttcattttctccaaaaattgaagccttagtttatcagcgtttgtagtagtggcagtgcctgtcccagggctgatgcttattgtgacccaggttgagttacatgcctacccctaactggccagaggaaactgggtttttacgggccaggtctgggccatgtgtctgctatttcacttccccagccagtgaatggggttggaggtcagaccacaagaactgagagtggggaattggataaatgcctagagaaaaattgggtgctgtcaccttaagaacaggaaatgaatgctgggtaggcaaaaataacagctgtccactggagagaagatccaattcattgggactaaatcccctctaggagatccacaatacatattatcaccataaaggctctgagtttaaagataaaaacaagctcacttggcaggggataagatcacccccagaaatagttttctcttaagagttaatataactcttaatggttaatataaccttaatggttaatatcaccaaggttaatacaaccttggtgataatattcatgttatatacttgctaagttatcttctgatttgattcttctattaatctgaacttggaatcgcaaatatttgaaacctaacataaggctaaagatttttaaactgacttagatggatttttgtcctgtaattgtattgaagttacccacttttcaaatcagattacctctcatttatacaccctcatacatactgacttgatatctaatgagattttcaggtaggggctgcaggaagaaatgggcaaattaaaaaaaa

SEQ ID NO: 85304 - DNA, 1029 bp, Homo sapiens
gtttttcatctgaaaagtgggtatggctaccttgatctcatgagtgtttaaagtcccataaatcagttcggaggcattgtttatgtcaatgacacataatccatggcccatgcctaaactgtttgtttatttatttatatttacatttttattttttgagatggagtctcgctttgtcacccaggctgaagtgtggtggtgtgatcttggctcactgcaacctccacctcccgggttcaagcagttcttctgcctcagcctcccgagtagctggaactacaggcacataccaccacgcctggctaatttttgtatttttagtagagacagggtttcaccatgttgtccaggctggtcttgaactcctgacctcaggtgatccggctgccttggcctcccaaagtgttgggattacaggcatgagccaccacacccagcctgttcttttatttagtgttacatcattctgtgtatataacattcatatttaaggaaatcaattggattggattccagcacagcatctgcccagtttcaggctgcctttgcagactgccctgcataggacacccttgatcttcctcggtgtttcggcaacttgagatgacgtaggcctcagagattcagggttttgcctctacagcagcctgtcgcgcctcatgtgaactgtcttacccttcttctatgctccagagatgtggctgtagatggcctagttttcttgtgtgtgaattctctctggtctcagttcatttgcataatgagatagcaatttttttttctttttctgagtactagcttttagccatttatttttatagaagagatatttcttaattggctcataactcttcttttctttaactaacaggccatcttcccatttacccggacgcctctgacaatgtgtgcctggcctggaactacagagatgccctggcagtcatttggtctcatgagtgtgtggtgtgtttctttgctggtcacacccatgatggtggctactctgaggatccttttggtgtatac

SEQ ID NO: 85305 - DNA, 2024 bp, Homo sapiens
tcctcaaaagacatcaaatgggacaaggtatttgtaacacatataaacaaggatttatatttagcatatatataaataatttctataaatcaatgttatatttcaataaaacaactgagatgagaacatactaaaatgtaattatgtgttttatcaattcagtctttatacttgtttccaaagcaatccatgatttttatttataataatttttgtgtctttataggaatccagttggtggaagaattcaattggctattgccattgtaatcacacttttcccatttatctcatgggtctacatatatattaacaaggaaatgcggtcctcttggccaactcactgcaagacagtaatttaaataaattcaagaacttcgtttttaaaatgaatattttcaatcaattttttataaacattaggggaacaagccaggagtttatttcaggtaatttgggctaatagttttaaaactccaaataactttttaagggtgcatataattcgatgtaagattggatgggacaagtaagagatggtctgatattttccagacgactttctgcagggtcttgtgtcataatgtagtggaaaaggctagagaatagaagtttaaaaatacgagttctaacttaactttgtaactatgtaatttgggcaaatatataaacctcctggtggatatttatctataaaataggattaatgccagatctacttacttacacagtaacaaggatcaatctagataatgtaagaacactctgaagatataaagtgtttggaaagattacggagggctgcccatgattaaaatagaggggagcagggattgggtaatatactgaaatagacattcaagagagggctataccccgatctttttttttttttaagacagtcccactctattgcccaggctggagtgcagtggcatgatcatggctcactgcagtcctgacctcccggggctcaggtgatcctcctacctcagcctcccaagaagctacgactacaagtgtgcaccaccatgcccggctaaatttttttaaattttttgtagaggcagggtttcaccgtgttgtccaggctggtcttgaattcctgagttcaagcgatctgtccaccttggcctcccaaagtgctgggattacaggtgtgagccaccatgcccagtccagccctaaactaatcttatccagagctggcatagtgcagtgaactaaaggagaactctagatgaatcaaatgagcaggcatgtcttggaaagaaagggaagctggatagaataaaggaattagggaccaaacaagaaggcaatagggactataactacattctaaatgagaaataaggtcaaaatctatatacattctttataaatggatgtccaaagtaatcctagggaggagagcttttttttttttcatttccattttcatttaaaaatggatacttgattattggaaaacttacaattgtgtttggaacaacttgggtatttgaatctaattttccaattgcaaattttatgatacctaaatacagataaagtatttccaatgaaaatttagtgtccaaatgagtggggctataaatgtaaaatacactggattttaaagacatggtagaaaaagaacagaaaatattttttgtattgattacatgttgaaacaatattttggctataatgggttaaatatactattaaagttgattttatctgtttctgtttacttttatttacgtggcttacattgcatttctgttggacagtcctgtatttaagtatctagatggcaacattttacatacacaagcatcaaactctgtggtcagatactgttttttctgatctaggaaagagatctgggaaatacttcactcaaaaagaacgagtagtgccttccacaggttaggagagtgtaaatgagtctggtagtttgtctatttttattgtctttattactatagtaaatattctataaatatttgttaaaggaggtatgtgtattttgtttt

SEQ ID NO: 85306 - DNA, 1037 bp, Homo sapiens
tccctgggactcatgatgctggtgtgcgggctggtgtgggtgcccatcatcaaaaagaaacagaagcacagacagaagtcgaatttcttacgcagcctcaagtccttcttcctgactcgctgatggtggtttccgcatctccctgccaccttgactgggagaagatctgatgaccaacatccgacatccctgtctcctctgtggggtgccataaaactgatccaggaaaatgctcttcctgaccctgtggggaagatagagcttggggctccaccctccatgcagccgggaatgttgccagatgtatccacttgatctctattctgactgatgcttccttggatcccggctgtggccttccctttggtcactctaaccccctgcccctgcatccaggcatcattcatccaactctctctgccaagtgcaatgcatgctgggaaattcttcgaaggtgggctatgcccaagggagaacctcatgtttacatatctgagtgccagagctggattcttcatttgcatacttctggaaccaaaactgacccacggaggtcctttacagaggagggagggatggctgagctctgacccattgggtttgacagccctagctcccttagcagactttcaagatcacaagtatcaaacattccaaagactgaacaatgaagggaggcctgggaaaaatactctccaagatggcacgtgcccctggacatgacaacatgactctaggggttagtcagctgaagaagtttagttcctaattatataatatttacatcagaggcagtggggtaggctaggggatgtcactgtttccgcttgaccttatctttctcattgaccactgtcttctctgaacttgatcattagccaaggacaaaatgcatgttgccctaatttctttcctacccctgcctctatctctgcatctagaacagctaaatggaaagatacagagggatcctgtaaggttgttttccctttcacgtccatcaagatcaaaattgagagaatcaagttccatatctg

SEQ ID NO: 85307 - DNA, 1143 bp, Homo sapiens
tgggaagaattaagcctacttattcacagttccagcaagtcactaaacttacttgcagaagctgcttgtgatggaaagacccaggtctttggcatcagagtgaccacaatttgaacacagtttgccacttacatgctgtgggacctcggtcaggttacttcagcccctgagccttacgagccccatataaaacagggataatggagtgtctacctcatagggttgcggtacagtcaaatttcaaataacactgctatattgtctgacacattctacgtgttcaggaaatggccttggttgccattgcaattattttctttctgggtctctgtttttccatttataaaatgaaggagttttcttagctatttcagataagtctataggtaatgaatcagcttgaaatctgaaaattgaggttttcagaaaatcaccaattcatgggctgtaggagttttataacattttattaaagccccaataagattccattttttctgtataccagggctttttaacaatggcactgttggcattgtggattggaaaatggattgctgtggcagactataggattgtaggatgtttgtattgtaggatagttagcaacattcctggtctctacccactagatgccaacagtacctcttcctccctgttgttatcatcacaataaaatatatctccagacattgcaaaggtcccctggggtaggcaagatcaatgtggtggatcaaaggctgctctggccagcctttcctcctgcctagcttgaaaattcaggatagaggctgggcttcctcatcttctaccccatggcacctggctcacagcctggcacttggcagttgctcagaggatgtggcccagatgctgcagctctgtcggggacaaggtaacactcagggggctggtccagtgagaaccacccttttccgcttcaattaagttactggtagtttggtttgtgtgattcaggagatccttcactcactgtagggagttgaattgtggcccccaaaagatatgtctacccagaacctcagaatgtgaccttatttggaataagggtcactgcagatacaatcaagataaggatcttgagattaaaacatcctgagtgagagtgggttctaaatccaa

SEQ ID NO: 85308 - DNA, 1052 bp, Homo sapiens
tggatggcaactctttgctatacttttttttttccccgcggagcctcgaggccattagaaagctatctgaacctctgagactcagctttgtaacccctgtgttgaaatctctgtgctgcagctcctatgggaggtgaggaggatgggggtgcagggcgggggtgctttccggggtagttgcgtgtctgggtctgtggaaaggaggcctgagtctaactttcacagctacgaggccatcccaaaagagaatcatagtaccatccttggcgtgtgtccttggaggaggtagggggaactgagaacaaaaagcgatggccaaggccaagattctgcctgcgtgaccagcgtgctttggttgaaggcagggaactgaaggcagggaacaggctgtcagagcgagggcggtagagaattttccctgagactttctgttcagtcccactcatgtgtgacctaaacaagggatccctatccaggaacagaagagttcctcttttgggaaccgtggaatggatatattagagctcgaactcagactccaagacacaagagggagatcctgatattgactagggggtggggtggggggcggtgcacagactatccccgcagctccccacttgctactgtctccattccctccctcttcctctgcacttcctcccgttcccttaacttctcagttgccaccttcttcttaaagattctgtccaacaaacatttgtttagtgcctactccctgccagcagaatgaataagagagtccctttcctcaaggagggggaccttgtagaccattagggagacagataaacaaatgatttccacatggcaaggttacgtctcatgataaaggcgggcagggtgctctgagagcagaagacaggcacccagcctaggcctgcaaggggacagatgggggtcaaatgtagctttctcaatgaggtagagcagaatcttgaagaatggattacgagttaatacagcaagcaagaggggaaggaggctcccagcagagggaacatccttagcagaaccagaaagacaggaag

SEQ ID NO: 85309 - DNA, 1035 bp, Homo sapiens
ttcgtagatggggagcaggagagacccagcatgtttgcctgacctcaccccctcctaaagagcctgtcctggggcctctggggagagtggggtgcccattcctggcagtagcaatgagatcatgtgctgaggttacagaatgttgatgtccaacttcactttatcaagagtgacatcatctggagacaataaatattcatgcccatctacataccactgtgagttgtataaaagaacagccagtcatcctgcctgttgtcaaagccatatccattaatggcagacaaagggagccaagggtcatgactctctaagcttcatggagacccagaatggaggctgcacaggtggcagaggagcactctgccacagtcctgcatgccctggttcccatccccccacgcctctctgacctcaacccctactaccttctgcttccctcctaggctgcagacacactagtcttctccagacacactgtttcttctcatgctgtttgtattcttgcattgagatatttccccctttctgtttctgtagccccaaattttctagcactaggtatttgttttgtggaatctgttgctcaagcagcactgttttggagaggcctttcctaaccttctctgttaccatctccggctttacttttctcagagcacttacatcatctaacatcatacatttgtcggttcatgtgtttattatctgtcaccatcagaatttaagccccaggtacacaagggttttatcttcctatcattgtggtatcctaggaccaagaacatcacttggaaaatcctagttgctcaagagctgtttgttcagggaatgatgaaagatgacatagtcctttacttggatgggcgtaggatccaagcacagatgctggttatgcagctgctgcatgctgaagaactcccttcaagactgcatcccatgtagtagccctctctgtaaagtaagtatggtgtccgtcacttgcataaaccataggctggtcaccagccagctggttgagccagaaggtcctgg

SEQ ID NO: 85310 - DNA, 1079 bp, Homo sapiens
gctggaaggaacctcctaagtttgtccagtataaagttcttattctgcacatgaggaatttgctcttaggtccagcagccagaaagtggctgacctgtgtccagaatccaggtcccaggacatccagatcttttctcagctcattttttacgtggtcacctatgcatctgcctgtattttattgcaataaggggatggtacatctggtacatgaacgtgccagaaacaggcaagcatttccttgccaggcctaagcttttgaaaagcaagagagagagggagagaagcagatgttgaggaaatagcctgagtgcattggtggcctctggaacatctggaccagtccaagccgtcttttgcttccaacattggaagtcctgcttaggtcctagcaggaagatgatttgtgatccaaccatttcacatatagggccaagagggcagacccgaagggttgcagctctcagcaacagccctacccagggaccgaggttgctatagaaacaatatgggggtgggggaaaaagcagagagtcatccaggtggagaggaggggggcgtttgaaatgagaggtttctagatgaaacagacttcctgcaggttctgctggagtttcattgaaggctgatggctttgtcatttcccatcaagctgggctgtagcatggggtgtggagggctcctgggaaagaaagacgtctgactgagtagtgtgatgacgcccccaacccagtgcagtgcagtgcagtgagcagcctatgtgcttgtatgattgtgtgatacatacacaattgtgattacctgtgtgtgtgtacgtatcagtgtgtgattttgtgtgtgattaccagtgtagttatgtttgagtgtgtgtgcttgtgtggttttgtgtgtgtgtgtgtgtaagattcagtgtgattgtgagtgtggttgtgtgattgtggttgtgagtatgtgtgtggttttatgtgcagttgtatggttgtgtgtatagttgtgaatgtatgtgattggttatgtgtggtcgtgagtatggttgtgtgtggtgttttgtgcatgattctgagtgtggttgtgtgtgt

SEQ ID NO: 85311 - DNA, 1208 bp, Homo sapiens
tttaattcctccctttcatcccttgtaacattggcatcattcatttcacttatggctaagcatatacaagcatatatatataatatatatacatacacatatataatttaatacattgttgctattattttaaacaaactattaccttttagctgaagtaaaaatatgagaaataagagtttttattttatcttcacttattttttcttcattattcttcctttctttatgtagatctgagtttctaacctatatcattttccttatctctaaagaatttcctttaacatttcttacaaggcaggtctactggcaacgaattccctcaatttttgtttgtccaagaaagtctttatttctccttcacttctgaaggataatttcacaggatacaggattctaggttggtggttttattcttttaataccttaggtatttcacttcacgctcttcttgcttgcatggtttctgagaagtcagatgtgattcttacctttgttcctctacaggtaagagtcccacagtcctagcttctttcaaaattttttctttatctttgacattctattgtttgataatgatgtgcctaggtgtattttttgcatttattctactttgtattatttgtgctttctggatctgtagtttgatacctgttattaatttggggaacctatcatatattcttaaatacttgttgagtgaatcaataaatactcattgagtgaatgagtgaatgaatgaataaaatggaaatctgaagaatgagtaggtattatccagttaatatgccaccacaccggacagctgccaggagaaggaaggtatggccaggctcaccccaaaatcacaggttcccccctttctggtaggttctcccctgactctatggagtactgttttcagtgatggggttttccatcactatgctccccacatgggttccaagaagagactagactcccccacattgatacctacaagacagaaaaagctaagccttgtcaggaaagaaatgacacagcaattatggtcccatgctgtgcttgtccacctgctcctgagctctgtgatgattaagctagttgtgtgtaaacttacaccaacttatgatctgaataggggacaccatccaggatagaagatagaaggtccccgaggagaacctaatggtactacttctggggctattttaaattgtgacagg

SEQ ID NO: 85312 - DNA, 1039 bp, Homo sapiens
tacttcttttcaaggatttcttctgcttcacctttgggtctagaagcaaggaatgaagggagggagagagggagggagggaggggaggagggaagaaaaaagaagtagagataggtctacagacttgctccaattcagtcccacatttcaaaatccagaaaactatgtcatagctgggacagagaggtatcccatttattcagctgtcccatccatcttcatggaacaagcaaagccacatcaataggcaagttcacgtagcagataaaagaggcttctggggctggaacctagatgccatgatttctagcccaaccaggctggtggcctctaccatacatagaagtaccatccacccttacagtaaaagcctccctcctgctcacaaaggaagcctaaagcccaagatttccctctccttgttttattcatttttgcacatctctgttgctctaacagaaatgaactggaatctgcacaggttctctcctgccctgaaagttctgcctggtttccttggcctctgatggcattgaagctttcacaatccctcctgcatctccaccttccctgtcttgctccaggctcctggctccatgccttcctgtgtcaaaaaggctttgccaagaattacttcacctcctaaccaggcttctgccctcagggctcccccagtgtcttgggagtgtcttgggccacacgactgcctcttagaaagttccaaccttgcccccaattcaaatttctcctcccctctttccactctccctcccagaaactcctgatttccagaaaacctcagatttccaggccaggtcactcattccttcctctcatctccctcttcctccatctaccttcctccattcaccttcctccattcctaatttcttttccctggtcttgctataatctccagctctaaaaatcagagctctcaatgaaaacaatggaagaataagacattctttcggtcttctgtttgcctcactggtgtatccttcatctcctgcccctgtgagttgataccccagtgcac

SEQ ID NO: 85313 - DNA, 1120 bp, Homo sapiens
ctccaaactaacagcaattatttgcatcagaaagactttgatatttaatggaatcctttggaagtaaaaggaatttttaaattaatcactccctctaatctcttaaataagtgaggaacttcataaataatgccagaataatgatacggtattactatcagtacacagtagttatttcattagtggaaaccatgactcggttggaacctcacatagactccagcagtgcatttactcaccttcccctgttttcagacttaaaggaaaggaacagcgtgtaactaagtgtaagtcagttgtaatatcttataaacccacaagatggtgccagttccacacaaaaatagaattttcccatcaaatcccatgtgtctgtctttcaggatagaaagttaggtttttccgtctcttctaaatatgagaaagaggcaagctggctgccattggcgtcttgcctcttcagtaggaggttttattcgaagtacccagcttcttggcagtttcttgagtaaatttgtgtttttaagctggaggtaccctgttagtgctcctgaagcaacttttctggtttttgagtgagctgattttgacccttgggggttttggtggctgtatccttttctgccttgtactcttcttggtagttactgttctggtgttcatggaatagatcctgtgtcagcaagccaggcagccaggcagatattactgtgcttggcaagtgcatccttttctctgctagcactgaagccaaggtccatgtgttctgaccacaaagactgagaactcctgtgttcagcaatgtttgctcaagtgattattttcaggaggttgttaaaatagctgcattcacagaagattaacagaataagctgctagctgtttatactttaaaaattaaaaaatttaaattaaagttcacattaaaaatgtggttatagttaatagttgactgtgtaattcagtatattgaggtcgcttttcagcttcctatccttcccacccaaaaaagtccaaaccctctttcgtttgtgtgtttggcttagcacctgctaattgaacagtttttggtatctcttttctccttgagccatttccacttccctttgatgtgctaggg

SEQ ID NO: 85314 - DNA, 1044 bp, Homo sapiens
aacagaataagggttggggtacccttggtagtcagtgtgaccatggttactttttgattccattcctcttaaagggcttctagcatttagttaggttcaacagacatttattgaatagttcatgtttatagagcatgccataattcagaaagaagagacaggattttatttatctttacatccctgtcaccctccccatgaaataattttaatatacataaaaaccagtgatagatatatagacaggatgatgtcagagcttagaggacactttctgtgcaggccctcagataattcattcaaattgaattagttattggatgcccactgtgttgcacagcacattatactgatgaagtataagattgacttcctgactgtacagctttacaatttaggtggtggtggttggggcgaaatgaaatggcaaaatgacaatttaggattgtatttcttgttccagatgggtgacttacaaagcttataaaaacaaggtgatttgtttgtttgttttattggtggggaggctgacagtttgaaatagctggatacagtgtgtttttttggttcaaaaaatatttattgagcatctgcataaaacgctcatgctgagtttatagagaattgaacatctctaactgtcctcatggaggttatccccctgtgaagatgggggagggaaggctatttagctaaacatgaaaaattactagttggaaaagtaataaaggtaacaagctgggttttgtgatagaagataatagagggcagtccgcttgataagatggtcagagaaggcttgtctggaaagctaaccctcttttacctgaagacggttctaggcagaggaactgtgtgtatgaaggttccaaagcagggaagagcttggagtgttctaggaactcctaaggcagtggttaggactttttctgatgctgtccgttctcctcagcccttgtatgttgatacccagttaactaaactttctaataagcagaacccattttagaaggaaaaaggacctaagacctctctatgaattat

SEQ ID NO: 85315 - DNA, 1041 bp, Homo sapiens
aaaactaggactcaagtgaaatgacttcagtttcacagttggaactagaactctggtctcctaacacacttcattttgttttttactttatcgaacaccatttgctttttgtttttataaacacttacacatcctaaacagccgcttacctcactgtatttggtaagaacagtaaattgtaggtttcaagttatggccacataaaagatcttaaaattgaggtaagagggtgagaatgaggggcaaatgtgggaacgagggtaggagatacgtagagagaaaaaggaggaggaaaaaccctcatgtagctttatttcttttataggcttactagcattctgtcctatgcattttgatattgattcatcagtgtcaagaattaagaatttaaattcttaaataaatattattcttgatatttattctaagatttaattaaacttgcctggggccaggaaaaatgaaaaagactcaaatttacccctacttgtaatggggaaaatataaatggaggatcatgtcaaattaagccccagggtacagatagttcacccagatataaaaaagtgaggcacacacgacttaaaatgtaaccagttaactatcaacaggttcaacggattatctagtacctccagagataggacttaaagtaagtgaataggaagtcagaatttcggagacaagggagacttcaaaaattgaacatattggccaggtgagatggctcatgcctataatcccataactttgggaggctgaggcaggaggattgtttgagactagcctgggcaacatgttgggactccatctctacaaaaacaaaaaacaaaaaactccaaaagttagccagacatagtggcttgcacctgctgagatgagaggattgcttgagcccaggagtttgaggctgcagtgagctatgatcatgccactgcactccagcatgagcgacagcaagaccctgtctctaaaaaaaaaaaagaaaaaaagaaaaattgaacatatgtgagtgaatactagtgaatattatatcataac

SEQ ID NO: 85316 - DNA, 1005 bp, Homo sapiens
acctcctttgtagctacttatatagattctgtactggtgacagaatttcaggttttgagaattttttaacacttaaactggcgcttagcttttaatgtgttagagcaatcattggcgacattctgtcattctcagtcacatataccttaaaatttttaatatattatacacttattaagcaatgtaactttttttaacacaaccttacatatagatccaactgatttctttttcatataccttacaaatttgttttcttgctcctttcgccatccatattactattttgttcacctcttctctctccttttcacctctttctttttgctacctagtaacagtcaatcagggtattttgctttaaagttgtttgtttcccagcctcctctccagttgtagtagaaggtgagttttaccttcccttttccagtgggatgcggggaagacttgcctgctacttccagagaacccttttcttcctgaatgtagtcagctcattttgcgtggtaggaggccagtggcttttagttgcttaggcttgtaagacccatacatctctgtttttctttctgaattctgttcccactgcacatttggtggggtagcatattgaccttcagtggtagagagaccagggtcagaccttctaggtttgccctagtacttctttcccatgaagtctccattctcacttcttcctgcattgtcatttctatgataaggtagtcagcagtggattacttcggtggtgcaccaaagacacttttcatgtcaaagtagctacattagcatttttcagtttttgtactttatagatggcatcttcttagaatcctaagaattttgataactggataggaaagactacttaactatcctttcttcagtcctggctcttttttctgcgtgttttgattgaatttgtttaaacacaaagttattgtaagcttacttccttcattttgttccccaaaacacaagcgtagatagaccactaacaaaacc

SEQ ID NO: 85317 - DNA, 2121 bp, Homo sapiens
tgctggtttgctctggaatatagacattaactttatggtaaaagtggtcacacttttctttaaaattgggcttgggctgggcacggtggctcatgcctgtaatcccagcacttcgggaggccacggcgggcagatcacctgaggttgggagttcaagaccagccagaccaacatggagaaaccccgcctctactaaaaatacaaaattagctgggcgtggtggcacacgcctgtaatcctagctatttgggaggctgaggcaggagaatcgctgaacctgggaggcagaggttgcagtgagccgagattgtgccatggcactccagcctggtcaacaagaacaaaactccgtctcaaaataaataaataaataactccatatcaaaataaataaaataaaaataaaggcttgaaatcatcaaaggactgatttctccactgttggggcacacttatttctagaatctccacttttattctaaggatatttcagaattatcagataaacttatgtttaatttattaaaaagaattatgtatcatacagtagttgtaggagggtatggggcaaagagcatgaaattagatatcattcaagtctgataagtctgagtactggctgcttcaaatgctcaaatctatcacaaataaaaaagatttattgtaagatgattctgatgactaatggaagctctgaaggattaatttttttcattgactttcacatagtttttgctctttatattgctatgtcactctcttttaatcactttattacagttgcctgttacaagtcagtggagttttattggagatgtgtgtgtgtgtgtttacatgcacaaatagcgattacatatttaatttgggaaacatctctgtagaaattcaataaaaattcactctgctcctcacagtcttccttttatagattatagttcatgcatttatctattcttcagtttattttctaaatataagtttattttagataaaataaacttcaagttacatttatttaagaccatagtgtcatgtttcctttaatactgttggatcattgaatttttctgaagtctgaatgtaagaacactttagggaaaaaatatttttccatttgtaaatgtagagttataagtgtagaggtcctgccttagaaggttgattaatttatctgttatttgaagataatgtttttgtacatgtaaaggtatttatataatttatgaccgtatctcactgactttaatgagctaacctgtgaacatagttgtttagaatatgacttacttgctttataaaaccattttttcattttttatttttcgaggagggatgaggatttgcctgaaaacatttttttctcacaagctgcccaactaccaaaaaaatcattcttccaaaacctcctgatgttgattcctcatgaagagcagttgagttgcccaatgtgtgccactcatgacagaagcccccttttttagaaacacagtttttaagaaatgcttttatgaagttgaatttaccttagtgttgtcagcattctaatttttttttttttcagatgagaatcgtgactcatttaaagatctttgggcataggaattttcctcagaaaatgcctaaccgaattgtgtgctaatcagagtgatagtagctaggcgtttggcaaatactcttctgataatttatttttcacacaaaggtgcttttagctctttatcactatcctcccccccgccaccttttttttgtagctgtagtatattatcagttcatggccgaagagttctggagctctaaatattttgggtagtgttaagtttctgtagctttgtcttttacgtttttggtggcgttaaaaactttgtgcttttaaaaaatgatttaacttggaagtgtttacatagcaacaggatatttatttagaagattagatgctccagagctattattctggatgctacgaattgaaattagagtacaggtggcggtggtttttggtggcactgcacatcagtatatttggaggaaaaaaaggaggcatcctggagactgattttataagtatccctaattgttttttaaattggtaataataaaaaggaaaccataaagaggaag

SEQ ID NO: 85318 - DNA, 1540 bp, Homo sapiens
aaagcaaggagcaaagggaaggttaagttgttctgcatttaaaactaagaacttagaaaattcagctggttaaatttctgattcctcgttttatgtagcaaaagtctgcagccagtgacaaaaattatataatttggaaattattaaattcaactgagtttgtcagcaatcctaagaaacaaaatgtcatttactgctcttggaggtttatacagtttatataagtttatatatatagttaatgaagttagttgaaaaatgagacttgtaggattagccgtaagccagactaacatctaatatttattaccatttgtggggaccatgataaattgtcaatgggaagtccatctgcttggaaaaaagtttttatattagttaaagcccaggaattgtagaagtagaagtggtatattccagagtcaggattcacctattcctctcatactttatgcttataccttataccattacaaagggaatgttgcttagttgtctttgaccttggaaatggtgggaacatgaatttgtcctgaaaatgctttttgttgctaggagaaggaaggtttctaacagctattgcaccttaaaataatttggggatgcttaatgtgtgacatttttgataagaaaataattagtgactttcccacattgcagaaagttttcatttatatgccacttgaactttactactagcaacaaagggatgttgacagaactttcagagttgaacagatacagagtagaaatgatatggaacgtttccagagagtattcccaactgaatccagttaaagtggttttcaatttagctcatacatttagggtgatggttttcagataaggtgtagtaaatatttggattgtcactacatggttttatgagatccgaatctaggcaaaaatgtacagttaataagatgcactaagaaaaagttgtgacttccatcttggtgttcattttccctgggtagaaatgccaaatgaacgttaatcagaaaggaaaatcaagtgcgtacgaacatattcactcccctttagagaagctcttacaaggataaggaaagagaggtacaaatgttaacagttaacaaatgtgtatctatatataccttcgacagataaagatattaccaatgataagaagcactgggatccttaaagatgaattaaatctagagcctactctgaagaagtgtatgttctttgagagattgagcatatataggagctatgtggtagaaataataactcttaatgtgtgtcaaatcctgctctaagcactttatattaactcctttaattctcacagcagccttatgaagtaggtataatagttaatatagatgaggaaactgaagcacagagaggttaaataaaatttccaaagtcatatagctaataaggggcagaactgtgtgaccttggtctggtcacagtttacacgttgtaaaccttagtgttttactaattcttgaaagcagttggcgcttataggaatgattttctaaatcaaatggcttttgaggagtcctca

SEQ ID NO: 85319 - DNA, 2185 bp, Homo sapiens
ggactgctcaatgcctaggccagcctctgggccagctgcaattctaattttcccagcatgttgaacaaatattctcatcttttaaacaagccattgcatgaaaaaagtaggcagtattgctttgaggggtggaacagtgctttggaagtgtgatgaggacaggtactgttcctaagtcagggttcttggttgcaaacaacaaagatttactccagccaataaccatataggcttaagttgtctgaggctgtccatgtcaactttattcccaaatcaataaacatttggaagtgttttctgtatcaggcacagagctaaggttttaggtatacagagaatctctcgcaggaaaccgcttctgtataaatattttaggatgtttgatgcctcgtttctctcctgctatagttaaagggacaatgtttatctgtgttgactggttagaaattgatgatatgacagtcccaccaaaggggttattataatcacaaattcataatgtttttgatcagttattttaaaccctgttgtacaaatatttcaatctttgttagcatctaaaaatcttcacaggtcatttatagtatcacgtccctcctttctccctgtgaaagttgtttcaagtttttgaaaaaaattcatattaatgtcctatttgcttgtaattttttgtcattaaaaatatctgaatacatggtgacagattgcctttcggttttgatttttttgagggacccttgaaaaagaagtaaaggagagaaggacccagccccagtagaggctctagtacttagagaaagtgaatgggagaggagaagatgcctttttttaaaaaaaaaaaagctcatgcctccaggtagccagaaacagcttctcctgagtattgtaaaagctatttttctacttttcttgaatctcaccttcggttgacattttggggccttccttttcctcctcaaaactgcctttcaagttcatcttaaactgatcagcatttgaagagttggggtacacagatgagacccagcaaggtaacttgatcatgtgctaagctcgttggcacttgttttaggctttgagtgatctttgcttggaaaggcttcgaaacctacagaattacttagtgtgttttgttagtaaatgatcagaatataaatttggactttttcaagataattgcagatgtctctgaagtgtagactgtgtttaaatctaatttatgtaacttaaatcacattctcttcatcatggtgtacgtttatgaagttaatggcctttaaagctttcaatttagtttttatttaaatgtgaatgcaatgctgaaaaaaatctctctgtgtattcagtataaatacttatattcaagaaaacagtttaagttttaactgttgtaatatattttattgtttatctggtaaggttagctactattccgtcaaattgggctttctaagaaaggaccaatttttgtttttctttggatagttttcacaatagttctttgttctgtccttgtcttgcattttatcttagtcttatattaatttttcttcacacggaggtaatggatgatgtgccagatggtttcaaacacagactacatgacatatgctcagtttttgatttgaggagtttgtaaagattttcttcaaattgtgatagcaaagttccttaacttaattttttctgtaaacgatttgccatattaaggtaattaataggttcaagttccagagattaggagcttagtatctttggggaccaccattcagcccattacagtctgttttctgggccccaaatattcatatccttcccatgtgcaaaatacatttaccctaccccagcgtctccaaaattttgactcattacagtattaactcaaatgtaaatctcacctaaatattaccagctcaaaaatcccaaatcccattatgaaaatcatttaaatcaggcatgggtaaaactctgagtattatccagggcaaattccatttggtttcaagacccgggagtaatcctctatctttaaatattttctaaagaaaaattctcaagaagtaaaagagcatatttactaaaaaaacctttttttttgtatattgctgaacctctcacagaaagtttttctaccagcaatatatcttattagtgattcttctacctagccattctgatcatcatg

SEQ ID NO: 85320 - DNA, 1376 bp, Homo sapiens
ttacaaagcattttcatggtctgatttcaattgtagtgaaaaaatacatgtccctatctatgtatagaaaaaagtctgcagtagttagtaaactgattattttgagatacttggattgataagtttatgtaaaattttaaccctatgtattgtataggtgtatatgtaacatttttaatatatttgatctttttttgcattttctgcccttctaccatggtggttttacttgggtaataaaaaacattggtatctcttcccttcctaccctaaagaaacagcttcatggaaataattatttagaatacttgtattactaacttgaagtttactctaccgtaatgtttttagcaaatttttcagattcttcactctgttgtttatattcattaaaatgagggaaaacgatatttattaaactgagggcattaagtataacactgaacagatggtaatatttttagaatttttcagtatatctactgagataattgatttttataatagtattttcacttgcaaaagtattaacttccctgaataatggaaacttgaagtgatagcattctatctattgtatcatagcctagtgaatgatttgtagttagtaacaactttagattattttattttttcttagtttaagaaattcctcattgcctttcaaaatattgtcctatattaactgtttgttaaagcaagttctcttgccttttggtgtgactttcttatgccctcagaatagtacctgttttgtagtacttgaaacttttactttttatttgttatttctcaggtaaacgcaaagcactgaagttgaattttgcaaatccacctttcaaatctacagcaaggtttactctgaatcccaatcctacaggagttcaaaacccacacatgtgagtattcttggtaatcaaaggctcaactcaagcaaagattttaaagttactgtattttatgaatttttccaattatgagatgtcagtataatttctctgactaaactctctgggaatattgtttattcttttccttctggagttccagttaaattgcaagttgcatttaggaaatttgactgtcttctgtccaactgtacaaattttcaccacttagtgacaaaatagagtcccatcttaataagctagattcctgcaagatttctatgtcatagtaaattgaaagagttgtgtacatgtgagtgtacacatatcagtggttatttcatttactgaatttttaaacaatagaaatgatattgtagcatcttagtgaaaatattagagcatcttagttaacataaagcaataccttcagaacaatattttacattaaccttcaattgaatttaagtgatgtgaaatattaaaaaa

SEQ ID NO: 85321 - DNA, 1026 bp, Homo sapiens
gagctgcttttaaaagacataatcatagtaccattgctacatctagtagaataaatctttaatatcatcaaataagcagatgacctcattagtttttttatttttaatagtttgaagtgaggtctatacaaggtcctgcattctatgcagttagctgatcagtcttttaaactagagttccttctcttgaaatcgattagtttttctttgtgatacatttttatctactcaggcattcagaaatttaattcttttaatttattgcttatttccttaaaaaaaggatttttggggggatcttggaggatgaggagacaacctgaacaggaaaccttgatttttaattatcaatgattaaaattagaaatatttttgacagaaaatgcatattataatagagactcttgtacccactaacattttttcccttggcttttaaaatgaaagattaaactggatagccaaagagtacaaagaaaaagcaaaggaaaaatgtgtggctaccttttaaattttcatcaggtttggattctactaaacactataaatctttttgatactctagggatattcttataaatgtggccagcttgtgttaaaatcatgttgtgtatatgaatttgacaaacagaagtagatattctgttaaacattctgtgttttcatgatagtgagttatggttgagtgctctcagtgtactgagtcgtttagaatatattcagtacaattgttattctgaaagaacatcccttttatcttcataacatatcacaattgtcaagaaaaaacactagcttaaaagttaacactggaaataaatagtggtggatgcagataacattttggggcttaagagttttggaaccacacgttttaagtttaaagtgctctctttagaccagaggatctctaggatttcccttatctttgtttattacattggaacagacagagactcagttgtgctatagaacatctaggagtagtttaaagaggtttcaaagtccctagttaataactaatat

SEQ ID NO: 85322 - DNA, 1075 bp, Homo sapiens
gaagggctagaatttaaaagaccaggcaatatcttggcaaatatgtggtgtaagcagaattctcctatattgttgaggaagcagaaaatggtacaaccactttagaaaactctgctaggtttttaataaaatgaaacaagcacctgcccctgacccagcagtcctaccttttgttatttgcctaagatgaaaatactctcagaaagatttgtaagtgaatgttcatagaaagtttattcagaatagccgccaaattagaaagaacccagagtgttcaataatggaagaatgaagaaacaaattatggtatattatttaacaaaatactcttcctcaataaagtggagaaaatactgatacctgcagtcatattgatggatctctgaaaatgctgagcagaagaagcgagacacaaaagagaacatactgattctatctctatgaaatctagagtaggcagaacagatctgtggtgattgaaatcagatcagtgcttgcctctggaggagattgacaagaatggcaccagggaaccagggaattttctgaggtgatggaatgctctgtatcttgctgtattttgtgaaatagaaaggtgtctgcatttgtcaaaactcattgagccacatatgcttatgatttgtgcatctcactctatgtaaatgatgcctcaattttaaaagcaatcctgaacaataacaattatatatatacatatattattattattattattattattattattattggtgtttgttgtttttttttttttgagacagagtcttgctctgtcatccaggctggagtgcaatggtgcgatctcggctcactgcaacctccgcctactgggttgaagtgattctcctgcctcagcctcccaagtggctgggattacaggcctacaccaccatgcctggctagttttttgtatttttagtagagacaaggtttcaccatgttggccaggctggtcttgaactcttgacctcaggtgatctgcccgcctcagcctcccacagtgctgggattgcaggcatgagccactgcgcctggcctaatttttgtattttta

SEQ ID NO: 85323 - DNA, 2152 bp, Homo sapiens
gtatttttgtcatttctggtcagttgcaattgattgatgtttttctcttcactatgggtcatgtttttctgcttttttgtatactgtggtaattttagattgcatcccagagattattgtgtgatggctgtttttgtattttcatgaatgtttttgagttttgttctttggttaagttacttggagatagtttgatcctttcaggtcttgctttttagctttcgcagatgagactactctagagctaattttgccttactagtaaggtaaaatccttctaactactttattggtttccaatcaggaagctttccactccagtggctaagaataggagctgccttgtatgagcctgggtatcatgccttcttaatccttttaggtggcttattcttcaggcttgtataggttcctcacaatcatccgctgatcaaggagggccctctgcatatcggtggggttctctttctgtgtagctgtctcttatcctgtactctgccatgtgaactttggctaccttggtctccctagattcccagatccttgtccgcaactcaagggtactgccaggatcttcctggatccccgctccctgtatcacagttggtgaactcttcagcagtaagctggggacacttgtagggctcaccttacatatttccggtctttcagtgtctgctgccctttgtttcctgatgatttccagtgtcttccagattgcctatatattctgtctgtttttttcagttgttttaggtatgagggtaagtctgtctcctgatacttcatagtaggacaagtggaggtgccacattgacactcactgtgagatggaaacaggaattgtggaactagggaataatatcttgaagactttgagaaagagcatctccaaacaagatatcttgcaggattcaaaatagtttcttacaatagtgactgacattgttaatacagtgaaagaagtcatggcgtttataaaaatggattggaaaaatctcgaggagagaacagactggatggatacgcaacaagattatagaaagggggcagatgaggaaaagacataactagggacctgaaaagcagtggtagagtgaaatcccttttgatgcaattgtgaatataaatgatactgcatgacagcaaaagaaaagaatttgagggcagtcattgatttgaaagcatacaaattactgaattttttaaaaatgtaaattcataaacacaagggaaggtaaacaacaaactgggaaaatatttgcaatgcaggacaagggttgatggtgttaataggtaaggaacttgttagtagaagcagcgataacaaaacaaacacctgggccaggaaggctcaggggcgctatctcaggcagttaataataatacaaaaaagacatatttgttcaccagatagcttaagaatgttcaactctagcagttgaaaagaatgatctaaccctaacacctttcaaattggcatgaggaaaaaggtgctgttgactaggtacagtgggcaccttttggctgatagtactcctaaatcagtgcagacttggtacacagccattccagtagtgataaccaattatttaatgactgtgttaaaatatattaagtgaaatctataagcagtaggtataatatgctgtttttgcaacctattcccatagtatacaaagatacaaaataatatgtactaaattgttaatagtggtttttttctggattatgattgatttttccattttcctttttatcttctacctttgtagctttaggagggattttagattcggtgtctggttggaaaaagaggttcaagtactggtactgctgctgaatttgcacagcaaacacactgcatctaatagagggtgggagtgaaggtggaggatgtggctagagctgttctaataaccctacttgactggccactgtgtttctttacaaaacaaggccacctgcctatatatgaagttccaggcagctttattagacattgtatagaaatacagcttttctcagtgtccagtctgattaatgttctgggacattatgtcacagttctgtgtgtgtgtgtgtgtgtgtgtgtgtgtgtgtgtgtgtgtgtgtgtttagtctgtaggatttcagaaatttcagactagta

SEQ ID NO: 85324 - DNA, 1131 bp, Homo sapiens
aagaaggaggttggaggaaaagaaaaagagtcttttttccaactgagttagctccttttaagtactgtgttcctattttccacctctaactgcaaggaatgttggtgacttagcttggcctgcaaaataccacatactaggtggcttaaacaacataatttatttctcacaattctcgagactggagagtccaagattaaggtgctggcaaggtaggttttaacctgaggcgtcctgccttggtttataggtggccacctctcactctgagctcaagtgacctcttgtgcatatgagaagagagtgaactctgtggtctctcttcttgtaaggacactaatcccagtggattagggccccacccttcattaaccttcattgaaccttcattatcttcttataggccctgtcttcagtacagtcacatttggggttagggccttaacatgtggattttgagaggaaacacagttcagttcatagtagttgggaaatgtagccttttagctgggtgcattgctgccacacataaatgaggatcctgttagggaggatgaagaggagaatggatgttgggtgacagctgatagttactgccacagcggctgttgtctgagtttcccaggttggtaatgagaaccttggggttggaaccttatgtagtgttcattggaggcaggtaagggtgatctgtataaaataatgcacagaaaattatgaagggaaagatgagggatatttaggaattatttttattttggggggtacatggtgtatatatttatggagtatgtgagatgttttgatatgggcatgcaatgtgtaataatcacatcgtgggaaattgggtgtccatcttctcaagcacttttcctttgtgttacaaacaatccaattgtactaggaattatttttgataaaatatagtccccattctgaagaaagtgatatcccaaggaaaagtcagggaactttttttttctttaagagtataattgtaggcaaatatttatgaacaagtaagggcaactttacatctttattggtttgtatttttcaccaatcttctcattgggtgtgttttctactgtttatgttctttctttcctaggcctcttacgtagtttagga

SEQ ID NO: 85325 - DNA, 1771 bp, Homo sapiens
agatttttaaaatctcccccaggtgattgtaaggtacagcaaaccttgggaatagttgtactaactgaagattgaggcactggaataactaatgttgggtaagatagggtaagaactttttcgcaataaggtttgcagctcttgggattctcacttgataatgctgtttggataaaccatcatccaagtttgaataagatcttatatttagaaatgaaaactgatctgcagaattagtttaatcaataaatgggaatttttaaaaatcttcttggcaatttgtttttatgaatcccgttgaagctgtgtctattgactacctaaatctagatcattcttaatccagtgtgtaaaaaaccaggatgacacaaatgaaaaacttcaaaaacctggaggtcagactattttagtaatttagaaaacatttttcccacacattaatcagtactaaaagaaaaaagttaaaacctatttaaaatgtggaaaaattgcttcccaatattttaacagagagagactgagaacacacagcattgagtcatcaggaaaactgaagatctcccctgaacaacactgggatttcactgcagaggacttgaaagaccttggagaaattggacgaggagcttatggttctgtcaacaaaatggtccacaaaccaagtgggcaaataatggcagttaaagtaggtgatgccatgattatttttggtactttaatccattaggtgaaatttcatggtgcagtaataccactgttgttgtgttcctacttttgtggtaaatgtgggtgtttaaaaaattgtttctccaactcctttgagggtgttctgtgtagaggtttcttattggtggcacattttctatctctttggaaacatgagtgtatgaagtgtgcatgttgattgcatttttggcatgatgcattaacatgttttaaacttcaggcccttctactgccaaggtgagttcaggctgggcggctgcacccctgggagcagggcagtgctgcactgagccaggcgggagctggaagaagacgcagcacactgggttgggcaaggtgcggggctagggctaacagcagtcttactgaaggtttcctggaaaccacgcacatgctgttgccactaacctcaaccttactcggtcctgaccggctcggcttctgtttgtttatttcatctctactcagtactgccctgttccctggttttaaagttgtactgaaatgcataccttgtgataatgttgtcacattttgtccttattgtgtcgtgccacttaatatgttcattaaaaaaaaaaaatggccagaaacagagatttgatccatagacaatacctggcaagcttatgctggtacctgtaaagaactggtggtttccatctgactcctagtttcatgtaattgtaatttattcatttgtttgtttagatgtttaacaaatctttgctgtatgtaagatatttcaggaaaatcagcaacagggggaacaacttgcaaaaacaaaggaaaaaaagctagctgtggccataccctctctgagcttaaaattcctatgggaacaaaaatgtttcagtttacaagaattcagaatggatttgcatatagtccaagctaatcatcttcctattagtgtcctattttgagagtttgtcagagtggttgataagagtccttagttttttcttgacatttgagaatgaatttaaattaaaataaaatgctttctgtgtagaagtctgttgtgagccaaaccttactgtaa

SEQ ID NO: 85326 - DNA, 1001 bp, Homo sapiens
accttcagtaagactgctgttagccctagccccgcaccttgcccaacccagtgtgctgcgtcttcttccagctcccgcctggctcagtgcagcactgccctgctcccaggggtgcagccgcccagcctgaactcaccttggcagtagaagggcctgaagtttaaaacatgttaatgcatcatgccaaaaatgcaatcaacatgcacacttcatacactcatgtttccaaagagatagaaaatgtgccaccaataagaaacctctacacagaacaccctcaaaggagttggagaaacaattttttaaacacccacatttaccacaaaagtaggaacacaacaacagtggtattactgcaccatgaaatttcacctaatggattaaagtaccaaaaataatcatggcatcacctactttaactgccattatttgcccacttggtttgtggaccattttgttgacagaaccataagctcctcgtccaatttctccaaggtctttcaagtcctctgcagtgaaatcccagtgttgttcaggggagatcttcagttttcctgatgactcaatgctgtgtgttctcagtctctctctgttaaaatattgggaagcaatttttccacattttaaataggttttaacttttttcttttagtactgattaatgtgtgggaaaaatgttttctaaattactaaaatagtctgacctccaggtttttgaagtttttcatttgtgtcatcctggttttttacacactggattaagaatgatctagatttaggtagtcaatagacacagcttcaacgggattcataaaaacaaattgccaagaagatttttaaaaattcccatttattgattaaactaattctgcagatcagttttcatttctaaatataagatcttattcaaacttggatgatggtttatccaaacagcattatcaagtgagaatcccaagagctgcaaaccttattgcgaaaaagttcttaccctatcttac

SEQ ID NO: 85327 - DNA, 1062 bp, Homo sapiens
atgtgcgaaaaaccaaagaaacgtgaaaaagtaagaatgaaaatgagagggagtataaggactgaagtacctgtcactaaagatgatggcaggcagtggaatctgaattgttgtgtgaagggttaatactgtaataaagctgtcatctcattgaagaactgaataatattgagcaggtaggtgggaataagaatgtgtcatgttaaatttgtcattgtggatcattatgatgacttttcagtcttctgcttgagaaattatctgggttaatcaggaaaaacagatctgttgtttgagggtaggtgcataggccggactgagttagcaatgtgacctggtatgcaagagtttcaagtattttctttctgttggagatctgcctaacttgtcttgttcttttgaacctcagctctaccctttcacctctactgtttcattgatgtgagtcttgctgattctggcctgttaacctgattttgattcctgcaatcctgcctctccttgattatttggattttgactttagtgtccttgacctggagttgagacccagcctaatcctgatgcttgatagtaaggactagagccctctgctgacagtatcagcagcccacagctcagctgttccctgagtagaacggaactttaatctgctggttgagtaggcctccctggtgtagatagtatggtgagtatgggaagtcaggtatcagaaaagtatggcttggcttgttttcctgccactggagagaccatgccacttctgtcaaaagttccattaccaaattatttcagtggggattatgatgatgaataatgatttgaggaggttcattttagtgtttaaacattggtcttgcatgttctgaaagcactagaatgatactgggatggccttcaattggaaaagttcctttttgatggcatagagtgctttgttaggccattttattcacttccaaagggccgcagtgatcatatttgattatccaaatcacctatgggatgcagatgtcatggctcttttgtttagaattgagactgtagtctaatatcttaggc

SEQ ID NO: 85328 - DNA, 1516 bp, Homo sapiens
tgattgagctgtattcttttatgcttcctaatattgcttaaaagctgtggtggtcatatgaaaagtgtaagtagagcatttccaggaggagacatattcaaggggtgtggcagggctggcctctaggcagccttgattttgaactcaggttgcttatgtagatggggttggaattcccagtatacatgtgtgcttgttttgctgtcactccaagttaatgtttttcagactgtgagtttgttccattaacagaattggatgtgcaacccaagaaataaaacagccaaaatcagtactgttcggggttatgtgagggtgggaagcagactctacctgcagccatattggaagcccttggggcaccagctctgaggaattaataggggtacaattaagacagtttggaaatggttgctctaggtgaattttagtcaatcattatatgtttttgaacattctaaagatctggtttctgaaaccttctaccatcacttggttaaactgaatgaattttgacattggactaaatcccaacttacatagttatctggagaaaaacctgttttttgttttgttttgttttgttttgttttgttttgtttttgagacagtttcactgcgtcgcccaggctggagtgcagtggcacaatcttggctcactgcaacctctgcctcctgggttcaagtgattctcctgcctcagcctcccaagtagctgggactaaaggcacgcaccaccacacccggccaatttttgtattattagtagaggcggggtttcaccatgttggctaggctggtcttgaactactgacttcaggtgatctgcccgcctcagcctcccaaaagtgctgggattacaggtgagagctaccacgcccagccaaaaacctgtcttaccatacctcactctgcgtgggtgtcatttgaaccagtatgtgatatatttcctgcatattttctatcattctttgtcatcttatggctatgcctctgaaatttgttgtatatgtcagatttctattgttacctcactttattgtcgtaagtactgaaatgatgatctgtcatttatggtcttcagacccttaaaaatttcagtgctaagattgacattgtttctttaaatgtggatgatgtggttagtaaagaggaagaagatgataccactcttaccaaggcatgtcaaacttgttccattaacttggtcctcagggcagctcttcccataatgtaatataacacatgcttttggaactgaactcccaggtgctctgataatacgtagcagaaggtaaggtaaaaggaattaagtggatctcagtatccccagtgagaagaatggggtattactattaattaattaattaattaatggggctaagatacaactgagagtttattaaattgattttaaaagacttgaatgatttttgcaattaagaattagcattctttcttctgcccgtagtaaaatcatatatgctttcacaatttaaaataattgacttaacag

SEQ ID NO: 85329 - DNA, 1022 bp, Homo sapiens
aagggtatgtttatggcatagcagtattggtgtttgtagatcacagaaactggatgcgttttcaaaatattacaactgtgttgtaatattatatataaattatatataatatattacatataatatatattaaatattatacaatattaaatataatattaaatatacaatatttaatatattatctataatatgtatgtaatatataatatatattaaattatatctaatatataatatatattaaatatataatatataatatatattaaatatattatatataatatgtaaaagattaagataatctttgttcttttcttcttttgatttttaatgctgaacctttgctatatcactctttattttctgtggagaggaggtcccatgtgctgtgtttgctcatgtactagttctaggatttctgcatgggtaattaaatatttactaatatctacctggtacaaaaggtggacaactgtcatcatagggagcttttgatttgcttcttgtcttgggtgtggtggttttagccatcatataattggacaggacaattggcaattacttgaaatacagaatacagattcttttttttttttttttttgagacagagtctcgctctgtcacccaggctggagtgcagtggcatgatcttggctcactgcaagctccgcctcccgggttcacgccattctcctacctcagcctccccagcagctgggactacaggcgcacgccaccacgcctggctaatttttttgtatttttagtagagacggggtttcaccgtgttagccaggatggtttcgatctcctgacctcctgatccacctgcctcggcctcctaaagtgctgggattacaggtgggagccaccctgcctggctcagaatacagattcttttggtaaccttagatgatagtaggtgcttatgtaggggaacaagccccctgcactgaagtatgggttttagctaacctagttatagcagattccacatagattgctgaagagtaaa

SEQ ID NO: 85330 - DNA, 1017 bp, Homo sapiens
gtgagccgagatcgcgccactgcactccggcctgggcgaaagagcaagactccgtcttaaaaaaaaaagttagctgtatttgttcaattccaaacaattcagatgcaataccagcagctacttttctacctactgccagatacttagacaaaatgttcagagaatgtggggaggtgttgatctcttgaaaagcacaatcaatttcatgttagactagtaggccattcagctgctctgtgttctattttgtactaaagtgacattaaagaatacttacagatgaataggttttcctgccagtgctgatgatctcaaagatagagctgtgctaggaactctctacattctgattagtaacaattctgtcagagattgtctcagtgttaggtatcagtaagatgttggaacttcagttaggcctttagatcatgtagtccatatatcctttctgtagctacggtagggttttcggacacaggctcgctcccaaaagtcagttattgatgataactgttgaggttttgactgtaatatgcttcctagttgaaatataaatatttgtacaaatgtgtatttagcataccacacaaccagttttgtgaaacaaaagataaactagtaaagaggacaccttttaaaaatagtagtttatgtgtgttagtatatatccatttgccaatatattcatactagtaaaaatagaaaaaaatacatttgttaacaccttttaatagtgagaggtagaaatcttccccaaccaaagggttatttgatttttcttctctacttgtctctaatattaaacaactcttcgtctgttttaaatttagatatataggattattaagattcttttataaataattaccttcctaaattagcattttcacagctacacttttagagttattttttaaaaaacaggtataaaggtagaatatttacaaaaattattacatcatgctttgaacaaatacagatcacatctctgggctattttgacttttaaaaatatcc

SEQ ID NO: 85331 - DNA, 1094 bp, Homo sapiens
ggaggagcgctttagcaccttaggaatagacaaaaagagccctctgtttcctcagttttaggttttcttccacaggtttatgctgccctacatgctgactcatgggttggagagtcaggtagaactttttgtttttaatgtatagaaagtgcagttaaaggacagagtcccaatctaggattttggagacctggattcttgcctggtgcactgctcctatactagtattcactttatccggttctggactatttcccgtctttatgaatgaggacactgtggtatgagtgtcctcatgagtgaatgagtgaagagggatgttcttgcattgaatgcctagattgcatacaattttgaaacggtgattaaaagtatgtatacagctacctataattattcatatgaaactgttaaaactcattatcattttctttatatttgcatgtgggggttaatttttactgcctaagaactttgttgcataactcccaacattattagtaaatgctcatggttaaattgccctgtctcctttaaaggatttctaagtgctgtttgttaaactttctgtgattaaagtaattcttgtgaagtataaggaaagatgataattttcatatctggtatttgtgaagtttggtaatttttagtctcgtaacggtttttctctaccatgagactaaaaattattggtgtttttgacaaaattattgtgtttttttgacatcttttgtcattcttttccagagaattcggtcaacagtggatgaaaaagaacaaaaacaacttcttatggatttggatgtagtaatgcggagtagtgattgcccatacattgttcagttttatggtgcactcttcagagaggtaggaataaactgggttttagctgactaatgaatatctaattgggacaaatgaagatggcaggattcgattctattcttaaatgccatacattagtaataagttaatatctcagtatcttagtgtttaaccatggtaatttacatattaacttctgactctttttgcggtggtgggtaaggggtgaatcacacgtgtgtttgtgtgtgtgtgtgtgtgtgtgtgtg

SEQ ID NO: 85332 - DNA, 1027 bp, Homo sapiens
tctagaaagtggtccttttgtaagagtgcatggcaaacgttgatagaagaaacacattagggacagtggattctattcatgggtagtgtattgttctgggcaagtaattttacttttaacaggcattaatctcctatataatccaaggataggattgattatataattattatataatcgaaggataggagattaatgggtagaaaatctttgatgatacagctgtatttataaataagtaacaacatacagaactgtataattttttaaaaatcattttgatagtattttcatttttgtaaggtactttgtagttcttgttcatctgtgtatcctgtacttttacagttataatcatggtatctacttttattttttattttttcatgactcatgcatctctctcatgaactgtattcattttcaaaaaaattgattttagataatctctttaatgttgttgtattcccttttgtgagatagttcctcggtttctagttttgttttgttttttctttttgtaatttatggaacatttaagttacattcccagtcataggatgattctataaaatggtatcaacacatttatttctgttttattgtcaaattgctttcaaattggtttaaaacaatctataatgcaagaaatgtttgaatgattcagtttaattatagccagcatccagtcatttaacaagtatttattgagtctttgttctggcagaggttacattctagtagggaatatatgagacaaacataataaataagtaaattacactttatattagaggatgatgaaggctttacagaacagagcaggataagggagtgcctgatgggatgacttgcgctttgcatcagttaaagtaggcctcactgagaaggtggcatttgtacggggtcttgaggcatgggatttactttatgtatttttgtctttttcctttttttttttttttttttggctaatttaagaagtttatgtagtctcttaagattactgtcatctattttcattgtt

SEQ ID NO: 85333 - DNA, 1057 bp, Homo sapiens
aatatattaaacccgtgttatcttgaaacttactatttgtaataattataataatagaaaaatgataatagctaatggttattaaatgcttatttgcatcaaactatttgtgacattaaatcttcatagtaactctctgtggtaaatagtgttacctcatttttatgaatgataaatctgaagcatagacagattaaataattaatatgctttgaagtgtgtaagtggtaaataatctaaatccaggcagcctgatcccagaaccctgctcttaaccgctgtataacagggtgaccatgaaattagaaaacagaaaattattttatcatatattgcaatataaagaatatatactgtaaaaaatgatttattccatatttgcctaagtcaagacttggtgatcactttatatatattaagcacacatgtaaaatactttgtatttagtctcttcttgctaattaataaaccagcaaacaagcatagctattcacaacaaatttatgtgttctacatttcttgtacctagcagcttgacgtcagcaaagacgtcaccttacagcaaatagttggcctgttgtttagttctcttttagtttgaggttgtgtctcttttccttcccttcctgaagaaatgtgtaattttctgatcatgatcagtgaccaggcaacaggataaattcccacagtggtgaacagagtttacactagctcttcaaacatcaccttgaaggcttagcatccaatgagggtggatgatgatgaggaactgagagtttagaaaacttttttatttactactggacttagaaattgaaatcgattttgctgcaagttattactcttagttgaaatggaaccaactcagtgatcattgttgtcctgtttttatttttgaacattttagaggccaggcacaatggttcatgcctgtaatcccagcagtttgagaggccgaggcagaaggatcgcttgagcccaggaatttgagatcagcttgggcaacatagtgagaaccctgtccatactaaagatgtaaaaagttagccaggcatgc

SEQ ID NO: 85334 - DNA, 1095 bp, Homo sapiens
ctggactaagtaaatgaatttgtaagcctcttgaaaacaatttaatgcctaaatttcttgtgaaaattttttttgatattcagtttttaagcactggcattcagaaaattgttttcctttctcattttcaatagaagaaaaccattgttttttctgtgttttataaatatgaagatgttaagagaaaaatcaatccccatctatatcttacagattaatgtttgtgaaatgacttttgctgttacatttacacaattatagttattaaagctacatgtttaaaacatgaataattattgtatgtgataaatgaagatgttttacttcttatatatctgaatttaaggacttgaccacttatgttgtctaaggtttttcaatatttttgcttaaagtgaagccttatgtaacttaggaagaagctaattgtatactgaatgatatctatgtcttgcagatatcaaaccttccaatattcttctggacagaagtggaaatattaagctctgtgacttcggcatcagtggacagcttgtggactctattgccaagacaagagatgctggctgtaggccatacatggcagtaagtgttaagtccaggccttcttgcttgatagtcattgcacagagagcctgtgctcttttgtgctggccattagtcatacggttttaccatgaaactgctagaatatttcccttaccctaaggcccaagctcaggtcctagcctctccatgaaactttgctaaattatcccagtcagctcctgttttcattgtcttgctttatttctcttacttggtatttagcagttgtggtcttctctgattattgttttttcattatattgaactcaactcattaaacagatggtaacttctcagaaagttcccaccgtcccttagtgagacaaatgggaagccttgagttcattagcagaattcactatgtattacagagtctgaagctgcatattttgaatattgttagtccttttttttaggggtagatgaagcacaccaacaaatgcaaaggtagaggccttcagtattttgcaacctggagcctcttttcctgcaaagagacagatgtac

SEQ ID NO: 85335 - DNA, 1090 bp, Homo sapiens
agatatcaaactcatcttaccccagtatatttgcatacagtgttcctacagcctggattttgatctgtatttgaatgaaaatgtagtgtctgtatttcagacatttccctaggtgttaatgtctttcttcaatgttgccatggttctttggggaccagcacactactaaatgtgacacataaggttttgtggttgtttcttgaggcctccctgccagcagcatttctttccatctttgtagactgttttaaactaaagataagcttagaattgaataaaattgttctttcttggtttcctccttgatatatatgttttcaaacctagtgctataaataataaaaaagtaagagtcacaggctagatattataggtgttctagattatttatgaatggataggcttagtgctactacaaattcaacttactgcatttttcaatcctcttttggttttgttatatcttcccatatcactttttcttcagatgaacatgtaaaagcggtgtgtgtgtgtgtgtgtgtgtgtgtgtgtagacacctaacctgtgtggtaagaccttttaaacttttggttttgtggatgttgactggctgggcagatttcttgactcagtttggaagatcatttgtttatcgtgataactagggataaatggcacaatagtttcaaaggcaagaaataaaaaaaattagacatggagtatttgggaaatgtgatttacatatttattaaggataccccgagaatgaactgaaattgttatttacagttttagggcttgtctcgatactaacagtgactaaatgtttttgttgtgtgacactgactaagaattatatttgattgaagcaggctttgaaaatgcaattgcagcccagataaagtagaatattttgaattcagctttctaagaaagactcagactttctttaaaacagactttcgtcattcttgtgcagagatatgctttgcaggcccaggagatgtaagacttctgttttcttgctgaccttcatctgtggaacacaaaggctgataaactcttggcctctaatctttactggaccagatgaaattcttctgtcca

SEQ ID NO: 85336 - DNA, 1227 bp, Homo sapiens
aaacctattggaggtatatcattttatttgagatttatagttgtctttagtctacaggacttaggattactcattagattgtgcaacataaaaaagtaaataaaatgtagagtttacacataaattttcctgtaaaccgatttcttgtaaacattttcccaactccataccctcatgtaggtacacagtcttatgttgcttaaccgtgggaatatgttctgagaagtgtgttgttaggcaattttgttgtgcaaaatcataagtgtacttacacaaacctagatggtatagcctactacacacataggctatatggtacagcctgttgcttctagactacaagcctatacagcatgttactgtactaaatactgtaggtaattatatcacaacagcaactatttgtgtgtctaaatatagaaaaggtacggtcaaaatatggtataaaggaggtagaggtgacgggccggagaaagatggaagactaccaggctgcggaggagactgcttttgttgttgatgaagtgagcaaattgtaaaagaggctatagaaagcacaattggtggttaacgcttattaacacagcaaagtgaaccagtggaacacaaatgtagtagaacaaacttcaagccaactcaccaagctgggaaaaccacttaaatacattgtgacctgtgtaattatgcaaaagaatggagctggattacacatggcaagttcctgcttctgggacagctctgctgacaggagctgcactgtgcgatgggagaataaaaccatgtactgcatcgtcggcacctttggactgtgtattggacctcctagtccagcctgtgaccttcctccggtagttcatcttctaacaccagctatgaattgagtgaactcttttctcgttctttttaagtctgttttgtggcactctaaaaatgcagagaaaaaaaccaaatgaccgcactgttacatgaactgtgcactgaagtcagatgagtatccctgtaggtcgcctgcagcctgcattgccacttgtaactctgaatatttcttttcaaaggtgctaaaatctgaaatctgctggtgtgaaacttgctatactgtctgaaatgattcaaatacactaattttccatactttatacttttgttagaataaattattcaaatctaaaaaaatatggtataaaaaataaagaatggttcactggtataaggcactaatcatgaatg

SEQ ID NO: 85337 - DNA, 1085 bp, Homo sapiens
tttgtatcttttctttttctgtgggtcagtctagccaaaggtgtgtccattttattgatcttttcaaagtactgttggttttcttgacttttctctattgtttttctattcctgttttacttgtcttcacgttactttttcttacgttcttcctcctgcttgctttgtatttcatttgttcttttttttctaattctttaagctataaagtaggtttgatttgagatgtcttctcttctaatgtatgcattttacactatacattttcttctgagcactacttctatatcccacaaattttgggaagttgtaatttcattttcatttagttcaattttttaactatttcttgagacttttttgatccatttgtcatttagaggtgtgttgttaaatcttcagatatttgaggactttgcagatatcttcctgttactgatttctaatttatttattttgtgatctgagaacatgctttgcatgctttccatcttttaaaacaaggtgtgttttatgccccagaatgtggtcaggattaatcaatgttccatgctagtttggggaaaatgttgatcttgatgatgttggatggagtattttttctcttggttgaatatctgggattttaatgtgtaccttatcaggcaaatacttatatttacaacaaaaaaaaacaaagtaaatagcttacagtgaattttatgcagcacagtactcatgctcaaagcaatatacagatgtctttagttgatgctcacaggcagagaatgtaatacagtcaactattatgcttctctgggcatttctttcaacagcagttactctcagacttagcgaaggatccattgtcaactctgtgccaacaggaccctctctctctcttcccttttcctgacacatcatttagatggtccctaatttcaaggaaatgtaaagatgttctttcacagaaattactaaaaatgatttctgcggtacataggataatatattactgtcttggcagtgctttaatttggctacaaatgactaacagacaaatatctttacacatatgtgtagtgataaatttagcgttattgtga

SEQ ID NO: 85338 - DNA, 1093 bp, Homo sapiens
cattcccctgcctcagcctcctgaatagctgggactacaggcgcctgccaccacgcccggctaattttttgtatttttagtagagatggggtttcaccgtgttagacaggatggtgtccatctcctgacctcctgatccacccgcctcggcatcccaaagtggtgggattacaggcgtgagccactgtgcccggcctaattggtaggttttcattatttttcagaacagaaagggagatagatgagaatacgattcactggttattagagaatattttttttttggacccttgataggattgggacatacgtaagactcttcagatctcttctggtgtggcttagaggtactgtcctgagccctttattggggcttcaggatgcagggtttgaccctgacttgatttcttcactacttgtaaaatctggttgtggttgaaattgtagtatctgcagaatagctgtagagcaggatttgcacattgtttcctccaagctcagattaggcttttgtttgttggatgttcttttgccttaaaaaggagtctaaccacgattatggaccaaggccttcctctaagatggctacaaattgtgcgtattctatagtaaaatagttctaaaaccagtcttccagactttcttataaagaagtcagaaccacaggctgccctggagcatgcattgtagggacattgtctaggcttaagttttgtgttcccatgtattccaagtccttgaatttggttgattcagaattctctatattattttgatttctaaatataacttctacttagcctttatgattctgaagattcctccccaagctaacctgtgtttaattcaaggctttactagagttttgcttgtagtttagatttttttgtggcccttccagtggggagtagtaaatgatgcctggtgtattttgctctttcctctttgttctctttagtatgagttggccacaggccgatttccttatccaaagtggaatagtgtatttgatcaactaacacaagtcgtgaaaggagatcctccgcagctgagtaattctgaggaaagggaattctccccgagtttcatcaac

SEQ ID NO: 85339 - DNA, 1228 bp, Homo sapiens
aatttttaactaatcatcctacactgactatcctagagataaatcttcagattatagactcacaattttttgtatgtgcttttactgtgtttagcaggctgtctgcgttgttactttggatctgaaggaaagaactatttcattatttgtaatatttcatctgtgaaaagaaaaatacttaggcaaatgaatctacattttaataatgttatttttatgttattttagccttacgaaggatgaatccaaaaggccaaagtataaagagcttctggtgagtgtgggactgtggggattgtaggtacatcctaaccccggaactctcttaacatgctggttcactaagcaagcagtgggcctctctgtcataaacaaacatctcaaatttattgagtgttttttgttaatgtttttacacaaagatttggaaagagaaaatttgcagttataatttttctactaatactagctaaattctcatggaaaattttggtcttaacatgttataaaaattacccccaaagaattctgactttaagaagccattttccactgcatagtctatttatatgggatgcagccataagaaaaaaattagtgaaaatttgtgtttattctgcctttataaaattcatgcaaatttacgtcatatagcctattcccatttctttgaaagttctcattcatcccatggaacttgggtgttttaagcagtctactgggtatggcattggtggggcagggagaaagtgttgtgatctaataatgtgggaatattttaagaaaagatccatttgtttgtcacatttaactactagctcttcaaggatgttgtgacaaacttatatcacagtccaccaatgactgtaaaaatatctagtcaacatacttagtctgtaaaagaaaactgttgctagagatggagttttaaaaggtgggttagtgaagcagatactgggaccctggctctggagagtacagggaagaagctcctggggcaaatttctcttgggcctcttttggtcaaaagaattacagcctttttgttaaaaggtcaaaagaagaggtcaaaaggattgcgacctttttgtaaaaaggtcctcctgttgtatataggagaaatggaggttgagatttatattggtgtcccaagaggaatagtgactggcatttgcgtcattcttcttagctcttagatggtgtggtggaggctccagctatgttttgt

SEQ ID NO: 85340 - DNA, 1164 bp, Homo sapiens
cagacctcactgccaaggtggcaccttcagatcattaccacgtatcctctctctaggcatgcccatgcccattagcatatctgcatggaataaaggctgtactcgcctctctgaacttgtagtgttgcggtatttcatagctatgtgtggttgggagcctggagttctatgttctatagaaattggaaaatgttcagtttgggctgtcatacaaacttttgacttttttgttttcaattttcttgcagaaacatccctttattttgatgtatgaagaacgtgccgttgaggtcgcatgctatgtttgtaaaatcctggatcaaatgccagctactcccagctctcccatgtatgtcgattgatatcgctgctacatcagactctagaaaaaagggctgagaggaagcaagacgtaaagaattttcatcccgtatcacagtgtttttattgctcgcccagacaccatgtgcaataagattggtgttcgtttccatcatgtctgtatactcctgtcacctagaacgtgcatccttgtaatacctgattgatcacacagtgttagtgctggtcagagagacctcatcctgctcttttgtgatgaacatattcatgaaatgtggaagtcagtacgatcaagttgttgactgtgattagatcacatcttaaattcatttctagactcaaaacctggagatgcagctactggaatggtgttttgtcagacttccaaatcctggaaggacacagtgatgaatgtactatgtctgaacatagaaactcgggcttgagtgagaagagcttgcacagccaacgagacacattgccttctggagctgggagacaaaggaggaatttactttcttcaccaagtgcaatagattactgatgtgatattctgttgctttacagttacagttgatgtttggggatcgatgtgctcagccaaatttcctgtttgaaatatcatgttaaattagaatgaatttatctttaccaaaaaccatgttgcgttcaaagaggtgaacattaaaatatagagacaggacagaatgtgttcttttctcctttaccagtcctatttttcaatgggaagactcaggagtctgccacttgtcaaagaaggtgctgatcctaagaatttttcattctcagaattcggtgtgc

SEQ ID NO: 85341 - DNA, 1049 bp, Homo sapiens
tgtcaaacaataaagggagaatggtgctgtttaaagtcacatccctgtaaattgcagaattcaaaagtgattatctctttgatctacttgcctcatttccctatcttctcccccacggtatcctaaactttagacttcccactgttctgaaaggagacattgctctatgtctgccttcgaccacagcaagccatcatcctccattgctcccggggactcaagaggaatctgtttctctgctgtcaacttcccatctggctcagcatagggtcactttgccattatgcaaatggagataaaagcaattctgactgtccaggagctaatctgaccgttctattgtgtggatgaccacataagaaggcaattttagtgtattaatcatagattattataaactataaacttaagggcaaggagtttattacaatgtatctttattaaaacaaaagggtgtatagtgttcacaaactgtgaaaatagtgtaagaactgtacattgtgagctctggttatttttctcttgtaccatagaaaaatgtataaaaattatcaaaaagctaatgtgcagggatattgccttatttgtctgtaaaaaatggagctcagtaacataactgcttcttggagctttggaatattttatcctgtattcttgtttgaattcctcctctatttaagatatatacatggaatcgaagtgtttatgtaatagttctatccttttgcctgcaggtcagttgtaataaatctaggatgtgatgatgactttgtaatttgattttctgaaatcagaccctgagaggggaaaatcttaaagtaaattacattaaattatctgtgcatttcacaccagggaaaatgacctccttttggaagtgttttatggctgctttctttttcttcttccttcccatggctaccctttttgcttatccttcttgaaaccacagatgtatctgttaagcatagctttgcttgaacaggtgtcacagtctcttgagtttctttgtttgttgtcctgacctgccccagcattcttaatgctaa

SEQ ID NO: 85342 - DNA, 1041 bp, Homo sapiens
ggtggcttcttatgcttccagggactccagatggtttccaagtaacaatgtctaaaattgacttggattcatttttccttcccaaacacatgtgctttaacatgagggggaatttatgaatagcagagtcagattagcccagatttctggcatggtattgccacagatatagcctcacgtggactgccttttgatgtgttggatgccgagatagtgtttcctggtattcgttgtttagcagatgacagtcaagccgacccgtctttaatgtcttggcttcttcgtcaccctgcaggcgggcattggccatcacctcagaccagccaagtgaccaggaggcccctgacactagacttgggttgctggtttctcttggtcttggggtttcagtgccgtgctagaatctaaatgttcagaacatgtttatgcctcctccctggccttcctgaaacacaattcttctttttttcaggacctgtttttaaatgggggagatttttgcgccatggcatcatatcttatttttcagcctcatccatggggggaatgcaaaatggtgaggggaggttggatttcagaaaaagtggtcttaggtattgagagcacgttcttggaagtccaagcagctggttaccaagaggttctttcctcttctttgttggggctctggtggatgttggcctatggatgaattctgcctttctccgttggtagccattgtgttgtgcactgggccaggtgagggccagcctgtatcgcttttgatgaaatccagagcaagccttttaaagcaaaaaccagttcatgttaccttgctgctgaaaagcttccagcgacatctgattgtgcttagcatctcatatcttgccagggttctacaggaccatccttggttggccttttttcttaactctttttctccccattctcatctcttcacattcatggagctctagccgtgtggcctttcttgccccaaacacactgagctcatatccaccttgaggatttcgtttttactgttttcccattttttttgtt

SEQ ID NO: 85343 - DNA, 1045 bp, Homo sapiens
gaaagtttttgagtatatcattgtatttctattgtcattcctaatttacaattctgtttttccctttgacaagttttgccccagaggaagtctctccctaccccggtcagtaattagatttaagctattttcatttggatttctttctcattagcttttgatcagcacatatgttttctagtaaattctgcttttctcagatcctttcctcctgatttccctgagtttactttgttcttttcctggtctttagtcttccatgttgtgttaggataggttaagctctgctgtgataacacatgagctctggaatttcaggggcttaacatagcaaaagcttcctttaagctcatgtgaatgtgatgtgagtcaggaggactcccatggacagctctcctccgtgtgtgattctggaacctagtctatccatcttcccctccacctcaaaatctcagtatgtggttttcagtcagtgctaaaggtaaaagagaaaatagaagtggtatactggctcttagatgcctgggcctggaattcacaaacgtcacttatgttcacttttcatgggccagtactagttccctggatatgactggagacagggagcctccacccctgttgaatctccagcagtcttctttctctccgcttccactgctcatgactgtcttttgaatctacagtcttctctgccccgccctaccctccgacgttcaggtatgctcactgcaaactctgcctcccgggttcaagtgattcttctgcctcagcctcctgagtagctgagattacaggcagctgccaccacaccaggctaatttttgtatttttagtaaagacagagttcaccatgttggccaggctggtctggaactcctgacctcaggagatccatctgccttggcctcccaaagtgctaggattacaggtgtgagccaccatgcccggccagagaaaattaattttttgttttgagccctttctacaatagggagaggaataatgaagagaacagaaactatcctactgtactggaatggcacct

SEQ ID NO: 85344 - DNA, 1190 bp, Homo sapiens
acactgttgcctttgcagatgtgtgtgcacactggcttggttttcctagatgctgtttaagtgtgtcctctgacggacacttgtgcagtaacggcacagaccttcctgttttatcctcccaacaactcttaagagtaggttctggtgtctcccccattttctacacaagtctcagagcaggtgagtgccttgttgctgctggttgcatagctggtgagggaagtggtttgagatttgcttccagaaatgctggctctgacattgatatttttcatcactgtactttaatgactctgcagtagggaaagaagcataaacaatgaaatgtctaatattaatggaatgattaagtaaattctggtacatttgcacaattgtaactattagtgtttttatgacattcaaaaaatgtctaagggccgagagacatgtttatgatagggaacaggatatatgagtgcatacagggttaagattgtacagtattttaaaaaatgcatagaaaagtctggaaggaaatcaggaaagactagaagattaagcataaaatgttatctctgggcaggattatgagtgatttgatttctgctgcttatgcttttttttaacttccaaatttcttaaaataaacgtgtattttattgaagagagagagaaaaaaaaagcttccagggctcaaagtagacaactgtagtcagaatttcttagaatggtattttattttaactttggggccctaaaaagtctaagtacaaatatgtttccagttgccttgactcctggttttaaatgtgagaaatctcttatctttaatgttctggaagggacgtgatgtcagatctcattttctaggataaactagtctgccattggaaaatgatatgctaatagccttttaggccattgctactaattttaaagacataacattttgagacttggtctgtatgacacatagctgaaatttgctggttcccccataatcagttagggttctctggatgcagcagcagaaatagactctagctaattttagcaaaaaaggagttttgggaagggtggggatggttgaaaaatcaaagggaagagctggacagtgcggcctgggagtgaccacagagtgtccctgctgcagggcaaaggacagtgtcgtcagaggccactggcaaaggagttgcttcaaaattctt

SEQ ID NO: 85345 - DNA, 1037 bp, Homo sapiens
ttagtagagacaggatttcactgtgttggccaggctggtctcgaactcctgacctcaggtgatccacccgcctcggcctcccaaagtgctgggattacaagcgtgagctaccgcgcccagccaatttttgtatttttactagagatggggtttcactgtgttggccagactggtcttgaactcttgacctcaagcgatctgcctgcctctgcctccctaaatgctggaattgcaggcgtgagccaccatgcctagccccagagaagtccatttttatctcttacctatccagttggctcctatgaatccatccctgaattatattttatctgtttctcctttttaatttatttaaacttgatttaagagacagtgtcttactctgttgcccaggctggagtgcagtggcgtgggtcgtagctcactgtatgctcaacttcctgggctcaaatgatccacccatctaggcctcttgctttttaaatttctgtatcttaattatagtctgcttctctagcctcgacttttgcagggactcctttctttgtattcttgcccttagcctcttcttcctctgacttcccgcaacacagcccagaccatatttttgaatacatggactgaagaatgtaattttcctttttttcaagttttgttctgtggggaaaaaaatcctagcactgttggaaatactgcatactataaatttatcttagaaatttacaatctatatttgtatttacggctctaagaagttctgcagttaagaaaactcgtgatcatttgtatctcttggattgctttcggttataataacagatgtcataattcagagtggcttaaacaataagggaacttttattccaggatgatagggcatccaaaggtaggaggagtccaggtgtcttgtgattaagtcacttgctgtctttctctccatttttcttcgctttgccttcatctgtgtcttggcttgtttccctgtcaaaatacaggtgtttgcagcaattagggtgatttgcctccacgttcacaaa

SEQ ID NO: 85346 - DNA, 1177 bp, Homo sapiens
ggaaaatgatagatttttaaactattatgaaattagagcccccatgactccattttacaggagagtataccagtcaggagaagataagaaattggctccaaatcaaagcaagtaagtggcagactagaacctagtggaatccaggaactgcccaggtcccaaattggccgttgggtggtatgtacataggtcagataccaacaacatgacaagaattgaaaactctctttcctctccttttattgcttgagaagcttcatgggggaggtggaacttgaaagtgagccgttaagaatagttcagagttaaataaggagatgagcaggcagtctgtaggaagagaaccaagtacagagagttgggaatagatgttgtgtttcacagtcactggacagatggaactatttagaaggaagtgggtattgtggaggttggtggaaggtcaaatgctggggagactgggcttttagtggggctgtggaagctgagcacagtagttgagatatggtctgtgaggcagtgggagttactgaacgcagttgaaaggggaagtgagattataggcatggttgatttggaacagtaccttagttgcagtatgcagggtggattgaaaaaggggagcctgccatgaaggaagccaacaaagaaaatgtcaagtagaaggcagatctgtttgagcctcttggtttttaggcatatttgggtggtgagaaatggttttctctgctcctcagcactcttcttttattcatcttgaagctataaacttgagcaaagaaggtgaccttctccagttgagaaggtataaaactaaccatacacacccctgctaaaactgccacacaagcttttaggacaaaatcagtggacacttaaattaatttgagtggaatatgatgaggaattatattagggtagggaaagtcataaatcttaaatatgataaaaaggatgaaaattggaaaggagctttaagctgtcattattttcagatatgattgtttatgtaaactaaaaaattactgcaaatgaataattagaattattaagagtttagcaagcttgctcaattcaaaagaaaggtggggtgtatttattaatatatcagatacagtggacttcaaggaaaattacagagataaaggaagacattacatactgataaaagagtcag

SEQ ID NO: 85347 - DNA, 1512 bp, Homo sapiens
tgtatgcatctgagaatagaggctcaaaatacatgaagaaaaaagtgatagaaccaaaaggacaagtagacaaatccacagttataggtgaggactttgacactcctgtcttagttattgatagaattagttcacagaaaattagcaaggacatagaagaactgaacaacactgtaaaccaactggatctaattggcatttatagaatacttcactcaacaataagatatacagaggatacatattcttttctagtgctcgtgaaacattcaccaaggttgactatatcctcatccataaagtaaatttttaactgattttaaaatgtgaaaccatacagagtatgttctctgaccataatggagttcaactagaaatctgtaacagaaagataactaggaaaccccaaatgtctggtaatatagttaagtaaataatccataggtgaaaagaggaaatttcatgggaaattaaaaagtatttagaactgaatgaaaatgaaaacacaacatatcaaaatttgtggggtgcatctaatgattggagggaatgtaatagcattaaatgcttaattagaaaagaggaatggataccccatttaccctgtgattattatgcattgcacgcctgtgtcaataaacctcatgtagcacataagtatatatacctactatatacccacaaaaattaagaagtaaaagaagaatggtctcaaatcagtaatataaggttctaccttaagaaaatagaaaaggaggaacaaaataaaccccaaatcaggcagaatgaaagaagtaataaagagatgagtagaaatcactgaaatagaaaacagaaaaaaattagaataaatgaaaacaaaagctgatgttttgaaaagatcgataaagttgatctggccagaccgactaaggaaaaatgtaagtgaaaacacaaattactaatatcaggaataaacaacgggatatcactgcagacctggaaagttgtttaaaggattaaaaagtatcacacaccattttgcacataaattggacaatttgagtaaaatataccaactccttgaaaaccgcaaattactgaaattcaccaaagaagaaataatgtatcttgaaaagtggagataattggaatacttttattactataaatagagttctttttgaaaacaaaactctgggaccaggtattttcactgacagttgtaccaaacatttgagggaataacacagtctctttcagaaaacagaaggagagagaacacttcatatctattttgtgaggtctttattacactgatagtaaaatcaaagatattacagaaaaagagaattatagacgaacagtcctcatgaacacagatgtaaaaaatcttcacaaatcaaatgcagcaatatgtaaaaaatataaaacattatgaccaagtgaggtttatttaccccagtaatgtatggttgggccaacattcacaaatcactgtaatttctcattttaaatgactcaactggtaca

SEQ ID NO: 85348 - DNA, 1091 bp, Homo sapiens
agtctcggaagaacaacctttgtttctttcacttgttcgggcaggcagaggctttgaagaccatatctaaaaccctgaagaatggatagatgtctcctggctttttggaagagaaagaagttataaaggttttaactgtagttaactgccctaatctttatgcttttccaaatatgcccattagattttagtttggcatatgggaagatatttggcactgatgacaatctcactgatttggcgaatttatcatctatttgaacaaacagctaagtcagaagaggtgacattatagactagcagaaggcactggccaaatctgactgaaatcaaaacaggacagttgtgcaactcagcaaggattaaagacaaaaacaaaaacgtgggcatggggatgagtaagggatgtgttgtcttcaggtgtttccatttacctggttatcaattgatagaaaacaatgttatcagtaaaactgaagttttgagattagattattgtggtttttgtttataacctgggtcagaaggttattcacaaaataaaaaagttctaaatgtgccttgggccttggaatttgcatggcttcatatatgcagctctttcagctgtgatatccttaaggcaaacaagagtcattttattatacattgcacaatgttagaaaaccagtcttgttactgtatgagttacagaagttggacagacagcataggtggggcagatagctttccctggcctaccgtgagctagagagccattgcagtgcctgagcattaatctcaaactttgatcctaaaacaccaactagagaaaatagaaaagcaaaaaatcaaaacagagcattatgtttctttcttccaaaaggaagcagagcgttatgttcctttccttttggatgttttccaaacaatgtgaatcacggtttttaaaatctttactttcacaatgttgcttattaaaaaaacaacatctcagctttgtattatagatcaaccgacttcctatagggaaaggtaagtagtctagttattgctttgattttgattggcatctcctaggattattctgacactaccattagaagatttat

SEQ ID NO: 85349 - DNA, 1025 bp, Homo sapiens
ctgaagaacttggagtctgatgttcgagggcaggaagcctccagcacgggagaaggatggaggccagaagactcagcaaatatcactcaatattaaccatcacagtacttcacttaggaagtattttgaggcatcatctacatttatagcatattagacactgaaggaccgaaacgtgtcatgaaatgcccacgtcccagagcccctgatctacagaaggaggtggggacaaaacatgtactgctagagtagagtggagaaaacaaaaaatagaatgaatgaacatcgagaaggcagaggtgaatcgtttgcaagaaaggtttggcagtcacagaggacagaaaggtaaatgtgaggacagcaagaatgagggagctggaggcactggggcaggagcgaggcgtcctatcagaaactgtttttatcactgactgttcagtccttcatgtcagctagatgttctcaactacccaaatccactgtagataaaattcttcaagacatgacagagttaactcgcattttctctgttatcagggcggcttttgttacatggttgcaaacctgttctacacacctgctttgccaccttcacttcctgacaatttctgatttccacttcagcttctggagcattctgtctcctgcccttccttttcccttcttcctagtggactcttcatttacctctgcctggcttctaatctgcctcttgtcccaattccccatttccatgtgttctggccccagctcattctgttcccgcagacctgatttctcaccttatttcctgttgattccttctcagctgtagcaggcatgcctcagtctccccaaggcaggctgccttgtggcttggcagaacaaaaggcaggtggggaggaggctggatttagaaacaagtgccgtgtctcctggtggtgatgagtagccttgcaagagcccttcccagatgacctcagtccagatggagatggcacaggagggtgcaggaagaaaactgcagtttcaaacagcttctgtag

SEQ ID NO: 85350 - DNA, 1056 bp, Homo sapiens
cggaggttgcggtgagccgagatcatgccattgtactccagcctgggcaacaagagcaaaactctgtctcaaaaaaaaaaaaaaaaaaaaaaaagaagcagtgtctctatgtccacacatgtctgtatatgtatatagatatatatagaaaggacaggaaggggaggctttaggattactttaggtgttcagcagtagaagaccaccttgcacactgggtgggtaaaagaaatctgctcagcattgttctttcatatttcacctcgagctttataaaccctgccagaggaagatctctggggccaggagttcaagaccaacctgggcaacatagtgagacccccatctctaaagataataaataaataaacaaacaaacaaataaaccctacaatggacctttgcaaagagaaattagtcctttgttgtgtaagttgcaaatattttcttccagtctattgtttgtcatttattataataccatttatcttgtagcaatgtaagaaaattgtgtcaggaagtctttctttttttcattacaatttctaaatttggagtcctgcttgggaaggcctttctcaccataagattctacattatcttcattttcttcccctgatgtttttttcagcattttatttttttttacaactaatttaattcatttcctatttatttttctgggtgggtggtcagagtaatggaacatatccaaatggatatccaattgccccaaaactatttattgaataaccaatggacccagttatatttattcccaattcccatacttctttggactgtttattaaaatttgtctaaaattgagtgtctgtctacagaagtccaattaagtgagcgattaatgttgaagatttgagaaacacttgtgtgatgaagtgtctagcagagctctggcactaaatggaagatgttattgtaacacagaaacaaaaataacagagacagtgtggatataaggctttgaaatgcgttgggcagggtgtctggataaaaaagtcatgcttgtggtcgagctccaggtaaggccctgga

SEQ ID NO: 85351 - DNA, 1601 bp, Homo sapiens
gggaccttggctgggtcccttgggattcctgagcagatgggctttcaacctgaagctgctgtcagccaccttggatctgtgaggggagagtctgccaaagaatggagtcaaccttaagaaaaacagacctgagagacacggggagcaagaccatgtctcagtgttgtccttagggccactaaggccaactctacccttgcacgttttagtcattgagtcaatcaattgactgccaccatcattacatgtgtcctcctcctgagttggtaacgcaggcacaacataaatgaattcctccttcattgtcctttggagcatagggggcagccttttatcaaaaacatctgcattgatgacccacagacagagtgtcatggtggcacattgttccagtactggaaattctgcttctttctttcccagggatcataatctttcaggttcttaccaggtctttcatctgtgaaatgatggggttggatgtacagagtgttcttggtatctacatatgaatgttcattatacttgcacgggatggctgagctggtagaatcctttttaagatgattggggccaggtgcagtggctcaggcctataatcccagtactttgggaggctgaggtggcaggatcacttgaagccaggagttcgagaccagcctggacaacatagtgagatcctgtctctataaaaatacagtttaaaaaaatgagctgggagtggtggtatacacctgtagttccagctactcagaaggctgaggtgggagattgaggctgcagtgagccatgattgtgccactgcactccagcctgggccacagagtgagaccctgtctattaaaaaaataaaataaaaaaaaaggccgagcacaatgtctcatggctataatcccagcactttgggaggctgaggcaggagggtcgcttgggcccaggagtttgagaccagcctgggcaacaaagtgagacctcgtctctgtgaaaataaataaataaataaaattaaaataattttaaaaaattaaaaaaatttttttaaaggttattgcacctaatttccttacttaacagatgagggaactgagacctggagaagctaagcatcttcactggagaatagactgcttggaaacagcccaacgagaaataagaacttctgattgctaatcctattatataccacatttctaaaattccttgacctagtttagtgaattcatgtaagtttgtttttccctacaatgtgtaaaaaatctaatgtcattcactgagataactcaagatatttgagtctcaatctgagaactgacataatatttagcatgccatcttttgctaagtgtatttttataaaataaaattattgtgccaatttcctcccattttacctctcacaagtggatagttctagaatctttttaaacccatttctaagatcaaggagagacctggagacaatactaaattcttgagcaatatgaaaattctgcatccaagtattaatcctaaaggattctagggagaagctggtctgagtccatgtccctgatttcttctggggaatagcacaggggacaaataaaatggtggctattctt

SEQ ID NO: 85352 - DNA, 1050 bp, Homo sapiens
gaatataggatttggattagagatttaaaaataatgtctagatattttggaacgagcaagaaaattcccattttaggacgaaggaaaaggtaacatttggagagaatctaaaacatatactgtgttttcataactcctcttacaaatgtagtcatttggttaacattagcaatattaagataagctatctataacttggtttgttcataaatttataacatgtggtatacaaaatattccaatcttcactattttgtcatttttaaattttttttttatttttacaactggaaaaatacatacaacataataaaatttaccatcttaaccattttcaggtatacagttcagtggtgttaagtgtgtttacattgttgtgcagccattgccaccgcccatctccacaactctttccgtctttgaagctaaaactgtgtccatgaaacagtaactccccactccccttctctcatcccctggcaaccacttttgaaaatacattttacaatgtatgtaatgttcattgtagaagaattaaaaaatttaaaacaataagaacagagaactaataacactttgacttataccttaatgtattttttctctgcatatacatatatgtaactttttttttttactatgcatactgttttatagcctgccctttcacacttaatatatcttcaatagctttacatgtcaaataaatgccatcctttttaatattgaaagtcaatttatttaaataacccccattatatttttccagtctgtgaagggttggggacaaaagatgaagtacaaacatagacctttatagagcaatgctctgattacttttttttccatcctcaattatttcttgtcaacaaataccgtcttttttttttttttttttgagatagagtcttgctctgtcactcaggctggagtgcagtggcgtgatctcagctcactgcaacctccaactcccaggctccagagatcctcccacctcagcctcccaagtagctgagactacaagtgtgcacctccacacccagctaattt

SEQ ID NO: 85353 - DNA, 1012 bp, Homo sapiens
ccttaagtgcagccttgctgctttgttcagtgacttcttggatggcatcagagaagtcctccttgcttgactctagtccacataaatgtctttttggatgaggccagaactcccaggtagcatgttaaggaagatattgcaagagtcaagaggtgctgtagtgattatcagctccacatttcctaaagtgtattcacctggtgttcatccacacctcagttatgaattagccgttacatgaaatatgttttcatatttttagagattgggaaatgacaggtgaactaaaattaagccattttatgtattgcagaccttttcagagcctttaatatggtagtgggattctgttaatggaaattattgtattcagtgtttctctaactcgtttgttcacagaacctttttttttttcagagcgtcttatgaatctattttttcatggaacaaattttgggaaacgctgccatgacctaacaagctgatgtataacactggtggcaatcaagatttttgtgggtggtgttgattgttctcctgaaactcataagtggaacagtgcacaatttcaagatcagtttgcccaggctctgttttgcttttagtctctcgtatacagaaagtttaaaaagatatgacttgtacccagatgtcatctacacagcgcctgtcatcctgtggaatgactcatcccttgaaaatggtggatagtgctttttaccttgatgatgaataatgatccttgtttcatttacaaagatgagacctaaaataccagccttcctaaaaatactatcacctgttaggccgctgcgtttccttgaaggttagcttccataggtcaggccttcactaatgctctgctgaagtgcttcaggaatagtgaaggagggaagtctcagaggagtggagattgggctaagtgacctctgttgctccttccaactcaacagtcatgagtcttttccccagtcagtaaaacctgttctagaattttcttaaatccttttga

SEQ ID NO: 85354 - DNA, 1037 bp, Homo sapiens
tggcccttctggaagtaaagagggatgtggttgagccctggtttttttttggcagggcgggagttgggggcaaggtgagggcaggaaagtggccaggcctgcatgagcagagaagcacaggacctgtgagatggtctggcttgatggagagcctggctggtgtccagcaaagatggagcagagtttagctcaggaaagggcatcaataatttcatctgatgttggtcaaagggtacaaagtctcccttaagcaagatgagtaaattctggagacctgatgtgtagcactgtgtgacgatggttaatgatactgtattgtagacttgaaatttgctaagaggatagatcttcagcgtactcaccatcaaaaaaagaaaatagaaactatgggatgtgatggatatgttaattagcctgagtgtagtaatgatttcacaatgtgtgcatatgaaaccattaaaccgtacacctgaaatatatacaattcctattagttagacctcagtaacacaaaagggaaaaaaggatttcatctgaaaataaggattgcgagaccgctagtaaacttgttgggtgacttccaatagttctttaagaatagttcttcttttttttttttttttgagacggagtctcgctctgtcacacaggctggagtggagtggtgtgatctcggctcactgcaacctttgcctcctgggttcaagtgattcttctgcctcagactcccgagtaactggaattacaggcgcatgccaccacatctggttaatttttgtatttttagtagagtcggagtttcgccatattggccaggctggtctcgaactcctgacctcaggtgatccacctgccttggcctcccaaagtgctgggattagaggcatgagccaccgcgcctggccaggaatggttcctaaagaatttatcttgagcttcagtttaattgtatcttttatgttgtgtaaccacaggtggaaatcccaaatattcaaaagcagaggaaacacttagccaagttggtgctggacatggat

SEQ ID NO: 85355 - DNA, 1083 bp, Homo sapiens
ctcagatcaaagcacaacagggtaagtgcaggccttccctggagaagggagggccggggtgcctgcttgccttcccggatgagatgaattccttgtatgtcgttggccctaacactctgcccaacagcatcacctgtagatgagccttttggacttacttccaaactggtgccttgagtcgggggtgcgtaggggtgcccatagaacattaaccccagtggccctggacgcaattggctggccatcccccaccccctcctccagtcctcctgtcatccttaaaaccacagaatggaggctcaattgggcctccctctctttggtaatcttaggagaatctggacaacaaaggaaagcgagattccagcatgagtgaacttggcgaacagctgactgactctttctcactcctcccctcagaggcctgggtagagaagccttccttcgggaagccgctggaggagcacctcaccatcagcggccgggagatcgccttccccatcgaggcgtgtgtgaccatgctgcttgagtgtgggatgcaggaggaggtaggtctgagcacagccacacgccgccccgggcaggtctcctcttccacgagacagagcttacaggatcctctctcctgtaccatctccactccggcccccacgaatccaaatggcttaagacagtggctcagacccatcttctgcagaacacaaattgatcctgccttttaccgtgagccttcatttgacaagaagagagaattgtgatggccatgaggaacggatggccatattctagtcattctttcccctggtttaacatgtttggataatttgggcattctgctattttttttttttcttttgagacagagtcttgctgtggcacaaggctggagtgcagtggcgcgatcttggttcactgcaacctctgcctcctgggttcaagtgattctcctgcctcagcctcccaagtagctgggactacaggcgtgtgccaccacgcccagctaattttttttttttttttttagtagcaatggggtttcaccatgttggccaggatggtctcgatcccttgaccttgtgatcc

SEQ ID NO: 85356 - DNA, 1011 bp, Homo sapiens
cactgcaacctccgcctcctgggttcaagcgattctcctgcctcagcctcagagtagctgagtttacaggcatgtgccaccatgcctggctaatttttgtatttttagtagagacgaggtttcaatatgttggccaggctagtcttgaactcctgacctcaagtgatctgcccacctccgcctcccaaagtgctgggattacaggcatgagccactgcacctgacccaagaagttcttgataagtgttgttttattgctgtgtaaatcatttcctgggagatagagctcatctttggtttcttccatagactattttaatatctttactccgtcttcctttgatctgattagccaatcagtatttatttagggcatgcggtacgtgttttattgagcaaagtatgaaatagtgagataggagacttataaacttattgccggagatgaatctagcatctctcagttaagcctaattcatccagaacagtctgtaagtctctaagggagcactaagttatatgggacaaagtaagggctatggatgagaaggaagccagtgagcatgcgggtgtatgtggcatgcttcctgtaggccagcctgttctagatgctggaaattcgaaaaggaatgggaataaatgtgtatttttaacacattttatatgccaggcatttgcatgtttgttatcaaattttttagcttagcttagcttagcttatgagacagggtcttgctctgttgcccaggctggagtgcagtggtgcgatcttggctcactgcaacctctgccttccaggttcaagcgattctcctacttcagcctcccaagtaactgggattacaggctcccagagcctgtaatggaatttcagcatgctggccaggctggtcttgaactcctgacctcaggtaatccgtccacctcggcctcccaaagtgctgagattataggcgtgagccaccgcactgggcctcaatttaaaaccgaaaaggtctctaccatccctga

SEQ ID NO: 85357 - DNA, 2362 bp, Homo sapiens
agcttcctcacatatatgcccaaagagctttgcacatgtgtgtatctgatgtaccctatattgagaagggagttagtgatcctagcaaggcataagcttgatattccagagtaggaacactttttctaaaggaaattggaagtctatatggccataaaagattaaaggagtaaggactgttctgcctgcttgtttatcagcctgtgggttgcattacagaatgcaaggaactaagatgaaacagaaaccgataggtctttaacccgtgtgtcacttacctgtgacgtggaggtttctttccaactctgacctgcattcatcttctcttccacacagccctctcctcttctctttcgcttcatagctccctttcactctctaaggtgcagtggttcacttggaagaagtggcagtgatttgaaaataactcttgagaacggaatgcagaggaatggaaggaggctacctcacaaaccaccccacccagtctgcccttcccctgaaggcatagactttatttgattctaaaagtgtaggccgggtgctgtggctcacgcctgtaatcccagcactttgggaggctgaggcaggtggatcacttgaggtcaggagttcaagaccagcctggccaacatggcgaaaccccatctcttctaaaaatacaaaaaattagctggacatggtggcgggtgcctgtaatcccagctacttgggagactgaacacgagaattgcttgaacccgggaggcagaggttgcactgagtcaagatcgggccgctgcactccagcccaggcaaccgagccagactctgtctaaaaaacaaataaacaaaaataaaaagtatagccctggttcctcccaacacacatacacacacacacacacacacacacacaccccctgtagacctcctcacattcaacttaccagactgaccaggtcttagtcgaattcttctccaagatttatcttacacgtacaagaacaagatgtctaagtgcccaagattcatttatccagtaaatagttactgagccagtgtgatgagccacccctgcctgaggctgtggggacacaacagtgggtaaagccagttcctgctctgaagttgcttatgtgccaagagggagacattgagaaagcaggcaactgggggattgggagatggtgttgggcaaatgcatgtaagaggttttggagaaaagaagcaggcagttgcggggtctctgcgctttgatgttgtaccttggagttgctgtgcgctgaccctctgtcctgttggtagggactcttccgagtagccccctctgcctccaaactgaagaagctgaaagcggccctggactgctgcgtggtggatgtgcaggagtactcggcagacccccacgcaattgcaggtgggcacctctcagcgctcctgtgtgccatggaggctcacagggaaggggtagaggggaggctgtgtggctacaagtccaggacactcaagtcagtggctgcccaaagcacttcagatgtgtccactcagtgcccagtttcagggctgggtgctctggccccttgaaggaaggcctccccgcatgccaagggaagacgaggtaattgtgggaagaaagaggggccaggtcccctgtcagagcctcatacccatttccataggaagctaccatttgctgttgacatggtggtcaggaggcccatccccagatggaacccacataggcagtgctggctggtgggtcttgcctctgccacatcataacagttcacaaccaatatttcattcatgcctaggagctttgaaatcttacctccgagagttgccagaacctcttatgacctttgaactctatgatgagtggatccaggcttccaagtgagtaccccttgttttggaatgtcctgtgagttacagtttatttgggagtatgtgctgaaattatagaagcatgtaacctatgatctcgcaaccccgtttcttgatctctgccatgaaggagtgcttatacatttgcccaaggaggcaggtccagggatattgatggtagcattatctgagatagcagaagcctagaagtcactaaagattcattggagaagggggttgggaagtggctaagtaaactgtggagtgtctgtaccatcgcacactctggaacaattaaaaaataggtagagttattcatgctaacataaatagataatgaaaggaagttaacaaggactcctgtgacattctattgttataaaaacgaaaacaaacacccagcacacttaaaacaatagaattttaaaaggacctatatttgtgtgtaagtgtataaaagaaagttctggaagggctcacgtaggctgacagc

SEQ ID NO: 85358 - DNA, 1474 bp, Homo sapiens
catgcagaatacaggctcagaatagcccatgggctgagctccctgactggcatctgtgtcctcctgcagccccatagccctgccacaccagagcaggtctctggctctggcacatattcacttggggcctctgaggtgtgtggaggaagcactgttaaaatcgcacaggacaagacagaaggagaacatagaggggtaaataataacaaccaaatttttaaatactagcttgctgatatggtcagttacagtggttggtatcaaatattacaatgattggttaatatgatttccgatgagactttattgattcgtgctcaaccaatgacctttcctatcaatttctcagtgtccaggagcaagacaagaagcttcaggctctatggaatgcttgtgaaaagttgcccaaggccaatcacaacaacatccggtaagtggatacttaccaagtatagacacatggcttgggcttatgtaagcctcagagatacaactgcccgggtaaaagtcatggtaactaccatgcatagcattttatgatgtccaaggtattattaacatgcatggtctctttttttttttttttttttttttttttttgagacagagtctcactgtgtcgcccaggctggagtacagtgggatgatctcagctcactgcaagctccgcctcccaggttcacaccattctcctgcctcagcctcccgagtagctataggcacccaccaccacgcgtggtctctgtgtgtggtggcaccaccacaggtcccaagccaccctgtgagggaaggcaggaataattgttgccattttttagataaggaaatggactcaaagaagcgaaccattggctaattcagttaaaggagcaaagatgaatgcaagctatcttaagatattggggatttgtggtaaagacaggtaggtgttggtggacacctgggagaagctgacctacatgggagctgggggaggcagaagtgtccttgagcaagttcacaggaaggagagatgagggagcgtgttctccagtgctcccccattcccgagccctagctgtgttccacgtctgcctctcgcttttcttgctaccacccgagcttccacttccggcgcgctgcagatccttctccacgcctggctcctgctgcttcacactctgcttctttaccgctttgtcttgccagcacccatcccggccctgccgcctttcctcccagcttcttaggaggcagattttcagcatcagcacctactgccatctgcctggttatttctgttttcctgttaaaaatccccagaatgatgggatggcagttcctcaaacaattaaacacagaattactgtaggatccagcaattccacttctgggtatgtacctaaaagaatcgaaagcagggacttaatattttcacactcgtattcgtagcagcagtgttcatggtaggtaaaaggtgaaaagccaaatgtcc

SEQ ID NO: 85359 - DNA, 1027 bp, Homo sapiens
actcctgacctcaggtgatctgcctgcctcatcctcccaaagtgctgggattacaggcgtcagccactgtgcccggcctgtaatctctatttcaagggacactctggcctgaaggtgtccactgtctgtactaaccatgtccgtggattttactggtctaatatccataccatagtttcttcaaatctgcaaatcttagaatgcttgtgcaggaaggaaagatcctctgccccaaatccttcactttgtagatgcagagggggagacaggttcctgagatggatggggacttttattcaggacttgcagatcacctggatgccttacagacccaccttttgctaccctaggttgtgccctttgagttgtccctcagcatgtgaaggtggggctcaatctcaaaggcaatgagattcttttttttaatgcctgcttcaaaattaggctctgaagataacttcctaagagggagtttcagagatgttctgagccacagaagcctcactccataagtagatgactctcaatggtgacagctttgaagagatagcagttgttacactaaattcggcatctgcttaaaaacataataattggtactgtaccgtatgtttggtagacattaagggaatgctttttgctgtgctgcaacagctgttaaggcatgtgaggataggttagtaattctatgctctgcccattagaggtaatcaattaaatcaattaatgctgttctaacattgaagaagtttgattgtctttcttttgcttcatgtgttttaaggtcgaactgctgactccctaagagttgcgttgataacagagttgggtgggtgtgggaaatcaagataaagaaataaaggaggtaggagtcaagacagtaatcctataggttctgcggctgagctaattcattaccactgcacacagacagaattgtgcagagctaatttattctcattgactgggaaaggatgggatgagtacttctgtatatctctttgacagccaaaaaacaactttaatg

SEQ ID NO: 85360 - DNA, 1051 bp, Homo sapiens
tatatttctaatatcttgaatttattctctatggttttccagaaaggcagtgtcatcatctataaatattaatattgcctcttattttattttcttgactaattccattggctagtgtttctcaaatggtgttaagtaatggtagtggtagtgagcattgccatttctcctgattagtttaggacagctgtcggctttcagtcttaagcatgaggttttagaaagatgatttcatatatttcagaaagtatccgttcctgtttttacaaactttttttttttttcacaaattgacattgctttattaaatgcctatataggtgatcacatgtgtccccctttttggcctgttaatgtgatgcattatattaataaggtgaaccatgggatgaaattttctagggatgacatacgagggagtgggtgtctggactcattcctcccctgcccaggaagggtgtggcagaccaagagttcacatgtaccaattctttcttccccgcagagatagagttcaacattactggcaattatgggagtccagtacacgtgaaccataatgccaactacagctcaatgccctccccagacatggaccctgctgaccggcgccagcccgagcaggcccgccggcccctcagcgtcgccacggataatatgatgctggagttttacaaaaaggatgggtatgaactggtgtctctttctcagcactggggattaggggaggtggtgggggtggatgggtgacgcataagaaaaatacaattacgggaaggctgcactgactctcagcagtttaggtgactcgtagcaattaaactgtatctgctgtgtctgggatgagtttctttggcttgccgccctttagaccagaggtcagtgtagccttcttagctgacacagttgtgatcagtattaattagttctcatcaaaagaaagaaaaagtagtcactgagtgcaattaaaaaaaatacatacgcactttatttggaatcaaaatgtatacaagtagatcaattccagaatttgtagtggctttactttgat

SEQ ID NO: 85361 - DNA, 1047 bp, Homo sapiens
gctgaggcaggaaaattgcttgaacctgggaggtggaggttgtggtgagtcaagatcacgccatgcatggcagcctgggcaacaagagcaaaactctgtctccaaaaaaaaaaagttaaattcaatgaaggtcttaccggtttagggtggctctccctgagttgtctgaggtagagcatctgtgcgtacgttttaaggaagtgtagtgaattgtagaagatcagttcttacctgaccttaaagagtgggtgtttttggagagaggagagaaatttgcatctcttgagtccctatgttatcttagtaacattaggccagttctctatattggccccatttctgatcttttgaaatctatgagatacattttaaagtcttcacactgctcattgaaaccctgacaaattaaagctcatgttattgaaggtttttggccaagttaaaaaaaaatatatatatatatgaattatatatcaataaagcagatacttatttaaaaagaagaaaattgaggggcagaaaaactgggtaaaattgcaaagaaatggtaagttaccgatttgtgtcagtgacactttcctaggctgatggctgttatgtcctagatgtcatacaaagcttcttacttccctcgcgactctgggctttggtcctgatgcctttctgatttgaaatgatgcaggaagctgggtttctttagcagggcttggtgaccagttcaggagcttacatatacatttttcatcattgtggtaggtaaaataatgcccatccaccaaagaaaaatagatctaaagacctggaaactatccatatttccttattttggaaaaaggtctttgaatatgtgattaaaataaggatctcgaaataaggagattgattattttggattatcaaggtgggctctacatgacatcatgtgcatccttattaagagggaggcagagagagattttactacacacacagaggaaatgtgaagatggaacagagagaaatttgaagagatggccacaagccagagattgccaacagccaccagaa

SEQ ID NO: 85362 - DNA, 1011 bp, Homo sapiens
ccctataaatagccctgcatgcagagtcttgagctttggaatcaggctccctctgagttcaaatcctggttactgaactctgaatgcctcagtttcttcatatgcaaaatggggaaatcatggtaagcaccgacttgaatcattctgagcattgaacgaaatattgcttacaaagtgtttagagcaaagctcagcacatggtaaatgttagctgttcttagtacaggaaccagatttttgagtgacatcctcatgtttttaagggggcaacgtggcggggcccactttcccactgatgaggcgtcccgatccagccctttccttgccacctcgggtgcttgaatgtttttatctgtctccaccttaccacgagcaattgagctaattctacaagcaagagatatacaaacaccaagggcttcgtgacaaagcacgaaatatcctaacagccaaggacagctgacggttgcaggaggctccccaggacgtggaaaaccctgtgtaagcaggaagtgctgtgaccattccaggctgagcctcctgcgccctagtgtattttgttttccaaagaacctttcagacaagatgacccttctgactcctgcctcctttactgccccaatgacctgggttgggcagtaagacttagaagggtttgcaggcatcccctctttatttgtttgttccttaagcttggaatcatctaagtagcattttagcaagcccctattctgaaacccaaattgggtcatccaactcagcagagccccgcgagactaagaaacctagggaaatgggactgataataaactccagtcctcatttttttccagtccccattttttgttccctgttctatttctttttctttttcttttatttcttttctttttttttttttttgatacagagtctcacactgtcgcccaggttggagtgcagtggcgccatctcagctcactgcaagctccgcctcccgggttcacgccattctcctgcctcagcctcctg

SEQ ID NO: 85363 - DNA, 1056 bp, Homo sapiens
ttgagacggagtctcactctgtcacccaggctggagtgcaccgtcgcagtctcggctcactgcaagctccacctcctgggttcatgccattctcctgcctcagcctcccgaatagctgggactacaggtgcctgccaccactcccggctaattttttgtatttttagtagagatggggtttcaccatgttagccaggatggtctcaatctcctgacctcatgatccaccagcctcggcctcccaaagtgctgggattacagatgtgagccatggcgcctggtcataaataagtaaaatgtttttttaaaaaaagaagtgagcagatgactacttttaccagtttctttcttccttctgcctctttcttccccatgccacaccaatatcaactcttcagctgctctctttacctgtgtgcatggtagggtatgacttacacttacacaaataggagagtcactttagagagaccaactaaattgtaataattttatagcacaataaaaatcccaccccaagaccctggaccatggagagagaccccttacagaaagacaacctttatgtccaaaggaaggcctagattttttgaaactaatatctgtatgtttctgtccctgcagccttaggaaaatccaaaggtatggtatcctctggtagctatgaggccatgctcagtctcttcaactgagccacctatgcatcgtagtgagttccaccagagggtgaatgcgccgcgtctggttgcttggccgacttatttgaagctgtgtgcccatcattaaaatagaatcagagcccagagggaccataggcacaagcagccccttccctgctgtgtagacaagtgggagtggcctgcagaggtgtgccttggccagggtcccagcagtggtggagctggggctagactccaagttacaaaaagaaggattcatatttagatgtctcctgctgtcagttccacgctccccccttcgctgcccctcccacctcgtcttgcacttgggaggagtgagtgtccctgcccccccagttaggccacacaccgctgt

SEQ ID NO: 85364 - DNA, 1122 bp, Homo sapiens
tcctcatttgagttctgagctgctttctaaacttcgagcagcttttcttgatgagacagttccagagccaagcacccaaatagtggctagcacagagaatgtccatagcaggtgtgtggctagctggcaggtggcaccatcctcaccccaaggggaaggagtcccctctgctggagccatccgtggcccgtgctgcctgagccggaggcagcattcacctgctgggtttctcccagtggcctagaggctttggtttggctctttatatttgactgctgtttcctcatcatagtgactatgatttaactcatgttttctcctaagaatgattttggggttctccagccaaagacttaaactttggttccagatgtccaagaaacgtttattatcattttaaatgttttgtctttttacagtatgattcctgccaaatgccttcaggaaggggctgagatctccagtcctgcagtggaaagattgatcagttcgctgttgcgaacatgtgatttggaagaggtaaggggcacagccgcaggcatcatgggggcgaggtggggagcagagctgcagagccctccagccccaccctttcagtttcagacctgtctggtgcggcactgcaagcatgcgtttggctgtgcgctggtgcacacctctggctggaaagtggtctattccggggacaccatgccctgcgaggctctggtccggatgggtgagtagaggaagaagcaagccaccctgaggttgctctggggtttgtgtagctggaggtgaatgcaggtgggcttgcagggaaacgtcagcagaggcaggagactcaggtccccaccctcagagtctctggttgtcatcctagtaggcagacccagggccaggggagctgagtgttgagaccaggaaacagcacgtgactgaggcctgtgtgccgctctcgcagagaactctgccctgatccttgtgctgcttctccagggaaagatgccaccctcctgatacatgaagccaccctggaagatggtttggaagaggaagcagtggaaaagacacacaggtagcaaaggccggtcagtccttgtcgcccacatcctctccctcccccactacgtgacactgagc

SEQ ID NO: 85365 - DNA, 1025 bp, Homo sapiens
gaaagtgggatctcaggcctcactgcagagctgccgaactggcttctgcgttttgccaaggttcctgggtgtgaacatgagtttcagagtcactcctctagggcccctgcttctcagctcggaccattgacccctcagaggacatttggcaacatctggaaacgttcttggttgtcacagcctaggaggtgggtagtggtgctgctagtgggtagaggtcaggggtactgcaccaggacagcagcactggccacagaaaaaaactgtcttgccctgagcatcagtagttccccgttgactggccctgaggcagagcgatgcagcatccaaaaggcggtggagcagacctgccccagatcctagtcacttaaccttcagtgttgatctgaaggaacttcctgcagattgtccccctgaatttattctggacatccccaatggggtctgctgaggccatataccctgtccgtcacctgagatgcttctctctcttcctgcagggatgccattattacttgcaatcctgaggaattcatagttgaggcgctgcagcttcccaacttccagcagagcgtgcaggagtacaggaggagtgcgcaggacggcccagccccagcaggtgagtgggagcccacagagcagcctttctttcctgggctctgcccctgctgctgttttcctagcattaagtggagtgctggtggggcgcattctaacctggcttttcagtctaatccagggcttctctactcagctctacattagaattatagtcattggaggagggggctttggggagtttaagaatcccaattcctggctgggcgcggtggctcacacctgtaatcccagcacttcgggaggccgaggcaggtggatcgcgaggtcgggagatcgagaccatcctggctaacatgatgaaaccccgtctctactaaaaatacaaaaattagctgggcgtggcggcgggcgcctgtagtcccagctactcgggagactgaggcaggagaatggcgagaacccgg

SEQ ID NO: 85366 - DNA, 1438 bp, Homo sapiens
gtttggttgaggattccataagtgaattccaaagaagagattgcagctataaaatgatagcttccatttactgaatgcccactttgtgggaggcagtgtgtgaaatacccttcatttcacttcatttcctctagggtcgtcgccagcagccctgggaggtagatgtttagtcactggaaggcatctttttcctcggggcatcgctggccagggccaggtggaggagtatgagttgagctcgggtgcggggtgaccttgggctgctttttggcccctgcccgtatctccccacatggcccgtttacctgcccctcactccatggcctgctctcctgctgtctctttcattcctcagggtttgggtcccctatttgtatgccctggacatcttctttttcttgtttttcctctcactcttcccagcacacctgaaaggcagctgagctagggaacaccgggctttgagacagcaggagtgggaccatgtttggccatgtagtaacactgcttggggcaagtcactgaactgtttgaacacctcatcctcattaccactcctgagctcagcaccactcctcagggggagctgcctcctaacagacgctgcaaatgccgggtctgtttcttcacaggtttgggcctgacacccagcacttggtcctgaatgagaactgtgcctcagttcacaaccttcgcagccacaagattcaaacccagctcaacctcatccacccggacatcttccccctgctcaccagtttccgctgtaaggtagtgtctcagaccggccccttgtcggcccagctctcgtcccctctctttctctccatgaatgtgttttgtctctttcagaaggagggccccaccctcagtgtgcccatggttcagggtgaatgcctcctcaagtaccagctccgtcccaggagggagtggcagaggtctgtgccatcttgaactaatggaatcgtctcagtcgagttgggaaacatttctgtaaatagccacatagtaaatgttccaggaggctctccagaccatatggtctctgttgtaactattcaactccgctttgagcacaaaagaaacacggacaataagctaatgaatgggcttggctgtgtgccagcgtgaatttatttagaaaagcagcctactccaggctgggttgaggtgggcggattggggccagtagttctccttttccaaaattgccttgcatgggaatagcagtgatagagctcgtgtgtttcacagtatagaaaataggaaatgtgtgatgaacaaagtcacccataatcctgttgcccagagataatgattgataacattttgtgtttcttgatttgtgtatgtgggtttatattgtcagtcttttcctgtatcactaaacagtcttaagtaacaagatttttattggtattccaaatagggatgttta

SEQ ID NO: 85367 - DNA, 1473 bp, Homo sapiens
ccttgttagtactaactaatgtgatgcttactaagtagtgctgatgggtgacagaccagagcacccagcaaaggccagagaagtccagaacctggcgaggagatgaggcttacactgactgaaggcagaaggcagcagggaggagaggaatgtgccggagcaatggcacaagtgctcctaggccagtgctgtgatgagctgatcagcactcccattgcctggcttgctcctcctgctcagatgccttctctcacctgacccctgctgtagccacccccagcctgagttgcatccacctgtttgttgtccatttccagcaccctgttcttcgctccatggcatgtgacagttaactttcatatgtgatttgcgtgatcgatgttaacatgctcagttttgccgatcactgttttttcagtgtccagcggccctcagtgagtgaacttacgttcattctcgttgcagctgtgctttagcttcttagagcagcgaatttttttcccttgatcttgagccttaactaaatgtaaaatgaggctccttcttgagataggtaccctttgggtctatgtgttttagcgggagtgatgataataaataagcatgtctacaacccacatgctgtttagataacacgttgttgagttggtactgtggccgaggctgtgagctaagcagaaacataaacattaataggacataggtgcagcccagaaaccaggtaggaagttaactaactagttatttcctactgtatagtaaaaggtgtgctgatttaattggcgttctggcattcccatgtatgaacgtctgggccttggctgtcagctcaccttgtgcagtgtgtaatttggtggtatctgtactgaccaggtgaacagaggaggggaaagcaccaaccatggcagagtccagaaaggcctctcagcaggctcagtccagagcgatcttcagactccgagtcgaatgaaaatgagccacaccttccacatggtaatagtataaacaaaacagagcagcagaaaggcttgcgttttcttaattctctgccttgtaatgcttgtagagagtcattattgtaagaaagccaggtgtgtaaacagatccttcttcctgggcttactataacttggcccgttgggggaatgagaagggttgttgtaaaggtggcagcctgcaactttaataatgaccagtccacagttttggccacccagggtctgggtaggcccaaaactgtgttctgttttcccagaggagaacagggcctgacaaacggattcattttgtatttttcattaatgtaacatttatgcaaattttccattaatgtggaaactataactgctaagccaatgagacagtcaaatcagtgagaggctctgcacgtcttccagaatgacagcccactgggaaacggagttaaaagtccaagatgagatgtagctcaggagtcaggccgcttcgggagtt

SEQ ID NO: 85368 - DNA, 1059 bp, Homo sapiens
tccagctgcgcaggggggcttacagcctcttgatgggaagaggcctcactgaggatgctagtagggctcttgtcctggcactggtgtgtatctgtggcttgttaatactcctcttttatagaaacactaatactttgtttcaaaatatacatcagctcttctggtttgcgatgataggttccctggcttcactattctgtttgttaacttgggtctctgaaagttgagtactagtttcttgtttttcaatttttaacggatagtcaccaaagattataatgtcttttcatctggctgtagtaaatataaatggctgaccaaaatacacttttatttatttcctaaaaatggtaatctccttagaaagtctggttttcgtgtcagattcccaccataattctgaggcaattcagttgctcgtggttggtgatcctgaagttactcttcccacacatcttcactaatgcaatcactttgctgttgtgtggttttcttgtagctgtgcggccccactctgccccagaatacgaggatgaaaccatgacagtttaccagatccccatacacagtgagtatgaaagccaggtttcccaggaggagggtgtacgtcctgagtaaagaaaacatggatgaaaatagaaactgaacacttgctgtgggcaccctgttttgtgttctgagcatgattagaaaatttagttgaggaatgaagatatggctcctgccctggcttataaacttacggatgtctgacttatgcctaatgatagtgattatgctttggaatattagataatcaagcactgttggtaaatagattgcattcaagtttgcacattcattgcttggaggttttttcccacaggcgtaataccctcttttgatcagacgatcatgaagaggtttgcacagatagatttttttaaataaataatgattacagcaacctaaaagaagtgttgttgggggttagaagctcctgcaaattccgaagtatcagggccagatgatgtggtcttagcttaggaaaagagttagtcttgtccttgaacttggcta

SEQ ID NO: 85369 - DNA, 1014 bp, Homo sapiens
ccctctaactccctggccacttcaggactttcgcccttccgcgggttccctctgcctcttctaattgctgcctatattgttactgaaccttcagggctcagctagagggtcatttactccagaactgcctcttcttctctagacaagttggatcccagccttctgtatttttcattttccttgcagagcacttagcataatgccactaagctgtttctgttatcgtgtttccttttgtctcctccactggcctgattagagcaaggcctccatctctttttcctgctatatccttggcatctgatataatggatactcagtaaatatttgtaataaatgatgttcaaaatatttactaagctttgttttatgttgatacctattggtaaccttttaaatacttgaatagttgctgtgttctacatttgttcaaccataactgctcatttctttgtttttcattaggaaaaatacctcgaagcaatcaaaatattttctggtccattgaaaggaatagaactgggtacgtctttgtctgtgactcatcctctgctatttctaacttatatatgccctgacctctcaaattagaatccattaaaaacatcaacatcaaacctcaaaatcaaatgcttcatcaccacgagatttttttttttttttttttttttggatagagtcttgctttcttaccaggctggagtgcagtggcatgatctcggctcactgcaacctccacctcctgggttcaagccattctcccacctcagcctcctgagtagctaggactacaggcgcatgccatcacgctcagctaattttttgtatttttagtagagacggggtttcaccatgttggccaggatagtctcgatctcttgaccttgtgatctgcccgcctcagcctcccaaaatgagctaccatgtggctggagatgggatttctaaatagtgacattttctgtgttcccacctcatgctgtaaaaataggggccaggtcggcaggagtgatt

SEQ ID NO: 85370 - DNA, 1050 bp, Homo sapiens
accctcttccgtgcaccccaaggccagtgtgtcgttgttagcgtgtggggtggacagatctggtgtgtagccggtggtggagaaaggactcattttgtcctagcacccacacacacaggcccccactcctctccacctctgctaaggagggctcaaaacccaccagcataaatgtggctcggtagtccaacgtggacttttaatttttttttcttttttttttttccagagtctacaataaaacatctaattggtgtcagagagtttacagaataaaaccttctgaatgtcttgtgtaatgtttgtcttgtaggtatctcttcaactgtggagaaggcgttcagagactcatgcaggagcacaagtgagtcagtctcttgctttcggagggggagttgattacggggcttgaaagccgaaatgagaggccagttgttttttatagcaaaagtggtccttgttctgttcatgttatcctgtttaaatgttttttcattcttaggttaaaggttgctcgcctggacaacatattcctgacacgaatgcactggtctaatgttgggggcttaagtggtgagtatattctttgcagtgtcagaggctggtgggaagtctctgggattttaaccggctttaccatttttccaagtctggggtgggcagctacttttttttttttttttttttttgtcagtggcgtgatcttggctcactgcaacctttgccttctgggctcaggtgatcccctcacctcagcctcccaaatagctgggaccacacgtgtgccccatcacacctggctaattttttttgtatgttttgtagcgacggggttttgctatgttgcccaggctggtctcaaacttctgcgatcctcctgtctcggcctcccagagtgctgggattacaggcatgagccaccgcacctggcctggaattctttttataccagcccagtcagcagcagcacagagcattaaaagctgtgactcaggagaacagattttaatatggataccacctcttaagtgttaccatccacttagtttc

SEQ ID NO: 85371 - DNA, 1022 bp, Homo sapiens
gtgggtttcataaccaatttgtcttttcttttgaggtgaatggttttcagatatgttcaggtgagagagcagtagattagatgcttcaaatgactaggattccttgggttaaaacatgtttttgagctgtcataactttctactcttagtggtatctttgtttatccatttcagatacatttccctgagcttgtcattgtgcactactctttcttggtttgatttctttgcattttaaaccactgctataaagaacagaatatattttaactatgcatattcagctatttttaaaaaatcataatttagtactcagttaacttggtatatggaatacggttataccccaaaattagcatattatttttaatacatccccccctattattttaaacatcaaaataattctcccaaataattttttttcccatctagtcactgtggtctgccttaacgttgtggctttttcataagatattatagtgaaaaattttggccaaaacttaaggaaaatcgttttcattaccagaacacccaagaggagttggctcagttttaaaacaggaattcaagttaccagcaggaaaacagcttggctgagtggacatataagttgctagtgtgcaaaatacgtgaatttaatgtgataatgcctatagtcattatggttctacaatatattgtcagctatttggagaaggatcaatctatttcaaataagtttttttgttgttgttgttattttggatgtcaaaacaatcttatagtgaggttcaaatagtgctaccactttaccaaaaagatcatccccttctataaagcaggacaccatctcttccaagtagtttcttccttttgctaccttcccatgttttctggtaaagagaataaacatgattccaccatgaacatatttttaatgaaaatgcgaatgaaaagcaatataagccaaattgatttatttgtccatttgggtctattttttatttttaaaagttactacctctatttggttatacatc

SEQ ID NO: 85372 - DNA, 1055 bp, Homo sapiens
gaaaaaaacctctcagttggatcaagaaagtatttggaggaataaaaattgaatgatttacatttagacagaaattgaacataagccaaggttttggaaattttaaaaggatgtgtttaggtggctgcttgatttttagtctgtagaagtatttttgctatagggagcgagttggattctgtaaattttaaaaatacgggggaaagccacagaatgcatgttgggattctttctggtcctgaaaaggtgcagtgtctgcctctttcctccttaggctggttttccagccctgctccgcatcccacttacacagcactcctgatcttccgctggaactccgtgtcatgttcctccatgtgtcactcatcccacacagccctctgcagtgtcctgagtgacgtgagttcctcatcagtgcttgtggtacaagtgaatttctccatctttttgtacccctcatattgcttccttccacttgtctcaggctgtgatttcgtttggaagcatcacaacactttaaaaatctcaacgattcccagtagagtagaatcctagtgttatcattatggtatcagtcagcttcccaaatcataatatttcccaataatgttagggatattttagttccagtgttaggcaatcttatacatttaaaataaaggaatgcaaaatcatttttattagtgtttttaaatagggtaagcagaacaaagagcactgggcaataagggttcaacagagtttttgggcagcatataaataaagaaatagtccttagcaaaaaggaagagtttactatactttttttagagggctagtgttcaaattaaaaatacatatatgcggttggtctgtataaaagttcttcacttctaataaaattctatgggaggaaaactttccttctgttcgtatttataaaaagattcaaattttatttatattttgtatttattaatattttcttttagcagttattcatttagttttcagtattctttgtactctatttctgtgatctctgtgaaagtagaaaaaataaagctttggaaagc

SEQ ID NO: 85373 - DNA, 1021 bp, Homo sapiens
aacttaaaataatggggattaaatacagcttctgaccttaagaacataccataagaccagattctcagttcttataaaaatgttcagggatttataaattagaatatcaattaaggacagaatttactgaggctgaattcctttcatgattttcacttactctgattgagcgcgtggctgaagagtgtatttgagtgagcatgcacaaagtgtaatgtattttttccacaagaggaaaaatagtttataagttttccagcagaacatattcagccatcctaagaacctacgtcttaagtaaagtcaggttacatcagaaatgaccctctttgtaaacactcagtgaacattcaggctttaagactttaataccttcaaaaagcagttcacacttccacagaattttgtttattctacttagttcaaatgcagattattgatgttggggaaggcagttgaaatcctcttgacattcacccacctattagaaagtaattctgatttggctggaccagaaaggagaatgccattacatagtagaaagtgctgatattctttgctgttattttcttgaaagctattttctggaaggatccatgtatatgtattgattacttttgctggagataaaaagattggttcctactctgaagtggcttacagtctggtagaggaagacagatgaataaataagtgcaataaaacaataacatttattggctctgtaacagaatataggcagtgccttaggcaagtaaaggaaggtgtagggagtggccgtttctacctgtgaaggtcacgaaagcttctcagaaaagtgaccagaacatcaaaaggttagatgggttttttactaagtatgtgcatgtgataggggaactttccagacagagggagcatcatgagtaaagacccagagatgtgaaattttataacatggaggaccatttggggaactacaaacattgcagtgtagcagaagcacaagtttgggaggatactgtgagacatttggctaaag

SEQ ID NO: 85374 - DNA, 1032 bp, Homo sapiens
tgtcatgcttattttcatccttatttttatcatcatttctatcaagttgaaatctcaatagtaattgaacatagaattcgtaattgcattctaaatgtcagtataggttagtataatagtaaaaaaattcagcattcatttttaataattcattgttcaaagaaatatttttgattatgccattgatgttttactacaaagcctcaagttgccagcgggtgacattaacaccgtaatcctctgtgaaagaagtctagcccttaggtgtttgatgaatactttagagttaaataatttggtgaaagacctatagtcatatccatatagaactcttagttgttagatagaaaacacctaaaatgaatattcttaagttatggtaattagggtttacatgtagttgcataaaaatgtccctatattagtttatttaaccttttccactaaggtcattttaatcaatagttgtttgctacttgatttccataaacttgcaagttagatagggcttaatttaatcttttctagaattttgacacattctcctctgagatctcctaactccttgtatatggctctgttatatcatttattaaattgcacttcagtatatttttatgcatctgaatgctccactagcttatgagtcccctcttgctataagggcatattttattcatcttaattcttggtacctgacaggcactcagtgaatggctgctgaataaatgaaggagagcatgggtcaacaaatgagaacataaactcaacaattaaaaggggctaaacacacagtgttactttgtttctttattactgcaaattcatcagatctgtcatttaaaaatgaaactacattttacgatgtacagaggaagatggtcctattgtttgtacacattttcttggaaatgtattagtcattgagcttataataaaacaagttgaattaaaatttgggtaataatcaccagtcagagtggctattattaaaaagacaagaaataacagatgttggagaggatgcagaga

SEQ ID NO: 85375 - DNA, 1033 bp, Homo sapiens
atagaaggctctactgctacagctgataggaagcgacagcatgcctgttttgcacaacattgccagcttattgataaaaatgtaagaaaattctacaactctctaaaatggaattttaggttgttatttgtaatgtttacagtgtcaaattcgttctttgttgaattagccttgtattaagggtattgccattaacagggaaacaatttggctattgaaaaataaatttttactttaatactgaaaagcacattgtaaaaatttaaaacatattcagagccagacgatgaaatgcagctcttttgggaggcaaatacatttgagagaggattacaaagggaaatgcctatgagtttaaagaactaaaccaggactcctaccagtgttagtagttgaggcatgtgtgtattcatctttattgtatgttctcagagaggacttcacggctaatgttctgggtagtagatggcatccaattcactttcggtttttaaaatacatgtcaatacttaagtagggtagacagcagcactaatcatattaagcacagtgtctgaactcacagtgaatgcataattaatgtattgttttagaggacctaatatattagtcaagggcaagagcttcatgcataacttgttctgtgggtgaggaggagaactattccacggtgctgtttgtaccaccgcagctaactctgctcactaaatctattttgttacacctctattaggagccaaagccatcagacaacctccattaaagtgtttgccacggagaactctctctgggatagtaaatgctaattcagtgtcaattagaaaaatgcttctaacaaaacactacgattaataaggggtacttgtgttgattcattgctgggtttttttttctttttctaattccttataaggatgcatctttcattactttctatttattattttaaatatgtttagcttgaaggcactttgccatttcatctttattttaaaatgtatccaaatgtttacttctccatcaatatccattt

SEQ ID NO: 85376 - DNA, 1016 bp, Homo sapiens
aaactactgatatctcaattgagacagcacgaaggtatgatccttgtattactaaatatttcttcccttgattttctgctttatatcactttgcatttataagccctttaccgaatggtggtggctgtgtgtgagcataataatttgtatttttaaattttttatccataatattttcctaatcttaaaaaattaaattttatatattttattcagtcttacaaatatattgttctaccttagaatatttttatgaagtgttaaattttccagaggatatattcatagtttaacctctaacctgttaaattatttgagaagaagaaaaaagacatgtttgtagcattatgaaatgtctgtttcaaagaatacccctgcttattttttacttttcctatgtttattctgatgcaaaattatagcttcaaatacttattttctgtttaaaaataattaaatattaaggaaaaattatgcaatatgactacagaaatttattaataatctaataatgttgaaagagctatgtaattagaactttaaccattcttattttcagttcattttagatttattttctaaaagaaacagtacaactcaatcaatttggaaattttgttgagatttttaacttaaaagcttgtaacatggtaacacttacagcttgtttagaaatgtgtggtgtttgtgaagttctttacaaaggaaccaggtaaatcttggcttaatgttgatttgataaaattccctaaaatttccctcaaatgtattaaaaataagccaagtttattaaaaataagtcaactgtgattgtattttctttaataatcaaaagtattgaagaagtacctatttacatctaaacatgaaaattgttataaaatgttttcatgagtcatacaataaaggaagctttgagagaacctggttatccattaatctttattacaccaatttggactaactggatttgtaaaaagttcaaattatgaaatagttttgaagaaatataatac

SEQ ID NO: 85377 - DNA, 1020 bp, Homo sapiens
accaatattttaattataaaatttctttggaactaatatagctattttgttatgaatgaaaatgtgtttattattagtttagcaagcatattactgattttagatattaggttggtagttctcaaattttaccgtgtataaagaatcacctggggagctgattgaaaatgcagatgcttgtctccactcccggatattctactttgggtcagaagtgagacccagggatctgcatttataattaaggactgcagaagattttgatgcagatgaaccctgaactgcactttgagaaacacttaatattgaggttttttagcattgtattgtagaagcaatagagtgttgattttgtactctaaatgtgtataaagaacatcgttttgttttccaaaaataaatttttattcaaatatggaattactgttttttcatagtcttcctacgtaacctattggaatttttagatttcaacattgcaattcagtaatacctgtgctctgcaattgaaatctttttcaaattcatggccagcaactcaggaaaagtaaaggcatttgagtagcaaagaaaagagcttggaatacaagttgagagccaccaaaaagtgctctgtcaatagttgtgtttcatcaaataagttgtttggattttgttttcttcaggcatttttaattttccttttaaataatgacaaaagaaattaaaaatagtaagttggggattagagacgaagatagagaggaagagaacattggcatcaaacaaaacaaagaaaatgtaaaggtgattgattttaagaagctaaggagtttgagcaatctaatgtgacagcaagtacactgagtcattcattgggaaagagatgaaataatattcagtaaattgttttgaaggctcagaaatacgagaaattttagaaatatttccatcaaaactggtttcaatttcattaatatttgggtatgcaaacaagaaaattacttcattaatctagaaaattcatttgtatgcaacatc

SEQ ID NO: 85378 - DNA, 1226 bp, Homo sapiens
taaatcagcttccctctcactatccagagacaaggattgtaaatattttgatgttttctccttccatcttttttcagaaagcattgcttgcaaactgagatctctctggaaggaaaaaggggtcagttccatacagtgattcttggagctagtaaaaaccagtttaagtttctgagtgttttacttgtaggatgtggtactttgcctctgataagtgctaggtgaccttttagatcctttattttctcctttaaggatgaagccttaaaatccagcctagtgagagagggcctgagtaatctgtttagaggagaacattgccccagtcaccacattgggtgaaaagccacttctgatgaatgccagagcacacacattcattatttcaaatgcctcatgggggaaaatcaatgggaaggagtcttacttagtttgtttattctaggtaaggcaacagagaattggtaaccagagagtaatggctgactgggtgtctttactgatttgtaagctgaaagtaatggcacatggaatcctgctggataaggtgcctctccctgtgctttattttttttgtttttaacatcccttttaacttggtctgagattgatcgagacattgtcttgaaccctggaagctgtgagccatattggaatgacaaacacttgttgacagcgttgagaagatggatggaaaaacaaactcccacgaggttcacatgtttgttttcctgttgactctctagaagaatgttgtgaccattatttaatgtaggggaagaaaaagttattgtcaaattcagtattttctgagcctaacttacagacatctctagaatacatctgccttttgcataggatgtaattaatcaaagtaggactaggaagtacatcagttgggctgtggtatttctatccatttttgttatctgtgtcattttggctcacagagttcaatagtatcataagtatatattgtctgttaggaagattaataagtgtattttgtatctgagcattaactatttggataatatataattagaattaatataatatattttaatatattactaggtaattatatatactatattaaaatataacgttatattttataatataaaatgtattgttagtctataacatatataacaatatatttataatatattaaaattaatattcactaacataaaaatatgtataataaggaagcacaaacg

SEQ ID NO: 85379 - DNA, 1092 bp, Homo sapiens
tgtcacttatttgtctttttagcactagtgtttatttttttctaatatttatagaacacatattgagtacaacacactctacaaagagctatgattcatacagacataagtaagaaatgatccctgccactcaaatctagtcagaccaggaatttctgaaatctgttacttacgtttctcttgaaaaaaggtttcatggtgaaataaatttgggaaacactgcctaaagtaaggttaatttggtttcttcactttgggatttctcagagattttattgtgctcatatgatttgaccatagagtcgttcttcctgggagcatctccggggatggtaagggaacatagctggggaagtactgacttcagccttccattgaattattgtttcgtctgttgatttggttctagcccatttagtcaaagatttcttaaataataacctaatcagcacattttttgagtactctgttttaccaaaaaaggagacaagtaagagacattaataacaaatttaagaacatacttgtacagtttgtcaaggctttggaaaattagttttgataataccttgggccttgtcttttaataggtaaacaattaaaactgtacttcattgttaggatgaccataccaatctattgtccaagctaggatgctttcagagtgagagaggttgctgttaatgatgctggcaccaagatgtaaattagaactatcctgggcagaataggatgattaccttcattgcagtataacctcagtttcatctgagatctctgagatcttaattacgtcagccctggttctttacatcagtagcccattccccagggtcagttgattcttggttgattctcaggctttgggttgtgtgaaagattctgaaattatttacaacgctaatgcttcaaacctgaaactatacagttgagccttgaatgacatgggtttgaactgtgtgggtccacttatacgtggatttatttcaaccaaacacagactgcaggatgtgaaacttgaacttaaagagggaccacattttctcataggcaggttctggagggcctactgcgggagttgagtatgtgtgg

SEQ ID NO: 85380 - DNA, 1048 bp, Homo sapiens
gtcctccagctgagttccctgtcccaattccaaatctttatgagagaaaatttgattgctccagcttgggcctgatagttccatttccctggggcaaaggaaagggttataaggacaattaagcattagggatgggaatgggaggacaaaagtacctaaggcaaagggaaggatccagggcagcttccacgggactttacgtggcacttggccagatgtgtatctaaagctatgattctgctttgtaactttctagctataatctacctccccaactttcaacaaacacattatgtcaaattctttctgtgtgttataattaaagccaaagagattcttaatatttaccaagtcttaatttcgcttcagagatgtgtttcctagttcagttaaaattggagtttctgttcatgttctccttgttttcagagaagacagagagatgtagacaccgttcatctaccatctcttatcaaacctgaggtccttcagacttatatttttaaggtatcttatatatattttttagtgatatcctttttgctggtctatcctaatttaatatttcttaaagatgtcaaggcctactgtttcttttaaatattttagaatcaaataattattttcttcaattcctcaagagtgtattgatcacctgtaatgtacaagcactgtcagttttgtttttataatgctcaaagttttataatctgggtgaaaaacctagccacatgtataaaatgcttaacagacagcataaggcagcccagaaatatgtgttgaatgaaatgaatagatcggtacaaacaagaatttctctggaaagtcagacaaagaagaaggacagagtggacagtgaaaacttcctgcaggcagagccaggactgggcctttcttcttgttatttcagagacatctgtattttgattatgtctcttttgaattatctattttccagcttggtaacgctgacagggaaataatacatgtcagcattagtttttccaacttaatggatcagatgagagtgatccataacatgtaagct

SEQ ID NO: 85381 - DNA, 1040 bp, Homo sapiens
agtgggtgacctaaccaggccggccgcagtcagcactggagtggagcggcttatgttggctcagcgtatgtagcttggccagatggggaccagcatcacattggtaatggtatagtagttatcaaatctcagagagcttccagaccacgtggattcctaacaagttcccaggtgatgctgatggtccaggagccacacttagaatcatggtgtggaggatctacccagaaattccaatgaggccctctttcctaaggtaactgagcccagagacacccaagaaggccagcttagcctttcttctcctcatcttgcttctagaaaccagatgtcagagtaacacttgaactggaagcaaactgctaaggaatttaaatgataaaaaggagtaaaaggactaataaaaaaaatatttcacaaaaaatttaaatattgaataaattatgaaaggagaaaactcaggtgtgtatgtgtgtgtgcctgtgtgcgtctccaggcttgggatgctttcaaaaatccatctaggaatgggaagagccgatggtttttgtttttttaatcaaaggctgaatggtatgattaagagaaagagtatatagactaattgacctaaaataacaagaaatcagtctttgacataatagtgtttgagatctctgagatttagctctgaccacattttatgagcactaaggcagaaaatcatagttgtgtttaactgagatgaaaaatgaacactcttttctaacctttttctatctaaaagatagatctcttgattaaaacagctaaatttcaacaacctgaatgtaaccatgatatttaaagatttcatggtaaatcaaacttaataacccacatattatttgatatattctctctttattccaaaaccattattattgcttgtcctctttctacttaacagttccaaagagagtcctttactttttttttactgatgtctcattgtatacaaatattctaaagaaaatcctctagttacccctttatttaacttttttcctctgccttatttc

SEQ ID NO: 85382 - DNA, 1020 bp, Homo sapiens
tggagtacagcctgacagtacgtgtcaaaatccctacaacatttgcatatcatctgacttagcagtttcacatctaggaatttatcttcggaatttcttctaaccagagctgtgaacaaaagtctacccataagatatttatcccaacatgctttttgatttttaaaaatggaaaaagactgaatgtctgaaaaaaagtatattggttgaattaattgtggtatatccaaagaataagccactgtgtgttataaatattaatgatgttgatgcaaaaaatatatttaatagcctggggaaattattaagatatattgaaataaatcagggaataaaaccacaatttagcatattctcaattttttttaagtagttatatcattggaaaaaggcagagaagatatcaactagtatgtttctccgaataactcatgaagaatttcttctttgtgattttctagaattgccagttttctgaattggatgtatattacttttgttataaatgttttaggaaaaaatgaaacataacaggaaaataaatttcacacagtttgcatttggagtacctttgcccataacacaagaaagctctgaattccactgattgagggctcctcgtgccagaaggggaaggattccttcaggtgcctggatgctgagagtgatcatggcatcctgggtaaatagcttcattttcgtttgcatggcttgtcagcctacccagttttcattcatgcccttgtgcacactgatttaaacaccaaaattgagccacatcattttctgtgacttcaacaaaggtcagaaactaaacttccacataaaatggcctatctcaataaattaaattcatgtgtgctcttctaaaagggcttttcgtaacactaatgtctctgaatccaactggcctccacagaacttgaagaaggagtaaacaaccttcttcttctttttttttttttttttttgacacaagggccaattcaggaaaaataaaatgtttatcagccacatttt

SEQ ID NO: 85383 - DNA, 1096 bp, Homo sapiens
cagaatggattattgagggtgcctgagtgagtattgtggaagtaactgaccacagggttcagaagagatggcccaggaacaggtgggtggaaatgccacctcaaggcagaatgtgcactcagaagtctctcagctgtaatttatggttcttctgtcacaagcaccttgacagcaacataccccttatattttctcattttccatcaaaattctcattctgttgggtcactctttgggcacagaggctgcaggccaggtaggaaagagtcagtgctggcccctatagcagagtggtagagtggtggccagaattctccatcaagtcacttctagctttcatattctgttgccctgacttcattccgtactgtagttccagctgctgggctctcctctggcaccctcccggctaaattctaactcgtcataattctacaagttagtctttttcctagaagggccctctcatagatacaggccctctctcctgccataggaacactgcaaccctgtgcatagaagggtatcatctcacatgtgtgcacatagggtaaagtctgcctctctagggagttggctgtttttaaaaccagagcactctagaagctgcacactggtgactcttgcttgctaagaaacgtgttgtggaatctgtaatccagcagggtcactgaacactacacaaacatatcttactcagaagtggaattatggcttctgctaggagaaggcaggcttgagtaacctccttaggtttctcaagaaagaataaataaacatgcatataagcaggaactagtagatccaatttatctagactctcaaaaagcctttcacaagattctatacaaagtctacttttagaagttggctcttttgagaaacaggcttataataatcattatcattgtagagttttagatgatgggtttcatttgcataaataacactgtgcgacctccccttgaaaatcccgtgtgcataagtcacgttacagcactggtactacacaacagccacccggtgtttactgttgtcaggaaccggtagcatgctgagcctgtaattcattacagacgttgtaatgatggcagtc

SEQ ID NO: 85384 - DNA, 1064 bp, Homo sapiens
cctacatttttttggtggtatgtcacaactaaatttgtggggtgaaaatagctcatttttaccatgtgtaagggaagtttcacagtctaattagtcaagtaattagtgtttttgaccgacacttaggaaggaagtggtgaggtttcctgcaatatatgtaagtacatatttttcacatgagagatcaaaaggcagttgaccataaaccgttaccctgtaagccacatttctgaaacttttcataaaagctcttacactccaatttggcaagcttacaaatgcgattacacctttaccatgattgtctcttagaatggttttaatatcctgtaaatgtcagattttaatgaatctacgaataccatattctaaaacgtatgtgcttgtgtgttctgtgataaacctaaaaccagagccccatccatgtgggaggcagtgtcagcaaagcggtggtgagcaaggaagccggcggcgctgcctggatggggagcccgaccccaccgctcatgagctgtgcatccttcgcagctgaactcagcctctttctgccactgtctcctcatctcccacatggggctaataatcttctcccctcctggagtcattgtgaggatgaaacaaattgttatttgtaaggtgctggaccatggtgagggctcaatttgggatctgtatgctgttgttatcattcaggagtcctccttcatacagtggagggactggcacagatcaggaaatggaagattttgtttggtttgtaagctgagcgatgcagccttgtcctctggctgttattttgaagactgaggcgcctgcagcctggtgggaaagagtgctggggtcctttggtgaggtttgcagtggatgagggaagggagggtttaaagcctgggcttggcatccctgggctagatgacatctgcgtgttcatcctggtttatagttgaccttcacagagcacacctgcacaccaccagccctcctgctcccggtcacgttcctcttccttagttccacctggagctcacctgacttgaccccaattccctctcccccttaacgca

SEQ ID NO: 85385 - DNA, 1056 bp, Homo sapiens
gcagatggatgttgtgaaagctaagcaaatgtgaattgttcttgatgtttgctattttataactgcacaatgaactgtaagcagctcagcttttctccccgtcacagtgccaacggctttcagtccagtgcttgctacagagagtgctgtgccgcaaagcatgggcccagcccagagagtgctctttgtggttgttctgtcagggtagtcaggactctgcggcccagctgcttctgtgcacaggaaataacttcattttacaaagccctctgtctataaaggtaatcattataatgggattttacttgtgtccattttcctctcagcctcagagttaggccttttcctctcacctgcctaattaccttatcttaatttttttttaattcagcctaactgctgttagcaaaaaccattaaaaatgcttcctagctaagattcaggaaaggcagaatgagagggttgctttctggcccctggtctagccagcttgttgtcacaggaactgccgcacttggtttgattctgcacacagggaatggcaatgacagaagtgacctgctggagccgcggtgaaggagtccactctgaggaggtaggggagggaggggactgcagataagtgcccagccgacattccagctgcaagcgggcctggagccacacgcattaggcctctcaacagtgtttatctccagagactattagtgtatctcagaggctttgggttaaatctgctccccctccttcttgccaaggccccctcttttcatcactccaatatcttagaaaggttcagattatttttcctcattttcctaaatttgaataagtcccatgtttcgggagtgtatggattgggccttcgtaatgaccatcttgtagagtggatttgcagttgcctttggcttgtgattcaaatgtgtgttaagcattaattatgtcacccaacatttagttacaaatgaggactcagaaatgggatcttatcaggaagtgacatttggcagatggatggttttagtaacaaaaagagaatgagatttttttaccctc

SEQ ID NO: 85386 - DNA, 1011 bp, Homo sapiens
tctagtaccttaaaaaaaaaaaaagagagagatctgttttaatgacaaaactatcaactagaaggcattttttcttggcagtgagtactgctagggaattaaaaaggacagaggaaaggttggaatgctcaggtgcaactgacggagtaaacagggtgatgcaagtagacttctttatattttgatggtaaataaagtgacctctggattttaaagtgactggtaagaggaagcgttgtcagagtcttggggcgtggggtcacgctgagactttgaacacgaggtacagagaagcccagccccagctcacgagctgtctcagattcaaagagtttgcagttatgacagccacaagcacgggggaagtgtctttcaagaaaaacaacatcagtgataacttagaaatgggggaaggaattggatcattcagagctcagtgtctgctttgctctagaaatggctcagaaagagcaacctcagctgggaaaatggctaaaataccagctccaaatgtgagattttccttgtctttctcaaaagccctccttttttgtgtgtgtcaaccgaagtattttgttttgctcaatacacttttttcagtaatgcttctgcttaaaataaacataattaaagaaatcattttcctgagagtagcatgctgttttctgtaagaggaaattgggtgtgggtttggctcatgtcacaaatgaaggaggtttggaaatcacagcctagccttaatggattgtaatcagaaaaccaccacccacacacggctttacttgatatgcttcaactgcctctcctcctataaaagatgaaaacaaattactttcttcatcaagataaggtgaactagaacaggaagacttgaattagtgccggggctgtggtggaacccaccttccttgtggagtaaacataaagcactcagttgactaattcaaagacctcaccttccttcaagataagtattctactcatctcctctgcctcaagctcctaaagcag

SEQ ID NO: 85387 - DNA, 1037 bp, Homo sapiens
tctgtctgaggctctgagcgtacatagggaagggaggaagggaaaacagaaagcagacaaagaaaaaagagctagcccaaaatcccaaactcaaaccaaaccaaacagaaagcagtggaggtgggggttgctgttgattgaagatgtatataatatctccggtttataaaacctatttataacactttttacatatatgtacatagtattgtttgctttttatgttgaccatcagcctcgtgttgagccttaaagaagtagctaaggaactttacatcctaacagtataatccagctcagtatttttgttttgttttttgtttgtttgttttgttttacccagaaataagataactccatctcgccccttccctttcatctgaaagaagatacctccctcccagtccacctcatttagaaaaccaaagtgtgggtagaaaccccaaatgtccaaaagcccttttctggtgggtgacccagtgcatccaacagaaacagccgctgcccgaacctctgtgtgaagctttacgcgcacacggacaaaatgcccaaactggagcccttgcaaaaacacggcttgtggcattggcatacttgcccttacaggtggagtatcttcgtcacacatctaaatgagaaatcagtgacaacaagtctttgaaatggtgctatggatttaccattccttattatcactaatcatctaaacaactcactggaaatccaattaacaattttacaacataagatagaatggagacctgaataattctgtgtaatataaatggtttataactgcttttgtacctagctaggctgctattattactataatgagtaaatcataaagccttcatcactcccacatttttcttacggtcggagcatcagaacaagcgtctagactccttgggaccgtgagttcctagagcttggctgggtctaggctgttctgtgcctccaaggactgtctggcaatgacttgtattggccaccaactgtagatgtatatatggtgcccttctgatgctaagact

SEQ ID NO: 85388 - DNA, 1050 bp, Homo sapiens
ggcacctactcccctcacccctacctccaccccataggggaattcaccatctgaaccggggtctcggagaacgtgacctctcaccttccagggaggtcgccgggaggtgcttggggtgggtggaagcgtgcagtggcctctgctcatattttctggaaacccctccgttccctgggtggttttagacgtgcgaaccgcttgttttgtttccaaaagcaaaagatgttccgttgcaggcgggcccggctgggcgctgggcactgggcgctggtcctgcaggcggctgctgccccctctcggcggcaggcggcgcgaaggctcctgacccgcgcgggcggtcgggctgcgggcgctgggccaggccgggccttccgctagtgcgcgggaccctccctctgcgcgcgcctccgtcgctcggcccagtgcgttcggcctcacgcccagcgctctcctcgcaggcagaaactccgctgagcagaacttgccgccagaatgctcctcctgttgctgagtatcatcgtcctccacgtcgcggtgctggtgctgctgttcgtctccacgatcgtcagcgtgagtgcctggcggggaggctccctgcgcggcccgcccttccccatctgggttcccagcccgtgctcctgctggttcaggactgtgttatttgcagacagttggaagtctcagacgtcccagggaagtttctggcaatctgcccccttccagttgctttgagaaaacgagagcagattcagtgataggaaccaagcgagcgctgggctgggttagctgcgcaggtctctatttaagccaagtaacttcagagccgatctagggtccccgaccttcatttgacaagattgtttaacttttttttttcttgatgcagcctcgttgaagaagaggagtatttatgatttttttttctccaaaccatagtcagatgggtgaattaatttataaaacacccttttaggacttgaaattggaaagttaaaatgggcttttctggaaaagagttcacaggtcccatgtcggctttatggcatgaac

SEQ ID NO: 85389 - DNA, 1034 bp, Homo sapiens
tttttagtagagatggggtttccccatgttggtcaggctggtcttgaactcctgacctcaggtgatctgcccgccttggcctctcaaagtgttggggtttacaggcatgagccaccgcacctggcaaaataatttttctatagatatcattgtttaaattaatttaattctcagcctattataacaacacaagcatgagcctaggatatcattaacatctgatgttgtggtagaaattgtctgtgttccgtgactgtggtccagaagcattacctcctaaggcaatttaacaaagaaaaagagtctaattcctttgaatggggaactctgcttaagcccgagctgggactcgcaggtctggctaacaccgagacttaaccagccatgactatatgaattccgccagagaagaagcagctggatccagtaatgaagccttggtcactgggggaggaggctgatcctgggggaggaggatgacctgccatgtctgatgctcagatttgtcccttggttcagctcttcctgagtgccatgtgcgtggcgatcaatgattcaaactctcaaacagctctttcactaaaaatcctggaaggccctggggtacacataaaaagtggggcgagatcttgacttcacaatgcatcaacaagaaggtcccaccgctctgggtatggacaagaaacagccaggtctggtagacccaatgggtggttggcaggaccagctttgctcatgaggaaccaagagacatccttggcactcccagaaatagacatggagcccttgctaaggcctgaagttcatcacgagcagccagggcatggagtggaatgcaggttattcctaatgtaacctcatcggtctgtccaagctggagaggcccggggtatctcaggttacactaaacatatttaacttacatctctcagagggacctggctttctctaatgttccacagcccgcagcctctttttatttatctcctctgcatatggaattgtctgcttggcaggagagctgtttcaattag

SEQ ID NO: 85390 - DNA, 1034 bp, Homo sapiens; identical to SEQ ID NO: 85389

SEQ ID NO: 85391 - DNA, 1594 bp, Homo sapiens
cactaaaactaatgaattcagtctaactgaaattgcgtcttcatcaatatctctcctttcccggcctctttcctctatccacccctgctgcccccaccacagcctctgatatcagctttctactctgtttcagtgagatcaacgtttttagattccacttataaatgagaccacacagcatttgtctttctgagtctggcttatttcacttagcataatgccttccaggttcattcatgttgttgaaaatgacgtaatttccttcttgttaaaggctagctagtattccgttgtgtatatgtaccacgttttctttatccattcatctgttgatggacacaggtagattccatatctcagctgctgtgaatagtgctgtaatgaacatcagaatgtggttatttcttcgatatatgaattttagttcctttggataaatacccagaagtggaattgctggatgatatggtggttctattttttcattttttcaggaacttttgtaccatttttcataatagctgtgctaacttacattcccaccaacagtgtaaaagggttcccttttctccatatcctcaccaacacagcaagtgtgaggtgataatctcactgtggttttaatttgcatttctctgatgattagagatgttaaatattatttcatacgcctgttggctgtttgtatctctttttttgagaaatgtcagttcaaatcctttgcccattttttaatgtttttttaccacaaaaatgtaagttggtgagctgaggatatgttaattagcttgactgaatctttctataatttatacatagataaaaacatcacattgtgccccataagtgtacacaattattatttatcaactaaaattaataaataaatcaatacacttaaaacatttaagaaaacactaaaaaacaaaaactaaccaaacaaacaaacaaaatacagcctcttagacttcactccagatctattaaacctacattccagggtgtggattatggaaataggtgtttgtaaatagctcccaagtaatttagaagtacctttcatggaatgacatttgggaacactgggctatcataatgaaaaagagagcaaggattgagaaacactggacaagagagtccaagatataagacccaggggaacctttaaaaatttgcacattttgggactgggtgacatgtggttggaaggaacgctggcttatggattttgcggagggaacggaaaatcttatgggtctatctagaaagctgtgtggatgtgattgtgaatctccacacacatttctatgtgcattacccaccgtatgcactcaaagcgtggaaaacatttcacagcctgctcgactcctcccgtctcagcaggctgtgtatctccagagttactttggggagtgtgaactcatactattagttgccaatgaaaaatggaattaactatgagactctcttgcaaaataaattacgtaatgtgttccaaagatgaaagaaattcctaagggattgcctgcccttctggataactatattgccacattctttctctcttgagttgagagttaagggttgactgggt

SEQ ID NO: 85392 - DNA, 1032 bp, Homo sapiens
ttgatgtatgcacaggggttgttggagatcaagggagccacaggccacttcagagttcctggaactgtgaaaagcagaaacaagaaaacaaagttccaagctcactgagatattcacaatgcttacattgaaaaataatgcttgtcagtctactaaaaatgcagtgtcatattatcatatgatcttaagttaattgcaggatttctaaaaattaataatttagtagtgtatggcaggaggcctgccagccctgtgtgccttggatgtggggcaactaaagcgcactccccacttttaagaagccattgacccagtggagtaaacaaacatgaacaaccaacaatatcacaatgaaataagtgtgagtggtatgtcaggagagccccaaagagggaagatcagaaaaggcctgacagaggtgaagctgggctgggaggaagggaagtgcctcttgattgaggctctgctctttctcctcttcccttcttcctgtgtctcctcactttccttccaccagatcctttccacttccccagccccgctattgtctggtcttagagggcaggaaaacgaggtctgctggtctgctttcagattttgtttaactatagaagtgctttggtttctttgtggtttctttgagcttttcagtgagaaagaagaaggcagtgggaatacattggaaataaacttatcagtgctttgtagcatcaccactgtggtgtgattgccccttgaggcgtgtgagaggaaaggtggaggaagatgaggctgacaaggttaagtggggcagagtgctctggcactactgggattgtagggaggggaaccgagggacatcatggcacaaatctggaacccgagcaaagcgagttttctgaaagataactccagcagtgatgtggagaattcttttaatggcaagagaccagatgctgtggttaccttgcagaagcaaggtggatccccaccctaaatttagtttggatgtcaagattgacgccatcacacataccaagagagcatgcacat

SEQ ID NO: 85393 - DNA, 1854 bp, Homo sapiens
ttttgtatttttagtagagacggggtttcactgtgttagccaggagggtctcgatctcctgacctcatgatccaccctcctcggcctcccaaagtgctgggattacaggtgtaagccacggcgcccagcctagcatgtctactttttaatgtgattgggccattgtatgtaaggtaatgctctgcttagaaatatagaatgttttcctaggcctaggccccaagtccatggtgtgtgaagtgaaataactttgatgttaaggagttctttttttgtcttttgcggaacactggagatgatcagacttcctgaatagagaaagcttatgtgctttgttacattggggaacaactgaagagattcttgactcaaccttttagagcttagtccatgttgcaacgaggagtgttggctttgtttttccacttaaaaactttatttataaaaaggaaaagtagttttcatattaagtttttatttcctttccagcagttggggctagaaagtatatgttggcactagaaacattgttaagatttgttctgtggtgtaggtatgcacattccataggtatgcacacggccatgtaatacctgtatatcccaagttaatgaaagtgttcatttacacagataatggagacctttgcattttgatccatagaacataggaggatgttcttagtctgtctcaaagctctatatgtttacatattatttctgtagattgttttcaggagaaagttttgcttctatggtaagagtgagcactttggcttatgtataagttagaaataattgttagtttttaatatgtacttcatggggaaatttcttagacgtatgcaagcaagtgaaaacaattagggccagtggtattaactactttataaaattttatttttgtttgtaagaagttatctacttaaggcccagttaatataagtggaatcatcatagtttaaggaatacccagagattgctgctattctatttattttacagaaaggatagctagattgaaagttcttcagtggaccttgagctaatagatcttttaccactaaaagagcattattctcatgtcataatgagaataataatttacatacttggcataataaatgcctaaaagacattttattttctgaatctatttttttcttgctataatggggatattgtaaattatgcatttgtattaatggtatttcttaaagcaatctatgtaactgtaaattaaaccaatctacaaactattgtaggcatctgtaaattctgttgtaggtattataaactttgttgaagtcttaatcagcagattatgttgtgaatatatttgtacattgttaaaatagtttttaagattatttgtttaattgaataagtgtcttattggagtgatagctttgaaggtgcaaaactttatatttgtataaaattctactatttacaaggcatttgacatgtgtaatctcatgtaaccctcatgataaatatgtaatactttagatgatataactgaacttcaggttaatgagtgactttcccaaggaaaacagattgcaggaatatctgtaggatataaaacatgatatattagtattttttagagaaaatatttgctctaaatgccctttcctttcttaaaaattaataatttgttaagagcttgtttattttacttagctgttctgtctggtgagaattgatactgcactaaagacattttaaaatacaatctgaaagatctaacctaaatctttagggttgagagtctaacaaaggatacattggtgtagttctttaggtaactgtgttatttgaactgcatcctaaaccaagtaacaatgaa

SEQ ID NO: 85394 - DNA, 1041 bp, Homo sapiens
acacttttcccttgcaggacttaactcagttggtaatggtacatttgtgcattggttgtctgcctctcttcacctctttccctgaggaaggagttggtatctgttagtcactgttgtattaccagcacatagtagatgctcagtaaatatttgttgagtaaataaagattaggaaagctatcaaactaatttgttaccttagtaagtaggaaaagagcttggtacacttgagagactgactgaaggccagtgtctataatcattttcagggatatgtagttgtaaaatatatgtagctatagtcaggatgtaaagtaggtcacagtaaccaaatagcaaggggtttagggaaaattagggaactggagaaagggcaaattgttcatgagggaaaagagaaggtgtaatgtttatgggtggacttgttgcttgctctgtcacctctacccctattagtcctgccattaccattttacttaatcgtttagccaggcctgatacatagtagtctttgctaactggatattatggaggtaaagctgaaggtttttgtttgtgaaatgttacactaagataggagcttgtgacagatctttaaataatgcttttaaaatgtgcctgtttatattaatcttcaccagaatgtcacaggtagactaatggttggcctacgttggtggaatcacattgatgaagatggaaagagccattgggtgtttgaatctagaaaggtaaagtgccttttttgttttaaataatgttatcagctaaattatttgtagactatatttaaatactggaagatgaagtattcagaattaaaaacactataccaaatcacttggcatgtcagcactaaaggagatggccttctagaatttaatgcatttttctgtctagttcagaccagaaacaagcaatatacgaacagaatcctttgagggaagacactgggtctgagttcatacagtgtgctaagctgcctgtcagggattgctgataaaagatctctgtgttgcctttgttagtgtctccataaat

SEQ ID NO: 85395 - DNA, 1053 bp, Homo sapiens
aaccctgaagccagtgtctgaggcaccccatcattttcaaggaacaggaataactggagaaacaagtctttcaaagtggttccaccttttgaggtaactgggagtgccttttcttggggtgactcagtcaggaaagtccccgattatgtacttaaggagtccttttctctccttttatggtagtctgcaaatagcagagagaagcccctcactctcgatgctccctgggtacctccctatggccccgctgctgccgactgcttcaacacattcttctgtccctgctgtttagatgccgtgttgtaggagcctgttgctagggtgtgttctgatgtgtcttccaccacctttaaacaagcagctcatgttccttttctctcccctggaatgggtcactgtgtaagcctttttcatagttcaagattccaggattgcccccaaataggccagatccacccccactccccactcccaggcatcacgtctcaggtatcaagggtgagaggtcactggggccccctcagctccactctcagtgacctggagcctgagcaaacatttcctgccttctgcagtgtcctggagaggcgagtcctctgcctgcagctgcttccctccccagggggcctggaattcccccagtcttcagtggagaatggagagacagtttatgctctctgagttctattagggcataatgactcgcagctttaaatgcagacagaagctattaagcagtgaaagcgattcttttttttttttctttttctttttgtatattgcccttgtggaagtaggaaagtgacagggtctttgaggtttgcaaaggcttaagtgcgccttggcacacctcttggcagaaggtgtttagtgcatcccaggaggcaagattgaagctggggccaaagcaggcaaacctgaggtttttgggcaggcacttgcctgggctgggagggctggctctgccttcgaatacagaacatgaatggaaagcagccatggtagcaggagtaataatgatgatgatgacgatgctggcacccactgacattt

SEQ ID NO: 85396 - DNA, 1356 bp, Homo sapiens
tcaagttagaacaaaaaacaaaggaaaagagaaatatttacaatataaaagcagaaattttaaaaagagaaaaataagacagctggaaaaatctgaataaggtcagtaggttatagtattatgccaatgtgaatgtcctgattttgaaaaaataataataaagcaaagtaaaatataaatttttgcaaaatctgggtgaagcatatacaagttctttgtgctatttgcaacacttcttatgtctaaaattatctcaaagtaaagctactatgcggaaaataatctaagatttaagaaataagagaattaagtgctgccgggcaccggggaggcaggttggtgtacgctgtgcgcggcggacgtcagaggcagcggggagcggagcggggccgccggggcctctccagggccgcagcggcagcagttgggcccccgccccggccggcggaccgaagaacgcaggaagggggccggggggacccgcccccggccggccgcagccatgaactccaacgtggagaaactgcccccgcacatcatccgcctggtgtacaaggaggtgacgacactgaccgcagacccacccgatggcatcaaggtctttcccaacgaggaggacctcaccgacctccaggtcaccatcgagggccctgaagggaccccatatgctggaggtctgttccgcatgaaactcctgctggggaaggacttccctgcctccccacccaagggctacttcctgaccaagatcttccacccgaacgtgggcgccaatggcgagatctgcgtcaacgtgctcaagagggactggacggctgagctgggcatccgacacgtactgctgaccatcaggtgcctgctgatccaccctaaccccgagtctgcactcaacgaggaggcgggccgcctgctcttggagaactccgaggagtatgcggctcgggcccgtctgctcacagagatccacgggggcgccggcgggcccagcggcagggccgaagccgggcgggccctggccagtggcactgcagcttcctccaccgaccctggggccccagggggcctgggaggggctgagggtcccatggccaagaagcatgctggcgagcgcgataagaagctggcggccaagaaaaagacggacaagaagcgggcgctgcggcggctgtagtgggctctcttcctccttccaccgtgaccccaacctctcctgtcccctccctccaactctgtctctaagttatttaaattatggctggggtcggggagggtacagggggcactgggacctggatttgtttttctaaataaagttggaaaagcaaaaaaaaaaaaataataataataataagagaa

SEQ ID NO: 85397 - DNA, 1007 bp, Homo sapiens
aggctggagtgaagtggcaaggtctctgctcactgcaagctctgcctcccgggttcacaccattctcctgcctcagcctccagagtaactgggactacaggcgcccaccaccatgcctggctaatgtttttgtatttttagtagagacggggtttcacagtgttagccaggatggtctcgatttcctgacctcgtgatctgcctcggcctcggcctcccaaagtgctgggattacaggcgtgagcccctgcacctggcctaaaagtactcattttttattcatcaataattagtaatctgactcgtttcaaaaatttgtttattattgacaacctctttgaagatccatttcacaaactcaacagagtgccacgattaagagctagggatcccccaaactacctcaagcatctaaaaaattgccattttttaaaggcttaaattgtagtagtaaagggggaaaaaacccataaatcatctaaaaaattgccatttttaaaggcttaaattgtgtgtgtgtacacacacacacacacacacacacacacacacacacatcattgacctttcttaagacttcagagggtggaacttccggatgtgaccacagagaggaagagaccgggaaggcggagcgcggccgccagcacccccgagccgccgccggacccccgccgccccgggccgccccccgccccccgcggtcccaggtctgtccgtctggggacggctcgattccccgcagagccgggggagggacgggggcgcccaggggagggggcctcgggcgccccgcccgcgcctgctgccccgtcccggcggtaatgcgctcccggccgtgacccccgctgggggcgggggccgggatccatgcgcggagcccccacccggcccggcgcctgcggctgacggcggcgggggttggggggcgcgcgtctggcctcctgcccaccccctggcgtcgacatcacgggccgtcgggggctgcgccctaccccgcggccagg

SEQ ID NO: 85398 - DNA, 1051 bp, Homo sapiens
gcctggaccggaggggccccgcgcgggcgcgaactttgggctcgggcgagtgggtggtgctccgcccagcccgagacgggcgggcgcgcgggccaatgggtgccgcctcttggccgcggggggccccgacccgtgggtcccggccaccagcgccccagccccgaggctcagaagcggcaggcggaggcgcggtccgggcgctatggccatgcccggcgggtctcacgcggctgcccctcgcccggcgcgccttcggtagggggcgcccggggcccagctggcccggccatgctgctggagacacaggacgcgctgtacgtggcgctggagctggtcatcgccgcgctttcggtggcgggcaacgtgctggtgtgcgccgcggtgggcacggcgaacactctgcagacgcccaccaactacttcctggtgtccctggctgcggccgacgtggccgtggggctcttcgccatcccctttgccatcaccatcagcctgggcttctgcactgacttctacggctgcctcttcctcgcctgcttcgtgctggtgctcacgcagagctccatcttcagccttctggccgtggcagtcgacagatacctggccatctgtgtcccgctcaggtgaggcgctcggcgtcgcccgaactcggggccccgtcggagctccgaaatgggtcgtcttctccaggccggggttcctccctcgggggccccagacgggccaggctgggggcgcgcggggcgcttggagggctggttcccagcctggccaccccgcaacgctagaccagtgcgcccgggcacccaagacatcccagatgcgcgtcgctctaaggagatctgcgtagggacagctctagggggtccggggagtgcggtccccggcgcccggggaggcgccgtggaaaccccggggaaagcgtcacccccggggaaagcgtcacccccgtgggcgggtggagcccggggcgcgggagttttggtgatcacatctccactcctgccacgaaggccgttcctaacactcgcccgcagcggcggtgcagcgg

SEQ ID NO: 85399 - DNA, 1044 bp, Homo sapiens
gctgataacactgtgaggtactccgttaacacagccaaactggagaggacttttatctttctagtccaatctctcttatttcacaaataagaaaagaaaacaaagaaaagaagaacaaagctaatacacaaaccaaagaccagaagctaaatcagtactcacaggcctgtgttccttgcactatgttatgctgcctcttttttttaaagcgattttatatttgcagcaccctgtacatagaggctcattcataggggtggcttcctactagagttcagaacaacaactggagtccaccccatctgaacttctcatagctgctggatccgacacatgtgcaaaactgtcatgccttctcttggataaggaaaagcagctaattaaatcagtggggcagctggtcactgccttctctgtaaacctccatcaccaccactcttccctgttggttcattagttcattcgaagagtttttcatttgtaccacacattctgctaggcactggaaacacaatcactgcccttgtggaacataagctaatgggaaacacagaaaataagtaaacatataaatacgaagttatgaattgcgacgggttccgctataccaaaatgaactggatgcactgagaagagaaacatggaggccttggatacaggatgtcaggaggcctttcaggcagaagctaaaggttgaggagtgagaaatttgaaaagtagaacataccaggccgagagaacaacatgtgctgctttcatgcaggaaaatgagcccaagatgaggcaggggccagttcataggcaccgggacccatggaagacttttaagcaggggatggtactgatttctgttgtataaaggtcacctggccagagtacggagactgaattttaggggagccagaagaaaagcagagagatcagctaggaaactatttcggtagttgactcgagacaacgtcggcttgggccagggtgacagcaaaaatgatggaagtggatatgcgctgtggaggcagaaccaacaggtcttgcagatcaaca

SEQ ID NO: 85400 - DNA, 1427 bp, Homo sapiens
agtttagcctaaagctgcctccttacatattttaaatttggcctaaaggtttctctgtacatcgtggactacaacaagtggacgtgtaaacagactatagcctgcactcatgccaatcctcgacttttggccaatcaaatgtggccaactgttcgaaccctgttcaaaaagggcaaatgctgagctataaccaatccagctgtttctgttcctcacttccattttctgtacgtcacttttcctttttctgtccatcactttcttttttctgtccataaattatcttccaccacgtgactgcactggagtctctgagcctgctttggctcagcaggctgcacaatttgtgaatcattctttgctcaattaagctcttttaaattgaattcagccgaagtttttcttttaacagtatcaactgtggtaaaattggctttgttatacagtgcatcattttgcttcaagtcacagtttccaaaaaccgatcgacttcctatacttcctacctacctaggtaccgctctttgagtctaggtcttctgtaaggcattgttctaggtcagtggtccccaacctttctggcaccagggaccagcttcatggaagacaatgtttccacagaccaggggcggggggtgatgcattagattctcataaggagcgcacagcgtagatcccctgcgtgcacagttcacaatagggttagctcctatgagaatcgaatgctgctgatctgacaggatgcagagctcaggcagtaatgctcgcctgcctgctcaccttctgctgtgtggcccagttcctaacaggccacggaccagtactagtctgcagcccaggggttgaggaaccctgttctaagtgcttgagatacatcagtgaacagaacacacagagatccctactaaattttaacagactcagatctagcaggggtaaacataataataaacagtatggagatatatgtggtatgaaacatgaaaaagcagagtaagaaagatcaggatgggcaggactgtagttttaaagaggctgacatcatggataaggtgacacttgaacaaaggcctgaggcagtaagcactggagtcagcaccacctgtggctccaggcaaggatctttctggcttcccacaaacaccacaagacatttgcctaggactatgggcagaatcatttctgaatacctctgcagactgctggagaacaagagtctagcagtgcccctgtctactgagaaatactagcagcagagttgataaaaattgggaaatagcaaatattaaattttttggtcatcttcaagccattagatcacaagttggagaccagcctgggcaacatggtgaaactccatctctacaaaaaagtacaaaacttagccgggcacggtggtgtatatctgtggttccagctatttcggg

SEQ ID NO: 85401 - DNA, 1063 bp, Homo sapiens
atctcctgacctagtggtctgcccgcctcgacctcccaaagtgctggaattacatgcatgagccactgcgcctgaccctatttagtcttaagtaactaactgaattactagtaatttttaaaaggttggaatggtgggccaaacagtaagatgaagtttcgacgagtaggtcagttcttttccttgggtccaggaaactattgagcagcaacagaagatcagagcagagatgtggctaaacagtagcaggtatgaaaagacttagaggttctggtttctgtaagcttcaaatatctgtgatgcttgtgccaaaacagcttaagtagactgtattgtttgagagttagtatcgagaacaagggaagaactggtttcactctgcacttctgatctttacaacagggcaattgaaggaacagactaaaaatcgtgtcctggaaggaaactacaggtactaccagggattttcagtctgaagaagaaaagacaaaatagatgacagaaggagtattagaagggagagcgatgagactcagttggacaccgagagagcaaagaagcaataatacgtgaagatgaaaatgaaatcaatttcagcataagaagacaagaacttatggtaaagctgcccacagccagaagaggatcctagaaggacaggaattccctgtctgcagcatttcataagcatgtaatattgttgcagggatactgcagaaggagttgaagcagtggacagacagatgatataggtgattttacagcctaagaaagccctgtgcttgtgcccccaaaacatgaggtgctagtgaatgaatgctgggggaaagcccagggcctaggtgttgcaatgttctgtggttggcagatgctttttgttttgttaaaaagtgcaacagataaaatttatcaatacttttctgctactcaggaaacttggactcagcataacttactttttttccagcagccttcagggtaaagtttagaaggtagatgcaacaagccaatgcagcaccctaagcttgtctttttaagttttatttttatttaacctaatata

SEQ ID NO: 85402 - DNA, 1166 bp, Homo sapiens
gtttgagccctgaagttccaggctgcagtgagctatgattgtgccactacactccagcctgggtgatgtgagaccttgtctctaaaaaaataaaagttctgaagaatatataccaagctctaccagtgttttttctttggggcaaggaaggaggtagaattgagggaacggccttaacctttactgtatttcttaaatttttaataagaattaaatattactggaaaaaaatgtactactttaaaaacaaaagggcaaagaataaaagatgtaaatagccgaatcctttgggaggaaaaagacaaatcttactagtgaccacaaaaatacaaattaacataacataacttttcatctagaaaattagtgaccacagaaaagaagttgacacaaatatggggaaaggggtcatttataacaggaatgtaaattgcagggtaacaggcaataggaactttaaaacatacatattctttgacccagaaattccacataaaagaacatatacccaggaagtaattatagatgtttgtaaagattttacagtgaggatattctcagtgtgatgaatatccagtattgtttatggtagcaataaaacatagaaacaatctaacaattcatggagtttgaggagaataaaaatgattcatctttacagtagaattatttgtaaccattaaaagtgatatggaaaaatttttaatgcattcaagagatgttcacagtaggtattaaagtggacagagcaggttaaaaaaattcttttttttttcagacagtgtctcactctgtcactgaggctggagtacagtggcgcgatctcaactcactgcagcctctgcctcccaggttccagtgattctcctgcctcagcctcctgagtagctgggactacaggtggcacacaccgaggcaggtggatgatgaggtcaggagttccgcctgccttggcctcccaaggtgctgggattacaggcatgagccaccacacctggccttaaaaaaattcttaaaggtaactgttgagattgattggtaaggttcccgacaaattttatttcattgttttttgtattttgttattttatagactaaatcttcatatgtttaatataaaaattcaaagcactcttttctatttcccccaataatttgttgtatat

SEQ ID NO: 85403 - DNA, 1083 bp, Homo sapiens
gtggattttggagtgtaactcaggctggtgcttgactctccccattgctggcctaggattcagttttcttaggtcttataaatcattttccactcttctatcagcttccaatgtatcatggctgttgtttctccctgtctttctcatcctttggaattcatacttttaaaaacaaatctggccgggcacggtggctcatgtctataatcccagcactttgggaggccaaggccagtggatcacttgaggtgaggagttcaagaccagcatggccagcatggtgaaaccccatctctactaaacataccaaaaaaaattagctgggcatggtagtgcatgcctgtagtcccagctacctgggaggctgaggcaagagaatggtttaaacccgggaggcggaggttgcagtgagctgagattgcaccattgcactccagcctgggtgacaggacaagactccgtctcaaaaaaagaaaaaggaaatccttttattatggttttagtggggtttggggaaggagtaaaaccagatgcataggttcagttgaccatcacacacggaagtgtttttagttacagtgttttttaagatttttatgtcaatggtcactgcttaatatgattaactttttttttccattctcattttacagttcctgatgaatatctgttatcgtaagtacatatactgttgtatttgatttttttttaaccattaatgttaaaatcctttcaacatcaactcttgatttttaaaaatactcttgaccgggcgcagtggctcacgcctataatcccagcactttgggaggccaaggtgagtggatcatgaagtcaggagatcaagaccatcctggccaacatggtgaaaccccatctctactgaaaatacaaaaaattagctggacgtggtggtgggcacctgtagtcccagctactcaggaggctaaggcaggagaatcacttgaacctgggaggtggaggttgcagtgagccaagatcatgccactgcacttcagcctggggacagagtgagactctgtctcaaaaataaataaataaataaataaataaataaataaa

SEQ ID NO: 85404 - DNA, 1045 bp, Homo sapiens
tgcctgtaatcccagcactttgggaggccaaggtgggcagatcatctgaagtcgggagttcgagaccagcctgatcaacatggagaaaccccgtctctactaaaaaaattagctgggcgtggtggtgcatgcctgtaatcccagctactctgtaggctgaggcaggagaattgcttgaacccgggaagtggaggttgcggtaagccgagattgcgtcattgtactccagcctgggcaacaagagcgaaactccgtctcaaaaaaaaaaaaaagagagacggggtcttactgtgttgcccaggctggcctcagactcctggtttcaagcaatcttcctgcctcagcttcccaagtaactgaaactacagagacataccatgtatttttaatttataactttttttcagaagattccctttttcttcttattatgccttctgcctgtttttgtgcctgttttatgattgcattaacttttttctgatgataaaatattagtaatagatgtttaaaattttctcctttctgcagtttttcctctaactttcttctgtttgttttattctatttcctttttcctttgttgtctggtaacccttggctgtctagtcatatttcagagtggaagactaaaaagtatattggaagctctgggtggtagaggggcttacggaatatgaacgtcactatagttgttctcagtaggctatttagttggggaaaccatttcagtgtcattcccacttctcttggggtatacctagggaagacttccagtctcctggctgaagtgtgaaggcctgattgcttgtgttatgggagccatgttagggaagagagcaggagatcctgttttcagtgtgacaccctgactttcactgtacctagtatttttccctagtccaaatagcctgtgtttgaacctctccagaaaataaacctagtctcttgccagaatgagggaaaggcagtcacctaaagctgtggagggaactggggtcccactacttctcaaacgtactcgaaaagagtcttattttcatat

SEQ ID NO: 85405 - DNA, 1109 bp, Homo sapiens
gtctcaaactcctgaccttgtgatacggacacctcagcctcccaaaatgctgggattacaggcgtgagccaccgtgcccagccagttttgggttttttccctccaacaagaaggttcacaagacacattgacagtcctgaagggggcataatcattgcccctgacacccatggttcagacacaggaaccaatgctgttgattcatgtttattttcagaagccctgttttctgtctttttcaaaatcttttttctattaatatatagttatgcacccttcctaacccccattcttcagtggtaatttttttagatcaagattccaagttttatttgtatgatgatatataaactagtcacagtggaaccatgtaggaagctatgattactttttgttttctttgtaacttttggatttccctggagttacaactatcttggttttgtttatgtgcttatttagttttttacatatttattcctactttaacctcacatcctttactagtgttctcaatctcccctcaagatgttcagatgaacgaagtatgttatcagtttcaccttcctgaagacatctctagagccttcggacttgcttaatatggactggctgatctctcggctgtttgctgagatctctcttaaccattattatctgggaattctctgtatctttgttgggtcctatgtttagtatatcctacagttttctttttctcagtttactacctcttttttttttttttgagacagtctgtcacccaggctgatgtgcaatagcatgatcaaagctcactgtagctttgacctcctaggctcagatgatcctcccacctcagcctcccaagtgagtatctgggactgcaggcacacaataccacagctggctagttttttgtattttttgtagagacaaggtctcactatgttgcctaggctggactcgaagtctggagctcaagaggtccacctgccttggcttcccaaagtgccaggattacaggcatgagccaccgcacccggcccatgtaaaattttttttttttttttcgagacaaggtcttgctctgtcacccaggctggagtgcagtggcacaatcataggtc

SEQ ID NO: 85406 - DNA, 1081 bp, Homo sapiens
acgtcactccgtctcgccctgccccggcggggggtcaggatcctccacaggtaggcgcagtcagctggagcgtcgcggcggtccgccggtcgtggagggcgtgtcctgcggcgcgatggccgtagtgttgccggcggttgtggaggagctcctgagcgagatggcggcggcggtgcaggagagcgcgcgaagtacgggaccgaggtcgtgtgtggctgcgccatgggcgcgggcggggcatccgggcaccgccgggccgggaggcaggaggcggggtgtccgggcctggccctgccttttttccatgtggttctctaaacctcttgttcgtaaaaagacaaaaaaacaaaacaacaaaaaagcgaaattggaacaagtaaaagtcaaatcgattcagcaaatatttacggtacagcgcagttgcaggagcccctccgtcggagcgagtaggccagtggggaccgaagtgctgagagctggccgggtcgctgggaggggtccccgcccgggggtggaagggacgggagcctacagtgagtgatagaaacgtggagttcttgattattttacacgaaattttgaattattaaacttctttttctcaaattctgatgttaacattaaagttaatgcttccatacactttaaaaagtaggcccagcgcagtggctcactcccgtaatcccagcactttgggaggccgaggcagttggattacctaaggtcaggagttcgagaccagcctggccaacatggtgaaacttcgtctctactaaaaatacaaaaaattagctgggcgtggtggcgggcgcctgtaattccagctactcaggaggctgaggcaggagaatcgcttgaacccgggaggcggaggttgccgtgagccgagatcgcgccattgcactccagcctgggcaacaagagcgaaattccatctcaaaaaaaaaaaaaaaagcattttaagagccacaaaacctaaatgcatatgcaatcgttggagtaaatctgggtattgtgaaagcaccattttttttctgaccagcagagggtactctttggctatgctcaccaaaatcacttg

SEQ ID NO: 85407 - DNA, 2693 bp, Homo sapiens
gttccaatttcgcttttttgttgttttgtttttttgtctttttacgaacaagaggtttagagaaccacatggaaaaaaggcagggccaggcccggacaccccgcctcctgcctcccggcccggcggtgcccggatgccccgcccgcgcccatggcgcagccacacacgacctcggtcccgtacttcgcgcgctctcctgcaccgccgccgccatctcgctcaggagctcctccacaaccgccggcaacactacggccatcgcgccgcaggacacgccctccacgaccggcggaccgccgcgacgctccagctgactgcgcctacctgtggaggatcctgaccccccgccggggcagggcgagacggagtgacgtcggggcgcgtcatcgcgcgtgcggacgcagggatgtcctgctcagtcgtcagggcccggccaatccggagggcgctcggcgcgtggtcgggggccaggagcgcgtctggcctgcagtgcgcagaggacgcggcgggagcatgttccggctcctgagctggagcctgggccgaggcttcctgcgggccgcggggcggcggtgccggggctgctccgcgcgcctgctcccggggctggcaggaggtccggggcccgaggtgcaggtgccgccatcccgagtcgcgccgcacggccggggcccaggcctgctgccgctgctggcaggtgaggggcgcgggccgggcggggccggccgggcggggacaggggcgcgggccgggcccgatgacctcagagccccttcccgcagcgctcgcctggttctcgaggcccgctgcggcagaggaggaggagcagcagggagccgacggggccgctgccgaggacggggcggacgaggccgaggcagagatcatccagctgctgaagcgagccaaggtgaggcggctccgggccctgcgcccggccgagcgcggtagcctttgtgagcggggtcttggcgttgctgcgcattactctctccgcctcgccgaagagtggatggaggctccgcgggtaaaattgccgagaatgaggtgggtcatccgagaggggattggaatccatccaggcttttccgactctaaggcctgcagtaaaacctctgcagtgtcaagtgcaaatggagatggcgccctaggcatcacgctttatgcaaacgaaatatcgggaacgttttgtagtggttttatcaattaaccagcctatctgaaatgacataatttcgcacgtatatagcggcctgaaaatggcaacttagtgttggttatgcggttcggttctcctcctgaattcttccttttctccacatccttttctatttttttttcctcctcttttcccaagttatctcatctcttccattgagctaaatacctactcgatgccaacaacgtccaaatttgtatttccattctgtagtgtgctactgacatgccatttgcactttaggaccatacctacctctcagatttaacatgcccaaaactaaacgatctttaatgcctcctcaacatacgctttcgccatctctttactaccatcagtttttcagcctaaaaacctcatagtcattcttaaaacttgtggtaccttaccattgccttccaatacacttacagtccagcaacaagtcctgttgccaacaaatgcaaaatatttctcaaatctttccccttttgtctatctcccttgctgtcaccctagtgcaaaccatcattgccaccaactatgctccagtagtctttcctggcctcctggcctcttgcaatctattctccatgcagaaaccaaagcgaccaaaaaaaaaaagagtaaattggattatgtcatctccttgtcagaaagctctgaatggctacccactgcatttatgataaaatacaaactccttgccttggcttgcaacaccccacatgatctaaaccagcatataccttgcccacccatttggcagtaatcctctggctcaccatcctcccttcacatctatttctttgcatttcttcctcaaaaccattctcttcagcttgtagggacttcactcattctctaccctctgtttgagtcattgttctccccaggtccttatttggttgactcattctcatccttactacctcagtttagctgtcacttccttggaaggcttccctaagtcctatttagaggagaccccttatcattcctttctgtcatctttatagctcttatcattagttgtaattaagcttacttgtcctatatggtcacctccagcctgcaagaaattagaaagaggatggaggacaagcagcttccttataaaatatgttgtaagatcacattccttctgcctgtgtctcttggccaaaacttcatcagatggccacacctagctgcaagggaggctgacctccctgtcatctctgtagacaatgctttgtacatagtaggaattcagtaaatgtctgatgaatgagttagcttccttctatcagttgggatgtacagttgcatacacttctgtctcttagcatatgcatctactatatgtttcattttctattattttgtcttcccttttcagttgagcattatgaaagatgagccagaagaggctgagttaattttgcatgacgctcttcgtctcgcctatcagactgataacaagaaggccatcacttacacttatgatttggta

SEQ ID NO: 85408 - DNA, 1011 bp, Homo sapiens
caacagcatgcttgccaaggaattcacagttggctcatcactctaaaagaataaagactgtggctttgaggccaccgtcagtctggaagttgatctgaaatatgccatgaaaaaatttacttgttatgagttcccttcattctctttctctcacaggaggacaatgcaataattgaaatttccctaaagctggccagtatctatgctgcgcagaacaggtaagtacagcagccagggagtaggactgtgggcaggaaactttgactctgggatgttacataatattcattgtctactggtcatctgggtctcccagaaattgggtgtcacactcaaagtgttccatccctcatctttgaaattgtcagtctttttccagtttgcccctactgtttccatcagcctgcctagtggggcacacaacatctctggctgccctgtgacaaaactaactaagttttctgttgctgcttgaagtgggaagggaagttagagttagaactttagtttaacttttcctagaagaggaaagagcagtgtgaaagctgctggggataatatattaatactctgaagaagccattttgctggtataaatagagttcaaagatgaagcatctaggttgtaagcagagaactcctctagagagttgtatttgggatgaatttagggagagacctaagactagcttcccttcaggttttagtggtgcagaagttggtgcgagaggtttggagtgacatggagcctgatgctgtagaaagggtgctcactgaggccaggccctggcactgttccctactgtcctactcaccagctcctttgttctcatcaggacctgcatagtctccttgcattttgattggacactagataggctagagcttcctggagcctttgacttcaagtcttttgaggagctttgagcttggcccatgccagggaacactgcagcttggtcaatctttcttggagttgtaacaaacatgcctagttcttgattgggtatg

SEQ ID NO: 85409 - DNA, 1050 bp, Homo sapiens
agaagaacagaagcatccccttccttccctacgctcaaaacttggcaagagggccctctctagccataacacagggcaagtggacactgcccagaagacgctcccagtcggagcaagaggtctacaaacaattcccctcataacctatatcagcctttcgaagcctcagatctggccatgtcttttctagtctcatgcttctcttaataaaacaaaatgaaaagtacagagtaccatgtaactcagaggctaattgttactagctttcacctctagaagactatgaatttgtcttactcaacaatgtttattaggctctgggcttcttcttaccctagggattcatacccaatcaagaactaggcatgtttgttacaactccaagaaagattgaccaagctgcagtgttccctggcatgggccaagctcaaagctcctcaaaagacttgaagtcaaaggctccaggaagctctagcctatctagtgtccaatcaaaatgcaaggagactatgcaggtcctgatgagaacaaaggagctggtgagtaggacagtagggaacagtgccagggcctggcctcagtgagcaccctttctacagcatcaggctccatgtcactccaaacctctcgcaccaacttctgcaccactaaaacctgaagggaagctagtcttaggtctctccctaaattcatcccaaatacaactctctagaggagttctctgcttacaacctagatgcttcatctttgaactctatttataccagcaaaatggcttcttcagagtattaatatattatccccagcagctttcacactgctctttcctcttctaggaaaagttaaactaaagttctaactctaacttcccttcccacttcaagcagcaacagaaaacttagttagttttgtcacagggcagccagagatgttgtgtgccccactaggcaggctgatggaaacagtaggggcaaactggaaaaagactgacaatttcaaagatgagggatggaacactttgagtgtgacacccaatttctgggagaccca

SEQ ID NO: 85410 - DNA, 1027 bp, Homo sapiens
gacttcatccattatactcagtgctaaatcctcggtgcctagaacagtgcctggcacataatagaggctcaataattactgaatgaaagaacaaaagacccaagaaagaccagcaaataaatccagtttcagtgcagtgtggaagtgctttgaggaaatccacaagaggtgtaaaaacaagtctagctgtcaagtaagtcacttctgaactatttacacctttgctgtctttcatttatagtgttgactatggtttcttaggagtgtaaagctatattttctgattcaaaaaataataccagtaaacactgaagaaagtttagaaaagcactaagtaaaaatcatctgtaatcatactattaagaaagagctactgttttatttattactacggcttttcgggttacattttaagaaataaatttgggatgatactgtatatcctactttgtaacctgagttttaacaatttagtaacatattatgaaaacactttttttttccaggcaaaggaattcttgttagatagagcaagctaatttctattataaatattatttttacattttactagttgcacagtatagaaaatgtgttacatgattcttcatcttattttttctagaaaaggaattcctacctattcagttttgcacaaagcaaatccattatcaaatttacgtgctttttattgacacaactatctctattctaggataacattacttaattacataaaattacattacttaattacataaaaccttgctctaggataattattttgttacctatgttgtagacatatatgtacttactgaggaaatgcccataaaaaattaagtgaaaactttggttacaaaacagtatagttagtatgtagactaaaaataggaatggaacaaaggctgaatgatagatatcaaaatacaggcagtgattctctttggttggtaggtttatagggaatttatattttatttgtgtttctctgagtattctataattttgtacaaatttatatttt

SEQ ID NO: 85411 - DNA, 1049 bp, Homo sapiens
gggagctcagctgtgcagggaaaggatgtgtgttatagtttatctaaggtttccaggtgtttgaagcagatgggtttcatctatagtgttacgttagattctgctttattccctccactaaaaccattaacactcatcagaaagtgctaatcagttgattaacaagagatttagtttagcagaaatttcaggatattcttggaatttgggcaacaaatatctctagtttcaaagacccttgtagactttcctatattgctattgatggtgagggggtaggggagtgttagaggcctatgctcaagttttcctaaattagagatgctcttttgctattgttacaaatgcatataattgctccagtactttatcaaattccctttagtctatatttatgtaaacctagtttgatatactgaaccattcttttattcctggaataaatgctgtttggtcatcttaatacatctgattattccatttggtaatattttgagtaaaaaattctatagtgaatcctgtttgcttcatggactgagtatagtagcgtatctttttctgtgactagaagttatttatgaaagagaatcatttatgtttgaagaagtaaatatgcctcagtttcaaatggtcctttaagggctctgtataaacgattccaatatatttctcagttgttattaaagtacttgatttttttcttgtctaacttttagcaatttttatattaatatttcaaagaaccatgtttaagtaaattactagcaaaggaactctttgggggaactttatgaaattttctcttggcagttgctaaaagttttcttacgttttctaaaagttcagtaatagtacatttatctttagaaaagtttgcttttcagaaagtgtttccatttttcttgtggtcagaatgtgctgtgaattttaaatgtatttttaagatattatagctaaattgtacctcactgttttctctaaaaagttttactgcttttgcttccactccactattcagtgataacaagggtaacaagtttccactagaa

SEQ ID NO: 85412 - DNA, 1020 bp, Homo sapiens
cctgttaccaatgagtgtgacatttcacacccttcaattttgaagcctttgttttatattcccccttctgtgttttcctcccttacctgtgggtgtctttctccttgtatttcttcagaaatctgcagagctttttcatacatcctttgtgcctgtgacggctgcttggagaacagaaggtagcgagcacaggcgtctaagcacatgcccaagaggaggtgggtattggctttctcttccactaaggagaaaagaggaatcagcaaatctacccaaatggttgttaccaggacccacaaatatgtcagcagaatgggacccacatgtcacttagggaacaatgtaggtgaattaacatccagttaaatgacctattccagactagctggaatcatggaacttcagcccacattttaagtagattaagagtccgcacatcaattaaaatgtggaatgttatttttagtttgaaacaaataatattcagcagaaacaaatgaaaataaacccaaagaagaatgagttaacaacaaaaagtcaaggccaatgaaaaacctgtatggtataagaaaaacaatgcaggaagaagacagagaacactcagaatcctgaagtgcaaagtcacaagctgaatttaaagaattcaacgtaaaggccgggcgcggtggctcacacctgtaatcacagcactttgggaggccgaggcgggtggatcacaaggtcaggagattgagaccatcctggctaacatggtgaaaccccgtctctactaaaaatacaaaaaaaaaaaaaaaattagccaggcgtggtggcgggtacctgtagtcccagctactcaggaggctgaggcaggggaatggcgtgaacccaggaggtggagcttgcagtgagccgagatcacaccactgcactccagcctgggcgacagagcaagactcagtctcaaaagaaaaaaaaagaaaaaaaagaatttaaggtaaaatttaaacaagctaatcattcagagaagaagaataaagc

SEQ ID NO: 85413 - DNA, 1888 bp, Homo sapiens
tgctggtgaagctttatgacaggaagtatcattttgtcagacatttcttagtgtcagcacactataccgatcattttcagaaacctgggatgacaggtgtattacacataccaccattcatgaaatcttgggctcatcaaagtcctcaggatatactggaaagggccgttaggaatcccacagcattcagtggagttccagcctgtcagatggggatgaaatgaggcagcaccagcttgtcgcttcataagcacacagtaaattagccctatatctgcattcatgctctctcttcagaatcaccttgaaaacatacactttcttcttactgtcccttctctctgggttattttagaacgatatacacaagcaaaagagatctaccaggaagcactgaagcaagcaaagctgaaaaaagatgaaatttctgtacaacacatcagggaagagttggctgagctgtcaaagaaaagtagacctttgacaaattctgtcaagctctaaatccatttttgtgtagggagaataatgtctagtaatgtggaagaatagctatcattcctgtctctgtggcacccgatcaatggcttaaatctgtcgtttttgatattcaggtttcctcaatttagccttagtgaaggaggggttgtacacactgccatttttgtattttaaaggaaaaatgactttcattcccaactgattatgacctttcaggatgtcgtcaagtgatgctttcagttgtaacacgtgacttggtgctgtccctgctggtctaagtagaactgtagattcatatgggctggtgttcctgtgcgctgtgggtgtggtgattcagcctggcatttctaccataagtttttggtctgctgatttgctgccctgtcttctcttactttactttatcaatacctggcaaactgaccagaattaccttcctcatggcaaagggggattatggtgaattgttgttcttatagtctgtttcatgaagcacaagtggaatttaatacataaaagagaaaaatatcttagtttgctaccagcatccagcatgaagttgtaaagtggggattaggcacgtgacagtatagcacccatttgaatttaaataaaagtgaaccatatttatctggttatataaaactaaaaatgggggtgtttatataaaactaaaaactaagaatgatgtaaccttttgtctgtgttatctgaacactctacttcctttgcagccttagtcacacaactgagtcatctcaagtactctttaaggacacacagcccaggctgttctgagtcagaataggcccctacaggtatattttaaaactcttcgtaattctaatgtgtactgctggtatagctgaactactgacctggatcttagtcctagcctttttgcttttgcaatttcagtatcttcatctctaaactagggaaacactgggattctttcttagctgtgggggaaggtatttggttagatgactttgaatgaatagactgctgtgctgaaagagctttatcacactgtctcaaagtatgtaaagatacataggtggatgctcttactgcagcagtcatgaatacatttttagccatttacctaaggaaaaagacagtttttctaggtaccatgaaggaagattgaccctgttggtatgcctgtgggggtgggatgtgagtgggactgataaactgatacttttggttcgtatgtacatactggaagaatcttcataataaatgagactacacaacaatattgtatgtatcccagtaatctttgcatttctcaaaaaaaaaaaaaaaaaaaaaaaaaaaactttctgaagaaaataaaaacaccagaaaccttgaggtccaaatcctcagggattagact

SEQ ID NO: 85414 - DNA, 4362 bp, Homo sapiens
acctcatttctcaatcttgtagactttaaaatctgcccagtgagattcagcagatgacttgcatcctgctgcccctcagtctgcagacgttcctgggtacttgtccattgtcgtctgagaactatactcttgcatttctcttgaagagttaagaaagctcttgctataacctgactctgtgattctccatggaaacatctgatatagacttaactaaaaatctagcctgggctttctcttctgggctcagcagccctcactcatatgctactcatgttactcttcttttttggacccgcactgactgctatatatcattggctaggatttaagtggtgagactttggccattccgtgttgtattcattttgctttcatggtgtcacatgaccattttacaataatcctattctactccatcctacaaaagttggattggatgaaataccagttatgttcatgacaatgaaaacctaatttttcttttgtcaggctcaactcagtttccttataaccctctgactatgcggatgctcagcagtactccaccaacaccgattgcatgtgctccctctgcggtgaaccaagcagctcctcaccaacagaacaggatctgggagcgagagcctgccccactgctctcagcacagtacgagaccctgtcggatagtgatgactgaactgcacaaagtgaggggaacagggtgcaggagagggatctctagtttttgtggtttaatttttagtagcaggtcaaaaacctgccctcctgtgacttattccctgagacttttcaggagagccagcccacagatgatgaagaaatgatggaagttcatttggagagtcaaatgggaaaaaaacaaacaaaaaactgcctttgatacaggcaattcagtggactataataatagtggagggttgagatgtagagtttttaaaaagtgaacagttgctgttcttacatctgtaaagaaaaccataatgtctttaaatcactcttctgtaaatagatgacctttttgcagtgtatatccccttgctgtagtatctggtgtacttatgttcaaatcagcgcatcaactttgggggtgatttttaaaaatctttttgtctatctatctttttaaccctagccttctaaacaacctcatacagcccagttacataatgttggctgtcacgggcattgtacttttatctgatattgtttcctctaaattcagctttccagtgatgtttaaaatcttgtgaaaatgtttagatttttaacacagaccctgtcataaaatctgtacattagggtcaaaaggtaaaagtaacaaattctgccatattgtaaatttccagtgcaggctttaatttttttttttcattagtagcactgaaaaaatattactgcatgggtatgttctagttcagtttataaagttttaaaggcttatttgaggcatacctcactgttacgcacactggtaatttaaccatgcccctaagtattccttttctcctgcatttgatgcagcccaacaaagcttttgttttgaaataaatttgactaccctgtccatagctacagtagattatttgtggtttaaggctcctggtgtctcaggttccaaaggaaaagcttacatatttttcccttagtttgaatatatgattggttgggttaaaagataatgatctgtgtagtatttagataagctttatgctgcatcctgaaaaactcatggtgaacacagtcctttttccccatcactatggaccagcatttactctcactttgctcccttgggacaagagtttactgttaaatgttttcatttcacagagtctcaaggtgcaaataatttaaaagactgaattctaaactaattatggtactagagggccagttttatctttcattaagaattgcttgctgaattttaaagtttttttcatacaatttatcatagcatttaagtatctttctataacatagatactaacagttttgggagaatgccactggtaactggaaaggggagaaacagatctctcaggatgataaaaattagcactttacagactttcaagtagacctaaacttttaaacaaaagtactcaaggcttttaaggaagcagctctgtgattagctactgaccaagaccctcctatcactggtgtctaatccctatgttacagatgaagacacaggtttagtactttgcccatatagttaaattagtgacagagataggccataagcccacatttgtcttcagtcaaagctttcactcctgtccctgttccactcctgtatacctgaggtccccaacataaactttagatcaggcttagtggtcagcattcctagtacttggaaagttggtattttttacaacagatatatgtaaacatataaaaatttcaaaatgaatgaaaaacagtgactaaatgttccacttcacagttttctgctgaatttttttttttcaggtactggtaatattttagagtttgttaataatttatattgccaacctaccataaaagagattatgatggtatttttctatgaccctgagggtcttaagctattctgagtcagaatacagttgacccttgaacaacacgggtttgaactgtgtgggtccacttatacatggattttcttccacctctgccacccaagatagcaagaccaaccccttctcatcctcagcctattcaacatgaagatgacaaggatgaagaccttcatgatgatccacttccacttaatgaatagtaaatatattttctcttccttataatcttaacaaacattttctcttctctagcttactttattgtaagaatacagtatataatacatatacaaaatatgtgtcaatcgactatgttatccgtaagacttctggtcagcagtaggccatgagtagttaagttttggaggagtcaaagttagatgtggatttttgactacttagggggtctatgcccctaactcctgcattatttgaaggtcaaccgtatagtttctgagaacatgtcagatcagagcctaacttcttactcttgcagttctacctgaggacccgaaggtgaggtgctgtgaaccactccctccatcctcatcataatgcatgtgcgtattactttatttaccatcacctggagaagaaatctcagaatgagagttaaaatccaataatagttcttggttcaaaataaatgaaaggacagaattctcacatggtttacctatggaggttcaccttatcatgatttaagtggtaagcacagagcagcactgacaacttactgtggttcactgcaaaccaaaacatgatattctttgtagacttagatttcagtgttctgacactatatccttacacgtgatttttttagcacccagaactaaattaaggtcttcctaatactcttcataaaagtattctgacagccagttttccactgcatgtttatgactgcaaatttcataatgcttttaattttggtacactgagtgattctattttaaaaatatttatgcccagaaaactccagtgaccattggacagttaaaaaattttaatgacacgattttaaccaattcacttttgaatttagaccaatcagtaaaggagatcagtcctccttttgcttcagtaccttattttacaacagtgtaaatgaactgtaatgaaaacacccacatgaagagactgtcctgaaaactcctagtgtttccaacaacgagaccatgagctgagtcactgtggatgatttaaaattaataaataaataaaacttggaatgaaaaacctttcagtaacccctgcagttgtgaaaaggtaaaaacattctcaatgcaaaaggtgagtggttgacattaatttttttaagaaatcaccatacgttaatactggtttctactgaaacagtctgatttatattgtatcttatctctctgagctagacttggtaaacggcattagctgcatggtaaataatatgagattagacagaaaataggaagaaatttacatctgcaacatacaaaactctagttttagtctaatccctgaggatttggacctcaaggtttctggtgtttttattttcttcagaaagttttttttttttttttttttttttttttgagaaatgcaaagattactgggatacatacaatattgttgtgtagtctcatttattatgaagattcttccagtatgtacatacgaaccaaaagtatcagtttatcagtcccactcacatcccacccccacaggcataccaacagggtcaatcttccttcatggtacctagaaaaactgtctttttccttaggtaaatggctaaaa

SEQ ID NO: 85415 - DNA, 1002 bp, Homo sapiens
aagcctttaaaactttataaactgaactagaacatacccatgcagtaatattttttcagtgctactaatgaaaaaaaaaaattaaagcctgcactggaaatttacaatatggcagaatttgttacttttaccttttgaccctaatgtacagattttatgacagggtctgtgttaaaaatctaaacattttcacaagattttaaacatcactggaaagctgaatttagaggaaacaatatcagataaaagtacaatgcccgtgacagccaacattatgtaactgggctgtatgaggttgtttagaaggctagggttaaaaagatagatagacaaaaagatttttaaaaatcacccccaaagttgatgcgctgatttgaacataagtacaccagatactacagcaaggggatatacactgcaaaaaggtcatctatttacagaagagtgatttaaagacattatggttttctttacagatgtaagaacagcaactgttcactttttaaaaactctacatctcaaccctccactattattatagtccactgaattgcctgtatcaaaggcagttttttgtttgtttttttcccatttgactctccaaatgaacttccatcatttcttcatcatctgtgggctggctctcctgaaaagtctcagggaataagtcacaggagggcaggtttttgacctgctactaaaaattaaaccacaaaaactagagatccctctcctgcaccctgttcccctcactttgtgcagttcagtcatcactatccgacagggtctcgtactgtgctgagagcagtggggcaggctctcgctcccagatcctgttctgttggtgaggagctgcttggttcaccgcagagggagcacatgcaatcggtgttggtggagtactgctgagcatccgcatagtcagagggttataaggaaactgagttgagcctgacaaaagaaaaattaggttttcattgtcatgaacataactggtatttc

SEQ ID NO: 85416 - DNA, 1067 bp, Homo sapiens
agggttaattggccgaatttgaatattgttgtgtgtcagggaataagggagccagaggaggagagagacagggaacaaccagtcagtggaggagtcaggacacacaccacctttatgggttgtttgccatcttatacaggtgctcctcatggtgcccccaaacaattacaatagtaatatcaaaggtcactgatcaccatcacagagataataatcatgaacaagtttgaaatattgtgagaattaccaaaatatgacacagacacaaaggagagcccatgctattagaaaaataatgctgatagacttgcttgacacagggttgccataaaccttcagttaaaaaaaaaagcacaataaaacgaggtatgcttgcatttaaaagaaagccaggatttcacttgtaacaatcaaaacaaaaaacaaggttcgtcctcctgccattaaaatgtggtaattaaggaactgaaatttctgggacatcaagccttctttactggcctcagagtacagaaactactaaagaaagaaggcagggtgacaaaaatcatacttcactaatgaccaacccccctttcccaactggaattaatacaccacacaaagaaataatatgtaaaggaaaaactgcagaacaaagcttcttcatgctactacaggacttgagcagaggctcagcaagttttggtagcccttttgatttttccagactgtgtagctgatgaactcagcagaatttcacagaagtgagacacctctgactgtgctctaaaagaaaacatcaaaaagagctcagaagagatcagagcccaggtcatcagcaaattttttcctcagccccagcaaaacaatttcacactgccccaaattcctatacaaccagtacaattgtaattgactaagtcaccagtcttataaccttaaaacacacacacttaaagccaataaaaattggaaggtaagaacagaaaggggaaggtcttaaagttaacatgtatagttttttttttaagacctctaatctctttaatctttttcttaaccatagtgagatagatcttttgctt

SEQ ID NO: 85417 - DNA, 1109 bp, Homo sapiens
gatcacttgagctcaggagtttgagaccagcctgggcaacatgatgaaaaccccgtctctacaaaaattacaaaaattagctgggtgtggtggctcacgctgtagtcccagttacttgtgggggccgaggtgggaagatcacttgagcccaggaggcagaggttgcagtgagctgcaattgcaccactgcactccagcccaggtgacaaagtgagaccctgtctcaaaaaaggaaaaaaaaaaagagtaggaaaaagggaagaaaaagaaacagttcttcagatcacatcatccggaatgctaatgcttgtatctgataagcattgtttcagacatgtctctggatagccagataagagttgctagaatgagattttatacattctgttaaaaacaagcacacaaaaaaaccataataatcctaagctttaatcttacaacctttttcttaatattttgagaatatctcttgtgcttttcaaaattacctgaagttcagcagtatttctgttttagtttagatttattttcctgttatcttcaagcaaaagatctatctcactatggttaagaaaaagattaaagagattagaggtcttaaaaaaaaaactatacatgttaactttaagaccttcccctttctgttcttaccttccaatttttattggctttaagtgtgtgtgttttaaggttataagactggtgacttagtcaattacaattgtactggttgtataggaatttggggcagtgtgaaattgttttgctggggctgaggaaaaaatttgctgatgacctgggctctgatctcttctgagctctttttgatgttttcttttagagcacagtcagaggtgtctcacttctgtgaaattctgctgagttcatcagctacacagtctggaaaaatcaaaagggctaccaaaacttgctgagcctctgctcaagtcctgtagtagcatgaagaagctttgttctgcagtttttcctttacatattatttctttgtgtggtgtattaattccagttgggaaaggggggttggtcattagtgaagtatgatttttgtcaccctgccttctttctttagtagtttctgtactctgagg

SEQ ID NO: 85418 - DNA, 2785 bp, Homo sapiens
gaagtactaacagaattgctttagagtctgggattttttttttattgcaagaactatttttcatggtggaaaggagaatttatattaaagaaccagtgggctcctgggcccaccatggcacatttagccttcactgggaagtagaactaaatgaaagccatcagcagccaacacagcttcacttcagctcattgtatctgaatccagtgttcccaaggacatcagtgactttatttttttgaaaactgtaatgctttaaaacttactttattggatctctttgcagcttttgacacagtgaaccactttcctttcctgaaatgctttcctctcttggctttctgatgccatgttctcctgtttcttctctacttctctggccacttctgtctccttagaagctcagtcttgctttgcctggcccttgattgttagttttccccagggctcacttcttagcccctttctcctcatgtcttataatttgagtcatctcatctactctggggagttgaatggtcgcttgtatgctgaaaactcccaaatttgtatctgtagcccagcttttcctactaagctctacttacatatctttgcagacctcattacttcttgactaacttactggctccttaaatatctaaaattgaatccatgttctacctccccatacaaaaagttcctcctccttccctaccacagttaacagttaccattactctggccattactatcctggtctctctgcctcctgatgggagtcagctcctcctgtcaagttggcctccacagtggctttcacatgtctaccttccattctgctaatttctgagcagttaccacattcttgctcaacagtaggtaccagtcacctggattgcttattaaatagttgaattatggagccccaggaatgtagaaaatttactaagctacccaggtgattctaatttgtatggccttagcaagtaccacactgcactgtaagctccattagcaaaggaagggttatcctgcaagtgcagtatctaaggattatcattggttaacttataggaaattgtcttcatctgaccatttttgatcaataaggtaatcttaacaattcagtcaaataactgctcaattaaatatctatcaaatgaatgactcctgttccacacacttcatgataacagggctctgctgtttcaggctcaatttatttaccttgtcacctggcccataagtaagaagactgtcatccatggccattgttttctagttcttctgaggacttttctcctctgtcagtttaaagcctccctaatcaaccaagtttgtttctaggcacatgcactcttccctcctctcatgtgctcagcccttgggtaagagtccatccttctgtggtctcattagaaatttcacattctggccgggcacggtggctcacacctgtaatcccagcactttgggaggccgaggcgggcatatcgaggtcaggagatcaagaccatcctggctaacacggtgaaatcccatctctactaaaaatgtaaaaaattagccaggcatagtggcgggcgcctgtagtcccagccactcggggggctgaggcaggagagtggcgtgaacctgggaggcagagcttgcagtgagccaagatcgcaccgctgcactccagcctgggcggcagagtgagactccgtcttaaaaataaattaattaataaattaattaatttcacattctggctgagcacagtggcccatgcctgtaatcccagcactttaggaggctgaggtgggtagatcacctgaggtcaggagttcgagaccagcctggccaaaatggtgaaactccgtctctactaaaaatacaaaaattagctgggcatggtggcggggggcctataatcccagctgctcgggaggctgaggcaggagaactgcttgaacccaggaggcagaggttgcagtgagcctagatcacgccattgcactccagcctgggtgacaagaataaaacaccaccatctcaaaggaaaaaaaaaaaaaaaaaagaactttcacattctttgggacacatcatttggctgcccacttgctttctgcattctttttttctctttaaaattcttagcgtcaagttgggaatgacggaaacaccaatttatgtcccaaattcttcccctttctggcacactgctttattataggcggttcccaggtcttatgctgttatcattcaaactgcagattacaagttgcacagtcagcaggaatgaaaaggatcaacagagtcttttgttttttccagcaaatatcctgagtttccagttagccatgcagggaaacacagtcattttcatagtattcactgtggtggctttcctctggatcacatcccaggctgcctcaaacctgttggtatttgtggcggtcatcccagagtccaaggtttcttcttcgtcagaaagccttggttcctgttctgagaacagcattttcctatttgtttttctccagcagtgcaaagttcctttcccttttctgggttacactgcttctttttttatttatttatttatttttggtaaacagatgggagagtctcactgtgttgcccaggctggcctcaaattcctatgctcaagcagtcctaccgcctcagcctgctgagtagctgggggactaggagtgcaccactgcacacagcttattgctcttcttttgatgttcctaccttacctatttcctgatttccctttaaaaatagcctgggcaacagagtgagaccctgt

SEQ ID NO: 85419 - DNA, 1847 bp, Homo sapiens
tacaaattagaatcacctgggtagcttagtaaattttctacattcctggggctccataattcaactatttaataagcaatccaggtgactggtacctactgttgagcaagaatgtggtaactgctcagaaattagcagaatggaaggtagacatgtgaaagccactgtggaggccaacttgacaggaggagctgactcccatcaggaggcagagagaccaggatagtaatggccagagtaatggtaactgttaactgtggtagggaaggaggaggaactttttgtatggggaggtagaacatggattcaattttagatatttaaggagccagtaagttagtcaagaagtaatgaggtctgcaaagatatgtaagtagagcttagtaggaaaagctgggctacagatacaaatttgggagttttcagcatacaagcgaccattcaactccccagagtagatgagatgactcaaattataagacatgaggagaaaggggctaagaagtgagccctggggaaaactaacaatcaagggccaggcaaagcaagactgagcttctaaggagacagaagtggccagagaagtagagaagaaacaggagaacatggcatcagaaagccaagagaggaaagcatttcaggaaaggaaagtggttcactgtgtcaaaagctgcaaagagatccaataaagtaagttttaaagcattacagttttcaaaaaaataaagtcactgatgtccttgggaacactggattcagatacaatgagctgaagtgaagctgtgttggctgctgatggctttcatttagttctacttcccagtgaaggctaaatgtgccatggtgggcccaggagcccactggttctttaatataaattctcctttccaccatgaaaaatagttcttgcaataaaaaaaaaatcccagactctaaagcaattctgttagtacttcccttaagacattaattatctcctgttaaagttaggtacttgtttcatcatacagcttcagagaatagagaccatgtggcatactaaaacacccaacatagtacgctactgaaaacattaggcaagagagaaaaaactataaagtaggcttcttcagttcaaacatggcatttccctgtcaaagagtttcccactttaagggtaagacaaagactacagaatgagcagaccacacaaaggtgaaatgatttgcatctcagttcctggctgctctgagatctctagctctccgtgctcacacagattcatctctgagtgccaagagaaattgaaaacaagagtatatttttgttggtgacacttgaggagctgtaaataatagattaaactgttgaagactggagacagaaaatagtaataacaatattttttgaaaaggtggccggatacagtggttcacgcctgtaatcccaacactttgggatgctgaggtgggtggatcacctgaggtcaggagttcgagaccagcctggccaacatggataaaccccgtctgtactaaaaatacaaaattagccggatatggtggctggtgcctgtaatcccagctactcgggaggctggcccaggagaaacacttgaacccgggaggcggaggttgcggtgagccgagatcgtgccactgcactccagcctgggccacagagtaagactccatctcaaaaaaaaaaaaaaaaaaaagaaagaaagaaaggctatctgtaagcctgataacaattctggtcagcattctaaaatatttgtcttttattttgttgccacctaaacagaacctagtaattaagagcgaggacaagttcagaaacagtggtgacactggctcatccttttt

SEQ ID NO: 85420 - DNA, 1015 bp, Homo sapiens
attggccagggccattgcaaacaagctggaccaaaaaggttcaacatttacaccagctgctttaacgagggcattgatcttatcctccgtgatggtcacctcattgtcatgcagagtgagggctgagtagatgcaggcgagctcggagacagaggacatggtatgggcaagtgtggggctggcgctgccggacgtggtggtagttgccggatgaagtgagggcctcatcccaacgtggccttagcttccttggaaggaccaagcactgtggtggcagctgaggaaaggacgatctgctttatttctgtgatctaccatctactagtctcctgatcctgtcaaaagaaaggaaagtgggggccttgcactgtgaactgcctggtggatgtttgtttagatctgtgtcactcttgtgattaataaatgttgaacaccaaggaaaaaaggatgagccagtgtcaccactgtttctgaacttgtcctcgctcttaattactaggttctgtttaggtggcaacaaaataaaagacaaatattttagaatgctgaccagaattgttatcaggcttacagatagcctttctttctttcttttttttttttttttttttgagatggagtcttactctgtggcccaggctggagtgcagtggcacgatctcggctcaccgcaacctccgcctcccgggttcaagtgtttctcctgggccagcctcccgagtagctgggattacaggcaccagccaccatatccggctaattttgtatttttagtacagacggggtttatccatgttggccaggctggtctcgaactcctgacctcaggtgatccacccacctcagcatcccaaagtgttgggattacaggcgtgaaccactgtatccggccaccttttcaaaaaatattgttattactattttctgtctccagtcttcaacagtttaatctattatttacagctcctcaagtgtcaccaacaaaaatatactcttgttttcaatttctcttggc

SEQ ID NO: 85421 - DNA, 1042 bp, Homo sapiens
agtgagatgtctcaagaaaaaaaaaaaaattttttttaaattgtctgggtgtggtggctcacgcctgtaatcccagcactttgcaaggccaagacgggttgatcacctgagatcaagagtttgaggccagcctgggcaagatggtgaaaccctgtctctactaaaaatataaacagctggtcatggtggcgtgcacctgtaatcccagctactcaggaggctgaagcatgagaatcatttgaacctgggaggcagaggttgcagtgagccaagattgtgccactgcattccagcctgggcaacaaagtgagtctctgtctcaaaaaataataaattaataaaataaaaatataaaatcagtaataatggtagcaaaaggttatctagcgtactatgtggtaggctctattctaagcatgtgtagatatagtctcatttaatcctcacaacaaccctacatattacaattatctccattttgtagatgaggaaacagactcaggtttaagagttggcacaggttacatatctagtaagtaatgaggctgcagttcaaacccaggcattccaactccagagtccatgttgctaatgatggaccaactggcttctaacagttccatactcatagcatcttaaccagattgttggtaaatattctagctaatgttctgtggcagaacctttttcctctgggttgatatgcaagtattaatcagaacctcctcgtgttctctcagcactcacttgtactaactatccccccagtcttatcagtcttttcctcagtccccttgatagagagactttgggtagaccatagtctggtttattctttttttttttttcttaagttcagctttgtattgaacacgttataagaaatttagtcaaaacaaccaaaagcccatgtcatcatcagactcctcagattcttctttgtttgcttccactttcttctcagctggagcagcagcagtggagtgggcaggatcccactggtgcagcaccagctgctggagcaggtccaccagcccctaca

SEQ ID NO: 85422 - DNA, 1403 bp, Homo sapiens
agtagagacagggtttcaccatcttgcccaggctggcctcaaactcttgatctcaggtgatcaacccgtcttggccttgcaaagtgctgggattacaggcgtgagccaccacacccagacaatttaaaaaaaatttttttttttttcttgagacatctcactctggcttaggctgcagtgcagtgatgcgatcgtagctcactgtagcctcaacttcccaggctcaagcaatcctcccacctcagcttcccatgtaaataggactacagggatgtataccaccgcacccagctaattttttatattttgtagagatggggtctccctgtgttgtccaggctaatctcgaactcctgggcccaatcaatcctcccgccttggcctcccaaagtgttgagattccaggccaatgttttatttttacacggttagtttatcagagttgcatatgaatagtgaatgaatcaactcaagtccacaaagacactggtagggtagaaaaagtagctggactggagcaagcacagacggacttggacttgtcctatacttggagctagttactgtaaaagtagagcgagggcaaggcatgaattaaaagtagcccaagaccttgacatcaacgttcatactaagtacttaacagtgcacttcataacttaacagtgtataggctgccaacaaaacagctaatagtcttaggctactttaaaaatgatgaatttagcatagatcatattatactactctattttgtattactcgaaacctagtgaaaggctaggttaaatgtttttggtggagaataactgagatggtaggggtactaagaatgaggacatgtgacccacagctgatgaaactggggacactgattgagaggactcctgaaagacacgtcttcaaatatctgaggagatgttatgtggggataggcccaaatggacaaaatgaagactgatgggtaggggagaaagaaaagtaaactatggagagttaatccagtcctacataaagaaaagtaacctagacacagcatttcttcaaagagaaacggcacagcttcagaaaggagcgaactcctgcctcctaattagaactcttcatgggctggcagacacttgagaaggaactctaggatcagatgtgttggacagatgtcctgtaaagagccttcaaactcaagcattacaggagaggcaacactggagatatcattattaatgcatgttttatttggggttcatgaaagaaatcccacttacccatatcagagtcacctccaccagaggagttcaacttacgaaaaatctcctgcttctttgatttaaccatgggtgatgtattttcaagcttggtgaagaatgaaggcaagtagcttatactccctggtgagcgggcat

SEQ ID NO: 85423 - DNA, 1007 bp, Homo sapiens
aatcctggggacattcctatcaatgataacaacagtcagagagtacttagaaaactactgcctcctcatcctgtgtttgtggttacagccctaagaaacagtatgtaatcataaaccacttagtacatcatttgaggaaaaatgatttagctctcaaaatgaaatcataaaattagaattagaatggagataatctagagcagaaattcttaggaaggaatgaagaagcagtaaatgaatattaataggaaaactcagaaacagcttatgatgctctctccttaacagcacaaacactgatatattaatggttaccacctaaactgggaacaattttactagaattagttttaagtacactaaaattaaaactaatagcacgcttgactacaaaatagcaagaactcatatctaagcaatcaacagctggactggaacacaacagtataggaataaaactgcctatttgttacaatcatttcaagcaacctaacaaatgagctgagtttaatataaagagtttcatattttactggcagcttcctatactaacacatttaaaaaaaaacaaggtttccctaaaaactccaggccaccaaggatctagctagagccagagatgagaacagagactataggttattgaaaacctaatccaatcatgtggattcagtcatcattcaaacacaagaacacgtactctatgccaggaaagacaattaaggtgataggaacaggaataagacatggtccctgtcctcaaaacactcataaacgtaggggaaagatgtaaatgtataattaaattgaacatcactccctctccaaaaatggattttcttcatttcattgaaaagtagcaatatctgtttagctccctaagaataaatgcaataaattaatagcaacactttgtaagaaaggcactagcaatttggagttagaaaggccttcgtttaaaactggcccttccccattagtatcagtacgaccatgagcaagtgaca

SEQ ID NO: 85424 - DNA, 1058 bp, Homo sapiens
gaagtcatgagttaacaagtttctgtttaggtaagtcccaggttagcctttgaaacacaatctaatatttcacatattacaatagtaggcctggaaaatccccagagaggagtcacgtctcttcggagccctacgagcccatctccccaccccaggttccggttgtgcatgagaaacaggacagcttgctgctcttgtctcagaggggcgcagagcctgcagagcagaggtaagtgtgcttcctagtgacagcaaccattcatggcgtgggtgctcatgctttaacatttccttcagttgttgccgtttttctcagaactttgggcttttatgtctggatggcattcttagaggatcatttgtctcttttcctactcatctaatgctagtgtattttagcaaaaagaaaatatttataatatcatatttaaataggttagaaaatatttgttcattattcttgaaattaaatctttctagattttttttttaatgtttttgtctaggggaaagggtcatccattgattcagccaacatttgaatgcttactgtataccaagcactgtggactctgaatagatttaatcttacctatttctaaccgtgaccccaaccctattaattattaaattatccccatttgactagatgcctttgagttggctcctttccagtcagtctccatacctccacctgagtgatttgtctaaaactcatgcagaatccagcacccagtcttttgcatggcatctgagttcctggcatgaccaggtgtatgctgcgcattcagcttcacttccctctgcatcatccctacactggaatctctgtccaaatcatgttgcttattgttccctgaattcctttctgtccatagtcgtgcagtttgcctagtgctgaaccctccactgatgcgctgaaagccagacatgtcacttgctcatggtcgtactgatactaatggggaagggccagttttaaacgaaggcctttctaactccaaattgctagtgcctttcttacaaagtgttgctattaatttattgcatttattctt

SEQ ID NO: 85425 - DNA, 1366 bp, Homo sapiens
gttttcatatttgcatttatcatttgcttctaattatctgtctagaccatagtaagaattaacttgttttgtttgttttagggtaatcttacatgagccttctttagaaacagcaatcgattcttttttattttttaatgatacagaaaattgtttatattaattttgtttgcttacttctgcatttatattttgttccactagtcctcagacttcttcagtgaataattttttttttctccaaaattaagataagttctttgtttggagctatgtaccacatcctttcaggtgttcttctgaattatatttaatctttgataatgagtgaaaagcacagacattcctggagtaagacatctatgtgttctctcctagatgatcctaccagacaatatgaaggaccattacatcactatcgaccacagcaggaatcaccatctccccaacaacagctgcccccttcttcacaggcagagggaatggggcaagtgcccaggacccatcggctgatcacacttgctgatcacatctgtgtaagtttttcattattcttattagttaatttttcttttttgatcatggggaaagcagatttcatatagaaaaagaaatttataataaagatatctagatttcttaatactattttttttttgcaagtactcaatgaattttaccacttccttcatttctcattcacagcaaattatcacacaagattttgctagaaatcaagtttcctcgcagactccccagcagcctcctacttctacattccagaactcaccttctgctttggtatctacacctgtgaggactaaaacatcaaaccgttacagcccagaatcccaggctcagtctgtccatcatcaaagaccaggttcaagggtctctccagaaaatcttgtggacaaatccaggggaaggtatgatctttattccaaattatatataaattgcccaacagtaaaacaaatggaatatatctacaggataaggaatttgtttctcacaactaaagttcatttgcctttattcccaggaaagtgtaaatgagctttcttccccctgcatattattcttagaatgtccactgtcttggcatttggtactatgactttttaatgtatattcaaaagatgattatattctatttgttggtttgtaaagacagttaagaagaatgtgtagtttggtagtggtttggggacacttcagtggtgcttccgaataatacctctcatatttatctgtctcaatggtttctactgggtcagcatcagtagaagtttaagaaggtgatattggccagacatagtggcttatacctgtaatgctagcactttgggaggctgaggtagga

SEQ ID NO: 85426 - DNA, 4114 bp, Homo sapiens
gggcaaactgtggttgaatgaaacagtctcaaaccctagtgtagcagtggtatattattttcattatgatgcttagaaagttgtgcctgattagattttggaaatcatatacacactagagtttgaggaaaaatcagaaagatgaacttatatgatttgtagtagtacttcttgttggtgctgttttatttatggaatcaagattgaaatttatcagagaaatggaaatgacagtaaatgatggctgatgttttgtttcaagttactgctgcggttttattgcatctttatttggacacttttagaacatatttctggaaaggccagaaagtagactatcaagtttcttatcttgtttttcttttttctatttaggtatgttaggaaataaacaatccataagcattgcttccttttgtctctggcttcctccttatgtctttgtttctttctctttttcacctctgcaggctcagaacagcctggccgacctggcagtcatggatatgttcgctccccttccccttcagtaagaactcaggagaccatgttgcaacagagacccagtgttttccaaggaaccaatggaaccagtgtaatcacacctttggatccaactgctcagctacgaatcatgtcagtctcttgtacatattttgacaaaaaatgtctcttgcatatacattttaaaatttgtgactgcaatagtctaagtatagtcatgcttttctgcccatgccatgaaggctttttttgttgttgttgcagtttgtccttccatctccccaccacattcccagcaaatggtcttcccttcacagagctgtgatttggttttatttacaggccactgcctgctgggggcccttcaataagccaaggcctgccagcctcccgttacaacactgctgcggatgccctggctgctcttgtggatgctgcagcttctgcaccccagatggatgtgtccaaaacaaaagagagtaagcatgaagctgccaggttagaagaaaatttgagaagcaggtcagcagcagttagtgaacagcagcagctagagcagaaaaccctggaggtggagaagagatctgttcagtgtttatacacttcttcagcctttccaagtggcaagccccagcctcattcttcagtagtttattctgaggctgggaaagataaagggcctcctccaaaatccagatatgaggaagagctaaggaccagagggaagactaccattactgcagctaacttcatagacgtgatcatcacccggcaaattgcctcggacaaggatgcgagggaacgtggctctcaaagttcagactcttctagtagctgtatgtatctcaatccgagtttcacaatgtgatgtctgagtaaagaattactttattctttaggtcaagtagaactatatggtatttaaaaatcctaacggttgatagtaaatgtaatgcaaaaatgtatcttctgctgtttttatgattatttaaatatcccagtttcctacatataagcctatcaatgtatcttccacaagaaaactgtatcattcatgtaattaaatttggaaagtagaaggcagaccttattaacatatttaggcatctgaaaggtaatggatatatcgccaggctctgggctactgaggtgtaatttctcaggaagcatttgctaggacatggttctatatttatgccaataccccaaagcctctaatatcctttttctaagacacaggtttttaaaagtgagactacctattattggtgattggtatttatattgcatcgtttttgcaagttggattttgttcaagtctggttagtcattaggatggctacactgcaaatgtgttagaattcacaggtctacattaaaatgctagaaaagttactttttaaattttcttttaaactattgccttaattctatgtggaattgcagaaagaacaagcaagtatttaaataagcatctgctaatactggaagtaatttaatcatatataatcatctttctgttatctccattgaataaattcagtagagttagacatcatgaaaaaaaaaatgatttctcatgctccagaatgcaatgtgcagttcttttgatctctgagtatccactagcttaattataatttgtttacgtcatatctaccgcattgctgaggcttttagagagagagttagtgttgtgtagacaaaagacttcttttaacctgagattaggaaaatctgcaatatagattttctgcatgcagaaaattgctagctgagaaagagatattctatagttgtatgaataggtcttttgaagggaagtcaccggcacactgggagatcccacctgggcttattgaatggtatagcacatgggttccttaatcattggattaaacatttcttttcagtttgcatcacaaaccaaaccttgctttaggaatttgattttcagaaggtgtgaaaatagaaagctcatcttttctgagtgtccatgtctctgtgtgtggttatcttttttatcactggtcagtgaattccatgatgtccaaaggctatgtacagttcttcagtgtggttttcagtttgactcttgagaaccttcctcatcctgaaggggaggtccattgccatagtcttgccccttaaggcttcaagaacaatgtgaacacggtttggattccgactttctactgagtgaatattggaagttgtaaccagatttaggatgttgaatacataaacagtgatgagtaacagtggatacaaaagtcacaaattactgtaaacttcttagaatatagtgatttattttagtttctcaatgatcatttctgttccatttatcaagtttccaatctcctaagtgtactagaacccaggtagctgcagtttccatgacctggtggggataggaaggactgttgagtaccagaggagcaggtggtggctagggagcagagttcattcccacctgctgcatctgtgtccagcccagggccatgcaccctttggagctctgacagtgctctcagattctgtagtgcagtttgtggatgtgaagagccctctgaattcagaggttcctgagcaggcggttacatctgctcccaactgtcagctctgaggctatggcaggactgtgaaaagctgcctgttagccccactgcatagccctctgtttacttgggaactgtgtcttagaggaggtccttttctgatgtgggtatcctccagagttggttgacatcctccctttctgggaatatacttcccttcagacattctctaccatttctggttattttcacaatgtaacacagtgctaaaaaattattaatgtttggagtaagttttgttagcaatactccatttatttgagaaaatcattatatagtgttatataatccatagctttaaaatcatcatggtggtgaatgaagcagctttatagcctcagcgtttttctaagaacagagtgtcccacagaattggaatcattggaatcagttattgagatctactccctcatttgtttattaacctcttccataaatgtttccctggtgatttcttttccagctcccaggaaaatatcataaatctgttctctgttctgcctcattccagtgtttattattgggctttaaaacatgtctttttttttttttttttttttttttttgagacggagtttcgctcttgttgcccagaatggagtgcaatgacacaatctcagctcaccacaacctccgcctcccgggttcaagcgattctccggcctcagcctcccgagtagctgggattacaggcatgagctaccacgccctactaattttgtattttttttagtagagacagggtttctccacgttggtcaggctggtctcaaacccctgacctcaggtgatccacctgcctcggccttccaaagtgctgggattacagccatgagccactgcacccagcctaaaacatgtcttaaagcccataaaacttcagaaaaccctcattaacctggaatacctttgaacatggtggatcagaattgaaaaaatgctacaggtgtgaagaacttagacttcagaaacttttcctgggattagtt

SEQ ID NO: 85427 - DNA, 1047 bp, Homo sapiens
tcttgacctcatcttgttctgtgtcctcactccaaccttctaacgtgctcactggcttcataacagctagctgttttatgttttagcacacacccctcttctcacagacaccaccacctcagccaggcttctcagcagttttctcccttctaaccattcatcagcttatatgaatatttatttttttaattaaattaaaaaatttttaagagacagcatcacactctgtcacccaggatggagtgcagtgacactccatagctcactgcagcctcaaactcctggcttcaagggatcatcctacttcatcctcctgagtagctaggactacaggtgcacaccacggctgctggctaattttttatatatatattttagagacagggtctcaccatgttgctgaggctggtcttgaattcctggcctcaagcaatcctcctgccttggcctcctgagtagctgggattataggcatgagccaccatgcccagcttatctgagtatttctatgggatatattcctagacgtggaattactagacaaaagagtatttaaaatttttatctccacagaggctacatccgggaccagccatacccactcttcagggttttaatccatctattccactcgtgtaaatgtccctctgatcatgtcacctgcctcctggacacaacatttcactgtaattcaagatgctacacaagctgctaactgtattttccattcctcctctaaactcaagctcaacaacacctttatatctaggagtttttgctagggctgttctttcagccttgaaagctctgtgaccaatatcttcaggcccaactgcagtccactgtttgcaccaaataaaaatgataccttcatcatgaaaacatttttccgtgtaaaattcacgtttccaccatctcagctgctacagcactttcacctgtttttcacttggggcctgtaataacgttgtcttagaatttttgtttccatcaaaactttttgtgcgcagcattaagcacagtgtacaagattactaagatgtgtcc

SEQ ID NO: 85428 - DNA, 1152 bp, Homo sapiens
cagttgatatttttatctttaagctgcaggtttatgttttacaggacacccaacacaccttgcagctgctgcaagtgctgagagggaacgggaacgggagcgggagaaggagcgggagcgggaacggattgctgcagcttcctccgacctctacctgcggccaggtcagtgaaaggcactgctcttccattctctggacacatcttagtaatcttgtacactgtgcttaatgctgcgcacaaaaagttttgatggaaacaaaaattctaagacaacgttattacaggccccaagtgaaaaacaggtgaaagtgctgtagcagctgagatggtggaaacgtgaattttacacggaaaaatgttttcatgatgaaggtatcatttttatttggtgcaaacagtggactgcagttgggcctgaagatattggtcacagagctttcaaggctgaaagaacagccctagcaaaaactcctagatataaaggtgttgttgagcttgagtttagaggaggaatggaaaatacagttagcagcttgtgtagcatcttgaattacagtgaaatgttgtgtccaggaggcaggtgacatgatcagagggacatttacacgagtggaatagatggattaaaaccctgaagagtgggtatggctggtcccggatgtagcctctgtggagataaaaattttaaatactcttttgtctagtaattccacgtctaggaatatatcccatagaaatactcagataagctgggcatggtggctcatgcctataatcccagctactcaggaggccaaggcaggaggattgcttgaggccaggaattcaagaccagcctcagcaacatggtgagaccctgtctctaaaatatatatataaaaaattagccagcagccgtggtgtgcacctgtagtcctagctactcaggaggatgaagtaggatgatcccttgaagccaggagtttgaggctgcagtgagctatggagtgtcactgcactccatcctgggtgacagagtgtgatgctgtctcttaaaaattttttaatttaattaaaaaaataaatattcatataagctgatgaatggttagaagggagaaaactgctgagaagcctggctgaggtggtggtgtctgtgagaagaggggtg

SEQ ID NO: 85429 - DNA, 1022 bp, Homo sapiens
aagaatttttcattatcagtatgctaaattttaaaagtaagaattctaagggttatttacatttcataataataggaaagtaactgtgggaaatattttatctaaaagctgtgtaaatgccatcaaattatttgtcatttgacaacactgtttcagaggagcccaatacctattacttagggcactgtctcccagattgtgtcagctgacagacttacctagcttctagatgaaggggaagcaaatattccagaaaacatgttacttgtttttctagggagaacatatacatataaaataggtcactcaagttctcagacaaaatggaatttttctggtttctatttagtgtttatcattgtcttcattttgtagtggtttcttttgcttgtttttgagcctgagttggattataatgttttgaggagagagacattatctactttttaccacgcctaccccttcctcgtatcttgtgtcttgtgtcattctctcacctaggggttgctaaaaactacagctttttggccaaatcctgttgccacttgtgtttgtaaataaagttttattaggatacagccacaccatttattctttttttccgtagctctttttgtgctacagtgacagagttgagtagctgtgacaaatgcgaaatggcccacaaagcctaaaatatatttaccatttggccctttatgtcaaaagtttgccaatctctgctccaaacacatggactaattaaatgcttatagtctataatcattttcaccccctggagagtaaagttactgattgccacaaagtattttcgtatacatttctgttggttgtactggatgatcagtactataaagacaattttattttcaaacacaactcttgcagatgccaggtaaaaatatgataaagttacatgtcaaagattgaaagtaaaactacttgagaagtttttagctactgttatccttccccttttccattacatcttagacattagaattgctattgctaatacatca

SEQ ID NO: 85430 - DNA, 1489 bp, Homo sapiens
ttgagggtggctgggtgcagcagctcatacccataatcccagcactttgggaggccaaggcgggcggatcatgaggtcaggagattgagcccatcctggccaacatggtgaaatcctgtctctactaaaaatacaaaaacaattagccgtgcatggtggcgcgctcctgtagtcccagctacttgggaggctgagacaggagaatcgcttgaacccaggaggtagagactgcagtgagccaagatcacgccactgcactccagcctgggtgacagcgagactctatctcaaaaaaaaaaaaaaaaaattgaggatgatggctaataagtgtttgaatatatatttattggtgggacaatctgaccatcctgaataacatcatttaagagaagagaggctggagtagggaggtgatagatattggtgaagtaatgagaaagtcattgtggaagaacagagcaaggaaaaaattagtgaaactagtgattaatgggtaggaaggaggttgcataacacaggcaatgagagaaaactgaagtttactacatgtggggacaaaagaatttagaatgttaaagtcatacaaaaaacaaaatgattcataatgagatttaaagaagagtattgaattttatttttaatgttacataaggtggtaaaatactggtgctatgatccaaaaggtgacagtactctccaaatctcagtttctactagttgtttacattttcatatgttgtttacattttcatattttgcaatattgaatgttaaatgttgagtggaaagagaagatccaaatacatgaatatagtctttatttgaatggttgagaaatggacaaatattatcatacttgcaagtttcttaagaacttgtggcattggctctttttttccagttacaatttcttctaacaagtctaccaatcatgaaaggaaatcgacactgacccctacccagagggaaagtatcccagcgaagtctccagtgcctggggtggaccctgtcgtgagccacagtccgtttgatccccatcacagaggcagcactgcaggcgaggtttatcggagccacctgcccacgcacttggatccagccatgccttttcacagggctttggatcctggtaaacacaaaatatagtgataatttatggcaaataaatatgccaccagtatgacttttcagctttctgttgttgtacaatatagtacaattgcaaatatcattaatgtacagctcagtgaattttcacaaactaaattctcccatgttaccagcacccagatcaagaaataaaatcttatcagcacccggtaaagaactaaaaagaatagtatatgaaaagctctcttatctgatggcacttggtgaaactagttgaaaaagtggattaatgtgaataattattttaaaatgacagaggcatacctaaacatgttaacttacagcataaatagacgttcatttaccagaactctgatct

SEQ ID NO: 85431 - DNA, 1235 bp, Homo sapiens
agattacaggtacctgccaccacgcctggctaattttgtatttttaggagagacagggtttctccatgttggtcaggctggtttcgaactcctgacctcaggtgatctgcccacctcagcctcccaaagcgctgggattacaggtgtgaaccaccatgcctggccttgtgtacttcttatcatcaggttttcttatgtctatagcatagagtgtggaatgtgggaaagtatgcagcttgggatcagtggggttgtgattgagatttgtaaacagaccaaaaaagatcaccacagtgaactgtaactgccatgggccagacatagacctgagatagaaaagtagccagatgactttgctacctgtaatgtttgtttctttccctttagggcacaccaataaagtttgacaacaactcaggtcaatctgccatcaaacacaatgtcaaatccttaatcacggggcctagcaaactatcccgtggaatgcctccgctggaaattgtgccagagaacataaaagtggtagaacggggaaaatatgaggatgtgaaagcaggcgagaccgtgcgttcccggcacacgtcagtggtaagctctggcccctccgttcttaggtccacactgcatgaagctcccaaagcacaactgagccctgggatttatgatgacaccagtgcacggaggacccctgtgagttatcaaaacaccatgtccagaggctcacccatgatgaacagaacttctgatggtatgttacttttgttgcttggtctgatactttttattgcatttaaaaaaaaaaaaaaaaacctttgtcaagtagtaaatatcaaattgtcagctttagagtatcccaagatctacaggtcttgcttgagtctaggagtatggaaggctactaatttaaaagtaggcataatttaagtaaaatacctgatatttaaatcaagtgcagattatgatgcagtccagaaatgctatagagtaagtatatttttagagtggattttcagccaattgcataaggttttctggaagtcagttttgacattgttccttcagcggcagtgtggtgtgaaagctgtaagtagcctctggaacaagactgcataagcttgaattaacattcttactgcatcaactcagatgagttacttagtttttttgtagcttagtttcctgatctgtaaaatcataatgtaacattaagacctacctctctggattgttatgaa

SEQ ID NO: 85432 - DNA, 3029 bp, Homo sapiens
tatttgcacctgactctgtgaccttggagtagtcatgagctatgctttctcttccaatacaaagaaataaagtatgtgcgtacatagtgccagatgctgcaaaatgcttgatagcattcttatttcactctcctttacacgtctggcatattatgattcacattttgtttttggggttaagaaattaataatgtacgttgtccatatcagaagtctacacacctctgtttctttccacatccaccaaatcactaagccatttctgtttattttcctaaagtgtctagaatccatccattactctgtattcaccactgtcaccatcatctttaacccagcagccacctaactcatctccctaccttcagtctcacccatattcaaagtgtgtaccacgtcactccttgactgatttttccatcaccctggatataactgcaaacccctaccttagctttataacccctccaggagctgctttcagcttagctcttcacatttttcccttctcacttttccctttagtcccctatatttacctcccccacactcttcctcccaactccactctacacattagccggttaccacgcttacgttcttttattgtacctttctctgtctcaccttggggtcttcgtgttcactgttcacactgcctgtactttttcctcctattacctttgacttgaacaactcttattcatccttcattctcagcttacacattgcttcctctgagcaggcttatctgaacctggaggtgttaggtttctctcctagcattttcatagcacattatacttctcctttcatagcttattttactacataatctgtacctacattattgtgtaagtttcatgcagaaagggacttaatttgttaatcttacctgcaagcctagcttatgcctagcacacagtaggcatcaataaacacatttgaatgagtgaaaatattttcatgaatcatctacacatattttattgtaggttaagacaagttttaatattattatttttataagatagactatgaaactaacctatttactgtacattgtataccatgtgctccgtctgagcaagtcttgtttgtgtattctgtagatattaagaatgcccgagaagggactaggagtccaagaacagctcatgaaatcagtttaaagagaagctatgaatcagtggaaggaaatataaagcaagggatgtcaatgagggagtctcctgtatcagcaccgttagagggtaaagcattgttttcagaatgttattttgatacatgttattttatatagtaattttgcattgttgaattaagttgtatgcaatttctgtcatttccacctgaaatgtatatttatattaagttgtatgcaatttctgtcatttccacctgaaatatatatttatattaagtttatatctgtatataaagtggcacataacaatggaaggaagtcaaatttaagcgtaattggtcatatcataggttactattagaatgttcatatttgaatgctcatacaatttgcagattattcctgtttcagctaagtgagttaaaaaaggtaaagtttattatgagaacttctttttgaattgtgagacagataaagtggtgtaatggataaagacatgaatttaaatttcagcttcacccttccctggtaaaattcctttgagcctgtttcttcctctgtaaattaagggatcgtacctaacactgtgtgagggttagaggcaggtgtctgaactggtgctgctcatgtgatatggcttcagtacatgatcagtatgattttgttttgttaatggcccactttgtttaaatcttaacctgcctcaaccaattttaagctagatgaaatactaaaagcagggtaagtcctgtgtaattttctaagagctgtatttttctctatgttaaaaacacacacttttactgtaaatatgtgtggttatttctaacccttgatttatatttatcagcaacaataatgtgaagcttcttaggaggttatttacaactctttcgtttcaatttgcatgtttcatttaatacattttccctatttttatggtatccatatttcccgttttccctttatcacaagtatatttcaaagctaagcaatggtttccaatcctgtatcttctttcctcttgataaagaagtgttgggattttagatttaactttgaaggtatctttccttttcaacctttcattagatgcctttggtggccattttttatttaggaaaatatttacaaaggactgtgtgatgtcatattaggtacttctggatagttcacaaacttaaattgacattccttccttcatagagcatttatcaaaaacatagactttaagaacagcattcagtatatgtgagttgacatatacattatgttgaataattgaattgctttcttgttttggaagggctgatatgccgagcattacccagggggagtcctcattctgacctcaaagaaaggactgtattgtctggctccataatgcagggtaaactttctgcttgttttgcatttttatttataactgcctccctggcaaaatagtttgacattaatttacagtgtatttctgcttttcaagttattttcccttttgaaatattaaagtcttggttattacttttctgcctctgagctacataatttattggaagatgatagttgcttaatcttttaatatagagatatctttattatgcaagaaccattctgtgactattatgaatgatgcattaatatcatatctcaagcaaccctaaagaaataatgattgataaatactgatttgaggatctactgtaaacagaaagttaattagaaactacaagatgtcaaggcattattttaaattatgttaaaatatatgtaacaaaatttaccattttaaccatttttaagtgcacagttccgtggcattgttgtgcaaccatcagcattattttaatgtttcctgaattctttttcaagggacaccaagagc

SEQ ID NO: 85433 - DNA, 1012 bp, Homo sapiens
gtgtttctgttttaacagcaagctaatactttaatatggacagaggaaagtaaatgggcctgtatgtattattctttctcttcactctggcatccaaactgtgggaagaaagagtatgaactgggccaaaggagactaaattttatctgtttaaaatctgtttgtgcacttgacatgagtacttctgaagtgggcgttaaggatttctagacacttactaatgagttcacttaatgactggacaagtaagtgtatgtctcttatcgcttttcttaagcatatggtatcagattgtgctctctagggttttagcagtcctcagagtatagtggtgaccctaaatgtgagtaaactcagtctaggcctctaactcctattttacaccaagctgctctctcttgcaaaatgctctacgtattagattctatgaacaattttccttgaaggaagggctcgctgcttaaaggaagggtaaaaagaatcatggtcattggcaactccagaggaggattgatgatggtgaaaatatagataacctgacctaaactgaatcagtgtcaaaacacagaggcatccaaaggcctaacaacctagtagtcagtttgatatttgaaagttatttttccctcatatcacaatttgagaaaaagttgtagtactctaaatttaaaactactttatcatcttatttttattagaaaatttatattaggttggtgcaaagatgtgatttcggactgtgaattttaaatcattataactaggctcaaacgcatctttatcaaaataggaaccattacaatcaacacatttttgccagtgagaaataatcttgttcattcctgtagcataaaaatacatgcttcgagattcaacaaactcttagaaagcattttctttctcttttcttttctcttttcttttcccttcctcccttcctcccttccttttcttttccctcccttctcccctccccctcccctcccccctctcctcccctcccctatcctct

SEQ ID NO: 85434 - DNA, 2130 bp, Homo sapiens
aaagaaaagaaaagaaaaaaaaaggttgattcttaaaatttttccaggttttcttgttgcttttatggaagagagtttttggaagtccttattactttgctgtatttgctgataccactctccatagcatttttagtcggaatgaatattaataatagtagcttacattttgattgcaacatataagtgctttatttatgtaatttattaatagtaaatactatttacatgtaatgtatggtaattttagaagacatatcctactccctttaaaattttttttatatttaagcaatctacgatgaagattttcttgctttacaaaaactattcttggttttgggtagaaggggtataattttttttttttttaaacagaaatgggaatgctgactttgtgaaattgaccttgtgaaaaaaacaatgtttgcttaatctttaaatttttttttgtttttttcttagggaacaccaggcacttatttgacttctcataatcaggcttcctacactcaagaaacacccaagccgtcagtgggatctatctctcttggactgccacggcaacaggaatctgccaaatcaggtcagtgagttaatacagtcataatgcatctacgtttgtagcatcacagccagtaatttagtactggattgtttcatgtttctctgcctttccacagctactttgccctacatcaagcaggaagaattttctccccgaagccaaaactcacaacctgagggtctgttggtcagggcccaacatgaaggtgtagtcagaggtaaaatatgctggttggcagaaatgttaaacttttgtccccaataaatttattaaagtaagttattaatatattttaatgatgggcttttttaactatagtctttaaattctaaatttgttttctttccatgtaaaagtcattttaaaaccttgaagttccatgtttcagcagttctttagtattattttggaagtacattttaataaaacaaacatgatgggttttgtgctgcttttttcttttcttcttagttgagtactctcccaagtaggggctgtttttttatgttttggggcaggggctgggggtgtaatttgctaatagctttgtttgtattcaggtaccgcaggagccatacaagaaggaagtataactcggggaactccaaccagcaaaatttcagtggagagcattccatccctacggggctctatcactcaggttagtcacgatcatctctgatatactcaacagaagctcaggaaaaaatgataaataattcttagcactttggctattttgtggcttaagttcatttttctgcattatgggactgggtctcataacctagatctgcaaactgtctccacagagacgttaatgtgatcattttgactacaagctatattatgaatactttggttcatttgaaaaggtcacttatttgcaaactggaaaaagaaatatgttctaattgatgcagctcttattgtcttcctggaaaagcttttaccatgtgtttagcctaaatagaaattgagaagaaaatcattacgaattatttgcttacttttgccctggtggagatgtagttgtagaatctcagtatgtgggctgccttgttagaatctaatgctaaaccaggaaatgtggatggtattaacaaaagcaccagaagccttccaattttgggctaaatacatcaccaattttgattaataaaatttctctcagttagttgttaattttaacttgatacttaagaagttcttagcctctttatgtatatgcataagagggaaaattctgttttgggaaatcattgtaaacagaaacctgtgccttgcattttctaaagtgttcactcattgtcacaagttttttatttgtctagttactatcctctaagacagttgttctcaaagtatgatccccacaccaggagcatcagaatcacctagaaaattgctacacatataaattttcagatcttaccccagatttactgaaacccaacccttgttggtggggactggcagtctgtgttttcccaagcccttagctgattcagctagggctttgctggccaagtgtggtttgtgcaccagagcattggcatcac

SEQ ID NO: 85435 - DNA, 1634 bp, Homo sapiens
ttttgagaggaagtactcaatgattttaaatttagatttacttggaaagataaatggatacaactaggtaatgaaaataataaataaaatgagtgggaatttattctgacagacattaaaatgctacaaatctaagtggtcagggttacaaatgagttttactttgtgcttttttgattttcaaaaattacagatgtttcattttaaaaagaaactatatattttaaagtcttaaatatgactgcatttctggcgtgccctttaaaatatttaaagtttctttatgctttatgtggagataacttacatgagaagtaattttcattagtattattgtagttatattcatggtttttataagcttatgtaggatttttgaattagtttgatctgcatcttttgaaaggcttcttccatttcttaattaaatatatttctgtgaatattagcaaggagtgagcttcaacaggctaattataagacttgtgaaatcctcgcaaagctaataacctccagtcaggccagatttgaattaacagaattgcttgataatctgatgtttgcctgttgtgattttattgcatgtgaaaacacttgattctccttaagaggaaagagaagttctttttcctttaaagggaaaactcgtaaatgaatttttgaggatacacaggagatttagatttacaggatttcttaacttctctgtgggtgaattttgcccccaggagttttagactttaatgttatagtcggatcagcccctggatggtgtgggcttggtcctttcacacttactattttaatttggggttcttcccttattttgataactttaactttcataggaaaatcagtcgcctatatgccttatgctgaggtcaaacgtgctctagaacaggaagcacagatgcacaatactgcagcaaggtcagcctcaccgtgtaggctttctccaagagaagtcagtaaagccgctccacagcctgatatgagtgcagcccgctatagtgtcccgccaggtaaatatcactcctctgtgcagtggctgctggccatccacccacagatgttccacgtgggtggtttaatctcgtgaatgaactgctcttccaggacgtgtccttgctgtttcagaatgactttgtttctctgcgttccatcatcagttgtatttagttgagttcactgggccactgggaaatttgtgttcacacatttatactgtgacattgactggctcttcctttaagaagagtacatgaatttgtaaaagtcttgagatctccccatccccaaaattcaagtgttctgtgagagccagaatcagtaagtgtttctcaatatgcaagatgcaaaaaggatgtataactggttgtcagtcatgtctgcgcattctctgaagtagtgttatcagctgtttttaagaagtaccctaagagtgattggcgagagagaaaaaatttttgaagactgatgtttgctatgctaagcagaagtttgaaataagcatcagcttgaaagctgtggtttgaaagggagttgaatatttcaaccccacaaatagtatttgtgacaaatatgtatacaggcttacgtgaatgagaaatttaaaatagaaatgttcattgttg

SEQ ID NO: 85436 - DNA, 1304 bp, Homo sapiens
atgacattcagatggtatcatttgttgaacttatgacaaggcataacatcattgttagtaatatctgggtcatttaaatatggatatcataattttaaagcctcaatatcttttattggtctgctttataaaatgagttgtatttgggaactgaagaaactgaaccaggctggagccccaaattctgagactccaaactgtgaattgtatttctctgtgttagtcacattactacacgtggtttagatctcagtggtatcctaatttttaatcataattcagtcatcttaaaatcaaattgtaattatacttttgattagtatgacattaagaattttacagtttggtcgaaggtgatgctctacaaagtagggcaagtttatccaaaggttgttttgttttagctaatctccctagtgtattcatcctgtaatttgtttaacaagtaccagaagtttttccttgagtctatcctgtagttcagtgtataggataacctttcaaataacatttaaatgtttgcagttaagatgcttgtgtctagaatgtttgacaaaaatggtttaaatttaacctcatagaacagtttatagaatgtgaagaatagtgatagtatggatttatgtataaagtatcaccaaatattggtacagtccacctgaattagggccatggtttttacttttcccttcatggtctcttttagcaagtaacaggcagcacttgttgtccaactatttggttgtatttatttctcttaatgtgaatggtataaataattactgtaggtatgcctgttttaagttgcttaaagcttttcccatctgtagaaaaggttgaaaaaaaaccttagagaattgttttcacttaccagtaacatttatacgagttgacctctgctttactgataacttttaagcctcttttctacagtgaaggaactcaaacttaagcatatggaggtagagttagaattgaacttctaatgcaaatttaacaaaattatccaattaaaataagagttaatgcttctatgtaactgaccctagtttgttgcatgtttattttgttgctgttgctgtttttcttttcctgctctgggtacatggtgatgtagatagctgtgtttagaaccatccaatttccatcatttaaaaaaaaaaaaaaaccactactatgaccagtggatttttttttttaaacatagttataaacttactggaaatggtaaaataatcagacattggatttttaatacattatcatattaaattatctaggaaagtgattttcttttggagttg

SEQ ID NO: 85437 - DNA, 1029 bp, Homo sapiens
ctaaaggatgccagtaacatttttaatagcattctagttaatgtgaattttctgatattcatctttgtgctggaagacattataaataaagttatgctttatgttccgttcatctgaattttcagagtgagaattgttgtcctgtccttgaagcaaatcaccttcaagtattacagtgtaatattcacattctctggtagatgagagacacaactttgtgtagtggatatttccaatcagacgctggctaagccttcaccttggcatttgccagctgtgtggccacaggcaagtcacttaacctttcatagctttagttttctcatctgtaaaatgaaaataatagtacacgtctaccttgctgtggttgtaaagttaaggaaggagcattcggtattgttatataacaggtggctctgcattattttatgtataatgtagcacgttattacatattaattagtgtattagtactgtatatacacagtagatactatggaggtacctgttttcattgttacatcactgtttttatttcaagtgatggatttgagttggtccgttgctgttttagttggtgtgtgatacacttttactttctttaaaaaaagaagaaaggggtggtttttatgttttaatacattcttctgacatggttagaagaattggcacatgtttctggttaagaatgagtttatagtctacttatatgctacgatatgcttagaatatcagaatactgaaatagtctgaatgattcagaagattctttacagtactttatttagctaaataagagctattagctttacaatgccatgcattccaagggttatttaatataaaataggaactgtggtacttaactgatcctgctgactctgcccagatcacaccaatattgagttattagttgcctaatacactgaacctcttatgttagagttttaaatttaaacttgttaatttttaaacataaatcttgtgctaggaaaaatgtgaaccagaatgataatatccaccaaggaa

SEQ ID NO: 85438 - DNA, 1620 bp, Homo sapiens
aattaaaaaaaaagtttaaattatttgaccaatttcttcttacttttttaatgtgaccatcagaaaaattaaaattacagatgtgattacattatatgtctattggatggagccgttctagagtgtcagttcagctgggtaaaaggaaattcacaggaagaggcttctagaaatacaccagaatgtcatcatttataggaatgttttttgtttagttttattgttcgttctttttcaatttcatataaattattttcagacattaaaatcctttatgcttttagtttcagaaggtcaagataatttgatctttcacttttatactctgtaggaaactttagccttctcaatggctgtaaatacttcaatgaggtcatcaaaggagtagaattcatcctaaacaactactttcaaacatggtttctatcaccacctgaaacatgttcattatcagatttttatgctgtatcattatctttaaggtgcagaaaatagttctgatacagaaagtgctccttctccttcaccagttgaagctgtcaagcccagcgaggacagtcctgaaaatgctacttctcgaggaaacacagaacctgcggttgagcttgagcccaccacggaaactgcacccagtacatctccctccttagcagttccaagtacaaaaccagctgaagatgaaagtgtggagacccaggtgaatgacagcatcagtgctgagacagcagagcagatggatgtagatcagcaggagcacagtgctgaagagggttctgtttgtgatcccccacccgctaccaaagctgactctgtggacgttgaagtgagggtgccagaaaaccatgcatctaaagttgaaggtgataataccaaagaaagagacttggatagagccagtgagaaggtggaacctagagatgaagatttggtggtagctcagcaaataaatgcccaaaggcccgagccccagtcagacaatgattccagtgccacgtgcagcgctgatgaggatgtggatggagagccagagaggcagaggtgaggctcgttccataagtcctccccgtgcttactctgctggttggtgactgaatcacagggtggtgctggctgcagacatgtctcctatgtaaatattggcacgttataggtagtctgtacaattttaatattgggctgatactgttctgtttaaataaccacaaactattgtatgatcattttaatgaaacagattatacatttctcctatatctgtcttgttacgtgtattctgtatgatagcataacagggaatttcaactaataaagttgtgaataaaccacagataactgttgtgcctgaggagggcagcagtgggatgtggtagaagaaggtggaggctagaggcattgaggcactcccgcttctctaaggcagtgcaacctcaaaacaaggcctaccagcccctacttattaggtagaagaaaatgctgaaaagagagacatgttcagtgttctgaaaatttttagaaagcataatttaaatgcaaagtaatgataattatgaccacttttttgtatcagttaacattttagattgttcatatttgtaatttaaaatatcaggtataatgcag

SEQ ID NO: 85439 - DNA, 2169 bp, Homo sapiens
ctctgaaagattgaaaggaaatgtaccggtatatttaggatctcttactgttggaataatgagcagtgatttttgtagtgttatgtcttccacatttcaaggtatatattatctttagaaaaaatatatatatattgtttttattagataacattatctggagtgagtaaaaagcatggaggtatgtgatttttggctttttatacatgtatagtggtgagtaattccaaaagtggatcagatgtaacttttgcttagtttgataaaggcgagccatctacacaaaatttggccagttagtgattatggagaggtatttatctgcactttaaccagaactattgtcaaacatgtgacctccttgtctggtgtgtgtgtgtgcttatcaatgttctacattatttcagaaatgaatttttttttctttttagttatttaaatcaaataatactctttcctcctttagacttcacgaaaacctcgtgaagagcgagatgtgtctcaatgtgaaagtgtcgcttccactgtttctgctcaggaggatgaagatattgaagcctccaatgaagaagaaaatccagaagacagcgaaggtatctcaaaattttaaatttagttgtgacatctgctatccagaataaataatttttagtcatttgactgtgtaggagttgcttcattgaggaaacagtgtgccagtgttttcatggtgtggagacttcaaacttgaacataatgtttttattcatttaatcaacaaatatttatgtagcacctaggatggtccagaagatcttggaaatggcagtcctgcttcagacatcaagtgccaacatcaataaaatacctgtgtgtctgtgtcattgccacatttatttgttcagttagtatagttggttacatttctctttattttattggcttaagtttgatttattttcatatttttacagagatttatatgtactgtagtaatgtttttacgtaaaaagaattagtgaccttagaagcaccgatagaaaaaaaaaacacgaaacttaaggaaatttaagaaataatgtatctttgtcatttaaactaatgacaagttcatggaaaggtaaatgttttcttgatttttttggtaagaaaaaagatacctaatttatttcagtttacactctgattaaagtttctgtggattttttttttttttttttggaaattgcttctgatgtggggatttttataatgcttttagtagctcttcatatattataaattaaacatgttcatgttttgtatatgcagataattttttccatcattttctttttgttttccttttcaattacttttgtttaaagtttgtgtaattagagttgtatctcttttctgtgtagggtctttattttgtataagctttaaaagttgtacatcctccaggtttagtaatattagattccatgttttttttttcctatagattattcttgttgtcttttaaacttaaacttgtattgaaatgggttttggctttgaacaacccctaaccttaaacttgtttttgggagggtttgtgaaaaatgaggtcatctttacaagagtagagagagtattagagaagtcccacccgagggtagggtaagagtgctgcaaacagggaaggtagtttggtgtgttaatggcacttctagagaggttgtcagagtctcttggttttaatgggtttgtttctggtggctagtattccctggggttataaatgttaatgaaggctggaggttaataaatctccttgggctgccataacaaaataccacagattgggtggctgcagcaactgaaattaattttctcacggttctggaggctgtacgtgcaaggtcaaggtgctggcacagttgctttctgatgagggctgtctttgtggcttgcagatggctaaccgccttgttactttgtccttacatggcctttcctttgggtgtgcgcactcctggtgtctcttcctcatatgaagacaactcctactggattagagcccactgttataatctcatttaaccttagtcatctccttaaaggcctcgtcttcaaatacagttacattggggggtagggctccaacagaagaattttggtggggaggggcacaatgcagtccataacaaagcccaagtctggtat

SEQ ID NO: 85440 - DNA, 2345 bp, Homo sapiens
aggagaggagaggtggagatcactaagtgggaagctactgggtgaggtaggacttctccagaaaaaaacaaaatgtttaaaaatgtagacatgaagagaacttttaacaacactgaaaaagatcataatattgaagtgttgacttgtttcttctagtttggtggaggagaggttactatcctatttctgcagtttctttcaccaaatgcttttacatagtcttttatgtcagataaagagatataattatatgattggtttgaataaaggatttaactttgtttttctctgcctgattgggttctctctttattttagtttctacagagcctgtggagacctctcgatggacagaagaagaaatggaagttgctaaaaaaggtaaattgtagtagttctggtttctcaggtttttgttttgttttttagggttattagtaatgagtgagatggaactaattgttttaattggaaaaaaaattctttcaaaaaggcaaagaggactcagaagtgactttaagagttcttttctggtagtatggtacccaataaagtacccccagtgtgccttgtttaagatgcccagttttaagggatttaagattctctctgcagttttattttgaatgtcatttaattaaagaacaagtaggtcgttttcacttttttagaataattatgactctatgctattgaaattgttctggaatgaatgttgatataaagtctatatttctattacctaaaagttgtatttaataggataggatggtaaatacttttgtcagtttgcatttggtaagtcatgtaattataaaccactagcagattgctctgtgattcagaggaaagagcatgaagtttgtaaccaggccagcgaaggtttgagtcctgtctctgccactttcatagctttgtggccttcctcttactctggcactttatggactttgtgcttttctgtcgttgcttgttaatgtactataatttgaaattgaactaaaatttctaataggataaataattggtaatattgagaaagattagctaatttttggtggttaaatatttaccttgcagttgtaaagataaattattgtaaatagcttgacatttgagtgacacatttcatatttttttgtatcaccccttatatatgtatacaaatgcatagatacatattctttgcacgtatgtgtgtgtttatgtgtgtgcatatatatattgattagagaagtgttaaattgcataggtttctgtaatgcattgtattaccataggatttttttaaattggctagtatttttctgatggcattgcttgattgtgaattgactgaggacaaatatggattataagtggagtcatatatatgtctttaaattgtgtttatcatttatatatgattatcttattggcttgatatattgtgtccagagatctagatgtacctaatcatttagtttgcaagtatttgagctattactaatgtgtctaatgttgtcctagccctgtgagagatacataggaaggacaaggtttagcccttctgttaatgagcatgttttaaatttgagggggaaaaatatagaactgtaaatgagttttgtttcaataagtatttttataagtatcaaagtatatatgataagtaattgaaagcacacttctagtgtcaatggttgtgaatacagtgattaagttaatttattatttctcttgtttgcttgatcaggtgactgttcaattaacatttggtctgtttttaaaatgcaggtctagtagaacatggtcgtaactgggcagcaattgctaaaatggtgggaacgaaaagtgaagctcaatgtaaaaacttctattttaactataaaaggcgacacaatcttgacaacctcttacagcagcataaacagaaagtgagtatattggggtggtgactctttacttactgttttttacttagagtgttgttgttgttgtttgagatggagtctcactctatcacccaggctagagtgcagcagtgcaatcttggctcactgcaaactcttcctcccggattcaagcaatttcctgcctcagcctcccgagtagctgggactacaggcgcccgccaccatgcctggctaatttttgtagttttagtagagacagtgtttcaccatgttggccaggctggtctcgaactccagacctcaggtgatccacctgtctcagcctcccaaagtgctgggattacaggtgtgagccactgcatctagccttgatgttttttttttttttttttttctgagctccagagattggttttaagagaaacctttttgtatcttatatttttattt

SEQ ID NO: 85441 - DNA, 1030 bp, Homo sapiens
tttataaaacaatattgtagattattactgtaaaacaatattgtggattattactatagaaaaggcatctatcatgaagatcatctattttagcttcttcatttcatacatgaggcaacctagactaaaggcaaataaaaccccagaattcctgccttttggtgtaggctgttgtctctggattgcaggtctagggcttttctgctgtcatttgttactttctcatggagtagttctggtttctaaatcagttggtttgaaatgtgtttaaattttaagtccattagtatgtaaaataggtcttataaaatatcttaattttagctggtcaaaacttttaaaaactatggtatggcagaattgttgataattttttttttttgagtgagagattaggtagttttattcaatttctatttagataatattcaaaactaaaaccttcttcgatgtatgtatactttggaatcacacaagttttcatttgcttttgtgtccagagaaaataccaaggaaaaggacaagatagatggtacagcagaagaaactgaggaaagagagcaagccacaccccgggggcgaaagactgccaacagtcagggccgccgtaagggccggatcaccaggtccatgacaaacgaagctgcagctgccagtgctgcagccgcagcggctactgaagagcccccaccacctctgccaccgccaccagaacccagtgagtggaaacaattggcataaacaggccataattttgttcgggattctgtttcactgctaggatagggtagaaaggacttttaatattgacaacctagaaataatcctgaagtgtggtctttaaattttttaaactttaatgtcaaagttttttgaaaaagaacatcacccagtcttgccaccccaatatagctgttttttatttagttgttatgctagtgtgccataaatattttctaatttctaataattaccatttttattttttaatggctgtgtaatattgaggcatgacttctttaaccattct

SEQ ID NO: 85442 - DNA, 1096 bp, Homo sapiens
catattccattaagtagactttcgctcaaaagtataaatgcatgaagatgtttcttatagcattatagatagtgatgaaaaaattggaaacatattaagtatctaaaacatgataaattatgtatgggttatcaaattttaaggtagaattggaatgcttgagtgacagattaaatgtggaggttgccaaaaaagggaaccaaccccagatttccgagtagaatcttaacattttcactttctcgtgggtccaaatgctatgagcatttgtgtctgcgtgtaggacccttcaagcagtacatatagaatacattaaaaacctctagactggtttttaacacacgatcaccagttacattgtaaatgactaacaatcatttaaaatttttttagatagacataatttatcacactataaggagctatttctgtttgcctttgaattttacaaatgatggttcattctagcagcaaattgctcgaccctcgcaagaagaaaaagtagaagaaaaagaagaggataaagcagaaaaaacagaaaaaaaagaagaagaaaagaaagatgaagaggaaaaagatgaaaaagaagactccaagtgagttaaataattagttatataataagttaaatgtttatttttattttatttttatttttgtagatatagggagtacagttgtcacatggatatattgcatagtagtgaagtctgtgcttttagtgtaccatcgcccaaatagtgtacattatacccattatacctcacccaccccctcgcaccctctcacctgtttgaatctctagtgtctcttattccactctctatatccatgtgtccacattatttagctcccacttataagtgagaacatgtgatagttgaccttctgtttctgagttatttcacttaagatgatagccgttagtttgatccatgttgctgcaaaagtatagtttttttttttttttttttttgtgatggcgtctcgctctgttgcccaggctggagtgcagtggcatgatctcggctcactgcaagctccacttcccaggttcacgccattctcctgcctcagcctcccgagtagctgggcc

SEQ ID NO: 85443 - DNA, 1017 bp, Homo sapiens
tgcactccagcctgggcgacagaaggagatccagtcttaaaaaaaaaaaaaaaaaattccaggtgcggtggcttatgcctaaagtcccagcactttgggaggctgaggtgggcaaatcacttgagcctaggaatttgagaccagcctgggcaacatggtgaaacctcatctctacaaaaaatacaaaaaaaaaattagccaggtgtggtgatgtgtgctggtagtccaagctactcaggaggctgaggtgggaggatcgcttgagcctgggaggcataggttgcagtgagccaagattgcgccgctgtactccagcctgggtgacatagtaagaccctgtctcacaatgaaaataaaaataaaaataaaaagaaatacacttaacttttacttttttctttgaattttcattttgttttatatgtgttctagaatattcattcatagtgaatagcttgttatttgacagaaatgtttcatgttatattaactccctgacagaattaaacttgttttattggctctcaagtattgagtttaaagaaggggagaaaaggaaaaacctggacaacgagccattgcgaatatttgtgtctgtgtagggaacttttagaagggtttcttttgaaggggtggacctcttttgctccagccaccctgtggagttgagggatgtaacttgtaaccttcatcctagaccatgtggattgactggcacttctctttacagatttgcctgaaacaaaagtagttccaagcatctcttgtttaaattagaggtaattccttactctcttgaatgtcagtggcagttgttatgataggtctttatgcatattgcacaaaggtgaggtcctccagttgctgctgactgcacttcctctccgctcaccactgcctggtcagtatacagaggggtgagaggttctgctggacaggtaccaaacacttctctagactctaatgcagcaactctgtccatttctttggatcatttccacactatgcagagccagg

SEQ ID NO: 85444 - DNA, 1978 bp, Homo sapiens
gcgtttaatagtaaagtgagtttaatttaaaatcgctgacttaaattttgatgcctgtttgcttatttttctatttattgttctgtaatatgacggtaaaagttgttctataaaatgatgttgagactttaaaaaatgagactaatatgataattaaatgctccataaggtcaccacttcagtgaacttgacattactttttatcttccaggtctaaaattttattatgttaagtatcagcttagtttaagaaaagaattcttctcaaaggagtagattatttaaaaaacgatatggatattctctgcctctgtaattcatacagtgaatatttattagatatatgagtaattattgtatgttagatgctgtggtatacactgctattgttattaaactgcatacatggttttttagtgcacattaagagcattggtccatggccctccttaaatttctagtttatgttttattctaagtaaattgtattttttttccagaataatgagaaacaaatgcggcagctctctgtgattccacctatgatgtttgatgcagaacaaagacgagtcaagttcattaacatgaatgggcttatggaggaccctatgaaagtgtataaagataggcagtttatgaatgtttggactgaccatgaaaaggagatctttaaggacaagtaatttatattttaaattattctctaatagacatctacataagttagtaaaaagtatttggcatttacttgtaaattgaactgttttcacaaaaacttggtcccattttggtgtttgaatcaatactgtgaaaagtagagaatattgatcttcctgtaagtttataggtgggaaaagaggtaacagataagaactggggttatggagtcatgttaagagtggttcccaaacttgggtgctggctgaacttttggggagcttttataaagtacagatttctatgtattaccgtagactaatcatttcctggtgtatggtgcccagaaatctgtgccctttaaaagtctccagtgattctacaattgttcctcagattggcagttagaaagccctatacatagtatttctcttctgttttttttgagacggagtctcgctctgtcgcttaagctggagtccagtgttgtgatctcggctcactgcaacctctgcctcctgggttcaagcgattctcctgcctcagcttcctgagtaggtgggactgcaggcatgtgccaccatccccagctaatttttgtatttttagtagagatggggttctgccatattggtcaggctggtcttgaactcctgacctcaagtgatccaccttcttcggcctcccaaagtgctgggattacaggcatgagccaccacgcccagcctatacatagtctttcttttcccaagtttttttttttttagttgttgaaatatttgtacgcaagtgtgtttttgttttcgttttcactcaggtttatccagcatccaaaaaactttggactaattgcatcatacttggagaggaaggtaagacatggtttgcattgggagtgtttgtaggtttgtgatggttgttactttgaaattcttgtgctctgacacatataagtagttaactagaaccgattttaaaaagactgcgaagagtctcatgtgattaatgtaatgataattacaattattagagaaatcgtaacacagaacacagaactaaatggttaatgaaagatgacctgatgtttatttccctaaaacacatagattacaatgcttttggagcctcattaaatttctaattaaaatatcagtctcgtgctcgcttcagcagcacataatactaaaattggaacgatgcagagattagcatggcctctgcgcaaggatgacaagcaaatttgtgaatcattccatatttaatataaagttgattttaatgtttttgaacaaaatatttaaagacattttaaaaatttgca

SEQ ID NO: 85445 - DNA, 1052 bp, Homo sapiens
agatactgtgttgtagcaagtggcattactttgtttttcaggcatttcctgcctgtataaagagcagaattaataaaattatgaaacaggtagtagagaccaaggtatatgtttgacaaatatatcttcagacccaaaagcagtatttcctcccttgtgaagcttcctcactcactttcccaaaacagaactcaatgtctagtctcagtttacatttatttctattgtgcttctctttctgtttaataaatatttatgatcagctaaagtgtcatcttcatgagtgcggttattttaaacctttgggtcaggctatctttgagttcctgttgcctagtgtttaattggatattaataaataaatgcagaataagaataaatttccatttctaacattgaatctttttagccctgttcaaactctcaagattgttccaaaagccatctagtattgactgagttttgctagttttgattttattatatgccttttcttaaacctcatctcaaaattctgagagtcttgtttatttgaaatagtggccttaagtaatgatcaaagatattttttaccatgctgtatacttcaaaataaatgttaagtagacttaaatatacagttaatactcgatttgcaaaattaggtgaagtggatttaatctaaaatgttcaatgatttagaaataatttagataagtaaaattcctgttttcatactacttagcacatttagaagtaaaaagcagtgttatgacttcctctgctctaccctttactactagttaacctagccagtactttttctcctttttctatgggtattgttggtttaggttatggtggactaactacatctttggtttttgaggagggggagtttgaggggtagttactacttaaaattgccaattgtgataagcacctcatatgtattatttaaactgtgaaaattctgtgaaatggaggctataattaatggctgttttgcaagttaagaaactaaagcccagctgcaggttaaataattcacccaaggttacaaattaataaat

SEQ ID NO: 85446 - DNA, 1033 bp, Homo sapiens
aattttcttttttattgtctcatgtaagagtcatgtaagccccttaactcacaattaaatttttgtaagggatgttggttgagttttttctctccttttaaaaatgtttcatgtatttttctaagtctactacagggcatacaaagaatgccatttgaaatggaattggcatcaataattatgactttctagaagttttccctaactagttccaccatttgaacatgaacatgtaaccttcaaatctcaatcgtaacatttaaattgttattaataggtgacacagcatattacttaaaagtatatactcaatagtattttatgtttcttctcttaacttggttaaaaagttccattcagaaaagtaatctatagttaatttaattgatatgtctttatataaggtctttaaatatatttttaatttctccctcatgtttagagttgggcagaggggagctggtctttcagccaccattgctaggagtgagcatgagatttctgaaattattgatgggctctctgagcaggaggtaagaaaataaatttaattcaagttaattcgttaattattaaagcattttaactctgtaggagctaagggtttttttgtatgtaaatgtgggaacttaattgagtgctagagtttagactgtcaaagatttgagtgtctgttaaagggtttttaaacgaggcagtcacacgatcatactggaattttacaaagatggctttggcagcaaggagacctggagagaggtgaggaggctgttaggataaaaataaggttctgaatcagggcaacagtggtagggatgtataggcgagtgtaatagaaaggtagaatggacaggccaagatggatgggatgtgggagatgagaaagaggaagaatagaatgtgactcccttgtttctaggttagaggagtaagctggtggtgccgtttcctaaagtagcaaaggagcatgtattttacaaatggcagtatgttcttcaaagggtgttgtctagcaagtgaacctgggagagag

SEQ ID NO: 85447 - DNA, 1144 bp, Homo sapiens
atcggttaaagcgtgtgtgttttgtttcgcagattggaaggataacaacaaaatgttcatatggttgcctttgggtaattggtcagattatgaactatttacatgtttgtatttttaattttccatttttttgggacaacaatgacataatgttttaagcaaaataaaagtaactggtcagctactactagtagtaggtgtcaagtagtttataaatatgcatagtcttaatgttaactaaaaaatccagccaacctgtgctctatgtgttgatcttagtaggaaacagagctacctttcctctctcctctttgtgcttttcgttcacagttgagtcataagccaaatgtacttctgacttaaccttaagaagtagcatttattttaaagtattaggtttgtcagaatcagagtttagtttaattattattaatttgctacggatatttaataggaacaaaaaatctgccagcgttatgatcagctcatggaggcatgggagaaaaaagtggacagaatagaaaataatcctcggaggaaagctaaagaaagcaaaacaagggaatactatgaaaagcagtttccagaaattcgaaaacaaagagaacagcaagaaagatttcagcggtgagtagtttgatgtttaatgactgtgatatttttcttcaaatatttattgtttcttttttttaaaaatttttttagtatgtattgatcattcttgggtgtttctcggagagggggatttggcagggtcataggacaatagtggagggaaggtcagcagataaacatgtgaacaaaggtctctggttttcctaggcagaggaccctgcggccttctgcagtgtttgtgtccctgggtacttgagattagggagtggtgatgactcttaacgagcatgctgccttcaagcatctgtttaagaaagcacatcttgcactgcccttaatccatttaacccttaatggacccagcacatgtttcagagagcacggggttgggggtaaggttatagattaacagcatcccaaggcagaagaatttttcttagtacagaacaaaatggagtctcccatgtccacctccctccacacggacacagtaacaatctgatctccctctactctcgccacatttccc

SEQ ID NO: 85448 - DNA, 4146 bp, Homo sapiens
atgtcctttgtagggacatggatgaagctggaaaccatcattctgagcaaactgtcgcaaggacagaaaaccaaacactgcatgttcccactcatagatgggaattgaacaatgagaacacttggacacagggcggggaacatcacacaccggggcctgtcagggggtggggcatgggggagggatagcattaggagaaatacgtaatgtaagtgatgagttaattggtgcagcaaaccaacacagcacatgtatacatatgtaacaaacctgcacgttgtgcacgtgtaccctagaacttaaagtataatttaaaaaaataagtaaataaaaaaataaaagtttggaggttttggtagggcatgttattgtgtagatccattagtactttacctgtgcttacattaaaattatgtttctttgtctcttcatagacatatgtacaacattttatacataaatatttgatttcttttatagccactgtataaccagccatcagataccaaggtgtaccatgagaacatcaagacgtaagtattgatcatctttggagttcttcaattaaagaccgtatattctataaagagatcatttttgttatctgctgacattattataatatattgtaggtatgttttagatttgtgtaatttgctgtcgttttattatatgttatcttcctctggcttcttgggggttggggtaacagctttgagtttccgaggccaaaaaatgaaataaattattgcataaaactagctggttttataatctgctagtaaaaaaggtggatacttaacattgaaatggcttaccttgaggcttgaattttttgcctcctgttttgtctttttttcagtggagtacctgcaaggcgcatgatgaagtaagataatgaagctttttcatttaagactagtgatgacaccgtcccccaccaagccacatctgccattgcaaagtagaagtgccacggatcattttatcattattcaaaatcctattctagggaaatcccttccatgactcttgctaatgacggtatttgtagacccttctgccatttaatgtcctggtgccttggaagcgctcagtcaccttgtgggtgacgaggctgctccagaatgtagtttgcttagccttgctcatcctagtaccaggcctttatggatgcagattttggaataagaaaataagtgaaaagaaaatctaatttcttgatctgattgaagtaagagaggaagctagatagatatcttttttttaaaaaaaaaattatactttaagagaattttaggtgcattattcttagtttgtgacaaaaatgtgatatttctactttatatgttttattaagtataagcagaacataattatttactagtatggttactaatgagcacattgctatttattttatatatatatatttatttttttctttttaaaaatttcttaactgagagtatgtgcaattattgactactttgcagaactggtggcaaatataatttgcatggtagtatgcatgaaaacaattgaatttgaataattttaacttttgttaagtaagtggttcataataaaagttatgtatttgtcaatttttctgtgagatgctactatgatcttgagaacccttagaagtaagttagtcaaaactcacatataatataccttgctttggaactgcttagctgttttaacatttttaaagagtagaagagcagataagatctagttggctacttaatgacttttttttttttttcccacaaagcctcagtgttatgtttgtgttgtgtcctgtttctcctgatacagtctggagagcagctctgtccgatttatttcatgtcatctacattgcctatttagtgctcagcacactatcctagatggactactgactggctgacttcatttaaattcctaggaaacatttaagattgtatttgttgattgtcatttgcttttgagtaacgtatacttaaaattatagcaaactgagtatatggtaatgcttccctgtacgacaccttttggaatatttcctcagctgcatgcatctgtatgagtcattcagtagctattctttcatcaccgtcatttgctttgtatgaaatagcaaatgtacattttaataattcttttcatctcttggctactttttcatatagccagctcctgcttgtccatacttatttgagtggagccagtgtcactgttagtcctgagtggcagataatccaaaaaattacttctacttgccttggctttgtatttatatttgaataatcagcttgaaatcctttctggaagtaggtggggtataaatatttatacttgaacctgcatgtcattgtttttgaaggtcacaatgcttccaatttaaaaagcgattaagatatattagaaatcttcctgttttgacacattgccctccattacttcttagagtggattgtgtcattctgtgactgaagaaaatcttctgtttaaagcagaagtcacctatctctacatatgttggtatacattttcctcgtagaagggaggttagcacctgatgtagggaggtaactgtaaaaatgtttccttctcttctacctcccttctccaaagagtaagatgtttatgtcaccagagttgttaagaaggataagtaactgtaattttaatttgaaaatatttgccttataattggatgtgctaattgaaagttaactattttgtattaagtcttactgtagaatgggaggaactttagtcagttctaatttttgcaaaagttataaaatcttattttgcagggtaaaaaaattaggattaactttgtttacatcataaattcttaagtgatctttgcctattttccagtgtctctggaaaaaaagtgaatgcattattaaattgtgctttttcttaatgtcatgcaaccatatttttctcttctagaaaccaggtgatgaggaaaaaactcattttattttttaaaagaagaaatcatgcaagaaaacaaagggtgaggtcctatccttgttaactgaaatttatacagctttcccattcatgctcatttaggcattcactttcctactgttaatgagagtggtccttgactccatttgaggataagtgctgatttagaaagtaaccatatatatatatatatatatatatgacttaaatctaattctagtaacattttgataccataccttacatttaatattatcaaattaatttcattggtcatctttctagaacattttcatttagtcaaaataaaacggtgagtagtttaaaagaatatgaaagataatttagtttcttaagcctcaaacagttgtaggtaagttgcagtcatgctgatgagacattactattctttcttttattagaaacggggtcagctagggttcagctttttcaaattcaaatggttttccatatttttttatgacttgcagtccaaaagttttgtggttatataattttcatgggaattaaattatagaaaatataatgccagtgattttattttcataatatgtttatactaattttacagatacactgttaatacatttaaactgaagtgtctgctaaataaatgctactctttaaatcgacatcaaaaatgaactttgtgcctaaagttaatgacctgacagtttgagttgtaaagctcaagagtcagcagctttatttggtggaaaacgtctaatgttctaatttgccagtctgatcagatactgtcttaaattactggtcttgagttgtttttttttttttttttttttttttttgccaagaacatataaatatcaagtaagaaattagctcatgtatttttttttcctttccaagtaattttgttgtaattctggtactcactaaataagttcactggtgatgcaaacactgtaaggtttgtattttcaccgatttgcttaaatatcacttggctgtgtactctgtcccatatattattctgcaaaggtgagcaagatagccatatggttttagtaattagggggagcctaaggtgatggaagtcagacaggtcagtcctagtattggatcacaccgtggtcatggactacggatgactgaggaggacacctaaggcagatagga

SEQ ID NO: 85449 - DNA, 1086 bp, Homo sapiens
ttacctattattcaggcattgctttcaatacaaatgttaagttttgactgaatttggtgaggaaagctatgacaatacaatttcagagttttctatcattgtaactacaaattaagaaaaaataaaaaataactggagcatatttcagcctgtcatatagaagaaggatatttggaaataaggataagttcatctatagattagtcttagataaatatttctaaataattattttgcacttagataatgtaatttttaattatatgatacaacaatgtctttatctctagaaaaaagcagaagaagctcataaaatttttgaaggtcttggcccaaaagttgaactggtaagtaaattttttcatttccagtgatttttttttttaatttttggtggtagtttttcttgggataagatggaatatgatccatttattttgggataagagagatgtagctgagcagagatgtagcttgagatgaagtttaaagtaatgatgagtgaacttggttacctttgcagacctttgcagaaacatcaccctgagcttgtttttgcttgagcagctatttaatccttccaggcagaatgagaattaagaacagaattagaaagctctttgaatgttactgttaaaatagtgacaatggttaatactccctagtattagggagtattaatactttgaaattaaaaatctgtgcataaatatacttatgggaaacaatggatttataaactgtattatgggagtgacaggagatgggattaacagttactcagggaatctaaaagttaggaggttttgccacaatgagataccatctcataccagttagaatggcaatcattaaaaagtcaggaaacaacaggtgctggagaggatgtggagaaataggaatgcttttacactgttggtgggagtgtaaactagttcaaccattgtggaagacagtgtggcaattcctcaaggatctagaactagaaataccatttgacccagcgatcccattactggatatatacccaaatgattataaatcatgctactgtaaagacacatgcacacgtatgtttgttgcggc

SEQ ID NO: 85450 - DNA, 1416 bp, Homo sapiens
cttttcttttcttttttttttcgctttccttcttttcttttcttttttttttcgagacagagttttgcttcgtccccgaggttggagtgctgtggcgcaatctcagctcactgcaacctccacctcccaggttcaagcaattctcctgcctcagcctcccaagtaactgggattacaggtgtgagccaccacagtcagctaatttttgtatttttagtagagatggggttttaccgtgttggccaggctggtcttgaactcctgggctcaagtcatctacccatcttggcctcccaaagtgttgggattacaggcgtcagccactgcaccaggcctcttttcttttattccttcttttctttctaacagacagtgtctcattatgttgcccaggtcttgaactgctggcttcaggcgatcctcctgcctcagtctcccaaagtattgagattacacgtgtgagcccccatgcctggcctcatcttttctttcttatgtatgttttatacatgtacctgtgcagtttcagaattgtaacagggagctcccggaggggaggaggagagcacaatgggcctagaacccaggctttctgatatgtactccccaaggctttttctgccccagtatgctgccttttgaaaggccctccctgcctcttttaacattttttaatgaatgagcttatctgtttcagcaccataggcaaggaggaatggggtaattacagaagtacacctccctcttatttcttgggtggcagcagttacactagttggaattaagccaagtgtggcttaagagatcgagggaccatttcttttatttagaaaggtagtgggaggaaaaaaactgccccaacgtgttaattttaaagttgacttcctgagaaaagttgacttgcatcatagttaaatttcagtctaagtttgtttagtctctaaacagactatttttaacagttcaatttgattttaccctatcagttgtaagttccaaaaatatttgtaaatattctaatttcagaagaataatacgtatagaaaagtgattattgttgggctctactagagaaatttgcagaatatctttgtgggtgtgtgtgtgtgtgtgtgtgtatttttttttttttttttttgagacacagtcttgttctgttgcccaggctggagtgcagtggcacgatcttggctcactgcaacctccacctcccgggttcaagtgattctcccgcctcagcctcccaagtagctgggattataggcacatgccaccatgcctggctaatttttgcatttttagtagagatggggtttcaccatgttagcaggctggtcttgaactcctggactcaagtgatccacctacctaggcctcccaaagtgttgatattacaggcgtgagccaccatgacct

SEQ ID NO: 85451 - DNA, 2817 bp, Homo sapiens
agtgattctcctgcctcagccttcttagtagctgggattacaggcatgcgccaccatgcccagctaattttgtatttttagtagagatggggtttctccatgttagtcaggctggtctcgaactcccgacctcaggtgatccacctgcctaggcctcccaaagtgctgggattacaggcatgagccactgcacccggcccagaattaaaatcttaaaggatgcttcctcttagtttttttttttaaactctatctaatgaaaatttgtgttgtttggttatgaaataaatctgattaattctctttgagctcttggtccatgagaccttcatggattaattggttaccctacagaatctgcaagcaaagcttagtagcctgtgttatctccagtggttaatcactgctgggtgtggtgtgcagcacatgcttgactctttctttctggatctcttagcaacagcttgaagaagaggcagctaaacctcctgagcctgagaagcccgtgtcccctcctcctgtggagcagaaacaccgcagtattgtccaaattatttatgatgagaatcgggtaagctcataccatctctggcagcacaggcctttaaccccacttgacgatgcccttttcagttttgaatgtatcctggtataattttaactttattaaaacctgatttctcttacaattttgaatgttcataaactttggctgactgaagcttggtgtttttttccttatcaattgaaagaaagtttacagttgtgccttaaattatgtaatatttcattttacattatgtattttataaatatttaatcagtgaaattttgtcagctgagtctcctattatatgaattctggcaaggaagcttggtagcatataatacaaaacaaccatcctgcagtttttcacttaataaatgatgtttaatgctgactactgataacatttcagtaaagataggtcattgcatgtggaaatgaactttcttatcagcattagttcacagtcgatagttgggctatggtttgaacttcagttaaaaagttcaaggcggggcatggtggctcatgcccataatcccagtactttgggaggccgaggcgggtagatcacttgaggtcaggagttcgagaccagcctggccaacatggagaaaccctgtctctactaaaaatgcaaaaattagccaggcgtggtggcgcatgcctgtagtcccagctactcgagaggctgaggcaggagaatcggttgaacctgggaggtagaggttgtagtgagccgagattgagccacttcagtccagtctagacaacagaccaaaactcaagtctcaaaaaaaaaaaaaatcaaagttcaaggtagattttgacctttaggtagactttgcttttttaggtttactctcatactcttaattaaaaatattcatggattcagaaacaccaggcatgaattctatgaatcatttttgtagtatcaaagttagttttggccagaatatggcccaggaactagcagttagagggaaactgattttacctcaacatgaagaaagtgtctgtttaacagtgggcttccagaagtccacagtgcaaaaaatgataatatgctttatactgtgggatagaatagggtttttagctaaaggcatgatcatcaggtaaaatttgggattgttgttttgattgatttgatttgtagtgagtggattcatctgtcagtctatcttacacatacagtctgtaactttatagtagtccacagccgaaaggaaattgaccttaaataaagcaattgtgaattaataaatatttatgcacatgtactcctgaatttaaaagttgaataaataaataaataaatacacatttataggaatgatcttggatttagatatacatgtatcaagtagataactgagagtcatcagaaatatacttacggtaatggtaagtgttatgggcaggtaaaaatatgggcaattaatattattttcttggctgggttcaatattagtccaatttattgtatggccacagcagtctacatgaagataaatccagtaaaggaagggaaggaggtgaccatgcctaagatgggggctgtgttccaggatatacagttgctcccttgtttaagaaaagcccaaaataatggggttttatgtgaaatctctgatttgtttttttaaaaaaaaaaagtcctctgcatagctgcaaaacacttttgtgggctcatgggctccatggccagtttgtgactgtgacctcagggataaaataaataggaattagtggtgatacaaatggagatttgatagtttttttttttaagttttataaaatgtttcttttttagtatgaattatttttcaaataaattggatttggtaataattattaatggatttattaatgagccttgtcttacaatattagtgaattctgtggttgcctcactgggatttgaggactgaatactattgaacaagatctgatctaatagagaatttaattggtgtttaatttttatatatagatgtttttattaattagtatagtgtttcttggtgcacattagcaaaacttgaaaactccttttgcacctcttctttctgtttgaacatttccatatttggtttgttgtttattttatgaagaaaaccaaatctgaaacctgtttcagtgttaaacttgccttcctacactgaagattgtttctaacccacaacaactatagaagtcatctttcttttccttttttcttttttctttcatttttcttctccaccctctcctttcttttctcc

SEQ ID NO: 85452 - DNA, 1052 bp, Homo sapiens
agttttggtttggaaagcctaaaaacttttgataggaacacttggccatgttatagttgttaagttgggtggacacacaggttttacctggaataatactatttcccagccagttgttcagaccatttgaagagccgttgcaaggaaatggctgagaagttggtatcttcctttgtcatgattgcattatttacctataaattctctataatttcagtattgttatactagaggctgatcaacactaactcacctcactttgtatagcttttagggtcttcaaaatagtacatggtatatctaaactataaaagtgaggtgagaatttgcatgtatgtgaatatgaaagttactactaaaagtttcattagacaaatagtacacatggctctgctgtggtttaaaactgactttttcatttaaggcaatctggactctattagtgagaaataaattgtttttcttggttttattctctaaaggatccagcattcggaggcaaacatgaagctccatcctctccaatttcggggcaaccatgtggagatgatcaaaatgcttcaccttcaaaactctcaaaggaagagttaatacagagtatggatcgtgtagatcgagaaattgcaaaagtagaacagcagatccttaaactgaaaaagaaacaagtaaatgtctttgcttaatatattctaagaatgtatgtttgtctccctacagtagatatttttgagttttccatattttgaaactttacataaaaggaatcatgccttatatattcggacttgctgtttttttgctactgttgtggttttcttacattcattcattttccttgctgcactgtctgattatatgattgtagagagtgaaatttgtttgtccattctatttttgatttttttttttctattccatacaatggtgctggtttttggttcacatgtagagattttctagggcatgtgcccaggaatggcagtgcttggcccaagattatgtacagtgaactatttaatagatgatactaaatttgctaagaagtaacacca

SEQ ID NO: 85453 - DNA, 1199 bp, Homo sapiens
tttatagatattcttcagcaactaaactttctgcaaatgttctgttttgtctttcacttctagattagtttttaatcctccccccaaaccttttttttttgttttaagacggagtctcacattgttgcccaggctggagtgcagtggcatgatctcagctcactgcaacctccacctcccaggttcaagcaattctcctgcctcagcctcccgagtagctgggattacaggcgcccactgccacgcccagctaattcaaaccttttttaaaaattagactagaagtttaatggtactatagtgaggtatatattctttgggggtgggaacagaaggggtacggattcactttgaatgtaagcatgactttttcatttgttatttcaaagtctaaccagggatgttaccagggagttgtacatcacttacaaattttcaagtgtttattttctttgtatgtattaggcctcaagaaaggagaactagttatgaaccgtttcatccaggcccatccccagtggatcatgattcactggaatcgaagcgaccacgtctggaacaggtttctgattctcattttcagcgtgtcagtgctgcggttttgcctttagtgcacccgctgccagaagggctgagggcttctgcagatgctaagaaggtaaatatttgttctcttaccctgtagagttgtaggtttgtaatgtttatttagttatactcatgcatagcacctcaaagaaagtccagttacaccagtctctaaaggttagtggtatgggaaagtaaaaattttgttaaacaaaactagaaaccacagatgagtgctccagactgctaaagtgagcacttttgccttttcggtaagtgaaaacagtccaagaagactgctcccataaagaagaatttctattaaataatgctcaagcatttttttactggcttgctggctataaaatgtggtcagaggtactcaagactactagttttgttaaatcttaattaaattttaaacaagtcccttaaatttagtagcagtttattaactgctatatgggagaaaacacatccaggtaaggttgaattgtgcatataagttctatacaaaagaaaattgttcctaatttatgtaagtaatacatacttatagaaaactgggaaaataaagaggaaaaaagttacctgtaatcctgtaacttgga

SEQ ID NO: 85454 - DNA, 1020 bp, Homo sapiens
ttacagatgcctgcctccatgactggctaattttatatttttggtagaggtggggtttcaccatgttggccaggctagtctcgaactcctgacctcaggtgatccgcccgcctcagcctcccaaaatgctgggattacaggcgtgagccactgtgcctggcggaacatgagttttttaaaaagaaaattaaaaaaaagcagtatcgaagaaagtaagttagtgaaatcctaggatttctcatgaatattctttgattggagaaaatttcaattggtggtggtgaatggtttgcttgagaattcccattatgccatcctggtttctcaacagctgcagaaaggacagttgggatgtgccattctgtaaagtgatgagccagaaccctctggagtggtctacatgtctggctggtagagggggccagagtccttagcagaggcagttacagccctaaccaagatttttcttcctttgccccacttacatgttccctcgggccatagaacagtatttagaaagccatacctattcttccatttgcagagaagatgactacatgccagaaaaagtgggaacaatcaaggagaacccacccagactatcccacgccaaagagaaaggctgccacaatgtacctgagcaggagggtggggaatggcacaaatgaggcgaatatattcctggaaaagaaaattaaagcaacatagtatgccaaaaataaaatcgccacgtgtaagaaacataaagagcatgcctcgtaagtgctatgcactataaaagaacttaataatataaataagttctatatttctatatttcttctataaaagaacttaaataatgaagtattcaaaaacaaaatgataagacagccagatgggctaaatgtagttcagacatttgagtgccctgaagatataaaattagaaagaaaaggaataaagtagatgtggcttaaggtaaaccttgtcttagaacaaagtcttgatataattagagtgagtgcagaagaaaaggac

SEQ ID NO: 85455 - DNA, 1047 bp, Homo sapiens
acctaccatctgtgattacaaaacttagtattttatcatccttgcttcagaattatttaataaagacaatacttccctctgcacaaatgcttaccttaaaactactcttgaattcttttcgcaattgacttatcaactcccaaatttaaaaccatgtatttttgtctttatatttctcagacatttatagaaagatatttactgagcagttattatgtgccagatcttatgctgtttttatatactgtttttactttatataactaattatattatttgtcacatattaacctattttaagtataaaaagaaatgatgcattaatgttttcaaaccttggtaacttttattaagtaaatacatgagaggaagcttttactggtaattgtggttttatttatgtagctatagttataatttattagaagtacacttggtgttttagttcttactaattctgtttttttctcatcctgtttaggtggtttcctagaaacatgattgtttattggcattgatctcacagtctggtgaggacttctttactgataatgtcaagttcaggttatcctcccaaccaaggagcattcagcacagaacaaagtcgttatcctcctcactctgtccagtatacatttcccaacacccgccaccagcaggtaaggaacagatagtatgcaaattgcacatgttttttgtgtttttctttacttttcctatttaatacacatgtgggacagaaaccaccaaatttatcttttttttttttaagttgcaagagctatttacaaagacaaggaaccaaagattgggaattaattatttctgtcttactgtggctttatgctgatttcaggagttgaacttgtctttgcttttcatgataggagttgatgataaatagaaaacttaccaattctctagaatttctggggtaagacctatatttatactcccaagttgtggctgagttttaagctggccagataacttggcatgtcttgggtgagggccaagataaagacctctctctttttaagaaattga

SEQ ID NO: 85456 - DNA, 1050 bp, Homo sapiens
atttgatactgccacttaaggtgctcccttccccttcagtctgaactttaaactagattcttttatttcagtgggtttcaaatgtaaagtattctgccgaggtatcttagtgagccaggactagagtgaagggtggagggaaggatgggaaagggcagggggagactgaaaagatgaatcctaggtctcccattcttactagatcggaatgtttctccattgtatcttttgtacatttagctttcatttaagacttttgaggaaaacattctggttaaaaaacaaaatctgagcactgttgccgtgtatctcatggataagttttgaggaaggaggttgtcgtggtctccaggctgcagttcatgcgaggacaggaagggcttgctttgacctgtaaatttgtatgctagtaggggctaatttcctgattttgctagtgtgtgtgtgtgtgtgtgtgtgtgtgtttttttttttttccttctgtattgggcggatagtacttttaaagaaaactgactttttttttttttgagataataaagttaaacttcactaaagtcataccacaaaacggacaaggaaggattactgagatgagggaaaaaatggacaagtcacttaacttgtgactttgagtgacattgagtgtaattgttgaactcaggactcaccatagctgaaagttaaacaatgtgcattaaaaaattgtacctcatgggtttctaatcatttaggccactgttagaaaaaaattggatgaccctgggttaaaatctttttttttgcctcttcattccatttatagctttatttatttgggatatctgagttgggaggagagtgcagagatagataacttaaagcatgttttaggacagcagatcagaattagttggaaaacttttacaaaatgcatgaatgttcatatagtgaaatactcttttttttttttttttgacagagtttcactcttgttgcccaggctggagtgcaatggcacgatctcggctcaccgcaacctctgcctcttgggttcaagcgattctcctg

SEQ ID NO: 85457 - DNA, 1061 bp, Homo sapiens
ttccacctcagcctcccaagtcgctgggactacaggcacaggccaccacgcctggttaatttttttttttgtttgtagagaaagggtttgaccatgttgtctaggctggtctcgagctcctgggctcaagcgatctgcctgtctcagcctcccaaagtgctaggatgataggggtgagccactgcacccggccttaaaagcattaaaaaaaattgtgttatgaattggtgaaattttcttttcttacctttgttatctgctgtagaaggcaaaggcctttggatagactgggggttgatgtaggtgagtgtcaggctgtttgttttttaaaaaatatgttttggttatttggttttaattgtattctgtgatctatcttagttgtaatttcaaattcttcttgatgcctgggaatgatggaactcttgcatatttagttccatctgttcttttacttaagatactggattttactagactatgatataaaacaactagtaaagattgatcagaatttattgtgtatagtcttatttgtagattagagattcatatatttttgtttactcacttatattcaaccagtatgaggtgctttttatgttctggcacactactaaatactagaaagttataaaatatagtcgagcagatcagttatattcacaaataactcagtctatagattatcttttttttttctttttttttcctttgagacagggtctcgctcttgtcacccaggctggagggcagtggcgtgatctcaggctcactgcaacttcagcttcccaggttcaagtgattctcctgcctcagcctcctgagtagctgggattacaggcatgcgccaccatgcctggctaatttttgtatttttagtagagacgtgttggtcaggctggtcttgaactcctgacctcatgatctacccgccttggcctcccaaagtgctgggattacaggtgtgagccactgtgcccggccctatagattatcttatatttggtccttttcaggtttgaggatgcaaaaaatacatgtatacatgtaaatggtta

SEQ ID NO: 85458 - DNA, 1064 bp, Homo sapiens
ctacaaagattcattcattcgttcaatatatcttgatcaatagctgctgatgctgggtcacatgtgattgtcctgtggataactgaagagttgatggcatcgtttaatttttaatagctttttaaaatgttttgatgtaccttttcatgaagatatttattggatgaaccaacttgtacttgcccgggctcaggagcagaccaattttagaatgttatttagacaagggtaacaattacagaagaagtaaccgcaagttactggagagagaaatcttgtatctttttttctttttctgttaacatccggtggaagtttatttatttgttttaatatttatagtacccagttgcttggccttgctttaagcacacctgttaatggaaatcaagattaattgtatatatggatatagctatgtataaaatgctcacagtaggaactgattacttacaatactaaaatactctttccttttacaaaaggcttgccatatgttgaactactcccccggagaaaatataatacaaagtatcttgattcttgctctaactatgtgattttggaacttgatcaacctttctgtgcttcagtttcctcatcttgaatattaggtaaacatctactctcctagggttggctgttgtgagcctaaagggagttaatagttataaaattgttttaaacagattgaaggggttatatttctgtgaggtggtaacagctccctctgggctcctgtaatgctttttctgcacatctctcgcggcatttacactttctatcttgtaggtatttatgtacctattttatctcttgagagcaggataggcccttcgctgattttatcttttttttttttttttttttgagacagtcttgctctgtcacccaggctggagtgcagtggcgcaatctcagctcattgcaacctccgcctccgggttcaagcaattcttctgcctcagcctcccgagtagctgggactacaggcgcgtgccaccatgcctggctaatttttttgtactttgagtagagacggggtttcaccgtgttagccagga

SEQ ID NO: 85459 - DNA, 1040 bp, Homo sapiens
ttggaaggaaagattggagtcaggaaaatcaattcagcccagcctttcttctctagactgcactgccagctctcatatatcagatttccatgtaattctggtctatacactttagtcatctcaacaaccctgtcttaattactgtagcttataaaagctacactaggccagaagtgttggttcacgcctgtaatcccagcactttgggagacagagacgggtggatcactagttcaagagagcaggaccatcttggccaacgtggtgaaaccctgtctctactaaaaatacaaaaattagctgggcatggtgatgtgcgcctgtagtcccagctactcaggaggctgaggcaggagaatcacttgaacctgggaggcggaggttgcagtgagccaagattgcgccactgcactccagcctcttgctcttgcgacagagcaagactccgtctcagggggaaaagaaagctacactatattatagaagcgctattatctgatatgaatagtcttctgattgttcttcagggtatgtttgctgtttttgaccctttttccaaataccttttttatgggggaagacagagcctcactgttgcacaatcttggctcactgtagcctccgcctcctggattcaagtgatccccctgcttcagcctcccgagtagctgggactacaggcatgcaccaccacgcccagctaatttttgtatttttagtagagacgggattttgccatgttggccaggctggtctccaactcttgacctcaggtgatccaatccttcttggcctcccaaagtgctgggattacaggatgagccaccatgcccagcccccaaatacattttagaattagcttggtgatgttcaaggaaaaatcttgctgacattttttcccccttgtgacagagtctcactctgacgtccaggctggagtgcagtggcgcagtctcggctcactgcaacctccacctcccaggttcaagcgattctcctgcctcagcctcccaaatagctgggactacgggcatgtgcca

SEQ ID NO: 85460 - DNA, 1050 bp, Homo sapiens
ttttcctgtaatactcaggagtagcaacctctattttctttttctataccaacaagaatgagcttggaaagcttcatccttaaatcaatgttaaacaggatttgaggactgtcaatgaagagggggccccagttgttctgagtggtcgtacatggtgtgatcctaaatctgcttaacttcaaagttagtacccttggctgtgtaccatgctgcctctagcatgtgactgaaatgcagacagacagataggtatatagatacaaagatgggaaagaattgtgaatggtgattctaaagattgtgctactggtagtcttctcacaggagtatcttggtgtcgtgttttcttaaactttgtatcataatcacacattttcaggcagcttaaatcctttaaggaacaaaaacaggataagaatgagtgaatagataggtctccactgttaaaaaaaaaaaatctaccactgtatatttgttaccctcaggaaattactacaatcaaggagagactcgtaagaaagaacttttgcagagctgtgatgttttggggattccactctccagtgtaatgattattgacaacaggtaatatatcttttaacaatgtagaaatttattggcaataaatatgcagtgatatactcaaaagacacacaaaaaactaatgtgagtggctgagaacatcttgtatgaaaagtctagggctcggtgccatggttcacgcttgtaatcccagtactttgggaggccgaggtgggcggtctcaggagtttgagaccagcctggccaacatggtaaaaccgcatctctactaaaaatacaaaaattagctgggcattgtggtccagctactaaagaggctgaggcaggagaatcacttgaacccaggagttggaggttgcagtgagctgagatcaagccattgcactccatcctgggcgacagtgagacttcatctcaaaaaagaaaagaaaagtctacataaaataacttcacagcggggcacagtggcttacgcctgtaatcccagcactttgggaggccgaggtg

SEQ ID NO: 85461 - DNA, 1065 bp, Homo sapiens
atgaatgtgtgtgtggtctctaagaactcgaatgatgcctaagctatccaacccactttcctcagtttttatttacgcagaaattgaaattaacaaactaatttctgagtcttaagtgaaattgttttcgttttatttaaagttacccttgacttacatagttttaaccttctggaaagttcttcttttttctctctctcttcctgttcctgattgccacactggatagaaagttctaaatgaatacttaggtttgaaagtatttttctacatctatttattttgccattctacagatttggctccattgtcctaaggtttcagcacaataaaaatctcgtttctcccagtgcttgtcttgacatcaatgtagcattaaaaagtccaagacttttacagactaatttaagctgaacaaggaaatataatctggtacctactaagaaacataaatgggcctgggttgctagcagttcctggaagtcactgtgttttccaataaatccatgcaaatcgtaacagggaaagagaagccacaaagcagaggctgggactgttgggatcatgttagtaattaaactctctctcctcttgagactcagtgagagccttccccttacaaaaaaacaaaaaagaccatagcttgctgccaaagcggatctgaccacgcgtcctctcactctaagagattaaaataaagcctcctgcagtccttttctccaaatacacaaagaagtggctgggctgaggctcaagggcacagttccagtccctgttggcaagagaagggcagggctctggttctcccaaagggtgcaaaggacaagaatgtttcctagaaaagaaaccagggaaggagaccaaagtagacctagctgatatggagctgttatgtgaaaactgaaagctgcttcgatactacttcaaagccagattattctgggaactgaagggagactgagccttcaagtaatatgactagggaagtcaagtacaaaaaaaaaagtgagaccaggaaggaacaaagcatgcatttggagctaataccactcattggaagaggtt

SEQ ID NO: 85462 - DNA, 1040 bp, Homo sapiens
gggctcctaagctgcttagaaatgaggtccttatcacagcagatacttaataaaagtgcactgatctttatatacctcttttttcagtcctttttctttttctcagatcgccttttccttctcttacttatcttttcccctatttcttttctctgcgtatggcttaggttagtccttggcggtgcagagacaccccccagaagttgttggaccctgctgcaacctccctgcagcttagacttcatttcttcacactcctgtatttggagcagcgacgctagtgccaggccctcagaccaggagacagttgctgcctcccacagtggcccttggggggcgatattggcagtcccaggttaggcttccacgtccttggctagccttaaggttagctctgaactctactgacctttgctcgctttggatgacaaaggaaatgatcgagtttagagatgggccagaggtgggtggaggggtggctgaaccttccggcttgcgctgtacaagccacaagaccaaataagggcgtgtgagccgcctccgtctgtattaaagttcagagtgcagtgtgcaaaagtgggactcggttttcagagataagctgttacccaaccctgcttgagttccagcagcggaggctgcgaagtctcctgctctgagcagggctgggtctgggggagaaagacctgggcccctgggcttgcttagctggggagaggaaagaaggggggcttccctcaccagcacctggtgactgaacggacccacaaccccacagattttcacaaagggtttccatgactctcccgactaaaatgtgccggccagtgtgactcattagaatgtgtaggaaaggtcactgtttgaggatattcagccagtgggggaaaaaaccacaacgttattttaatgaacgcttttagcctggcttgtttcctgaacattaaggtctagggcgggacttcgagtttggggccttttccagaggtattaacactgtgtttgctaaatacaccccagggaaggagtcgtcgggcttc

SEQ ID NO: 85463 - DNA, 1066 bp, Homo sapiens
ctatagtttgtttgattcttatatcaatcctgtgagacaggcaggtctcacactatcaacaccaatttacagattagaaaactgagactgagagtggttaagggactttgccaagtctgtcaattcttgactgacagagctggaaccaggtctctaaactcccaatacagtaattcctgtctcctttacttcctttggctttgaggtagccagatctcaacctctagcagccaacctttttctggtagggcacaccgcagggtagagggtagccagccaggtcttctatggcccttttactcgttctagctgcaagaatcatgggcacagggcagctttagtgccacagaaacacgtggcaatgctgtggccactgtcctgccctgccctgagccacagggtagagggaggatgctcaggggaaaatctggctggaggcctcaaggcttatcacttcaccctgtctcctctccatccagggtgctctgtgctcacgcttcagtctgtgaatgtgctgcgcaagtacatctcccttctggatctgcccttgtctctgcttcatacgcaggatgtcctcttcgtgctcaacagcaaagaagtggcacaggccaaggtgaggattgtaaattcctggacaccccaactcagatccctgccccagacccctgtctcctcaaagccccacctctgcagaagccctaactgaaggtttttcacagtggttcagcacctgtccctgagaattagggctaggccagctagatcttgggaggcatagatttttcaatgactttagccttttttttctaattataaaaataatatatgctttttctaaaagtaaataacacatgctcattgcagaaaatcttgaaaaacataaaagcatcaaaaagaaaataaaaataagaacaattacctgcagtcccaccaatcacaggtaatccttgttaacatgttgggctacatctttctactctttttttttttttgagacggagttttgctcttgtcacccaagctggagtgcagtggtgcaatctcggctcactgcaacctccgcctc

SEQ ID NO: 85464 - DNA, 1122 bp, Homo sapiens
ctgggcaacaagagctaaactccatctgaaaaaaaaggaaagaaagttatctatctaaacacaggaaaggcctgtgaattcttcaggctgccagtcagagattgctctgggctgtgcctttctgcatgttgtactctcaacttggtattgaatgttgtctagccttggccaaacctggctcagggagtgtgattcccatctggcagttgaggaaagtgagtcagagggctgaagcggtaggctggagccagtgctttccgagccagctggcagcctgtgggtctcatcactgaagccataagctgtggcatatcctttggaagccctaatgtgtagcgtgatgatgcctgcaggtgggggcttatccaggagccggtacaccatctggtctcacccatactgaggatccccctttgtctgtgccactttctcgtaggaattgccccccactgcctggatgagggcactgtgcggagtatggtcactgaggaattcaatggcagcgattgggagaaggccatgaaagagcacaagaccatcaagaacatgtctaaagagtgagcttctgcctctcctgccctgaaaaggaggaatgattggggccagcaactttgctctccctgccgtgcctcggtggtgctcctgaatgtggctgacctgggctgctggttccgttgactagggtcatcttgatctctgcagtttgctccagctaccagtttctttaggcagctctttgtcctccctctgcccagattttgatgtagtctaattgacatccttctcttcccaacttttgtgtgatcttttaggaaaaaaaataaatatttttaacattaaagcagtcactttggtttatcatttcttttgtactgtgatttgcttctgaggccagtcgattaatagcagatatatactcagcactatcaagatgtttgccaccaggcattgtggcttaagcctgtagttccagctactccggagggttgatcgagcccaggaggttgtggctgcagtgagctgtgttcgtgctactgcactccagcctgggtggcagaatgagactgtctcaaaaaaaaaataagaaaaaagaaaaaaatgtgtagctaaattggaaagaag

SEQ ID NO: 85465 - DNA, 1048 bp, Homo sapiens
tgaaaaagttctaatttagcacagaatcctctcacaagttattccacagtgcttcttttccaatctggactctattgttagtagcctggtcagttctccatttgagtaattccatcgtatgtgcttattattcatatataattccggtacctaggggcaaaaaggactggatgctgttaaataattagctgcatgccaactttgggtcccaaagccagagcctgtcgtccctgctccatcataacgccggggaaggtggtacaaatcaggccctccacagccagcagtgccatctgcctcaaccgaagagcagagcgagagtggagggcctggggagcctccaggtgtatacaccctttactaacataccctccaactctccccaactctagacttctatgaagattctgcccaaggctttccactcagtacccagccaggcacacctgcagctaaccgcccccggctcctcagcagtgtcagtctgagggtgatgctgccacaagccacaagccctgaggaccctgctctgtgtcacctgggccatgctgttgaagctctgtgatgagccatataaaaggaacaaaaatagaacaatgaacctttctgtccccatcacctgacttcaacagttaccagcccaaggccaatgtttcctctgtaccccaactccccagattattttgaaatattgcattttaactctgaaattcttttaagccaatttagggaaaaaaaaatactcacttgcagtcaaatatatgcaagtctgctgaggcccaaacttcaaaacgaactgctccacagtggcagcctcctgtgtgcttcaccaggccctggtattcactaaatgaaacaaaaatcagaaagataataatttctgaatagctgcctcctgctctctttttgttgctgaaagaaagacagaagattagacaaaagtcttttctacatgacaaccagatgcatttctgcttttaaggaggcactgtcaatttcctaagtgaagaatggtttcagcaccttctttgtccatgagctctctttt

SEQ ID NO: 85466 - DNA, 2758 bp, Homo sapiens
cgagtggattctgggtatcgcgagcgtaggcccaggcgcagcccctctgcctgcgggactgaacaggcaggtgcgtcccagcggccgggcgggccgggtctccctcctgcgggcaggcgccgcgctgcggggcgcggctggcggagcggggcagccgggcgcagcgccccctgggcctgaagactggcgggcggcgggggcgcgcgcaggccggcgggggcgcgccgcgctgcgaggcctgcgcgccaggctgcgggagccatgcggcgatcgaggagctctgcggccgccaagctgcgcgggcagaagcggtccggggcctccgcggcccccgcggcctccgcggccgctgccttggcacccagcgccacccgcacacggcgctccgctagccaggccgggagcaagagccaggcggtggagaagccgccgtcggagaagccgcggctgaggcgctcgtcgccgcgggcccaggaggagggcccgggggagccgccgccgcctgagctggcgttgctcccgccaccgccgccgccgccgccgactcccgcgaccccgacgtcctcggcgtccaacctggacctgggcgagcagcgggagcgctgggagacgttccagaagcggcagaagcttacctccgagggtgccgccaagctcctgctagacaccttgtgagtgcggcgggccggggggcgcgggagccgttgccacgcggaccccctcggcaggagtcgggctcgcagcccgcgtgcaggccttgggcgcctttcagctctgagccttccacgttacggagccgacgcggctcccccgttagcactggggttattccttaattctaagggcggcggggcggggcggtgcttctagggctgtgtggcctgggaatggaaagggggcttcgtccggagcttgagggcgcgcgcagccgtcttgggacacaaagagtctttcccggccataagcatcgtgctcggggacgttgtctcttgctggcgcgcaaagggtgtgggggcctttcttagtgaaaagaacataaatcccacggctttctcttacccgaatcccctttttttttgtgtttgcacacgtgtttttgagggtgggtggaagggaaaggtagaagcgttgaaggaagcatgaatagttttgaactcactgggaagcaaaatcccgtcattgttccaggcactgccagggagggagcagggggcggaggttattgatccgggagagaagcgcgcgcgaagagatgctccggcctcgcgcggcggcggggatacctacgtagggaggcttttatgtgctcagccagctaatgctccctgccgctcgccctcctggctgctccgcagtcttttagatggcccgaggagcatctcgagtgtccgcgatttgggaaagagcttttaactgggctgttaaagggctgccttcttttctccaaatgcgatctggattcctgcctcggggaacagttgtgctacagagagatattttaacgccctgatattatatttcagtgtcaattttacgaattaaaaagaacaatcaaaacactagggggaaaaaaccgacaagaataacctagcaattgcataacctgagaattacttcttttcttgaacatgttcctttgagcttcttgcggaagaaattctcttaggatgagtcgtccccgacagaagatacatatttggttttctgtgtgcttcactttttggtttttcatcttggactgcacactgaatttttaaaaaacgttcatccatcaaacatttgagcacctatagggtgacggctgcctctgggcagaaggaatacgaagatccttaggaatgtaaaactcatggtgtcttcaaggcatacagaaaaaaagaagaatgtaaaactcaaatttgagataaatttttattttaagacaaactgataaatggtcaagaaaaagttttaaaatattgacataaaaaagctgtttttctcccactagattgccatgactttgtacttataaagtctactaaattatattcaaaaagtgtgtataactgtaccattttcgttaaaatattgtgtagaaaaaagtttgggggaatatataacaaataattaactgtagatccctctgggtgtaaagattacaggaggctttcactttgagcactctcaaatagtgtgaagtttggagtttttacaataagcattatgtgtgcagaaaaaattaaaatacataaacgtaaagaaacatgaaaaaatgatcagtcttaatcatgcaaattaaaactgcagtgagctatttttcctataattattgcctgagactgtacagtgaaatgttttctcatttatttatcgggtaagggtgttcaatccttttggaaagcgattttaagacatttatcagatcttaatgttcatttctgagtttggcttatatataagctttaaagggttaaaattgtatgtaggctgggtgaggtggctcatgcctgtaatcccagcactttgggaggccgaggcgggtggatcacctgaggtggggagtttgagactgcctgaccaacatggagaaaccccgtctctactaaaaatacaaaattagctgggtgtggtggtgggcgcctgtaatcccagctactcgggaggctgaggcaggagaatcatttgaaccctggaggtggaggttgcggtgggctgaaatcgcgtcactgcactccagcctgggcaacaagaatgaaactccctctcaaaaaaaaaa

SEQ ID NO: 85467 - DNA, 1045 bp, Homo sapiens
ccacaggctaggggcctccctcccttcgtgaagcccccagaggccctgaggcacacaaaggtagtattcgatgccttcagagctgaatcagactgaaaatatagacagaccctgaaaggctttgaaaacggaagaggaacgtcatggtagacgcatggtgtcagatccggctctgccaacaactggcgaccttgggaaagccactccccctttctaagccttagtagtcttggcagcaaaatgaagggtttgatagtctagtggttttcccagttatttcttcttagagctccccttctttggcgaggggttgagtgactggccccatcccagtcatcgcacttttatctgttggaatattggctgccaggcaagacgttgtgtaaagaaagggttgtgctgttaatgtaaatggtaacaggggttgtgacccctcagattccaggaagtcccagaggaaaagtcggggacagtcatggctcttcctgggggacaacatcaaaagggtggccctattggttccctgttcctcaccccacaggcctccctccctctcctcacccctgctgctcatccctcctggcccacttcccctgcattggggctgggctcccacacagtgggtggacctacttgcacttggcatttttgccattagaagtaatgagaagtaatggcaaaaaccgcaattttttttttttttttttttgagacagagtcttgctctgttgcccaggctggagtgcagtggtgccatcttagcttccgggtttaagcaattctcctgcctcaccctccctagtagctgggattacaggcacaagccaccatgcccagctaatttttgtattttttttagtggagatggggtttcaccatgttggtcaggctggtctctaacagctgaccagccagcctcagcctcccaaagtgctgggattacacccagccaccacgcccagccttttgcactaacctaatacctccttttgcaggctccagtcaggccaacaccgacgcgcagctgggaggaagacaggaccct

SEQ ID NO: 85468 - DNA, 3781 bp, Homo sapiens
gagggggagtcctgggtagcgcgccggtctaaatcgttacttggcggaaagttcccatgagtctttgccagcgtccccctccttttgtgaggattgggatattccgactccttaagggcctggcgcacataaggtgtgaccttttcattcccgttgttatggaggtaggctctctaggaatctgggagtagtagctggggggcaagagcaaataaagagctcgagcttctgtggtctctggggagatgttcccgggaagcctgtctagagggcggagggcagctgttgagatggcgtggctccccggctcctgcgcccgcgtggctttcgcggcgggcgctgcggcccggtattggacagcctggcagggcagcgcggggccgaatccggctgccgtggctgaggctcatggatcactcttttgtggtagggccacatctgccagagcctggagtctgcgaaggccgggacccggttccccggcccacagtgggggtgtgcaaacccgagagaactgggtaagttggggtcggcttgcagtttggggtaccccgagggcggtgtacgtcggtaagattgtaacagtattactggaagacttattcgactgtcctgatgatacttgtaataggaagtgccgtcagaagcgataactgacgacgtctaatgtctatctgaccgcagtcgctgaaacctctacaacttagttgaccgtaactgccagagccctgccctgaattcctgtccttactccctctttaagattgcgtacccactgcagagtgctgaagacggggtagccacgaggtgagaggctctctggtgtagggtttaacatggaacgtagttttgtcacttgaatgcacggaaattggcgttttgacagttttctacgtttaggtgttttatacactttagggtaacgttatcatgtcattgcatagggtggaacttaaatagaaactggagatggctgcttcagccacagtcctaacctagaactgcatttaaagcaaactgataatgcagaaacaaactccttcgttaagaaatgtctccagtagcagggttagcttaagtttcaggtagggtctagatctgcggttggaacagtactggagggttgtgaggtgcttgactgctctgatgaaatcactaataggaagtgccgtcagaagcgataactgacgaagactactcctgtctgattgcagtcaagtcttcaccacttgctggttcccaggagtaaacttgtttgaacggtgacctaattgctatattcacctaggttgcaaattcgtgaagaatcagcatcatgtttggcagctgagtattggagccaggagcctgccatgaggtaagccttgctctatggggaggctagtggctgaccacgcctagctgtcaggtcgaatattggcaattggatttggttaacctaataccttgtaacagtgtagcctatcccagagatactgattttagtttccggtggcagtggagccagggtggattacctagaaagaggggctactctatttacctcttggctgtttagtctcgggcaaattacctgtctgctgagatgtagttttcctcagatgtgaaaaggaaaagtaatcttagctttgtgaagtttaaattgatatgactgaaatggagattacaactcccctgaggctgggcacagtggcctgtaatcccagcactttgggaggctaaggtgggtggatcacctgaggtcaggagttcaagaccagcctggctggccgacatggtgaaaccccatctctaccaaaaatacaaaaattagccgggtgtggtggcgtgtacttgtaatcccagctactttgggggctgagccaggagaatcgcttgaacccgggaggcggaggttgtagtgagtcgaaatcgtgccactgcactccagcctgggcaacagcgagactccatctcaaaaaaaaaaaaaaaattacaacctactgagaagctaattaagatttgtagtcctcaataatttacaaaaacttagaaaaattacctctaattaggtcttaaggggcttttgttaggatggacttaaatttgtaaagtcattaattgactgtcatcagaaatgcctgtcctgctctgcatctgcagtctctaaggtgtatgcgccttctccattcccccaggttttgagaacagagtgctgttttagagctggcagcagcatctcagcccaagagaaggtaagccttgagctggccaatgatcccttcaaccccatagtggaatgaataaacagctgatcttgttaaaactcgcttcaaaaaaaaaagatatcaaatgatgaaatcacccaaaatagctggaattaccggcagattgtgtagtggtgaacctatggttttctgaagatatctcttaccctgtgattgactgtcagttggtgcagaaagtgagattgaaatgtagtttctttgcaggttatattcccagaggatgtcagtcccaaggaccagtagctgccatcagtttggattctgaaaactaactggcatcaacactgggtgtagaaacatgcttgccttatgtatcagaggacatgctcagcagatccaagagatatatttggcaactttttctagaaaaggcacattgggtatcattcattacattcttgagtttttttgggtttttttttttttttttgagacagtcttgctgtattgcccaggctggagtgtggtggcacaatcacagctcattgcatcctcaatcacccaggcctaagcaatcctcccaccttgtagctgggactacagctcacagcacacctggctaaaattttttttttgttgagacggattctctatgttgcccaggctggtctcaggctcctgggctcagatggtcctcctgcctcagcttccaaaggcacaggccaagttgtagctttgtcccttgccatcatgcccaacaagaggttctataccttttaatgaattgactttcataaattggttatgttggtgggcaaagttctttaagctggaaattgtaaattcctcctgaaatgttttttcatgcagttaccatgaactaatactacaataaaggatggtcttgggtgtcaattcttgaaaatgtgtatttgaagaaaaagtaaatttcgcctactgttgtcagatattagcagtccagatattcgctctagcttgtaaacttccctgtggtcagcctaagctcttaaccccctattctacagctttagactgaaggcaaaagctcaaagcatttaaggcctcctcaatttcggcccctgctgctctgtgctctgttccttggtgtagctttgttccagctcctgcagcattgcaccattcctaaccacaaccttaacagcatgtagggccccatactctaggccccatcttgctgtcttcctgtgttggaatcttgcctaccaaggcctgtcaagagggtcctcccccatactgtttgcccacaaggttcaagagtgattggctcccagtcttcctggactgaactacttggatctaggggttgcctgttatttagaagagatcccttaactggtagggccctttcagtaggacagtatttgggtaaggggagggtataagatgagaacctttgctaagttaggttcctttgggagcctccagtttgtttctccctctccccagccatcttgttggatctgccaagggattggactccttcattgtcctaggtttttaaggttttaaagcccaccttctgcagtcggttt

SEQ ID NO: 85469 - DNA, 1318 bp, Homo sapiens
ttacagtacctccagccatgtgcccatttccacaagtctttggggaaggccatgagctgagctgagagggttctctggggcctgggatgacttaagaaccaaatggcagataatgggatagggggcagatgcagaggaccaacgggaagttttaacacaaatccccttccccagatgatatggtttgcctttctgtaggtgggtggcccaggccaatttttggcaatatccttaacccacctgataggagaagcgccctcccctgcctgccttgcccattctacccaacaaggactccctggtgaggcccttcacttccatgtcacgtctgagctgcagctacagtctccttgccctcatggtggtcttcggcaggtgccacagggccccctccagggtcctcctggcctactgtcccttcccggacctcctccccactgcctgggccctcacccagctccaggatggtgggtaggtggccctgctttggggagcgcttgcgcaggctgagcaggaagggctggggcaaggagaagatgtccacgttgttgcccaggtcaatccacgtgacattggggaacttgctgggatccttaaggatgtcagtgaggtcgcgcagcacggcccgggtcaaccggttgccattgagtgccagtgtggtgaggcggggcagggtgctgagtgctggcagcagctgcaggaccatgtcgtccgtgaggcctgtgaagcccagctccacgctgtctacctgctccccacagcgctgtaggtagctggtcacccgctccaggtctcgggaggtcagtgggattcccgacaggtccactgtgttgtctggggggcttccggccaggacagccttgaggctgaagggaaaaaggacaaacaaggctcaggcacatagggcaggcctttcccccagaagctgcagtgccagcctctgctcggctctccgacgctagggactgcttttacgaaacacttggatgtcggatgccacaagtgcagaggtgggagcaaccagggacctcagtcccctgacactgccgcacgtctcagctgtcagggcccagctggccgtagcctgaggtatgtggctgcccctatttaccagaaaaattgagttaagagtaccattgggctgatatatggaagaagttcataagtgcaaaatggtgccttgtatagtaggcgagtgaggaataaacatttgctgctgtattcatcacctggactcagcttcccacttctaccaccctggggtggcagctcagcccccatgaatggcacaaaggatctctgagtcccctctttcaag

SEQ ID NO: 85470 - DNA, 1046 bp, Homo sapiens
ggtggtgaacagcctgagctgggtttgaattcagccccaccacttaccagttgggtgatcctaaccagtcaattgacaacagtgatatctcctccctaatttgttcctttttgtttcttggagatggagtctcactctgttgcccaggctggagtgcagtggcatgatcttggctcactgcaacttccgcctcccaggttcaagtgattctcctgcctcagccttctgagtagctgggattacaggcgtgcaacatcatgcccagctaatttttttatttttagtagagacagggtttcactatgttagccaggctggtcttgaacttcctacttcaggtgatccgcccatctgggcctcccaaagtgctgggattacaggcgtgagccaccgtgcccagcccatttgttcttttaacaaacatttgttaaactcatctgtgtgccaggcagtatcctagacactagggtcacagtggtgaacaggatggacaaaatccctgttcttcctctactagggggagacagaccacaaacaaaaccctgagtgtggggcgatactgtagcgtggggctgtggctactcaggagaaggtagcgtgtggactgacacatgaaaaagtaagcatgggccatcaaaagagtttggtgaaagttccagcagagggcacaaaggccctgaggctggaaagggactggtgtgtctgtgaaccagcaggaaggccagtgtggctggggcgggagagcaggagaggtgagacgagggggcgaggagagcaaatcagaggcccatgcttggatttcattcaggtgccatgagattccacccgaggggaatgagacctcatgacatggcttccgaatgaagaatggactgagcatgggtgtgtgtggggaaccaggagaggcccttaggttccagcagagctcaaactaccagctttccattgctaaagaaccagctcagtctcatggcattccaggttccaagggccccccgtcttgctgtatccccatatatgtcccctctacccaggtagagcccctc

SEQ ID NO: 85471 - DNA, 1003 bp, Homo sapiens
aaaccaaaccaaacaacaacaaaataacactgatgcctgggccaccccaatgatgggtgggtggctcaggcacagggatttttttttttttctttttgtttgagatggagtctcactctgttgcccaggctggagtgcagtggcgcggtcttggctcactgcaacctccatctcccaggttcaaacgattctcctgcttcagcctcccaagtagctgattacagacgcctgccaccacaccccgctaattttttgtatcttaatagagatggggtttcaccatgttggccagcctggtctcgaactcctgacctcgtgatctgcccgcctcagcctcctaaagtgctgggattacaggtgtgagccaccctgcctggccacacggggatttttaaaaggtccccaggtgattccctagtgcagctgaggtggagaagcactggttcaaagaccatgggtgggatcaggtggtctgcccagcatcactcctggaaccaccccaggacagaatgtagccagtctccaaagcttagaactgagcccctcagctgcagctcctccttcaatcacttcccagggtttccaaaatctggggccaaaatccctgtccaccctctcagcctgggcagctgagccttaaaagaagagaatagaggccgggcgcggtagttcacgcctgtaatcccagcactttgggaggccgaggcaggcggatcacaaggtcaggagttcgacaccagcctgtccaatatggtgaaaccccatctctactaaaaatacaaaaattagccaggcgtagtcgtgggtgcctgtagtcccagctacttgggaggctgtggcaggagaatcgcttgaacccgggaggtggaggttgcagtgagccgagatcgcgccactgaactctggcctgggcgccagagtgggactggtgtgggactcctaaacacacacacacacgcacacacgcacacacgcacacgcacacacgcacacgcacacacac

SEQ ID NO: 85472 - DNA, 1061 bp, Homo sapiens
gcagatactttgggctccccagtccctgtagggctgagtgtgattccacatcctggggacactgagcttctccctgccttgagggagagtagataagcccctgcagccccactgtgggatccttgaaacaagaagcatttcctcagacatctgcacatgggtcttattggtgtcctggtacccgcctcagctgcaggactgggagggctgatgggggggtgggagggggcttatcagacttcccccttttctgtgaaagcagcaggtcctcaggctctgggcttctgggctcctgttgggctcccttaacccctggctggggatgcaagggccgtgggcctggagctgccctgtgtggcctggaacggatggagcaggacccctcccgaaagtggtcatgggccttgagcagtgtgggagtggagcacaggagtgttcacttgcctatgacagagaggtggctttctaggaccctgaggccatttggaggaatgtccagctggatttgtgctgtgcactgaagtggctctttctccaaaattgcattttcctttccattccagtttccttctctagtctggtggtggtgatgttcagaaagggaatgagcagctagtgagagccttgagaacacacaagcctcacaggggtcagaccagcaagaacctcttcctcagcaagacagccagtaaagacaggggtctgcaaagcgtggggcaccctgttctgcaggaatgtcatgcaggcctctggggtgggagtcaatgagcaggcacagaaccagggaggggcagcagcgaggacagtagccctcacctccattcacacagcatgttctcctgcatttgataacttgggtttggctgctggatttgtgtatgcccagagccatatggctggtggggactcgggagcctttgttcctgtgcttcttagcctctttgagtccttgatctttttgaggctctgaaaaagctacacacaatcttcccaggcaaatgcactgactcacgcaatctcacaggcaatttcggagggttcacaaagcccctgaaacccag

SEQ ID NO: 85473 - DNA, 1051 bp, Homo sapiens
acaatcatatctgcaatgtccctcttgccatgtagggtaacatattcagaggtttgagggatacggttgtgagtctgcttggggagaggggcattgttctgcctaccacggttgtgctcttgccttttttcatgggtcagtataagagaagcctcctaatagaaaataaaaagtgttagccaggatgtggagaaattagagcccttgtgccctgctggtgggaatgtaaaatggcgtggcagctgtggaaaacaatatggtggtgcctcaaaaaattcaagatggaatttccatgtgatccagcaattccacctctgggtatatacccaaaggagatgaaagcagggactcagtcagatacttgtgaccccatgttcacagcagcattcttcacaatagccaaaaggaggaagcaacccaagtgtctatcaatagatgatggataaacaaatgtggaatatacagacagtggaatgttatccagccttgaaaagaaggaaatcctgacaaatgctacaacatggctaaaccttgaggacgttatgctaaatgaaataagcgagacacaaaagaagagctattgtaagattctacttatatgagatacctagagtagttaatttcatagagacagaaagtagaatggtgggcctagtgcagtggctcatgcctataatctcagcactttgaaaggccaaggcaggaggattgcttgaggctgagagtttgaggccagcctgggcagcatagtgagaacctctctctacaaaaaattaaattaaactgaaaaaaaatgtagaatggtggttgccagaggctaggataagagaatagggagttactgtttaatgggtagagtttttgtttcctaagaaggaggtggagttctgtagatagatggagagtctgggttttctaaaatggggagagttctgtagacagatgatggtgatggttgcataataatgtgaatgtggctgggcgcggtggctcacgcctgtaatcccagcactttgggaggctgaggcaggtggatcacctgaggtcagga

SEQ ID NO: 85474 - DNA, 1124 bp, Homo sapiens
caataaactcttattagtgaataagcattctccagatcctgtgtcaggcactggggctcccaagaagaataagacactgtccctgtcctcagagctcatggtttcagagggacaaggcacacagttgagcaatgtatgcaacagagtgctctagagtattctgggtaataaaagcctacaggtgacttgaggaatataggggagggagtggctggttcttctggcaggctacagtgcgagtcaggaagcctttctggaaaatgtaacatgtgacctgatttctgaagcctgaacaagtagtcaccaagcttcgggggttagggagggagaagtttgagcaatgcaggggcctgacatgtcgtggtgtgttcatggctctgcacttggttctttggggctcgaggtgacagaggaagcctgggccagcagcggatagggtagagaaggaagcagaggccagactacagagagtcagtctctggctgggtgaggtgctggacactccctgtaggccatgggaatggcctataggacagattctgagcaggagggtgacaggatcgccttgaagttagaaccatcactcggcaatgcaagattacttatccgatttattcattcttgcttccagactatgtagaaactggcaaaaagcctaaaagtctagtgttttcaggcctgtttggagagaatgatggacatgggtttgtgaaatatcaaatgcttgttctgacccaaattgctcataatcagaaagagtaccttttcttttttttcttttttttgagatagggtcttactctgttgcccaggctggagtgcagtggcatgatcatagctcactgcagccttgaactcctggattcaagggatcctcccaactcagcctactgagcatctggaactacagtgtatgccaacacacttggctaattttgtattttttagtagagagagagtctcgctattttgcccaggctggtcttgaactcctggccccaaaggatcctcccaccttggcctcccaatgtgttaggattataggcctgagccactgcactcagccagaggagtatgaatacttagatatttgcacacaaatctcagtctgacataagtctgca

SEQ ID NO: 85475 - DNA, 1141 bp, Homo sapiens
taatttctcatattcttttatagctatttttatacttagctttttaatctatcagacttgttttttaggaaaataattctggttaaaggcagaagatctactggaggctattaaactgggtaaattacaatcaaggcattctctccagatcagtgctggtgaggatggaaggaatcagactctagggacaggatgttgttggttgatcagaggtgggtgttgaggaacctggggtagttagaagtacctttaacagagattgagaagaacagatttggagtaaacttgggggatggggaggggtaaaaaataatatggtaagtttgacccttatggacgtagagggaggctgggttggaattcttaagtcttggatgtggaggtggttgctgaaatcatgggagtgagtgtgagcactcaggaggctgcatagagtgaaaggagaggaaccagcctaggaagcccccatgtagtgggcaggcaaaaggggagcaggtgcagaggctgggaggtgaatcagaggggtgggcattagtgggagaagcaggtctggaacccagggtgctcagcttctacatccgcgtgttgatctgggggtgatgtctctttctcctgctgactgtgtaacttcaggcattgcctctgtggaaggagcctgcaagcctgtttctacttctttgtctagccctgtttttttgtgggaccttggctgggtcattttcattgctcaggcctgttttcccatctggaaatgagctcggtcttgatctctcccagggttcttagtcttcctggtgtgattctgcccttgctgtgcccataccccactgccaaggctccaaagctgcgggggcctcaggtgggaatttcagacatagagggtgtgggccaggacgaggtctcagggaagcatttcatcaggtttccctttgttcctgtagacattcgtagaagttctaaggcataggacttcctgatttgacttaatgtgtatctcagaaacaacggggagatttcgcatcccccccttgtagaagatctgtaacaggagttggtgtgttgcttggcagggagcgtgtcaaaaatctcagacacacaaaatcccatttcagacggccaagcaccatgacaaatgctcagc

SEQ ID NO: 85476 - DNA, 1144 bp, Homo sapiens
gtgtgtgtgtaccagggagcacataggtggcactccctacgtggtgccctcagaccgtgatgttgcaaagcaatccctacctgggcatttgtctccaaaagcagcagctctaagcagcccgtggctacctctgaccctcccaggctcatataataaactatagcattttatggctggtctgtgccctccacactcaatcagcatctatttcgaattgttactgacttatatgatgttaccatttgatttcatttgcttgagtgttatcttgccaactagactgacttcttgttgttgttgggcccgtgataattcttggtgtgtctccccattgtctagcatggggtttgggcggcacaaatctagccaggtgttctgtaaatatgtgtggagttgaactaccaactttgtaaatgccttgctgcgtaatttctgctcccagcttgaaaaccttaagacagggcgggtaggaaaagagagaagataggaaaaggggtgttcctcggagggagattagcaatgtagtgacctttagggattactcagcagaagggagaaaacctcccaagagctccagataactgggatggggaaaattcggttacctcagccccactgggttgggacctggagaggaaggtggacatcaggaggtcacagcgtgcaggagagggaggaaggcagcagcagtccctggatctggggacagtggcttcgggaagccctttctgctcggggacttctgctggggctggggctgctggacttcatccagttccggaagctgaccattgcctctccaggcagccctgagatggggctaactttggggaatctcttttccttttttgggaaatttctttctcgatacacccacgtaccctgtaactggtgggtgtggaggagaggcaaatttcccgaaaaaggaaaagaaatttctcaaatgcaggctgaggtgaggtggggtccgggcagcctcacagacaagtaaaagcctgagagatttggctgggcccctggtttttcaggagtggacaaagcaacaatctagaaacccagattgctgcctctgtcctctgcctttgtttctccacctgtaaagtgctgcccatgattttacctaattctgtcaccaagtttttgg

SEQ ID NO: 85477 - DNA, 1031 bp, Homo sapiens
gtcttcccagtgactctccttggggcctggggaaaccacaagggagcttggattcattcacccattgctgccttgctgtgtgcctcagaggggctcagaggtggaaaataaatatgaaaaagcatccttgtcttctagaatctcgtcggctgctgggaagaccaaggggccagccatcgcagggagcataagcactgagacaggcacacgtgcctgcccggctatcgtagccaggctggcagccttgcaactccctggggaagaacaatctaggaacattctggggtgtggagcaggaagggagtgtcacatgcaaaaggcaggatcagccaaagcagaggggctgaagaagcagtgattcccccacctaatgtcagaagtaaaatcagttcatggtgaaaatttggggaaacaaaatcatgcagcaaaattgcctattaaaccccacacggaggtaaaaatcggttcatattgtggttatgtatctattctcttatgatgtgtatttatgtgcttatgtaagacctaaaaacaataatttttaaataaaccagttatttttaataagaatattctggccaggcatggtggttcatgcctgtaatcccaacactgtggtaggccaaggtgggcggatcgcttgaagccaggggttccaggctgcggtgagctaggattgcactactgcactccagcctgagtgacagagggagaccctgtctcttaaaaaaacaaaacaaattctatctcacaattcctttcctatccttctatgcatggtctttaatagctacaccccattccattgggtggctgtatttgattcctttattctgtactttcggacatccaagttgttttcagatttttacttttttaatatgatgcttcagagaacattcctggaagtaatgttgccagtgcagaggtgcaagcatgtttgagacagctgatagttacctctgtccagaactggctcactcccaacagcagcaggaggcacccagggtctctcactttcctttcaattt

SEQ ID NO: 85478 - DNA, 1110 bp, Homo sapiens
ctcctttcttcattttctccttccctctcttcctgtcctcctcccctccctccctcctccccatgctcttcctctcttcgctcctctatcccttttccccctcccctcctctcctctccacctcaaattaaagaaatacctctgggcacagaagactcgagcccttctcctgccccaggctcagtgtgctgctgggtgctgcacccgtgtgatctctagcaggatacagcagtacagacccccccatccccaaccctgggcccaggctgccagcaggcccagcgtggaccctggtgctgaaagaagacctggagcggtgtcttctgaggctccttccactctggagaggacactagggctgcccttgcacaaccaggcccagggctggagctggggcttcagaggcaggacctacactgccctccgctcctcccacccccgtcgtctagcccccacaggactgacaggcagctctggcaaggcaactgctgttggttcctttgtctgttgtaaaattctatatggtggaagtagttgtgccatgatctgatctagctcctgatttcagaaatgagaagattgaagctcctaaggggccaggagccacccaagattgtgctgggatagtggcagaaccagatccagagtcgtcctgctggcagcgcctgcttttgctgtgttcccttgctgcacccctggtgtctatccagagtgaacttgccacacacaatccctgatgggtccctgggcagctctgcccagccttcctcaaagccagggtgcccagcaccctccctctgcagggactgtgggagttcagcaaccccccacaccctagtccctcaagagtacccattgtgggaacttgaccagcacagctcctagattctggcctcagggccagcacctgcctctgttgccctaaatgggcacagctcgtctgtactctcaccaagcccactctgggagagcagtgttagggcaattccaggccctggagacagggtcagtaatggaagttacacatcctatgctctgaggccatggccaggccaggcctctctgccagcacggagtctgtgtcgtgtcctgagcctgctgtgggtgtgg

SEQ ID NO: 85479 - DNA, 1066 bp, Homo sapiens
aggagtaggtgacttctcaacaatggatagctggtgcagatcccagtggggccttagccaggaagtccctgctcccatcctgtgatccaggactgatgccaaggatgctcttttaagcaattaagaaaatatataagtaaagggttttgctagagagaggaggaggccagtgggtgggcaggggaggcttcatgctggctggcaagcaggctgtgtgtcgtggtggctccagagcaggatcagctatgtcctggtttagcgccagaccacagaattagcattcagcacacctgcttggcttggcttcttctcggagagactccttttgaactcgttcttgtctcctgtcgcctgggacaggtgcagtctctggggctttgtactctgcatgcactgccacacggggatgggttttcacctggtgctggccccaccccccaccagttctgcatactaatactgcagcatccctttctcctgaccctggtgacatctgattggctgctgtcgctttctgaggcctgctcactggatccctagtagcccaccctgtgcttggttggattcctgtcccctggttgattagagcagaatctccaaattggcaagagattcttggccacacctacctgaaatggcagccacaataggtgtgcccaggagccagactgctgggaccacagggttggttttttgacaagccacagtcatctaggcaagcctatctgaacctgaccggttctgggcttcgatgtgtccgttcctcagacttccagagtgtttcttggatagtgagtcacctctggctgctgagtgggggaagttgttttcctggttggcctgctggtgactggcagcaaggacagctccccatgtagccctaacccccctgccctcagcacagcggttagtgccctgggaaccctggagctgcagggtgcaggccccgttttctgtgctgaccagtaaggtgcttgctgtcccacctgcagcttccagggcaccaagtaataactttccacctcgcccagtagatcagggcagccagtgtgcgagcctgtggtct

SEQ ID NO: 85480 - DNA, 1047 bp, Homo sapiens
gaggagccctcatcctggaagtggcctgttggtgagccttgaatctcaccaagatcccaccacaatcgctcaagtgtggtggacgcctggcttgcacttaccaagctttccctgggtgtcctggaactccagcagcttccttagcttcctgctctcacaatgccgcggcctctgctgctcccctaccccagcgcctgcctccgctgctggttctagcaggctggcccggcacaagcttctttcctgaggaagacactttgtgtctaagcacagggaggaagctgagctgaggaagacactttgtgtctaagcgcagggaggaagcagagcccggggccctcgccctcctctctccgggggtgaagacgccttaggcagccagttttccctcgcactccctgagaagcagctggcctcttgggggaggtggggtctcaggaattgatcttgtttcctctcttccttgtggagataattaggcttccaggcttgggagcccttcacccacttcctctgggttcttatcctcttgtccagagcagcagtgacaccctccccgccaggtaacttaggtgcccctgggagaacaggcccggccctgtgagctgagcctcagctggtgcgtcccccacctctgaccccaccagggtgacttcttgcagctggaggacaatcatggtctctctccctcttcagtgattaccttgggtttttgcttctttaattctttggataattttggttcaccattatttgatttgaaaaagcagcgctcttccatgtattcatttcccagccttgttttctttcaggtcttgcctctgcgctctcctgctgtgccgctgggtggcgctgcgcctcctccacccgcttcgcccccatctaagctccgtctccggccgtagacagcctgaggaggccgccagccctttcacatgaaatcagcctgctttgtttttgttttaatttggtctttgattccttttactgttggcagaaacaatgttaattcctgggcctcttccttgctaaattttggggtggggg

SEQ ID NO: 85481 - DNA, 1046 bp, Homo sapiens
gtttgaggccttggacattgagaaggcagagcacatggagaccaatgcagtggggccctcaccatccagcgacacacgccagggccgcagcgagaagagggcgttccctaggaagcgggtgagctcctggggctgggcagcacctcaggggtggctcgggggcgggtcagcatgcaccccatgcgccaagtcccctccacacaggcctgggatgtgctcctgccaggcttctctccaaccacctcctctgcatagtgacttcttgagagcaggcctgtctcctgcagcttcatatcagagccttctccgtctctgctgaaggatattctcatgcattttagatcccagatttaattaggatcactctcttcctatctgagacagcccagcaacaaggctgaatgtcacaccttcctaactctttctttcagtacaactacacccctcgtttctccactcagcccaaggtagactcggcttctgaaatcctcctgggcacccgcctgctgcttttgtagccggccaagtctaagctcatcttctcctggcttctctcttgttcacaaggtgcctagtgcctactgtctggcccacagcttgccacctgccaccacagagcccagggctcttccttctgtgacccagagaagctggaggatggggtggggccaggaaagtgacagtgactgggaatccaaaagaaaaggctgctctatcaaccagggcatctcaggacccgggtcctgtcctggccctgctgcagacttgctatggtggctaggcagatcactgcccctcgccaggagcaaggccctggcggctcttggaggggtggacagcaccagctcgtccctcacatgcccacattgccctgggctgcactgaccagcggctgctctctgccacaggacttcaccaatgaagcccccccagctcctctcccagacgcctcggcttcccccctgtctccacaccgaagagccaagtcactggacaggaggtccacggagccctccgtgacggtgagcccaggcgccgcgtcctcc

SEQ ID NO: 85482 - DNA, 1241 bp, Homo sapiens
atcaaggtcctaggttcaagacttggccctgctactgacccccaaagcaagtgcatgtgtcccctcctctacagcggcagtctgctgcctgtgtagacttagacccagtgatccctgagggcccttccggctcttagaccccgagtctctgtcacgtattgtctacatttgcagaccgcagtgcgctgaccttggtctgagttgtcccaggcagcagatggaacaggggcactcagctggcctctgaccatagtctgcctctttgcagactctctgctgtttcttctcctgtgtgctccctgggccttctctttctttctgccccacatgccctagactctcctctccagcctcttctgccatagtcattgccatgccctgttcagacctggtgaacagggcctccctgtgggcctccctgccaaggtcatttgcgcttgccctccaggtttgaggagcatctttttaattcttgattgggcctcatcctataagaactggcttcaaatcaggtagtaaagataaaagttcagcatcccaaattcgaaaatctgaaatgctccaaaatccaaaactgaacgctgacattatgctgaaaggaaatgctcactggagcatttcagattttggatttttggattggggatgctcacccagtaagtagaatgcaaatattttaaaatccgaaacagttcttgtcccaagtattttggataagggatactcaacttgtactaagcagcggactttgcacattgctaacctaggaacctacctctgtctaacttgcataattgcatgagcctacactgaagcccctgttggtcagcactgggcaaagctggtctttaataccttttccctaagtctaataacctgtgacttctcaccaccctttatgctttggaaatgcttttaatcacgactcagaatgagcagggggtctgtggggttaagggtcaggagccagctactggggtgggtgctatactaactgctgggaggagcttgcatgatttggacattgagtgtgaagtgtaacttgaacttaacataactgagtgtcacatctgtggcttccccggccagcagaccgagagggagccataggcaggccagattcttaggctgggctcggctcactcttgtttgtgttgtttttccctatattaatgagttctgtctctgcatgcctttcagtgtggggagttttgtttcatttacgttgtgttttgtttttg

SEQ ID NO: 85483 - DNA, 1013 bp, Homo sapiens
atttgcttgctccttagttaattggggtgcatttaaatcctggctaatggaaaggttcaagccaggattcgttcaatattggcttttctgtgggcaccaaattaaaacagccctctatgaccctgccctgcacaaacaccccctggggctgggaacatagtccctttctcacctgaggccttcccaaggggcatggctgctgcacagggctgtgtatgaggctgctcaggcaggactgggtccactcactgctgctgtggcttaaagattaccccacaggagctcagatgggaccagccatggaacagattgacactagttattgtgacagaaaggaattaagggttatcgattggatcctgcctacgcagttccacagatacacaaagaacctagggaaatggccttcccgggttgtgtcatgcgacttggccccaggcagctctggagtgtcactgttgtgttgctgtcccccaggagctgaacaaccgcctggctgcagagatcacacggttgcggacgctgctgactggggacggcggtggggaggccactgggtcaccccttgcacagggcaaggatgcctatgaactagaggtaccatcaggagccaggccctgcctgactcagctctgcacccaggaaccccaggggagtgcagcatggcccctgtcttacagggttgtgggaggaacagacctgagacagcaggagtcacagggtccaggaagatccaaatcacccgaaggcggcgaggagcagtgagctgccaggtggcatgagagccactagccgagtggagccctcgaggggctgtggggatcctgaccccatctcactccacccactcccctccatttctgctatgccacaaacactgaccactcaaaaggacacgttctgtagccatgtggctgctgcagctcaggtcagggaggctcgctttatgttagaatgatggattctggagtatagggtgtccttttaggaaggcacttagatttctccacatt

SEQ ID NO: 85484 - DNA, 1031 bp, Homo sapiens
tggtgggaggggcttgagggacactggggagagtagcccaaattgaagtatgagtgctcccatgggccacagctgccaaagccccagggcccagcactgagccagcccgagctcaccctgctgggctggttctggtggctttgagctctgtgtctgtcttggagccacctcctggcaatgacactgacaggccagggctgtgaagagcagtgcttggcatgatcagctcctgcctcgaggccaggtttcacccagccctgctcatgtcggcctgctgtcagctgtgcctgtgttgttccttgcacatcactgttgtgacactggtgccgcctccaagagatgatgctgcctgctcttgttccccagccaggaagcagtacatctttagtgtgctgtccagagccagccatgcacaggagggcgggcggaggtgggagcggcaccgcgtgtgtttgggattggttgtgtgtctcatgtctgctctctcctctgacagtccgtaattgagcaggtctcgtgggatacctgaaatgcacccgcttcccggcccatgcaggaggtaaaccgcctctcccaccgcctgcatgcactgctcacacccccatggcaaacgcctgtgtcatggttactttatttcaattcatcctgctccaacaaacacataccaaatccaagtgaggtttctttaacctgctctggggagttaattggcactctaacctcttaacagagatgaccctggcagtgaggtgctcctctagcctggtgggcaggcagagagccaggcacccatcagcatgcatgttggataatctgtgcacaacggctgaactcactccaccccctcaggggacacttgtcttgccctctgtcacgaggtggaatttacagatgtccacactggcaagtgaagtctaccgtcaccaaaggcctcgcccacctagtgagccacttagtggcctctgtctgtcaaggctaacagggtggtcattctaggaatggataaaccaggactagagcttggtgaagat

SEQ ID NO: 85485 - DNA, 1028 bp, Homo sapiens
ctgtctttgccctggtcacctctgactgggttagtgacagccttggcagcaagcagtaaccccgaagggacatactggctggcatagactcggaggtgtggcctcacccagaccacggcctgcccagtcccccatagcctgtgtgtgacgctctggccctgtgtgtgatgtcccctctgtggttctcagcgtccctcctgggagcttagccgccaccactctgtgaaagcatggcgggctttcctggcccaccaaactggaaacatatagtaaagccagtagcccccaggaacagtccacactgggggcgggactcctgcatggaatgaaatcaccttgtcctttctgcagggatccaggtccggcacgatcaagacccaggctacatgcatcacaagtttgccatcgtggacaagagggtgctcatcactggctcgctcaactggaccacgcaagccatccagaacaacagggagaatgttctcatcacggaggacgacgagtacgtgcggctttttctggaagaatttgagcgcatctgggaacagtttaaccctacaaagtatacctttttcccaccaaagaaaagtcacggaagctgtgccccacctgtctccagagctggagggagattgctttcatggcacagaacttgcggcacctccagcgaaagccaaacctaaccaagaatggggctgagccctccctgcgggctgctgtgcgttctgagggagggagacctcggcactagaaaaaaatcgttaaactaaagtctcgtctattagaatactaaattgaactaaagaaggttaggaaagggaaatttctgttacttcgggtcagttatttcgggccagacctttttcttgctcctttgccaaaataacttcagtcacgacctgccacggggtgctttcatgagtgtggtccgtatcttggtttggaatcgaaacttctgctacagcacagaaaaggcacagtgcctcttccaggtcgatcccattcccttccctgattctagaaaagtc

SEQ ID NO: 85486 - DNA, 1115 bp, Homo sapiens
tcgagggattgtgctgtggtgtctgagtgttttgttttggttttcttcagcaaagtgaaggtgctttttaagttcaccaaggtggacagtcgacccaaagaggacacacagaagctgctgagcatcctgggtgcgtccgaggaggacaatgtcaagctgctgaagttctggatgactggcctgagcaagacctacaagtcacacctcatgtccacggtccgcagccccacagcctcggagtctcggaactgacccgtcacacacacctgcctaaagacagggatggctgtccacaggatcctccagccccgtgagagggactgtcccttgagtttctcaactgctggaaggagctgtgtcccagcaaggaagggaaaccatcagggctgggctcggccctgtcaggtttggggcctgtgtgcttcccagactctccctccagccgttggaatcgctgaagatggcaatgaaaggcggagggatgatgggctctctctgtgttcaaactccttggagagacgactaggaggacagcttgcctcccaggccccttgtggacttagactcaaaacccgcaggagaaacaggtccgactcagtatgcagtcgcaataacatgtctgctcccgaggttaacattcaagcgtttctactttgaaattcagcaagagtttctgggccttatgtttgagggtaccttttgctgcagttgtgaatattcagtacattgccagctcttggtcactgagtgattgagttagggctccgcaagagactttggggagtgaagtggatctcttcctcatcttttggtcctctgaaatgtgtgttctgaagccatggggctcgtcttctggggtgttcccctgcaggtgctggtgaaggtaacctggggcttaatgatggagtccctgatcatttttgcacaagacaggttgctgaggggtcggcaagcatctgacttgcccaatcccctggatatggtgagccccgccatgcttttattctgtatcgcttttgtctttattgctgctttcaacatttacgtttggttacagttaactattttcggagtgtggtgattgaagacaatttcatcatcccactgtacttttt

SEQ ID NO: 85487 - DNA, 1052 bp, Homo sapiens
gatcctgctgggtgggatatttggtattatatgatagatgtattagctttctgagtccaaaatactctggctccaaaacccatgtggccccaggggtttcacatcaagagattgtgaacctatagcacccttgtgaacagtgtaagttagaaaggatgcagctgacctaaacccgccgctgaccaccttctaatgtgcctgtcatgcagatgctgaagtgcattgagctggatgagcggctgaaagccatggaccaggagatcacagtgaaccctcagtttgtacaaaaggtgatgagggttcccttattacaagaagtaggctgggtggagaaggaggggtgttgtcacatcaggcacaggaactaagtttcaggttattaaatatttcttgaaaaccttaccagtacggtcatggagaaatactagttgagagcattttcaaatgatggcctggaagtacacttagggatgcttagggtggttcctggaattgcctgcccttgttcacagggggctttgttctgggagggacagggcaactggtgtgcttattgggctgccggggaacccttgataaaagcaaacataaatacataacttcactttacctttacagagtatgggctcacaagaagatgattcaggaaacaaaccatccagttattcttgaaactaacatccatcctgagctaaacaagagaaactaccatcttggccagtgacaagtgttcggagggcagcagagaggaccaagcctgtgtcacctggagactaagaaattaagttttgttttgacatcttcagtcctgtgtgctttcagaaaaccattttctctgcaaagaaaggaaacagatttgcaaactttaaagtctgtcgtggatttatttatcctcagattattgttactgcattaaatctacctttttgttttaagttgcttgaacattaatgtgtcttctgtatcacttttttctcctctgaagtttttaataagcacattcattgtgaacagaaatagctggattttaggaatttttggaagatttggat

SEQ ID NO: 85488 - DNA, 1073 bp, Homo sapiens
ttttgccatcaagaggtagccattaaaaaacagctgccattaaaaacacaaactctgtttgtgactagtaattgaagtttagataaaagaacccaaatgctaacaaacataaaagatagtacatgttacaaaagatgttaaattgcaaaatagcaaatgaaaattaaataacggtttcaaaaattagctgggcgtggtggcacatacctgtaatcccagctacttggaaggctgaggcaggagaatcatttgaacccaggagatagaggttgcagtgagccgagattgcaccactgcactccagtctgggggacaaagtgagactccgtctcaaaaaaaatttttttttgatcaaacaggaagagtctcaactcgaaatggtctttccagggctggggtagtgactcacaaagtcatcaaggtcctgggtccttcgtatgttgacacgaagtggtggattgtggtacactgagctcacaagcactgcctgccagagggacctggggagggctaccataaggtatggtgggcaggaaccgtgtctttaaaggacatagctagtcagaaggttacatctgtgatagtggctgctccatttttggcatgatgtcccagtgctaaaatgaaaagaacggggaaacatcaaaggatttttctagccaagtttttcttactagaaaatccaaagaagtctcaacaggtagactgtatcagtaggtgatggcatggctgggatggaaggcagctggggatgggttaaatctgccacctctcccattgaaatattactttgtgttaacattttagtagatgtttttctttttctttttctttttctttttttttttttttgagacggagtcttgctctgtctcccaggctggagtgcagtggctcgatctcggctcactgcaagctccacctcccgggttcacgccattctcctgcctcagcctcccgagtagctgggactacaggtgcccgccaccacacctggctaattgtttgtatttttagtagagacggggtttcaccgtgttagctaggatggtctcgatctcctgacctcgtga

SEQ ID NO: 85489 - DNA, 1902 bp, Homo sapiens
ctgacaatatgggatatacttgcttaaaaaatagtatgtaagtgtgtttttgcttcctatacacatttgagtcttctgaagtttgtttgtttgtttttggttttttttttttttttgagacggagttttgctttgttgcccaggctggagtgcagtggcacgatcttggctcactgcaacctccacctcctgggttcaagcgattctcttgcctcagcctcccaagtagctgggattacaggcatgtgctatcacgctcagttaattttgtatttttagtagagacggggtttcttcatgttggtcaggctggtgtttaacccctgaccccaggtgatttgtccgcctcggcctcccaaagtgttgagattacaggcgtgagtccccacacctggcctcttctgaagttttaatctgaattttttccctcctttgcatctttagcctcttagcaatgcataccacgagttagcacaagtgtattcaaccaacaacccctcagaactccgaaacctggtgaataagcacagtgaaaccttcactcgcgataacaacatggggctggtgaagcaatgcttgtcatctctttataagaagaatattcagaggctaacaaaggtgaggaaagtgccaccttcacagggcagctcctgaccccctgggggccatgtttccctttctctcccttttcagagctgaggaagcaggtacagggataaagcatggcaggatttctgtgctgagagagaactctcttgtgattggcttcttagaaagaatttgatgtatacctttggtcttttcagggctagagcagggtatttggagcaggtgaagaggaagaaaggtaggagacaaggctacattgggagacagtgaaaggcagcctcagagaggtcagcagctccagcagggcagatgagggatgctaatgatgcagacctcagtgcactgtcaccagccttgcaacctgtctgttctgtctgtgctgatctctattagaacattttttttttttctctcttgacacagtgccttgctctgttgcccaggctggtgtgcagtggcgtgatttcggctcattgcaccctctgcctcctgagctcaagtgatctgcccacctcagcctcccaagcagctgggaccacaggtgtgagccaccacgcccagctaatttttgtattttttgtatagacaaggttttgctatgttggccaggcggtctcgaacccctgtgctcatgtgatccacctgccttggcctcccaaactgctgggattacagacatgaaccaccgcacccagccaatgagaacaccttatgtgaacatagtactactcggacattaccatttaggccagggttgtacaaactttgtgcaattgacttctaggatgtaagccaattatataatttttattttcttctaggatgtaagccaattctataatttttattgtcaagatgaaaataacctgctaggttttgactatagaaaatatgcttaatgtcaaacgttcaaacagtacagaaaaataatgaaaaatgaaattttttgtgttttaggaaggtataggctgcaagttacaggaatcctgtagctcaacaaatagaggattgcttttttctcttgggaagtctggccagatatgcatagttcacagctgctgagaacacagtgcatctgttcctgtgcacatcctttgccttgtgtcagccatggtgatgcatggttggggacgagccaaggaaccagaatagggtagctgtttttttgctaggctacccagcaatggaaaaggctgatggatttggctacgtgaggacttaggggagaggtgacttcccctagcccaatggagaagctagagaagagaggtgggtcggggtggccgttgaggt

SEQ ID NO: 85490 - DNA, 1093 bp, Homo sapiens
ttttctgaatggctaagaaaatggagtacaggttgactattcctaatctgaaaatttgaaacccaatccaaaaatttgaaacccaaaatgctccaaaatctgaaatctttagaatgccaacttggcactcaaagtgctcattggagcaattggatttcaggttttcagattagggatgcttaactggtatgtattctgcaaatattccaaaatttgaaacacttgtggtcctaagcatttcagatagcagatacatgaaatgtgttgacatttagataattttagtcaataaaatgtaaaacacaattacattatttggaaatttctggaatcaatgaattttctccttctgctaatacctgcctaagtaaaattaaagtgatgatttaatatcaatttgttcacagctttgtttgctagcaaaatgctttaagcctgcccttccatatcttgacgtggatatgatggatatctgtaaagagaatggagcctatgatgcaaaacactttttatgttactattattatggagggatgatctatactgggctgaagaactttgaaagagctctctacttttatgaacaggtaatctctctaaaaattagctgaggttgttctgaacttgtgtgatcaaaaaagtgctcccataggtttgtggctagagtggtctgatcccagggcctccgtttcaggtgttggtcctttcagagactacttctctgtgatcatgtaaatagtggtaacctgatccctaagttgaggagcagcgccagtgcatagaagagcacttgtctgggggttctaatctaggcttgcacttataccttatctgatttggaataagttatgacatctcttgacctttatagcttcctttgcatataaggaagagattgaactgagtgatcttggttgtgtcttattctaaaaccatgtgtggtattttgttaagttttatttaatcagtgaaacattctcttgattcaaaatttaaagggtagaaaggagtacacagtaaaagtccctcccaccctttctgtgtctgtgtaatgaaacatagtacacaatttggtagaatattctggaggttt

SEQ ID NO: 85491 - DNA, 1043 bp, Homo sapiens
tttgtgtccgttctgtatagtgattgtgcaaaataaccaggtcaggaaaatctcatggattctagttcttatttatttgttttttgagactggatcttgctctgtcacccaggctggagtgcagtggcatgatcatagctcactgcagcctcaaccttctaggcacaagtgatcctccagcctcagcctcccaagtatctgcaactacaggcatgtacccccacgcctggctaatttattttttgtagtagagacagggtctcaccatgttgctcagactggtctcaaactcctggccttaagcagtcctcctgcctcagcctcccaaagtgcttggattacgggcatgagccactgtcctggcctagttcttaattctaaaaaatactgttgctcatttaattttacagagtattggaggcaggatggatttcttgcatacattgtttctgtattttatcccatgaactatcagggtaatttgattcttttctccttattctaggtttgtgaagttttctatgcccagtgttcctgacttcgaaacgctattctcacaggttcagctcttcatcagcacttgtaatggggagcacattcgatatgcaacagacacttgtaagctaaataacattttattctccattgaaaatattttgcccttgtggttatatttatattttgaatattttgttattgtatctagttgctgggctttgccatcagctaacaaatgcacttgtggaaagaaaacaggtaagaaatactattcaagtattcctagttttgttataatatgtaactagcttacacaatgaattactttatcaagattccagttagtactgagcatccaccacctagatatctgtggtcacttgagagcactcacagccattgctgtaagctcaggcagtccccgcatcccctgaatgaggtggaggcacggggtggtttggcacctcagggaggctgctgctggaactaccaagtagttggaattaccaagccagtaccctttatgttgtaatatgctgggtttt

SEQ ID NO: 85492 - DNA, 1410 bp, Homo sapiens
agagtaggtgtgtgaggggaagtagcaggagataaggctggaaaggtagcagggaccagttattgaagggccttagttcaggctgaggcgtttgcacttcttaaagtcattggaataacttgattgaatgcacagtttatagaacagacagtactaatatggagtgcgggttggaggagagaaagatcacagtaggcagaccatttagaagatttatgatgtaggctgggcgcggtggatcatgaggtcaggagttcaagaccagcctggccaagaaggtgaaacccccgtctctactaaaaatacaaaaaaattagccaggtgcagtggcaggcgcctgtaatcccagctatttgggaggctgaggcaggagaattgcttgaacttggagggcggaggttgtagtgaaccgagattgcgccactgcactccagcctgggcgacacagtgaaactccatcttaaaaaaaaaaaaaagatgtagtccagacaaaaaatgatgaggatctgaattagggcagagaggggagagagaaagaaatggagctgagagactttggaagtaaaactaaatcatttggatgcagagagctgttaatagtaacgtgcatttctggcttgggagactagaaaacagaatagagaaaaaggtgaaacattcagggtcagagagaagtgggaggtccagtgtaatctctaattcgttttgagaccacggacaggttgtttcactcctctggtccttctggatcctcatccgaagtgaaggagattaagaatcaattttgggaacttcaggctctgaagtacaaagttgtggttagagttccatcagtttggttagtgctgtagctgaaatgcaatagtgttgttcctgttttccagggcaaatgacacagctttgtgaactgatcaacaagagtggggaactccttgcgaagaacttatcccatctggacactgtgctcggggctctggatgtacaagaacactccttgggcgtccttgctgttttgtaaggagcatcttcttttatagttctgtgcttgttaaaatggaacactgtgcacttcctggctttatttttatttatttatttatattttttgagatggagtttcgctctgtcacccaggctggagtgcagtggcacattcttggcacactgcaagctccgcctcccgggttcactccattctcttgcctcagcctcttgagtagctgggactacaggcactcgccacccgccccagctaatttttgtatttttagtagagacagggtttcaccatgttagccaggatgatctcgatctcctgacctcttggtccgcccaccttggcctcccaaaatgctgggattacaggcgtgagccaccacgcccagccctggctttatttttatttattta

SEQ ID NO: 85493 - DNA, 1024 bp, Homo sapiens
agaaaaggcagttgaacccaggctgcttggctccagagtctaatatcacggggaaaacctcacgggagacgtggcaacgaagttgtgcttcattgaagtatctgtccaggtggaaaaccgcagggcctctctagcaaaatccagaaccagaaaatacttgcttaattatgagtttccttccttcttttgcccactatccccatttaacctgcggagggatttcagaagtgcagtgaataaagatgcaggggactatggaacactaatttccggctacggcgaattcaggctgtttccatggaaacagtaacgggtgggcagctaggtatagtctcgcggtgcttgaaccagcggaagtgacgtcgccgctcgcgaggacctcaggtggatcgccgcggcccctcctcccagagcggcagccttttcccgcgcgtgctgccttcgccgctcgggccgcccgggggaaaacatggcgtctgccctggagcagttcgtgaacagtgtccgacagctctcagctcaaggtaacgccctaggccgccgggctgggcatgggcgggtaccgggaactggcctggatccccaggcgccagcacggacggctggaacagcccttttagtcctgagactcttctccggggccgggcttggggttgcggcgtttagatcagggcaggatcgagcgcggccgagtgtaggcagccccctcgcgctccgctgtcctcgccggccggcctcccctccctcgggccgccgggagccccctccccccggcctgggccccttccaccgggcgctttgcttgacagtttgggggcgtgacttccgccaggagccatctcgggcgactattggttccttctgtctctcttgccttcggtgattggcgcaccgccatgtcatctttgccgccgatccgcagcttgctgactaggccgccgggagcgggcgggaggcgagtccgttctgggtgtcttggctctatggctcgcctctgccagctcctccgctgccaggcggcgca

SEQ ID NO: 85494 - DNA, 1095 bp, Homo sapiens
tcaatcatccatgtcttcagctacaaccccaagagtgctcgaaagcaacccacggtgtggcagttcctcaagaggttacaggcctttccgctcggctgttttcctgctcaggagccgcagggccgtaggcagccatgacgcccagccggaatggcatggtcttgaagccccacttccacaaggactggcagcggcgcgtggccacgtggttcaaccagccggcccggaagatccgcagacgtaaggcccggcaagccaaggcgcgccgcatcgccccgcgccccgcgtcggggcccatccggcccatcgtgtgctgccccacggttcggtaccacacgaaggtgcgcgccggccgcggcttcaatctggaggagctcagggtggccggcattcacaagaaggtggcccggaccatcggcatttctgtggatccgaggaggcggaacaagtccacggagtccctgcaggcgaacgtgcagcggctgaaggagtaccgctccaaactcatcctcttccccaggaagccctcggcccccaagaagggagacagttctgctgaagaactgaaactggccacccagctgaccggaccggtcatgcccatccggaatgtctataagaaggagaaagctcgagtgatcactgaggaagagaagaatttcaaagccttcgctagtctccgtatggcccgtgccaacgcccggctcttcggcatacgggcaaaaagagccaaggaagccgcagaacaggatgttgaaaagaaaaaataaagccctcctggggacttggaataaaaaaaaaaaaaaaaaaaaaaaaaaaaggaggttacatacagctttccatctggcccaacaaccctacttctgggtacatgcccagaagaattaaagacaggtattcaaaccaaaacttgcacacagatgtccatagcagcattaatcacattcactaaaaggtggaaataacccaatgtccatcaaaagacgaagggataaacacaatggtgtgtatctaggcaacggaacattaatcaaaaaaaggaagttctggtacatgctacaacatgggcaccatatggatggatctgggaaacac

SEQ ID NO: 85495 - DNA, 3299 bp, Homo sapiens
gaggctgaggcgggaggctgggaggctgaggcgggtggatcacgaggtcaggagtttgagaccagcctgaacaacatggtgaaacctcgtctctactaaaaatacaaaaattagctgggcgtggtggcggatgcctataatcccagctactcaggaggctgaggcaggagaatcgcttgaacccaggaggcagaggttgcagtgagctgagatcgcaccactgcactgcagcctgggcgacagagtgagactccatctcaaaaaaaaaagaaatgatggaactagacacagaagatgccacccatgtttatatagcattcttggtttatctggacctcatagaaagcaaaactggcatgaactaaactgtgtcagattaccagaactccagctcatctgccttgttggtactgagatagaagaggaggggttacagactgtggtgcctacccccatcactgcttccctcagccataacaggataagggagatcttgaaggcatcttgaaaattgccaggtgatccagatttgctgatgtcttttactctggccataatggagtctgattctacaatagtctattataaacttactgatggatttatgctgccagaccctcagaatatttctcttagaagatgacatctatgtttcctgatgcttgttttattcatacaagattggatttgagacccgtcagactgctttgtcttttatctcagagatagtcagggttgacttagatagtgagggttgacttccctattccataaggttttcattctgaagaataaaacttccccagggggggctgggcgcagtggctcatgcctgtaatccaaacactttgggaggctgaggcaggtggatcacgaggtcaggagttcgagaccagcctgaccaacgtggtgaaatcccgtctctactaaaaataccaaaaaattagctgggtgtggtggcgcgcacctgtaatcccagctactcaggaggctgaggcaggagaatcgcttgaaccccggaggtggaggttgcagtgagccaagatcatgccactgcactccagtgtgggtgacagagcgagactccagaaaaaaaaaaaaaacaaaaaaaaaaacctctccaggtagaagactttttctttcttaaaaaatataggtggtttctttacaactttcttatctagagacagtttaattacagttgtatacaggtttacgcctaggatgtgttcagacaggtggaacctgtgtgctgcttttgtcatcccacacttatagcactcatagttgcctctgtttattgctcccactgctagctcattgttgagactgccatctctttctcttactcaactctcccagtgccttttggccactgcagctaccttggaatggcattttatacataccttgtcacctacttctgctttttcctacccagtagaaggtaaaagatttctttcaattggtcctcctgttgcaatgactgttatttctcttttttggttaactttaaatcaaaactcaaaatatgttcatccagagtgtaaacttacatgtcctgagtaacagggataggagacatgctacccacaagagttctgggccttccttttcattcttattaccaccatccttattatatcatagcttgaatattacaagagagatagtgtgggacagtatcagtttttaaaatgtcttcattaattagacccagttattccacttttgttaatgtctctcaaattgtacaaggtatgaaaaattatatgcacaaagatgttgcgagtgacgttacttttagtagcccaaattataaaccacttaaaagtttggggtaaatatcggcaaactttttctataaagggccagaaagtaaatattttaagtgttttcttttttctttttggagacagagtctcgctctgttgcccaggctggaatgcagtggcatgatctcggctcactgcaaactccacctcctgggttcaagtgattctcctgcctcagcctcccgagtagctgggactacaggcgcctgccaccatgcgaggctaatttttgtatttgtagaaacagggtttcaccatattggcaggctggtctcgaactcctgaccttgtgatccgcctgccttggcctcccaaagtgctgggattacaggcatgagccaccacgcccagccctattttaggttttgaaacctactgtctctgtcataacttgtcaacactgctgtatgaagcataaaatcagccacacacaatacataaacaacatgggcacggctttgttccagtaaaactttatttacaaatgtgttgccatagtttgccatccctgggtctaggaaatagtcgataaacaggtatatacaaacgatacataatgtacttattaaaaattagggccaagcacggtggctcatgcctgtaatcccagcactttgggagcccaaggtgagcagaccacgaggtcaagagattgagaccatctggctaacatgatgaaaccccatctctactaaaaacacaaaaattagctgggcatggtgatgtgcgcctgtagtcccagctactagggaggctgaggcaggagaatcacttgaaccctggaggcagaggttgcagtgagcggagatcacgtcactgcactccagcctggggacagaacaagacttggtctcagaaaaataaaataaaataaaataaataatgaatattattaaaaacatgagaattttacattaagtaaaatttgcaagatgcaaaagtgtatgagtgggtgtaatcatggctgaaataacacatcaagcatttgataacaagatgacaaagtaaatcaaattactaactgtggttacagtgggatgggaggcagtaaatggatgactttgtcttttctcaatgtttatttttatttgtattacttttataataaaaatgttttaaaatttaaaaaaagaatgaagtgagggtgtctaaggtgtaggagcactctgtcccaagaaggggagctttgccggcctgccattttgcccagactttcttccctccccttcatcaccctctggaggcctgggatgctccagcaaccgaacctatcccctctccatgaggctgtctctcagtaggaggagaggcggtgtcaggagtcacagcccggctttggtggccttttatccctggcagtaccaccatttacatagctgtgtgcatggtccaatcatgctgtgcctctcttccctcttccataaattatggagttatcaatgaggctggaaatgagcaatgagg

SEQ ID NO: 85496 - DNA, 1056 bp, Homo sapiens
taaaaccctgtgatgtttgcctttgagtctggtgacacggatacaactgtctgtcagacgtgggaaggatgctcagaggatcacccctggcggtagtatttttgtccactctttaaaaaaaccatagtagggggctgggtgcggtggcttacgcctgtaatcccagcactttgggaggttgaggtgggcggatcacctgaggtcgggagttcgagaccagcctggccaacgtggagaaacaccatctctactaaaaatacaaaattagccgggcgtggtagcgcatgcctgtaatcccagctactcaggaggccgaggcaggagaatcacttgaacccgggaggcggaggttgcagtgagccaagatcgcaccattgcactccagcctgggcaacgagtaaaactctgtctcaaaaaaaaaaaagaaaaaaagaaaccacagtaccacagtagttgggaccaaagtgctctgaccttgccttgtttgtacgatgttcatcctccttgacctagtggcttttttcattccttctatagttggccgatgactaaccttgaacacaaaggtaggcccacttagagctttctgcttttattcactcggtatttggtcctgtcccttttcttttggcttgaatatttcacagtcatcctggcttagcagatgcccacttctgaatagcatgttctcttcactccaggagttccatgctatttacctccaccaactagggcagttgggcttgcagaggggcctccctgtgggctgcatggccccttttggctcagctgccctccaggcggcttgtcttacagctccttttttattatctgaagactgtctcctttcctgaaagttcaccaaagaacacgcaacccttgctatttgggggttttcagagatgagcatcttaaacatgacccactttcaactttcagaactaaattttcttttgggccaggttatgtttgcttcaagaatgggattatctgtcatccacatttctattttaagtacttttttgtttgttttaccatgtcctttgagactcatgt

SEQ ID NO: 85497 - DNA, 1035 bp, Homo sapiens
ggcctagaaatggctccagttagacaaaatgtcgtatttcaacaagttttgtttggcatttgtcacctgatattggtattggtttgttcattgaaccaacatgttcatgagcttatttgctaagcattcattctttccacggacatttcttgagtgcctgtagtgacctacacactgggccgggggtagggagacacctgtgaccaggcagacatggtccttgacctcagagtgacagttgacttgacagaagatcaagagtgtctgtgtgtgatctgcaagtgtgctaggcctgggagctctgtgccagctgcctaaaaaagaacccgtccctgccctctgggggtggacagcctagtcaggggatagacacataaaacgaagtgttctaaaagctatggcaggaatgacagccagctctagggggtgcagggcaggaacgccaagacgtgtatcaagctgtgaatgctaacagctgttcttcccccacagcatggacaaggacagcccggaggtccaccaggacctgaacgccctcaaaagcaagttccaggagatgcgcaagctcatcagcaccatgcccggcatccacctgagccccgaacagcagcagcagcagctgcagagcctccgggagcaagtcaggaccaagaatgagcttctgcaaaagtacaagagcctctgcatgttcgaaatccccaaggagtagagtgaggctgacttccttagaaagagggggaagccaatggcctgtctccccactaccatccccaaacgctccttggggcgtggttcctgtggaccccagctcagctcgtcaagctgcaggggcggggctcctgtgctgctgcgcgcgcttcgcctgtgcgggagccagcgcagagcttggctgcgccgggggttcctcgtgtagatccatatgtctagatgcataataactggagtgcctgctggtggaagtcagaatgctcctggaggctgcagagggggtggaggactctcccctgcctctggggagggggccatctgctgcgc

SEQ ID NO: 85498 - DNA, 1034 bp, Homo sapiens
ttggagtggtccttgtcaggtgtcccctccctcatgcctcctcaccctgccctctctgactcagggttgctgacttttggggccatccctggcactacaggtgtccagcaatgtccccggcctctgcccactagatgtcagtagtaccccaagcccaggccatctgagtggtttccagacattgcctgatgtcccttgagggccatggctgcctgggcgttctgagtacctacccctcagcacagcctgccatacctgctgtcactgtttgtctctcactgtccccttcccaggagcatcctaagagagttgaagcggagcctgctctgcttctgtgtccccaatcctggcatgtgcagtgctccgggtggcagctgctgcctgaccttctgtgtcaaggagggtagggcacctgttgtagctcagtgcctgtgcccagcaccatgcctggcagaaatggatgtccaggcagtgtttattggctttgtgagcgtggattgcccattgactggttttctgcagtggcacctggtggacaaggtgaggctccattgtgccaggttctatgcacaccccgactctgtgaaataaagcactgcatggaggtaaagagcagcagtcatttgtagcaggctcagcgattcctggcatcccagtgaagataagataggcagcctgtgccactccagctcccagagcccccctgcttgccctgccctgccatgccctgtgttgtcccgagggagccagcatgggaggcacagcagctgccttgagcagttatttacaagagcaaagtgtgcacatgctttggtattttaactttattgaagaccagttgcatgtaaccaacatcaaagctgctggagacatagcaagttggaaccctacttccaacctagaaggatttctaggcagagttgcctgtgtctgacttcccttcctcactgggaccccgtaaacctgaaggggagctgtaaggaatcctgccaagacggcagatgcacacggggtcacgccggtttcctccagcc

SEQ ID NO: 85499 - DNA, 1048 bp, Homo sapiens
gcactcaagattgtcccctgtcgagtgtgggcgaggagaggcacaccactattgttttaatttgcttttacctgattcctggtaggttgagcatctcttcacatttatctcagctgcttgggtttcctctggggcctctgagaaccctcatccaggagggtctcggtcacaccagggttggtgtcacctcccttcagggtgccaggcacccctcttcagaggtgctgatttcctcatctggcatccaggcacatttctgcggccgccctcccaggacatgacacagctcattaggtttcagctttttatcttcccttttatgagactacactgtagtaacctttgccggacttggatgttcccaggcctcccagtgtgttcccagagggtaactttttctccgactcctgggggctcacaggccctgctgtgtctgggtggtgctgatgctagctctgtccctgcaggcagacttctgcgttatgacccggctgctgggctacgtggaccccctggatcccagctttgtggctgccgtcatcaccatcaccttcaatccgctctactggaatgtggtaagtgatgtgcctgacactgtccagacgggagtatctcactgcttggtgagccccacatgcaggggatcgcggtggttgctgctggctggccagacagacagacagctctgctcttccctcccgtgtctgtcgctggctggtgtggagtactaggcgcttcctgccgtcttgccttggggatccagcagccattgggctgcccaggctggcgtcaggatggtccaggactgtaggggtggccctcctaccctcacaagaacctgcaggagaacgctgccatggtggggctgccattggtcacatgtgcctggcagtctggtggccttctcatgcatgaagtgggttgcccaggaagtaggggctctcttccctctctgccatgtcacacagtaaagccacttgcttgtgaatctcccacccctcgtgtgttccacaaacatggttatttttcccacatgaggcttcctgca

SEQ ID NO: 85500 - DNA, 1222 bp, Homo sapiens
atactgaacaggccatttacctctctgtgcctcagtgtccccatctttacaatcaggagaataacagtacagacctcacggtactgaagtaaagatgcagtgagttaatccatatgaagtttagagcagtgcttttgccaataaatgctgattgctgccgtcattgttgtattgttattgctgttctatctccatggcagcccatgtttgaaatgcattgctttccacagctgcctgtggccatggcatgggtgtctttttcctcccctatccaacgtgtggctccacagggagggaggaggtgcaacagcaacggtgtgcgcagagcagcgtctctgcgggagaggcacctgggcactgggcccaagggaacagggattttccaaggacccactgtttccaaagttctgtgcttaatgtcggggtccaagcaggaagcatccctgcacttgaccacaagaaggtcacagcccagtgggtgattgggacccagctcatagccaaggcctcgaccagagctggaggcttcctggaggaggggcctttgagcaggtgcttcaggcacggcgaggtaagagtgagaggagcattcctggcagagggaacacagtgagcagagcgagtctttggaagctggaagggatgtggcctgtgtgctgtagccaaacaagaggggaggacttggctcagaaagaatggtggcggaagaggttgggctgttgctgggacctcctcactggcctccctgcctccatcctgtcccctcccaggtgctggccagcagcactgtcagagcgatcgttctaaacccagcagataacctccagtggctcctgctgccttatgaataaaggtcccatctgtagttcttcccatgctgtccagggccatttctggtgtcctctgcctgccctgtcctcattcagtcctgtcccctccagccacagctggcacctccttgttaaggtgcagccatgtgcatccttgcctctgtgcatcgggctgggctgttccttccacctgggatgcccctcaccttcctccctgccgccccagaccaaaacagacgtcctgtctcctcctcctctgacctccgaggcagaatgagtcatctccctttgtctatactcgtggcatagcgtttatcacggaattatcggcaattctgccagtgtctgtcctccccatgaggctgaagcatcgaggcctgaaagcacgtctc

SEQ ID NO: 85501 - DNA, 1002 bp, Homo sapiens
ccccaggtgctaccttccagcctggggccaagccttttccctttctctcatttgcagctttctgataggtgggaaagagaagcaggaaaaaagagcagaggaaaaacaatattttcatttcaaacacagataggggtgagggaggcgggaagtaatctggtttatgatacctttgagacaagcacagaaaatccccaccgtggcccgaaatagcactaaaacagacgttttgccaaatcagacttaattgagtggctctcttcttgactccagcaggatgtggctggagctggctttgttcccttggggtgacactgtcccctggggcccctgccctggctaattaaacaaagaggacctggtctcctaggcaggacaggagcctggggagctgaacttgacagcccttggcctctgcctgagagggccagaaatggttacaggggttgggaaggtggggggttcctgacaggagggccaactgagtgaaagcattggtgggagaggcctggttcctctaatatgtgaatatctgtctctttggatgctgaaagggatggagaaaagccagcattgagtgcctactattgtgccaggcattgggtggtcctcgctaagtcttattaactgccctatatccattatcaaggaaactgaagcacagagaggttaagtgatctgcctgaggtcacacagcaaccaagtggcagagctaggattagaaatcacatccgcaggctccaaagccaggccctgcctgctgcttacccccttccccatgttagtcactcatccattcgggagctaattcctggctatgaaataatattgtgaccttgtgggaagtgaaggcttgcagtcagacagccatgagcttggcttctgaccaaagcagtttttcttttcatggttttctccctcagaacctcctctttcctcatctatcaagtgggcataatcatgcctttatcctggagttgctgtaagggttaaattcagcac

SEQ ID NO: 85502 - DNA, 1025 bp, Homo sapiens
ccctctgcccagctgccccttggccctagctacaagctgcccttgccctgacctatccctactgccaggcctgtctcttctcccctattccagaacggttcaattctaacacatccaagccctgcgtgaaacaggccttgggaaatcacagttgccagggacggtttggcatttaaaaggcatccaaggctttggggaaaaagctgaagagacaagaggatgcagggccctgtatcagaacagcatctggatttactggatggaaaaatcacagaatgcccctttcctcgggaataacagtcctggccgaggggcagcgggtgtggcatgggcacgccatgccctgcctggccaccacctgccatcaccgctgtgtactctcagaaatgaaaagattagggaaaagattagggagggacattgtcagcctgcagccaacggcccgctctaacaggtttattcagttgtaaaatatttaagacctgtttcactttacctgtatccaggaggcagccaggctggggccgagattgatgtgctgaacatgatttatttatctggatttgctcttgtggtctgggtgttacctgggtgtggaatttaaccaaatgacaagatgggtttgcgtgtgttcctgagcttggggattgtgtgtgtgtaaaaagtgagttggggtttgtgtacatggcagggggttgctgttaggtggcttgtgtgtctgtttgtcactgggaccaacgtgtggttgtgtgtgtgtctgatttggggaaatgagctgagggtatgggtgcttacacaccaggcagtatccacagcaggtcacacgttctttgtgtgttgggggcacctctgtgtgtggccgagtagctgtttgtgtgcatgtcctgtggtgtgagacctggatctctctcacccacttttcatcagtggtggggcattgcgcactgactgagttgctggggcatctgcttttccatccggccctgggtgagcactgacaacacctgactgtcttccagtagaac

SEQ ID NO: 85503 - DNA, 1694 bp, Homo sapiens
ggcccagagagggccgtcttcttgcccaaggtcacacagcaagttcatggcataagctagccagcctcgtactccagagctctcctgagggcccccatgtgtctgtgcgggggtgttgatggggggcaggtgggagggaggaggtaaggctgatttgtttcccagcctcctccccctcccctgctcccttctctccctcacacggtttgtttggagaatgactcacaggaatgcagcaaaatcctgatggatgggaaggcagggccgcagtacccggaaaacctctccagggtagggaggcggggctgagccttggggcctgagaggctggtgataggggagccctgcatgcaggtggggcgactgaggccctggaagaactctggtcacgtcctggctgggggttgtccctcctcgacagaaacacacaggccctggctgccgcagcacccctggagcacccgtcccccatgatttccatctttgtgtccccgaggcatctggtgcactgtagctgacaaacacatgcattttggcactgagtgtgacccaagtcagaccctcctgtgtgtgccctgtcccccaggtcctcccagctccccggagttggggggcgggtgcttgccattcagtcctttcagaggcagccaagggcctacggcatgctggacactgccaggggctggggaggctgggatggagctggagggaagtgggaggtgtacacgggatggacacctcctgtgtatgttccaaatgtgctggaggcctcaacaggtcttggtacaaggtgaggcaaaccttagaggacctaggatgaagtttcacgtaaaggaacagtggctgtaagggctcccagaaagtgtagggaccctgggaaggtcccagtctttgaataaaggtgggtgggaccttattggtagcttggggcattagggcccagatatcaggcagcagcatgaggtgaggcccgggctctgtcccagggcaagccctcctcctgcgcaccacatctggggcctccgaggagggacaaagcattcaactcccgggacctgtgggtgggaatgtccccaggcccagccctttagtgcctgctgatggctgtcacgcggtgtccggccctgatgaccagatatgtgttttcaagagaagctggaatttggatttttatgtgaactctcctgattctcaaatgctggctccgttaacaaaaggcacagtgtggtttaaaccacacatgtccgcaggcagaggaccaccagtttctaatgtctgcgctgtggggcgcttgggtttttgcatttggttcttttacattccttattttattggaaacagcccaaatagtcactgagctgcaactctgtgctaggtgccggggctctatcagcgaataaaacaacatgtgacggagctgccattttagtgggagaagacagtgaataaacatatatcaggtgatatgtgttaggaagcaaatggaagcagggctccagaacagagagcggctgcaaggccaagcccacatttgggtggaaggggcagctagtgcaaaggccctgaggtggggctatgctaggtgtgttagaggcctgtgtggctgcagcgggagtgggtggggaagtgggaggaggtgaggtcagaaggtagcataggtcaaatggcataggagactgtgggctgtggtataa

SEQ ID NO: 85504 - DNA, 1029 bp, Homo sapiens
agaccagggctgagcttgaatgcgacttctgggtcttagtgtaccagcctggcctgatgggcctccccgtcccttgtttccacctgggtgtccctggtggcctgtcagtgagccttgtccttggctggctccactgcctgcattccctaggaccctgcttagagtccccagccctctacccaccctgcctctctggtcaacagctcctgtttactatttagctctggaatggcatctggacacacacttgcatgaaagcagctattgagatagtgcttggcaaacaaaagggctgacatgtccagacctaggttctccagaacacagcctcacctcaccaggaaggactgggccctttaaaacctgtgagcacccctaccatcccagcgaggagggaggatcctaattcccctggggcagactcttggtgaaaggtgaaatcagaacctagggagcaggaagcctgccagccaggcagcctcctctgctggtgttccagcaacatttgtgggtgctgggtgctggttgctggcaccatgatcccatggaatcctgccagtagggtctgatggagtaagcaaggctttggggtccatgcacacttaggtttgaattgtgaggttgccactccattctgctgcactgccacacgccatgcactgtgcttggtggaggtgagcaaagaatcttgaaattgagagtcggatgggatccgattgtgttgctgtggtcttggcaagttctttgcaggctctcagcctgggtttctcctctaggggatggtcagatcctgaccttggggtactgtcttgtgactctccatgataccacttgtggaagggccctggccaggtcagggtttccatcaccctctggcagatgtgaatggcagccctgctgaatcaagatccctccgtaccactgccccaggagctccagggagtccccagggagccagggaacaagagaggcccctggaacaaatgacaggctctgcccttttttgagataagccacccaccaccatcc

SEQ ID NO: 85505 - DNA, 1033 bp, Homo sapiens
gcctcgacccctccctcagggccgggaggagaggaggatgaagggggaggagagtggtgggaacttctcctttcccattgaggccatgggaagggaatgctagcccagaaaatttctggggaccgcagttctgaggcggggactcaatccaaggggggaccaccgggtcagaggcttcccggcacgcagaagcccccagattattttgctccatcgggggatgcagaggaaggggagaggtggaagagcgaagggctagctggactggcgttgcgggggtggagagcccgtggaaatcagccttaattggattcccaggcaagcagccaggctatcaaggtgccccctcccctttttcttcctggggtagagagccaggtccagagacaccaagctggcaacccaggcaggtgaaggcaattcctctccctacttaaaaagagaattcctgggggagaggggaggcaccttttgagagggaggggggcggctagactgtgttcaggctgttctgtctcttggtccaggaatagaaagagttaaccctcccccagaaatttgtcagcccccacacagcagggaaacattgttggaccctctgacatgctaacagtgtgacaccggctgactggagctagcagattctagaccctggactcccccttcaaagcccaacaggactcggctgggtggtgccttgttcagggaccttgtgggaggcggaaatgagagcccagagagggtcaggcagcaaagcagtggccttgtggcccggagggaagaggggttacaagccagggccatcggaaactggaagggaagtcgccatgggtctggggtagagggaagggagaggcccttctaccctttgcccagactcctgagcaaggctttgccctgctccccacccttcccacacacccactcagctgcaggcctggccattaaatgtgggtgtctgacccataggttggaccatgagaccctagtggctgagggaggcctgggtgaggctctgggaggcaggactgaa

SEQ ID NO: 85506 - DNA, 1934 bp, Homo sapiens
taaaatagcattcacagaaaagctgaaaaaaaaagagaaaaataaggttattgacagtcttagagggctctgacaatgttagtattttgatgtagttcttcccagtccttttcgactcggtggttggtttgttttttaaagactttgtcgtcattctctatattcagatgtatatcctgcttgctttgccggcataatgtgagccttttcctgttttgtaaccaatgcttcataaacaccatggttaatgtcttcaggcttttccaatcaagtggatgtaccataatttacttaatattccccttttgtccaacattctggatgttcctgatgaatgatgtagtggatatattttgtatagcttttcttgatacttaaaatgatttgctcaaaatgccactgctgatgccgaaggctccgactgcctgcagtgggagaaacggcttctctagttttccttggataaatgggacactatttttccttccccacaatctagaaccttccatcagagccgaaaagagccttggcaatgaatcacctatctgacctccctcctttgacagaagaggaagccagagcccagagaggggaagcgagtcccaaggtcacacagcagttgctgggctatgcagcagcgaagacccagctactgatttgccatgttggttttcgcatctgaaaagattcctgaggtctttaaggctgaccctgcccatttcacagatggggggactgagaccccaagcttacccctggtgccgccagctggagccccagacaggcttctcggccctcctgggccacccccgactgggtgtgttcacgggatctggcggctacaggctccctgttgcccgccccacctgcccaccacagttccccttcctctttgccatcccattctccagacaaaaagctgaggatccaaagcagatgcagtgagggggtgggactgtaggtctctggggaccctagtggttgcgtccttgccccatgcctcagtttacttgtcagagacctaaccttggatctgttcaggagcagaggcagatgttggcacagatatgaggtatgaaggagtggtgtgggggatggggtgcaccttaaaatctctctctggcccgagattcaccccaggagaccccccggggagaagggaaggagagagagagggaagaaagagttgaagcagagacagtattccccatcagaggacagggactttctgccccctcccctgcagcacaccaaccatccgtgtgcctctgatcctgcttgtgtattgcttaaggggtttgtgtgccttccagcttgggcatgtgttgtgcatgcgtgcctctgtgtgtgtgtgtgtccgtccctgtgtgtgtcccctctgtggtgtcagtctctgatcccatttgtgcatttctggggggaagggagggtgcccccgagctcggtcttgtgtgtgcgcgtgcatgcatgtgtgcatgtctgtgtgtgagcacactgtttcctcctaatggccccaggagggatccaggcatcaggcttttgtgctgcttcaaggttgtggctgggtgggcgaagagagggaaggccttcgacagggaggggtggggttgagggaggcaaaagaaaatcttaaaagaccgtcttccctctggtctccaaggagatcaggctgtgaaatgatccgcacgttaattaaaaacgattatatcctgattgagccattcctgctcacatcccccagccagggagaggaagaggctgagagcagaggatgcaaaatggggtagggtccaatggcagggcatagccaggtggagccacagcccacggaggggagcacaggctgggggagtcaagtgggaaggtgttgaggggcacgtgcccaagtctgattggagcttctcctttgaattttagggactgtcttccagtgg

SEQ ID NO: 85507 - DNA, 1167 bp, Homo sapiens
tcattcccttcagtccttccacagtgtctgctgatggcgccaaggttctggcccagatgccctggcgaaggcacccaaagggacaggggctgggtctccaaggggaagcattttgctgcagaaggaagggtgttggctgcaggacacagcatgccagaggcctgggggtgtgggtggcgagcaggtgggattggggaggtggaggcagggactgaggccaaaaaggagtctgggccttgactgcttgaagggttttatcttgaaggcagtgggaaaagatgggtgctctgggcagtgagcaccgctggagcaaagtctcggcagtgggaacacacagggacaatgaggagaggcttaagaggatcagaagaggacccaggtggggcctcagtttcctccctgagaactcctgagtcctctggggtgtgggctggatgagagcagcctccctcctcctggagctgctgtgcaggcctagaatgctggtctagagggaagcagggacctgaccatctccccaacctcttgcctaagcccagagcagctcggcctagccctgcatcccctgtgagctgagcactgggagggactgttcagtctcggctgagaagtaggtgatggtcctgggggactgataattaaagctcagcagattataattccctgaaagaaagctcagcacagagagggaggaacagtgcccagagccttggcacaggctggaggaggattgctgggggaggtggtggtggggggaataagaatgatacctggaaccatcgtgttcagagcttcctctcggtgaggcctcctaggtgcccagccctgggcactttgctgtttccagtcttcagaccctccttgccaatgaaaggttcctgccatccccattttacagatgaagaaactgaggcttggaaaggtctggcaactgtggttcaaggcccatggctggtaagaagtgagcctgcggctaaaccctgggctgtgttgggagcgttggcctccttactgagaagaaggcactgcttaactcagagagaggctgtctgatggcagagtcctgggcaggccacaggcctgaagcaggaacaggttggagcagggaagacccctcaggacattccccatgtttgtggccttctgtctgggagagggggatgggat

SEQ ID NO: 85508 - DNA, 1071 bp, Homo sapiens
caagaattccgactcctgactcccagtccagtgctcgttctctctaagacactggaaaaattggctcttaggtgggcttctttctctggcacattttttaaatgctcctttagttaatatgcaggagggatttccatgttctcgtacataaccttttgctgaagtgacaacgtgcgataaaagggtcccaggagagccagtgtaatttgggctgtgagggacagagaataccaatgcagaagcctctgcagaaggcctggctgctcctgggggctgggagacccggggccccctcaccacccaatgcaaaggtctggccatcttgggccctgggaccacgtgtacgttctgattcgtcttccactgcttggtttatttttctcacgtttttgggtgaggatcttggttcctagaggagggaggtctaggcagagagaaaatgagcatccaggacagggggagagattgaggaggatgcctgaggcagacgttgaagccttgtttctagtcaagcactggctagttggggggtatcagacaaaggggtccacatagaaggcaaactgaagggcatgttcaagtgctgttcacgcctgcctttagcccccaacgaccaaaagggggcttggcatagcgagaccctctctctacaattttttttttttaatttagccaggcatggtggtgggtgcctgtggtcccagctactccagaagctgaggtgggaggaacacctgagcccgggaggtcaaggctgccatgagccaagattgtaccactgcactccagcctgggtgaaagagcgagaccttgtctcaaaaaaataaaaagttggggggatgttaaggaggttccagttaattgtggctgattctaaattgggaggcctaacaaatggtacttatcctcccgtgggagcagaccagggctaaccaaggccgctgggaatgggggtcatggagacagagccccttttccctcccacccacctgaaggctccaagaacttccactgcagaggtgtcagggacggacctggtgcagaccagtgggcccacacctgctttcctat

SEQ ID NO: 85509 - DNA, 1147 bp, Homo sapiens
agcactgctcttgactttgtccttgctctgggataagagcaggcccagcagatggccgagaggtcccaaggaacagaggaacaggcggggaggaggcccagtcactgcttagcttctctgtaggagatgtagaaggaagtgggtctttgtgtttctgcagcatctggaccagatggagagacctttctggagatggcatgcacacttccagataggagctggaacatttccagaaatggaatgtttttagaaatgagacatggtgtttctggagacaggatgaggacgtttctagagaagagatgaaaagcatttctggaggaggggcatttctgaagatgaaatgagaacatttctggagatgggagagggcatttttgaggagtaaagatgaggcttttctggattctgagcattgctagagatggaacatttctggaaatggattctttctagagagaaactagaatacttctggaagtggtgtgtttttgaagatgatgctggagtatttctggaaataaaatagggcacttctgaagatgaggtatttttggagctgaaatgcaacatctctggagatgggatatggcatttctggaagtggaacattcttggagttagggtggagcctcagtagaccactggcatttctggagatggattacatttgaagatgacggggaatatttctggagataagatggagcatttctggaaatggaacattttggagctggggaatttctgggttaaaatgaagcatttctggggaagaaacaggtcattctcagagaagggacattttttggattgaggatgggacatttctagggaaggagttttctgaagatgagggggtcatagctcagcctggctgtttcaaggccacttgaggaggcaataggggagggtctcaggggcccagagaccccacctgtggtccttgttttgcacatggcccgagggagggtcttgcccagactcactcctgctgagctgcagagtgggcttctgaggaacctttccagaatgcagcctttgccaccccctggcccaaaaccctggcctgtgctggaatactaccagagggaggccagagctgcccagtcttactcttggggtccctacctgcttctggtggggt

SEQ ID NO: 85510 - DNA, 1098 bp, Homo sapiens
gggaagacagagatggctggacaggatgggacaagccagcccccaggagctggggaagcgaaggtgggtgcaaatgaaaacgcagaatcccatttgcagtccatttgcttagcagccctgaccaggagggagagaaagaagagggcagagcagggagagatggggagggataaggatacagagagagaatctggcagccaggggtcagggagcctttggccgtaaggcctgggatgcctgctgcttactgaggctgtggcccctcctgccttccagagctaagaaagctttgctctgtctcagctccagacaccgcatccccaccacacattccagcacctgcctgcttcccctgacctctggctgccccacagaccccatccctacctccactccttggggattttgaggtcttatgccaccactccactctgagcaggctcagtctccctgtgttggtggtggtgcggggtggtgagagtggtcctggagcagtgggaactacccggaggccacctggggtgggtcccaggcaccagtccagctggccagtgggccacgggggctgaccttgtcaccttgggcccagatggagggcagcggtgctcggcccttcccccaagcacatacagccgctgagctaacatgactcaccgcgtggcagctccctctccccactgggagtggggatggaagcctccagatgctgcagccccaccctgagggaatcacaggccaggctgagcccttccaaagtggggatagctggggatcagacatcagcatccattgaagggggtgttcacccgcatggggtaagccctgtgcctgggactctgggcttagtgcccagctagggccttgggagacccttgggcttctctgtgctcagggggaaaggagctgtgcagcctctaggggtcctgcctgccccaagctgtgctggtggtccaggccccctttggggaggaccctggccaggggtccctagctcctcctctgtcatccagagaacccttaggtcccaggggctggtggtgttcctcttcctcagaaacactacctgcaagactggaaccctaacacagccacctctgg

SEQ ID NO: 85511 - DNA, 1087 bp, Homo sapiens
ccacacccagccctgaaggcttttaagcagggaggtaagtgagctggtccagcatgtgtttttaaaaactctttctccagcagagcttacagaagggtgagcagggtgtacccggggggcttgtgtggagtccaggccaggcagggacggtggccagcgggtggaggaagccgtgaggatgtggccggaggagaggggcaggcttgggccctgcgaggtgggtgctgccctgggccatgattgggcatgagtggggagccgagccataccatggccggggacagggactgggtgcgttgttcccacatgagcgttgtggagttggcatgcattgggaggcatccctctgggctcagcccctgcctaccaggccaccattgcccctttcttggccagcagatcctccaccagcacctgtcagccccgagcactggaaacggcagccggcggggcctttgtgcttcaggattccttctccagggacacgggtgatagccaagcccggcagatgcccccgggggtgccaccgtgcccccactcgccatctccgatgctcagctgctccccagaatgaaagaccttgtcacaaagggaggcagggagaggatgcgcttccgtgccgcagcccatctgggagccaacgttattttcctgattgaaggaaacatctgttcagtcctctttcagagcgaggcaggcagcggactgggtcggtctggctctgggcaggaggtagagaacctgggctgagcccagagcccctgccctaaggggtttaagaggagctaccaccgttctctgtccctccctaaactgggagttcaggagctcctgccatccccttaagaagcctcggtcactgcctcccccaaggatgggggctgctggggcaaaagccatcgcctgtcccagagcaccatatgtgttttctttttttttcttttcttttcttttttttttttttttttgagatggagtttcgcttttgttgcccaggctggagtgcaatggtgctatctcggctcaccacaacctccgcctcccaggttcaagcaattctcctgcctcagcctcccaagtagctggg

SEQ ID NO: 85512 - DNA, 1044 bp, Homo sapiens
aagacggcagctcatctggctgcagagtcaggaaagatttcctgagcctggactgagaggccaaggtgggtttgcggaggcaggagagagctccagatcaggaggcagtgtgggccaagccggggggcggcaggatgtgagcacagagagggcagcaacccttctacagaccagttcaattccagtaaccccagcctgccgtaggggtgggggacagcctggctgcagcggggcccacctgccagtgtgtgccttgcctgcgctccaccttccccctcgggcactgcggctttcttgggacagcaggaccccagttaaacagccctgtttcctgcccagccgtggctgccgcctcttctcggaggatttttttttcccacaactcaacaaccactaccacttgcagctaagcagaagggaagttaggactcgcattttgcctctgtagcgcctgtaatcagccccacacagcccccgccgcaggcgcccatcagtgccacttccggagactacttgagatacacctgctcacgctaaaaggagaagcagtaatccatcaaaacaaccccaggcgccggggcgggagaggctgagactcagtttcccctcccatggaacagggcagtgttgggcatctgaagtccccacgggtcctggcattctggaagaacacgactcagtagctttccccttctgggcctcggtttccctgtctgccaaaggtgcagggagatgagctcccagctcatgcctctgggcctcctacctcgcccccaccctcatctctccctttccagagacattataaatcaaacggcttagaacgtaaggcatcagaaattctgaaaccttcatctattattaacgctgacagtaaattccccctccgagcgttttacatagcaactgttaccaagactcggtggtggagctgctgctccagcggccgcatcccagcagctccgggcaggatggcagggccgccacaagccctaccaacccggccaccacctgggcactcagcaaaccctctccaggggatgg

SEQ ID NO: 85513 - DNA, 1025 bp, Homo sapiens
tgcagctgcccagggctggcgctcagaaatggcctgtgcttggtgcatgctgctctgctgttgctatcttgagtttttattactttgtgagcaagaggccctacattttcattttgcactgagccccacaaattctgaggccactcttaacaagaggattaatccctagggcagactggcagggcaccccacacatccacggtgctcaatagctatttggagggtgaaggcaggactgaatgggccttggttcagaggagaacagtaccccagcgaggccaggtggcttgcccagtttacacgccagacatagggccaggcagtgctctgaccatcacgtgaggggctgtcagggcgacggtgtgtctgtcaagggcaggaagtgggctgtgtggagtgccagccaggatgggcagggtagcctgcgccctgctgacctgcagccagacacactggggagacacaagacgactcaggttggaatcgattgaaaccaagccaagagcttgggccttggagtgcatgggagggggaggaggttcagacccaaggtggcggctgcggctggtgttagcacttcttcccggcagggtgggcagggccccattaggggaggcaggcctggatgccccccagcaccctttcatgagggggagagaggagaggagcaaggcccaggccacctggtattcagaaggctgaagtgacagtgtcaggcagtttggggggcagatgaagccgtggcaaagggtggccaggaggccagagcagcactcacagatgaggtgggattggggccacctgcatgtgtggggaaggagcccccaggactcggtgtgtgggcctctggctgacaaaggccactctgcagaaaggaaattagaaagaagaaatgatttcttggctcatgtcttcacgaacaagggagaaagttgctggcgtggtctcctcacagaagagccagggtatctgaggggagccctttctctgccagctgggtcaccctcagggctggaggtgctgga

SEQ ID NO: 85514 - DNA, 1053 bp, Homo sapiens
tgcgcaggcctccttgggacagcccgggtcggatctcagactgcagcatgtggggctgggagccagctcccccgaggcacgggggctcaagaggtctgagcagcatgctgaggtcagggctggaggagcagaaagtagtagggagccactgatggcgtcataatgaaggagcgacatgacaagcttgtgaggggccacacagggcagaggctagggacgaggagatcccgctggcagctgggcatggaatttctggtgggtagtgaaacagccagacctaggacctgtggcagtgaggatggggagggggccagatgggcacacttcaggcaggggaaccccaggacttgggggcctcctcagagaggccttacagaaggactggggcagcaagcaaggcctgtggggcgaggaggcctaaggacaccatggatgcactggagccaagccattaaggaccctgcaccccggccagaggcctcactcaggatggctgcagtggagactgaagagatgggtcgggtggagggaaatgggctttgccctcaggaggtggttgtgggaggagatgcggtcacccgggaagagaggccagaggatgggaccgaggagcagcgacacgggaggacggcagggcgggtgagcgggggggccctgcccagggtgacagggctttgctgggccctccaggaccctaggcagggtctcccctggaaccaggcggtacaaggcctgtgatgggaggggcgggaggatgagggattgctggcaggagggcctgggaccagaagtctccactgcagccatcctgagtgaggcctctggccggggtgcaggatccttgtctacctgcggggtagggagacagcctgtctcccaaagggcggtggggtggctgagcctcaaggacaaaggcaggcgggggcaggggaaggagcctgtggctgggagcttaatggccccgaaaaaaaaacataaaaccagagaattatggggagacataaacagagctgtcaggcattagctgcagggagacggctcagcctgggtaag

SEQ ID NO: 85515 - DNA, 1041 bp, Homo sapiens
cacggagcagtctgcaaaatgtcaagtgagggagagatccagtcaaagccccaggggggcctctgagctcagtcagctcctctgctgctccccacctcttgggggaaggacaggctggggtttgcatgggtggccttttggagagcagagtaatgggagcctacttgaacttcctgcggcctcattccctgactgggggcggagggtagtctgagctgctggcctggggtgcttggccgcaggggaaggggctgggagggaggggtctgggtgagtctaagggagggtgagcctgaaaaggggacggcagcactaaactgccttcggggagtccccactgtgcgcccctggcactttcccagtcccctggcgcggtcgcaggcacgggtggggtctgcctcaaagttgttggtacggccagcccgctgctgtttaaatggtgtgtttgtttagagcggcttagggagggaactggaaatggggggcgggggcagcgccccacttggcgccaccgctgccggagggtctgcgtgttagaagccccagcttcgtaaatgaccgaagaagggtgggcgttgaggagggaaggccgaaaaccaacggagggctcggggccccgggccggccgccccctttttgcggggggagagcaggagccgcctctcgcagccactctgcgcgcggggtgggagggagagagggaggcgaagggacgacagcgccgggctccccgcccccatcccacccggttccaatatttcgcagaaaggcacgcggctcctaatcggtcttttccaggctgagatttagccgtgcgatgcccgcgcaggggcgggggccgcgggccaggggaggcgctcagagtccggagccgccgagcgaggtgaggagcccgcgtcctcggctggtggagcgggcgggcgggcgcgcaaacccgagaggcagatatagaaaggggggcaggttaaaaataaccctctccggctgggaagctcgcgcgcgctctctcgcctcgttcggtgccagaggactccaggggag

SEQ ID NO: 85516 - DNA, 1104 bp, Homo sapiens
cgtctttggtgcgctttccggattggcgcagaggccgggaaacaaggcgggggcgggcgggggaacacaaatagaaggtgaaattttacctgcccctgagggagtcctgcggattttctccggcagcagcaggcgctctgcctttgtcttacacggctgaaacatctgttgcagaggggcggagaggccgcaacaacccccacacaccctgcgctgctccccgtccccctctgccccagccgggctgcaggactccaggcgccgcgttaaccctgctcgcgctggggcgcgcgcccgcactcgctgccgcagtccagcgcctcgcgtggggctcctcgcccccgccccggatctggtcctggccggggcgcccggtgacccccctccacctcgatggggtgctgaggtgtaggcggggggcgggggcggaaagggttaatggcctagtcgcagaccctaattgtcagagccggccccgcttcgtttcaattaccctaagtagagactgaatgcgcaattaacgaagtcagcttgccaactggaaagccggccccgctttcacgttgagcagaatactccaccagctgacttggacgaagcaatttcctcctctctctctccccttttttctctccttctctcttccaatccccctccctctttttctctctccttaataataaaattataccaagcagtttgcggtgtggcaggcggccagaaaagcgtttctttaaacgccgccgtctcacaattaggcagcaagaggatttgacacgccgtggcggcctgacaggcggcttcctcccctggggactggggggagggagggggtgccaattccccgctcccccaggtggaacggggactgggaggggctggcctgctgtgcctccccggctgtcagaatggctgcagcgagggggtgtcaaaggcagggaagcgaggggcggttccgcctaggctggggaaggcggaaggcagcggcacattccacgactcctctgggaagctggcgtatccaggagggagaccttgttcccctttctgtttgacagacaggcactctggggcatagagctgtagacggatctcagccctgct

SEQ ID NO: 85517 - DNA, 1029 bp, Homo sapiens
tcctcccggcagccttccctggggggcctaggaatgcctgcagctgctgtggaatcccatgttgctcccccacacctcacagtggaggtgggactgctggccatctgcccctcgtccctggactgtgggccctgcggcccaggtctcccggcctcttgatagctgtatcccaggaatcggcaccaaggatcggtggggtgggagtggagagcagggcacagctttagagttaggggacctgggcacctaggcagggggcctggctgtgcccatgaacagcaggtggggccaggccagcgggtgggcgtggttaggccctgcagggatcccattcagctggcttagcaggtctcagctgtccccacagctgggtccctggaggagatggtgttgggggctgtgaggggaggctcctcaaacatctggagagtccagatacctctgcactctgaagggcccagagcccccagccacaccagggctcccccaacctcaactgagcctggctagggctgcccttctgcttctcaccccatcactggcatcctgatatttgggacccccagaccctatagagagggtatgttggtcaccccgtgggattcttccttgagcatgggggggccatgaatgaggagggatgcatatccaagcgttgcccacagggagtggtctggaggggctgcctggtcctctggggttcctgatgtcctaggagggtcctccatctgcccgaagcaggcctctcagcccgtggaccctaacctgtcccagaagcctatgggcacccaacctcttgtcttgtgggctccttggaaactcgcccccttcctcccattcaagccaggcccctaggatatggaattgagcccatacgatagcagtgaatctggcgaacgatttctcattttcaccaagtctcctgtattgattattcatcacccacaacagatggggaggcctgaggagttccaccttctccacccctgcctggactcctcctctgccctgtcctcagcttctggagcc

SEQ ID NO: 85518 - DNA, 1395 bp, Homo sapiens
tcatggcttggagtgaggacacccattgctgtgtcaaggggaatcctgatgccctgggtgctatgtgattccagctcatgctccctgctgtgcctggcctgcctcctctgtccagcgctgagaagactaagttccaggatctgattctaagggtgaagtgttcatgtatctggtgcttagaggatgcactagactccgctcctcctgccttctagtttcagcaagaactttggagataaggcctggaccaagtgtctgagaggagaggcaggttggggagaaacggatggatgggaatgagtggggaccgtccgggcagtgtggttgagctggaccatgaggagtgagcccagtgggtggggggtgccctcccttgtcccctctcaccaccccttctccctccagcccaagccacaggccaaacccacaatctgcctgctaggccacttcttccctgcccccaggttcaaaggtcaccatcgttctgccggggccagggaggggggtgctctttctgccccctcctctcctgaggcctgcccagcccaacccaacccagcccagccctgctgcctgcctcgccttctgtgtcctgtcctagtgctcttgaaaagtaatcataatcataataattaataacaacagagcccatagcaggcctgaggcagcccttaaagaggcagtgcccccttttctcccagcagagctggcagtgggacctggctggcactgagaggcggcctgtgcctttgttcccatccctccctttgccttgggttccagggtggtgttggggcgagcatttttgcctgcattctccatcagcactgggcttctcgtgttttaattgaactgtcttttcttagcaatagatgctttcaccgcatccagctgctcgtgtgtattgggaaacctgcctgtaatacagctcggctaaattaaaagacacagcagctggaccaattaaacagggagggaggaatgcagacggacaggcagggagggggtactggtaatagcaccccctcactgtctctgtctctctttaaataatgtttctggtaatgcattttggagaatgtgaaaaaaaataaaaaataaagccgtagaaatgttaatgatatccacaggacactcagcaggaaatgagagtgatctgggactaataaaagccgaaatgtaatttgtgcagatatacgaggcgcagccttcagagtggtcctgggtttgcacattctgggctcataaacatgcgcctggggagggcagggagcgggcgctgtgccctcggcctgggcacaggcccgcctgggctgccctgtggcagtctggccagggcaggagcgtgaggctgcccacctggcagggagctgccagaccagaaccaagtgccgt

SEQ ID NO: 85519 - DNA, 1001 bp, Homo sapiens
gacattttatgtctacagtggcttggcagcccctaatcgatgtctgctagaaggaacagacagattccagatggcgtggcagtgatagaggaggtgtgtgtgtgcatgcgtgtgtgtgtgtgtgcgcgcgtgtgtgtgtgagcatacatatgcttgtgtgcacgcatgtgcgtggggacaggggcagaccctcctcagtccccagcatggctgggtcatgcttgaacacggtcgcgaagggactaaattacaggatccagcaggccccaggggatgagggagcgggaattgctctgctaaatgcttttgagctgtcaggaagggctgggagtgatgggtgggggacattggggaggagctggcaatgggcggggggggggcgggtagctccccagtgacctggcgctgggcagccggttttgcctcccgcatcagtggccgtccttggcaagactcagctgcaggcgatgtgggagcgggaattacagagcacacctccctgacacagaagttgtcaatatgcgcacagctggtggggaggctcaggcgaaggggggactattaagagctgcgcgggggagcaggcagggtggggaggtgggtgggagggtgctttctgaggcaaaaggaagtggcccgtctgaatcgctcatcctctgccccctccctgcccatcctcccctccctccttccctccctccctcccttcctttttcttttcacagataaccagcccgagtcatgcagtcttttcgagaaaggtgtggtttccatggcaaacaacagaactaccagcagacctcgcaggaaacatcacgcctagagaattacaggcagccgagtcaggccgggctaagctgcgaccggcagcggctgctcgccaaggactattataacccgcagccttacccgagctatgagggtggcgctggcacgccctctggcactgcagccgcggtggccgccgacaagtaccaccgaggcagcaaggccctgcccac

SEQ ID NO: 85520 - DNA, 1050 bp, Homo sapiens
acctcttgctccctgaatcctgcacagggcccccccagggacagatggaaggggctggagccccaggccggggggcctcggaagggctccccaggatgtgtactcgttctctcacggccctgagtgagccccgcacgcccggacccccaggcctgaccaccacccctgcacccccagacaaactggggggcaagcagcgagccgccttcaagtcgggcaagcgggtggggaagccctcacccaaggctgcctccagccccagcaacccggccgccctgcctgtggcctccgacagcagcccgatgggctccaagaccaaggagacagactcacccagcacgcctggcaaggaccagcgctccatgatccttcggtcacgcaccaaaacccaggagatcttccactccaagcggcggaggccctctgagggccggctccccaactgccgtgccaccaagaagctcctcgacaacagccacttgcccgccacattcaaggtctccagcagcccccagaaggagggcagggtgagccagcgggcaagggtccccaaacctggtgcaggcagcaagctctctgaccggcccctccatgcgctcaaaaggaagtcggccttcatggcgccggtccccaccaagaagcggaacctggtcttgcggagccgcagcagcagcagcagcaacgccagtggcaatgggggagatgggaaggaggagaggcctgagggttcccccaccctcttcaagaggatgtcttctcccaagaaagccaagcccaccaagggcaatggcgagcctgccacaaagctcccacccccggagacccccgatgcctgcctcaagctcgcctctcgggcagccttccagggggccatgaagaccaaggtgctgccaccccggaagggccggggcctgaagctggaagccatcgtgcagaagatcacctcgcccagcctcaagaagttcgcatgtaaagcgccaggggcctctcctggtaatcctctgagcccatccctttccgacaaagaccgtgggctcaagggtgctgggg

SEQ ID NO: 85521 - DNA, 1032 bp, Homo sapiens
ggcctgtggtttccaaggccctgagtacctcttgccttgtttgctgcctctgccaaaacccggccaacttcaaggaccttggggacctctgtgggccctactaccctgaacactgcctccccaaaaagaagccaaaactcaaggagaaggtgcggccagaaggcacctgtgaggaggcctcgctgccgcttgagagaacactcaaaggtcccgagtgtgcagctgccgccactgccgggaagccccccaggcctgacggcccagctgacccggccaagcagggcccactgcgcaccagtgcccggggcctgtcccggaggctgcagagctgctactgctgtgatggccgggaggatgggggcgaggaggcagccccagccgacaagggtcgcaaacatgagtgcagcaaggaggctccggcagagcccggcggggaggcccaggagcactgggtgcatgaggcctgtgccgtgtggaccggcggcgtctacctggtggccgggaagctctttgggctgcaggaggccatgaaggtggccgtggacatggtaagaggccagcccagccagggtggggagtgtggggttccaaaggacaggcaggcaggcagtcggggagccccttgtttctagtgctacagtgtgggccaaatgtgtctgcagtctcgggacaatctgcagagtcctgagcctctctggggtgtgtgggggaagtggaggcacccatctggctaaggcaggtcacactcacctaccctgtcccaggagacttcccgccggggcccgtatgcccagccaccgccactctcccactcacctggcatcttcaggctccagccccacccagaatccactgggcccctccccatgctgtcaccggagatgccaaggcccagagaacacgaggactcccaagattgaacatcagggctgccccgggcggtgcaagagcaagttgcccaccctctgttcctgtctccattgcctctgggatgaagctaagggctcaggaagaccctctctggcgacacag

SEQ ID NO: 85522 - DNA, 1186 bp, Homo sapiens
cctgctacctgccccccggcttcctgtcggcgcccgggcagcgcgtgggcatgctggctgaggcggcgcgcacactcgagaagcttggcgatcgccggctgctgcacgactgtcagcagatgctcatgcgcctgggcggtgggaccactgtcacttccagctagaccccgtgtccccggcctcagcacccctgtctctagccactttggtcccgtgcagcttctgtcctgcgtcgaagctttgaaggccgaaggcagtgcaagagactctggcctccacagttcgacctgcggctgctgtgtgccttcgcggtggaaggcccgaggggcgcgatcttgaccctaagaccggcggccatgatggtgctgacctctggtggccgatcggggcactgcaggggccgagccattttggggggcccccctccttgctctgcaggcaccttagtggcttttttcctcctgtgtacagggaagagaggggtacatttccctgtgctgacggaagccaacttggctttcccggactgcaagcagggctctgccccagaggcctctctctccgtcgtgggagagagacgtgtacatagtgtaggtcagcgtgcttagcctcctgacctgaggctcctgtgctactttgccttttgcaaactttattttcatagattgagaagttttgtacagagaattaaaaatgaaattatttataatctgggttttgtgtcttcagctgatggatgtgctgactagtgagagtgcttgggccctcccccagcacctagggaaaggcttcccctccccctccggccacaaggtacacaacttttaacttagctcttcccgatgtttgtttgttagtgggaggagtggggagggctggctgtatggcctccagcctacctgttccccctgctcccagggcacatggttgggctgtgtcaacccttagggcctccatggggtcagttgtcccttctcacctcccagctctgtccccatcaggtccctgggtggcacgggaggatggactgacttccaggacctgttgtgtgacaggagctacagcttgggtctccctgcaagaagtctggcacgtctcacctcccccatcccggcccctggtcatctcacagcaaagaagcctcctccctcccgacctgccgccacactggagagggggcacaggg

SEQ ID NO: 85523 - DNA, 1354 bp, Homo sapiens
aggtggaggacacactgaccccacccccctcggatgctggctcacctttccagagcagccccttgtcccttggcagcaggggcagtggcagcggtggcagtggcagtgactcggagcctgacagcccagtctttgaggacagcaaggttgggccctgccacggtgcccccttccccactcccagccatatcctctgagcctcatgacagggccgggaagaccctaacagatcctacctcccatttcatagacagaataactgaggcctggagccacgtggggtcccacagtaaggtgggcagaatcctgaccccccccttcccagccccatgctctctggggtccctccgattctgccctcaccaccctgcccaaccccaccaggcaaagccagagcagcggccgtctctgcacagccggggcatgctggaccgctcccgcctggccctgtgcacgctcgtcttcctctgcctgtcctgcaaccccttggcctccttgctgggggcccgggggcttcccagcccctcagataccaccagcgtctaccatagccctgggcgcaacgtgctgggcaccgagagcagaggtgggaccggccagcctgggcatctttgggagggacactcggggtgagcccccaggcttgtgaacttggggctctggatttcctgggagctgtgtccccagctttccctctgtccatagatggccctggctgggcccagtggctgctgcccccagtggtctggctgctcaatgggctgttggtgctcgtctccttggtgcttctctttgtctacggtgagccagtcacacggccccactcaggccccgccgtgtacttctggaggcatcgcaagcaggctgacctggacctggcccgggtaaggggctggccccggcagagtgggcagggcagggaccccaggctgtgaaggtgctgggtgtcaacccttgttcctgctccctgtgcacaccatgaatctgtcccgtcctccctgtgcctagccacgcatccgcagacccccaccacccctccagagcctgctgtggacggctcttctgagctttggggcagctgctctgacctcacttttctcacctggaaaaccctcatccacagggagactttgcccaggctgcccagcagctgtggctggccctgcgggcactgggccggcccctgcccacctcccacctggacctggcttgtagcctcctctggaacctcatccgtcacctgctgcagcgtctctgggtgggccgctggctggcaggccgggcagggggcctgcagcaggactgtgctctgcgagtggatgctagcgccagcgcccgagacgcagccctggtc

SEQ ID NO: 85524 - DNA, 1042 bp, Homo sapiens
tctgtctatgaaatgggaggtaggatctgttagggtcttcccggccctgtcatgaggctcagaggatatggctgggagtggggaagggggcaccgtggcagggcccaaccttgctgtcctcaaagactgggctgtcaggctccgagtcactgccactgccaccgctgccactgcccctgctgccaagggacaaggggctgctctggaaaggtgagccagcatccgaggggggtggggtcagtgtgtcctccacctcagtcttcacgccctccatgagcacgtctgtgttccctccactgccacaggccgacaccagatccttcagagattctgtgggccgaaaggaacagagccaggagtaaaggctggatatgtgaccccaaatcagagcctaggcccttggaggcctagggactactgtagctcctaaagctagcccaggacgctttgatggggctgggttagggccaaagggaggcaccaggtctctttcaggaccagaggtaaccaagggactagagctgaatgcagggctacagccaagggtgaggtgggcagggcagagggtgggccagaaccaagggtggggtggggctagggatggggtggggccgggaggtggagcaaggctagagaagaggccagactggagctcaataaagccaggactcactgcttttgtggacagcagtgcgcagacttaggttctcctgcttgagtttctggttgctgtgttgcagaaagcgaatgtagtcgatggccttgcgcaagacagcagatttattcagctgcacggtgtgggagggagggggagcgcacaggtggcctgtcaggtcgggggttgtggggttggagagccctagcaagggggtgcggagctgctttgcaacattactgcctcaggacctttgcacttgttccttctacctgaaccgttcctcgcctagtagcacccacctcccaggccgggcatagggttagaatgtaagatgcagacagcagggtctggctagctgctgctgtgcctgccgccatctcaggg

SEQ ID NO: 85525 - DNA, 1688 bp, Homo sapiens
gagggggtctggccaggggttggggagggggcagccccagcccagacacacagcttacagccaagcctctcccaccctcaggtcctgctgcagccccacttcatcaaggcagactcgctgcttctgacagccatgaagacagacggagccactgtgaaggcggcaggtctcagtcccctggtctctggcaccactgtgcagacagggcctttgccggtgggtgacgtgggcagggcataagggagtggggtctacacacacacacacatgcccacctggtaacatgtgcctggccctgcagaccctggtgagtggcggaaccatcttggcaacagtcccactggtcgtagatgcggagaagctgcctatcaaccggctcgcagctggcagcaaggccccggcctctgcccagagccgtggagagaagcgcacagcccacaacgccattgagaagcgctaccgctcctccatcaatgacaaaatcattgagctcaaggatctggtggtgggcactgaggcaaaggtgtggagaggcctgcaggggcacagaccggggtgtccctaggaaggaacagatcaggggcaactggaaggaagagagggagtgagactgagcctggacaagcagggaattggaattcagcctccccaggcctggccagcctcgtttatttagttaaactggtttgcaggcctcttcaataaaggtggggctgtgctaggcattggggatgcagcaatgaacaagacagacaaaaattgtccctcaaagaagagccgaccttctggtgggggagatggacagtaggcaggatgaataagtgctcgagaccaccacgtttggctcgttgcagagaaagcaggaagaggatggtgagggtcccctggtggtagccagggaaggcctccctgagatggcggcaggcacagcagcagctagccagaccctgctgtctgcatcttacattctaaccctatgcccggcctgggaggtgggtgctactaggcgaggaacggttcaggtagaaggaacaagtgcaaaggtcctgaggcagtaatgttgcaaagcagctccgcacccccttgctagggctctccaaccccacaacccccgacctgacaggccacctgtgcgctccccctccctcccacaccgtgcagctgaataaatctgctgtcttgcgcaaggccatcgactacattcgctttctgcaacacagcaaccagaaactcaagcaggagaacctaagtctgcgcactgctgtccacaaaagcagtgagtcctggctttattgagctccagtctggcctcttctctagccttgctccacctcccggccccaccccatccctagccccaccccacccttggttctggcccaccctctgccctgcccacctcacccttggctgtagccctgcattcagctctagtcccttggttacctctggtcctgaaagagacctggtgcctccctttggccctaacccagccccatcaaagcgtcctgggctagctttaggagctacagtagtccctaggcctccaagggcctaggctctgatttggggtcacatatccagcctttactcctggctctgttcctttcggcccacagaatctctgaaggatctggtgtcggcctgtggcagtggagggaacacagacgtgctcatggagggcgtga

SEQ ID NO: 85526 - DNA, 1917 bp, Homo sapiens
tggccaggtggggctgaggtgggagtgtgtcccagtctgtatgaggaggaaggagtcaggacagacagcacttgcttttacagagatgaaatcaaagccctgagtggccaggcctgggtcttgaggctacttggctgcaggcaaagcctggacttgagcccagaactctacacagagacacactggttggccatgtggccagcagctggcttggccctaagccttggtctgttccactgagtaatgggttggtgatggcagcctggctcttggcttcttagtggggcaagaaaaggcagagagacaatagatttgggattttgtagacctgggtttgaaccccactgcatgctcttgggctgcttgtggtcctccctgagcctcagtgtcttttcttgtctccaagatgaggtgagctaatcttttgaggtagtctagggtagtggccagtggttggggcattggagtcaaaatagggtctggactcagttgagtctctgactctataagaacttaggccagtaagtcacctctctacagctcagtttcttcacgtgtagaatggggccaatgatcacatcaccctctcagctgtgggtgaggattaggggtctagcctggccccatcaatgtgggtagccccacagcgggcctggcttttggaccagacccacccttctgacatgggcccccacccttagagtccttctagtgtggatgaggaccctgctctgatctggggtcctcttgggggacttccctgtctgccattctctttggggatcctgcgctgccctaggaagagtgggcccaggctgcacagttggtccttggtcacagaggatcccaccacttcttcagggcctcaaggcaatcctgcctctctctgcacccctcttccccctgtaaactgaggggaggggaaaatcacccactcctcagcagtttctaagttgctttgtcaaattcagtgcccagaggatcctgctgggggtgcgttttaggatgagaccaggagtggccaatggtggggtgtggggcccatcgctcctatatgaagaccccctctgccctagactgctcctccctccccatccccatctccatcccaaagactggagctgctggatctgtggatggaggcgtgccccccgtttcacacattgagaaacaggccccaagtggagccagggaaggctgcacctgggcctctggattccttttgttctgtgtggggttgggggtgatggactgtggagagggcaggagagctgtctggaagggttggtcacctcatgggcaaatgcttggaagctggtctgagtccacggtgcagtgtgtatgtgtgtgtgtgtgtgtgtgtgtatgtgtgtggactcagaggtggatgtcttgtagaatgcatgccccatgaagacaggagtaaaagtttaccaccatccacatcaagctacaggacactcccagctccccagaaagttgcttagttctaggcagggatttcccttattcacagccgggagcagtgcctggcatagtgtgggcactcagcactcagcacatgctcactggatgagtgaatgaatgtgagcctgctgtttgctgtggactaaggatgtttctagatgtttgggcaaataccggatggtgggaagagctcaggctctgaagtctgcagtcttgggcccgaccctgggctcagccccagcctagctgtggggcaagattgtgagccttgtggtgcccaccttgtccaggtattgtgatgcactcgcagcagcaggcattgctttagacagcacaggtgctcgcaaaatggctgtatgtccgggaacaccagctcctgtgggtggctttctgtcctggtggcattgcccacacatacagctgtgtgccaacaagggttgtgcaaataag

SEQ ID NO: 85527 - DNA, 2580 bp, Homo sapiens
cagtgggatgggagggggttagagcaggaagatgagacaaataaagacacaataagaggcaggaatatgtggtaaagccaagatgggtaaggggaggggacaggcttgactgttcacagtggccctggccctgctgtctcaggctagtatctgcttgttggtctcaccacattctaggctcagaaactggggagcaaagtaatgaaagaaccaggctgggaggccatggggaactcatgcctggagttcagctctcagtgtgcttttgggtcaaggacgcttccctgtcttaagtcactcatgtcagagcctttgccaagagcaatgctgtgttttgttttgggggtgagggaacacccgcgggctgaggggagggttgggccatgctagagaggccgtctgttgtccttgaacctcccaaagctgggaaataagggcctgggctggacggcggtggcgaggacaggttgcgagagagacatggctgggttttcttgcttagggtcctgaatagagagcaaggttgaggccgcagggaccccagcccccaatggactgctgagtcgctgggtctgcccagggttcaggcaccctctcaggttgcagccaactggggtgtggaccaggcagaggcgctggcctgcagtttggggcagaggcaggctttgctggtggtctacttggctgcaaaatcaactggccaggctctgatcactttgtgtgtgtgtgtgtgtgtaacttttacctttgacaaaagagggaagacaggcccaggcacctcctcaaaagaaccctagagcctgtcaccccttccttacccatcttctgtcctagggactgcagcccttcctggcttcccagggccctacaatgaatagtgggtcgggactcacttggtgactgctgggttgtgaggccttgagggggaggggcagacttcacccatctggcagagggacatcggtgctggcagtcaggaaacccttatttccaggcctcagtttcccggaagtgacctgttttcaggagtggcctcatcccagaccatcagccccgctgtggtgaggggtggccccttcctggggctgccctagaagggggaggtccctgcacccaccgcagctgccactcggcagcccttggccttaattaaacgcttcttgcgtactaagtgctgcacccatattatctcccttctaccattcgacgccagggagataatgactgtcctgttttctggaggagtaaacggagggttggagcggttaaggctcgctcagggtgccagcgaaccagtgatttcgaacacagagttctggtgtgttgggccaggacttctctgctttgaccctttaacgaagggggcgggagctgagggccagtgaccgccagtaaccccggcagacgctggcaccgagcgggttaaaggcggacgtccgctagtaaccccaaccccattcagcgccgcggggtgaaactcgagcccccgccgccgtggggaggtggggcgggggccggggccgggccctagcgaggcggcagcgcggccgctgattggccgcgcgcgctcaccccatgcccggcccgcagccccgaagggcggggcggggcgggacctgcaggcggggcggggctggggcggggctgggggcggggcggggcggggcgggcgcgccgcagcgctcaacggcttcaaaaatccgccgcgccttgacaggtgaagtcggcgcggggaggggtagggccaacggcctggacgccccaagggcgggcgcagatcgcggagccatggattgcactttcgaaggtatttttggaggcctccccaccagccctttatacaatgcctccgtctcctgcaggttctcctggggtgggcgggcatgcgggctacgcaacttgagcaggaaagagccccttcccgagggagaaggtgtgacagttaccagctcgctggggaagtggagggctacctccaaccaaattagtgtcccctgcaactcaagggggaagggtttgcttagagacccaaaagcagcatcccgacctaagagggtttggagggagagggtggtcttctctacattctctgcacccgctttgggacaggaccaggaggaagcagggaggagggcccgttgtccctctgccacagcgtctgccctattcagcacccctgcctattgtgggcatcttagacttttcaggaagacagtgggagccctagattgtcaaaattgtcagtttttctttcaggcctcagtttcccccatctatcgaagaggctcacacggactggggtaaagggatgggaaaccctgcagttgaaagtccattatgacttgatgacttgtgacctggggggtccacaaaccaggagagtttctacttgagaagccaggaagactggggctgccaccccatcctgttctgccaactgctctaggaaattcccctcctgcagtagcttccctgcctgggtacctgtcagtaggcaatgttgggtctccactcggtgccagctgcctgccaagcaaagcctcgggcagccgtaccaaaaggggtttagtcttttctgtt

SEQ ID NO: 85528 - DNA, 1075 bp, Homo sapiens
tgaggcctgcccaggatttccctcatggcctcacagaatacatcggccagagtcattaaagggcgcctgcatctgccttcagagagaggtttgaaggtagaactggggagggatgccaggtgggggttcaggtttcctgttgggtcctgatagaatcagggcaggagaggaagaagaagagggaagaggaggaacccaggcttggggaggggtggcagggcttcacaagcctggggaaggtgaactagggagcagttggggccaccatggcccagagtctatgcctcctcttccttcctgtgttcagagtgtgtgtgggaaccacaagggccttctcagtgttcatagggaagcccggttcacccatgggtgggccgcaatttgggtgccacagtgagcccctagagaccagctctcccagcttccaggacagggactaggggaggcaagagaggctcttccttaaattgtgcacccaaggtgcctcagctgccttactctagactggccccgttaactccccttaaaaaaaaaaaaaaaaagactcagtcgaatggtaatggagctccaacgtgaatactgcaagtatcaggcaactcactacctgactttccagttctaaaccattctaattgctgtagagagaactaacctttgttgagactgttgagtgatggatgttttacacacttgctttcccagaattcccacctctggagatcgtaggtgtgggagctcagagggtggggagtggactgtccccatcacacagcaagggaggggctaaaggaagagcagggcctggcatgcagccccagatagcccacttgggtgtgtctctgagggaggctgcagggctggctctagagtttcctttttcagtcttaacctggtgaccagcttccacagaaattggcacggtgactcatgcctgtaatcgcaacacattgggaggccgaggtgggaggatcacctgaggtcaggagttcgagaccagcctggccaacgtggtgaaaccctgtctctactaaaaatacaaaaattacatttcattacaggtgtggtggcgcacacc

SEQ ID NO: 85529 - DNA, 1001 bp, Homo sapiens
acattcttaactccccagtaagtcaaagaaataatgagcaacacagactcttcctaatctgatcagtgactggcttgggcctttctgaaagtgctcttgtgggcttcccacattgggtccgaagttaggacacagagcacattcctcagagcaaggggccagctgagctcactgagggagtgaagagctctggtggcatcgtagatacctgctcagagtgctggactctacctgggaccccaaaccaccctcccccaccatcagcagcaggtgtcaacccccaggactggagttgtcacatcactgctggtgatatgtgttctttgttctttttctttgtgaaggtcgtgttattttttacatttgatagacactggggtatgcattccttttactgcttatttttactttagtcttaccctagatcatggcattgggtgaagccagctatagacagagctggcatttttgtaatagaaataggggtcttgcaagtgagccccggaagggtacctcccagagccagggtaggtgaggaggtgattaagggtcatcacctcatttctctaggctgggagccaacattccattaacatggcttctagggagcttcttatcatgtcatatttgatggcaacttaaacctttttagccatgtgcatttttcagagtctctgtccctgaggtgcttggcacaggggcccaagcaaggtgactgctcaggcaaccccgtggtacaccttagtatgcctggaagctgtcacctccctggctctggctgctgcgccccagtgctcagctgaacttggtttctttgactcctgaagcacagccagccattgaacacagggaagaaaggacgagactaaagggagctgttgctttcagggctgcttcatgaatttcccctaaagagacacaaagaagactaaagccccatagtcccctttgtcatcagagccctcgtttttgctgtgtttctgttgatggtaaaatgtgcc

SEQ ID NO: 85530 - DNA, 1189 bp, Homo sapiens
ccctgaggccaagtggcttctatattgtaatgagtcagtttccataatttctgacatccctgggtttctgaattagaaaacagaagcaccaacctgaaagttaaggtttctgagtcataagaattgaaagccaaatacaatctagcaatcgccttatttcacagatgaggaaattgaggccaagcattgctcaggcctctgtcccctgctcctgcctctccacccaaatctctaaggcttcttaggatagaagaaactcaggagctctccggtgaagaaagtggggtccagagaggagcgactcaccccaggtcctgccaccagtgagtgtgagggcccagatggaccccacccagtgcactctcctcagcgtgccctctagggcttggtctggaggatgccattccataaacatactacttatttggaaaaatctaggacatggaagaaaagggttcccatgagccagcttttgggaagttatttttgaggaggtgaggaatttcttaagtgtcattgtttattttctgagcatgttggctctcaagatttatccccaaagaagaaaattaaagtatgaccccaggcctcaagggatttgttctttagcagcaacaaaacaattacaagaaaaatctgaaggtttaaggcccctgaccccttaatgtctttgttgtagcttttgcaacacattggaaagctcaggacatctagtctgtttctgctaagtggacaaaagctggtcaggtgtaaagaaagggctggtgcacactctaaccgctagtgtgggactattttctctctggagatgctgctgactttctaagcttcagttttggggactcagcatggcatgcgtcctcccagaggccacacattctgacttacagtcattgagagcatgataactggtgtgtcctgttccaggaatgtctcaaggcagaaggcctgccagcaagcacagagtagcagtgtaccctactgccttttgatgggcaagggcaaggaagtgccagccttaggcattgttaacacatctgtcagtcatttgtgcgtccatccccccagtgaggacccacatgcctcctgtccctaggtttcatgtctgggtgataagactccctgataccttttcaattcaatgttcttttttttttttttttttttttttttagacagagtttcagtc

SEQ ID NO: 85531 - DNA, 1020 bp, Homo sapiens
gcctagcagagcagtaccaaccccattagaaggcactcgagagccagggtttgtttacagagctggtgcagttgggtggtggctgggagggtgtcctgtggcggtgagggggtgcggcacagtgaagtggagggaatggtatgtgtttgggcctccccaaacataaccatgctttctgtacaatttcggattactgaaggggaaagaatgtgtgtcttaatgcttctcatgagatttttgtttttgcctaacaaagaaatgtgtatgaatgcacgtctgtttgcaggggcagggaggaggagggtccttggaatagctgccgacaacagctggaactcctgtctgggtcccccagctgggctagagagggcagtgatcatctgtccactggacaggaaggtttgcaaagggctgtttgcttactgggtcccaatttttagccttctgaagcccctgtccaatgggcccaggcaggcagcagtgctggtttccacgggatgctccttcttgggggaagggactcactccctcatccatgctggtcttcacctggtggatctgagggcatgcatccctctgcactggtcaccagagggcgcagaagagccagctggctgccttgggtcctcagtgccgtgcctttccacaggagtgggcagtgccacctgaacccctgagactgggacactcaaaatcaatgcagtgctcatggctctgattctcccattacttagaatgtcctcccacctgccccagcgtgggcattagagagcccagccaggggcctaccaggatactgcctggtgaggacatcccctcctcgtggccaaccctggcctgcactgggagcagccctgttgtgcccctatgaggctgacctcatttgtccctcactctgggtccaggacctgccttgtccatgccagggtgtgtcctgctgcacccctgccattatcagcgcccaggcctgggtctgagcccaggagatgtgagtgacttcccgcccttcaccctttgtgt

SEQ ID NO: 85532 - DNA, 1036 bp, Homo sapiens
gttcccaccaacagaagctgctcccagttcaagtataaattcctggggtaggaggtggggggaataggaagagagataattggtggtgtcagccctaggatgatcataactgtgggcaggttatgtcccggttgcctcctgcacatcgcaaagcacttttgggtgtagcttcccatagtgaagcaagagcagcagggaagcttggcagtgtgagctgtttgcctgcagactcatgggtatgtggctgtatttgaggagaggctgaggccactctagcaccctgtgctgtcagcgtagctggagcgcctgaggagaaggaaggaagggtgcccagagtgaacacagcaactcctcctcttgagctatgcgtcaaatcctccactctctgagttgggagagaccttccaggaagttggttcagttctacacctgtgttcagatttcttccacagcatcttatctgttgggtctttctgcgtgtccccagtgacaggctgttcacagcagccctcttgctttcaaatggacatcttggttagacttcgggcagcagcacagcaggcatacaaattacacaggcctatgaattaatgcctccccatccttgccctcccactgatgagctgggcgatgccaggtaagtcaccagccgtctccaggcccccttctcctctctagactggagtgatcacttgcaccttggcagtgcctggcgcagggctgggcttaggcaaggcctcacaaatcctagctttcgtgactattgttagaaagccctttcacacattgatctaaggtgtggctccctataactttgatcctggtctgtcttcttagacactagaacaagactaattcctctttcacatgggtagatccttaaatatttgaagattgccataagccccacccactgcacagtctccacatggaacaaatgtggcatttggcagcatttggcagcccaccacagggagggataggcagttcttcacaagaagcagacataaaatggagagcttccatcagctgaaaa

SEQ ID NO: 85533 - DNA, 1517 bp, Homo sapiens
aaggcatgaagtggtgccaggaagaactgccatgtgttttttccccagcctccgacagtgggctgtgaaactggtttttagaccctaaagtcaacaccctaaactaaaatgctagggcattttgaggttggcgtcacaggacttagctggattttgaaccaggtggaggcagccagcgcagctggtgggggcggggccagaggcactccctacgggcaacctactctcctccagctgggccttccagacagtgctctgtgaggcactttctttggccctcctcagaatccagaaggagtgttggccaagaggggctgtcctgatccagtagttttaaatccctgagcatgcaaattaaataagtgcatcagggaaagccgggctgacagtactgttcctggtgagatgcatcagtcataattaaggaggctttttggaaactgaccttttaacttcaaatgggtctgttggttagagacagagtttctgtggctgcctcaggattggttgtaccacattgctggagtgagggagacagttaaattctgtgacaatgacagacttggcaatggagtcatgggcacaggaggctctgcctcctcctttgggtatgtatggtgaatgggacagcatgagaagggccatttctgggaaggcctttgagtattctgtttttgatacagtccaagacttccaaagaacagaatttttttttttttttttttttttttgagacggagtcttgctctgtcgcccatgctggagtgcagtggcgccatctcagctcactgcaagctctgcctcccggattcacaccattctcctgcctcagcctcctgagtagctgggactacaggcacccgccaccacgcccagctaatttttttgtatttttagtagagatggggtttcactgtgttagccaggatggtcttgatctcctgacctcgtgatccgtccgcctcggcctctcaaagtgctgggattacaggcatgagccaccgcacccagcccagaattttttttttaatttttaagtttcatgagtcaacagaaatgataatctacttgaatttttgctctttcctctctgtgatatgttttcactgaagggaatctggtgattgtgcttttcttgggatttttcgatttgggcacacatgtgctgacatttttggcagcggacatcatgaaagaagcttgggtctgggaaaaggacccctgggggtgaactccccagtctggcctgggtctagctcccaatgggctcttcttcccttgaaccacagtcatctcacctactggcagcagcgctagacagagctaggctagacaagctcagcattagttgtctctgatctgaggaaacctgtagttagcctttacttcatgtcacacatcaatttctcctttcctttctgctcaatttgttgccggttcccaactccaccagtagaagctttcagggcagaggtgctcccgcacagagggcaggcaccctgctgagctgacaaggc

SEQ ID NO: 85534 - DNA, 1092 bp, Homo sapiens
cataaaatatctagtcatccaactgacagtttaagattccctagtgttttctgtggccattctcacgaggccaaatgtttatttgctccaccatgttcttcagggaatgtttcccttgatgtatcacattgaggttgagttctttatcaagaaaggtctgcatgcaggtcctggcctcagaaagagatggagggaaagaagaagggataaagagaggcctctctccacagcctctgcagctggcctcatgtggtttgcgccacatagggtggtaggttctctctgcccgttactcacatggtaaacccagctgtgctgctttatccacataccagcttgacttggtacagtgtgctgaaaataatgtcgggcctgtccctttggactccacccccattgaagaatgcagtttcatgctgttggtttttttagtgctaaagaaactagatagatactgtgtttatttttctacagtaaaaatccgaaaagctaggaaaatgcctattccctgttggattttgatcttatttgcatgtttcccttggcaagctttgtttcgtattattcaaggtgacccacttagaactactgtttaaagtcacattgtcattaataagttacacaacctgtgtgtgataagtctgttagccctgaatattgtataaacaggaatacatgcttgtgttggggctcttcttcatatttaaatatggttacatttctttttctttttctttcttccttttttttgagacagagtccctctctgtcgcccagacaggagtgcagtggtgtgatccttgctcactgcaacctctgcctcccaggttcaagcgattcttgtgcctcaacctctcaagtagctgggattacaggcgtgtgctaccaggcccagctaatttttgtatattttgtaaagatggagtttcaccatgttggctggtcttgaactcctgagctcaagcaatccgcccgcctcggcctccaaaactgctgggattacaggtgtaatccatcacaccaggcccaaatatggttacatttaaatgtaatcttccctgtttgttctcactgttgatattcgtgaccttt

SEQ ID NO: 85535 - DNA, 1340 bp, Homo sapiens
tgtggtggtggccctcaaaatgatgcttagggggcatcagaacctcctggggagcttggtgaaaagcccatgaggccaggattgatgggggtcaagggaaagaggccccaagggaatatgaacctcatctgtaattgcagtagacactgttccacaggctcccaatacctgttcctcatttcttcttttctgacggagtctgattttgtttggattgcctatgtgcccagctatattctcttacttagtttcccttgcagctaggggtgactgtatgacacagctctggcctatgaacaagaggcaggagctcctgaggagagcacctcttcataaataagatggcaaagtcctttggccctttcgtgttcttcctgcctgctttatagactgccaggtagagcagtggtgccttgcagctggaaggatggaaaggagggaagcctcaggccaaggatggcagaggaagaagacaaaaagttcctgggtcctttatggaatccttgagtggattccataaatccactccagctctatactgcctgcttctagatttcttcttgttccctgagaaaaataacccccatctgtttaaacgactgttagttttttaattgcttgcagctgaatgcaatcataactgataaggtaatgttttaatattttacaagggggaaatgtatttacatattgtgcaattaaaaatgaaaaataatttaaatccccacagatttctgggccccacatcagatgcactgaaacagaatctttgaatctttggggatgggactcatgtagctatatttttaacaaactctacagatgattcgggtgcacaataaaatgggagaaccatttccatatttattaatagtattaactccattttatagataagaacattgaggcccaaggagttgaaacaccttaccccaatattttaaagtaagatttgcatgtagttctgtctggttccaaagtacattccccaccacatcccatgcctgctccagagaggcctggctttcccccaacaatacagccatgctacttctgaggggaacttctaaaatagaagattcaactgtttgtaaaacagttttacactgctgcccagggacaacattaccataattcatctatccccaggaaacaaagggacgtatgttttctggcatgtttgttaaaaaagagggctgggcacggtaactcatacctgtaatcccagcactttggaaggctaaggcaggaggattgcttgaggccaggagtttgagaccaacctgggcaaagtaccaagactctgtctctacaaaaaataaaaataaaataataagaat

SEQ ID NO: 85536 - DNA, 1007 bp, Homo sapiens
ctgagagcacatgataccagcaggtgacgcaaagcctgcatgacttggggtcctcaatcactgggaaaggccctcccccactggtgacacaaaaaggcaggaaagaacctttgtttcatctggttcatatgtgacagccttcatttgctacagatctttggccctcaccattcttacctgtgaaagtcccctaatccgagcctgatgggacccaggtgtgaggcattgatcatggctggttattcatcaggggtggatattggcacacaggctaccatttccttattggttgactctgatcaaagataaaaataaaaatgtcggtgttccttgaataggattacagtagaatgcttgttacaaaaccggaggagggaattcattaggcttttatgatcatcacttctgtgggaggaagggttcatgttgaatagcctgccagataactctggaatatgtaccactggagtagggacaatttgccaggcattgctctcctttatcctttggggctgcagggacagatggcctccagccttctttctgctcccctggcatttgtcacaacatgctatgggtcaggagaccctaagcagaaagatcgtgggaggtcagcacggcagggtacaagaggccagttcaactctgagccctcatggtatgaggcagctttagaacaatgtggaagaatcaaagaggttgaacttagactgttaaaaagcctttttcccctgaaaatttgaaagcagaaagaaatgtagagaagtagagaaaaattttcattatcccactacacaaaggttactactataaacattttggtgtattttcttcctgtattattaaaacatttttctttacagagataatgctgtaagtacaattttgtgccctgtttttcccacttaatatagaataatcatttttaattaaaaaacagcttataaatatcattattaaatgactacataatattcccttatgtggatgaatacattgcatttcat

SEQ ID NO: 85537 - DNA, 1032 bp, Homo sapiens
agatttaaaagggaaggtgtacatatcggcccatacatatcggcccataataagatcttaatacttagtaactagtattataaatgtcctttaaattgatatgattttctggttagtatagtaatcctgcgaagtatatagtttttaatccccattttacatatgatatgattgagggttaaagccaggattaatgaacttgcctgagatcttggggctaatacattacagagccaggagtttgagcccaggtctgcctgaccccaaggcccccatccttattactgctatttattaatggaaccttgcaatgtggccttgtgaaaaagaacatgctgatcttgggtcaggcagatcagggtcgtctggtccttacttttgtctgctgttttcagctagtgctggttttttataagctggtgaactggattacaaattttccttagactcctttgtccatatcttctgccttctttctgcctctcgttttaggagctgttagttctcataagcccctgtaatggagagaagtagagagaacagaacattcaaataaaaagttcatgcacatcagctcttttgtgctacgtttttgtgggaaagtggctgagacttttgtattttagagatgaggtcttgctgtgttgtccaggttggacttgaccttctggcctcaagggatccttccaccttccctccctagtagcagggactataggtgcatgccactgcgcctggcttagaggctgaaactctttaaggcaaaatgaggttcataggttatctgtggatttttgtttttcagtcagccgagttagtgaggcatggacagggcttatgtatccatttccactgtaaaattgctaagaatggatcattggaagataataaatgtggcagagccagaaatcaaacccaggcctgaccaactcactgcctggctggttccattgttccactctgcctttagggacgggcaggtgagggacccacagggaagacttagactgcccgtggatatctcctcgtggc

SEQ ID NO: 85538 - DNA, 1113 bp, Homo sapiens
gtctgggcaacatggcgaaattccgtctctacaaaaaaatacaaaaattagctgggcatggtagcatgcacctgtagtcccagctacttgggaggaggctgaggtgggaagatggcatgagcccaggaggcagaggttgctgtgagctgagattgtgccactacactccagtctggttgacagagccagagaccctgtctcagaaaaaaaaaagtcaagtaccttcctcaaggtctgtggattatcagtggcagagcagggatttgaacccaggtctgtgggcagcagagctggtgctcttaaccactaaaccagagagcttagtattgtttgtgggattgagtgaatgaatgcctgaatgaacttggtagctgaaaaatctagtaatagttgtcttaaatccagacctacactagtattgtaaattatgtactcagtttcagttttcctcctgtaactcagtgtacaagtgtcctcttcataccagtaagttttctgagaatttcctcaaaggacgtgctttcttatatcctcgctgaggcacttcttagtaatggaagacctgtgtattttactttctctttggatttgccttagaactacagtgatggatggaggaaaagacggaatttaaacacatgctaaattgtctaactgaccaacttgcttttaagacatcaccagctgctcttttaatcattaatgaagcataagccttgtagtctgggaggcatgtcaaaaattctgtttcgggttttggtttaaaattgagtgtaatggagagagactgattctttcatctcagagaattgggctgtctttgagagctggggacaagaactgggtcctgtaataggacactgtggagttttttttgctgctcctcaaaggagaaatcacacagatttctggcacgtcattagtcgaaataggaaatgaggcctgagaaatgatgttgcttggggtttgaaagctgaatttgctagtggcttccagagagcgagagtctcctatgctaactgtggaaattcttaaaccagcaattcaaagaatcagaagactctagttgaaagggtcttagtggtatttggtccaaccctctaatttttgcag

SEQ ID NO: 85539 - DNA, 1030 bp, Homo sapiens
cacttcatcacccaggctggagtgcagtggcacgatctaagctcactgcaacctccgccccacaagttcaagcgattctcctgtctcagcctcccaagtagctgggattactggtgcctggcaccgtgccgggctaatttttgtatttttagtagagacaaggtttcactaccttggccaggctggtcttgaactcctgacctcgtgatccaccctccttggcctcccaaagtgctaggattataggagtgagccattgcgcccggcccaaagactacgttctttaactgacttcaacttttagtctctttggacctaattttccctgcttataaaataatacttctcaacagctgcatggggcttacacctaaataattttgtctgttcacttcagtaggcagttatgagtgcctgtggggggccaggcctgtgccaggctctggggatacaaatattaacaagctgctcttagggagccttcggtagaggtaacatgctcacaaaaggtgtcctgggtctgtctgagcggttggtggagtaattcttactctgtcttatgcgtgggcctcatgtgaacattctaacctggtacgatttagtagaacacttagcgtgttcatctcaagttagcggctaagaccacagtctgacatagttaactgtgcatttcttgcatccatcccgccctttattctggagggcagttcctgagtagaaagcatggtttagggagagagtaagctggacaggtgcggtggctcacacctgtaatccagcactttgggaggccgtggcgggtggatcacctgaggttaggagttcaagaccagcctggttaatgtggcaaaaccccatctctactaaaaatacaaaaattagctgggcatggtggcacgcgcgtataatcccagctactcgggaggctgaggcggaagaatcccttgaacctgggaggtggaggttgcagtgagccgagatcgtgccatttgcactccagcctgaatgacagagcgagactgcatctcca

SEQ ID NO: 85540 - DNA, 1063 bp, Homo sapiens
ttggctaacacggtgaaaccccgtctctactaaaaatccaaaaaaaaaaagaaaattagccaggcgtggtggcatgcgcctgtagtcccagctactcgggaggctgaggcaggagaattgcttgaacccgggaggcggagtttgcagtgagctgagattgtgccactgcactccagcctgggcgacagagtgagactctgtctcaaaaaacaaacaaacaacaacaacaacaacaaaaaaccaaatataagagatatagggatatatagcaagtggaaagagcttgatacttctgtcagggagacctaagttgaattttgacctggcccccatttcttggctgtgtgaccccagaaaattgtgttgctttctgaggtttagtttgtcagtcttctgagagagagagagagagagagaaagattcctattcacagagtaatgtagtttaaatgagataatgtatgaaaacacttagcatagtatctggaacatagtagaagctcagtaaattgaaactgccactgttaataacagaatatttaagttagggttggattttctatctggagaggatatgtgaaacaactggcccgtctgtgacctgtgaaggaaaataccctaccaggccccaggattcaccattgctcataagatgcttgactaaagatgatgatggctccccactgccaggtagccaataggtcatttcagttcagttcaggtaaatgattaatggacagaattaggttctaatgtatattccgtactgttgtgacaaagtgtcaaagtgactttcttgatatttagtgttgttagtattcttttaaaagaatgtgcgggggtgggggattggtgggagggagggggaatacagaaataaaataacaactacaaagctaatgattaaaaacagcagctgtaggctggttgtggtggctcatgcctgtaatcccagcactttgggaggccaaggtggtggatcacttgaggtcaggagttggaggccagcctgaccaatatggtgaaaccctgtctctactagtaatacaaaaatgagccgggt

SEQ ID NO: 85541 - DNA, 1020 bp, Homo sapiens
acagtgtttctcacagttgtcctgggttcagggccaaggcccaaacagtcctcttctatggggatcttatagtttaccacccaacctgggtcccctttgacttgcctgatgatagtgttgttgaagaccagagaggttggagctggggaaagcagcagagttttacacaactgtcaacggagtggcctcctcacagataacagatccagaattttcctgggaaatgataacctgaagtcaacaggatctgaaaactatagtccctattggccatgaattaataaggagaaaattggttgggcgagatggcttacacctgtaatcccagctctttgggaggccgaggtggaaggactgcttgagttcaggagttcaagaccagcccgggcaacataggaagaccctgtctccatttttaaaaataaaaaataaataaataaataaataatgaacaaaatttttcttaaaaaagaataaaatcaatcacttactgaatgcttactgtgtgctcagtgcacatgcattatttaagtacatgtaagctccggaggccataaaaagggagtcctaatgcccttatttcccagctagggaacctgaggctccagggaggtaaaggaacttgtccaaagtcgtacaatgagttactgacagagacggatacagaacttgagtagccgtattcacatccaaagcggtatatacagtaccaagatgaaatcatttgatagttatgaggtcagttatgatggctaaattctgggaaaagttatcagtggaccgggtacctctctttctatgaaaggaggctggaagacggaaccccttaaaaatccattctggccctgctccctcgggaaatgcttccttagtatttttttttttttttattcaaaagcttgacaagcccaggactaaagtgtcttggctgtctcacacgactgtaaagtggctgggagaggacctacgtgctcattttataaatgagaagggccgggccggcgttctccgagaaaaagg

SEQ ID NO: 85542 - DNA, 1110 bp, Homo sapiens
cagcctgcccagtggtgggtgggcagccactggccctgggcctgggcctggactgcacttcttccagaccatccatgccacagagagcacaggtgcctgctccggctccctgggggtggggtggtggggtgtgtgtgtgtgtgtgtgtgtgtgtgtgtgtgtgtgtggtgtttttgagacagggtcttgctctgttgcccaagtgggagtgcagcggtgtgatcttggcttactgcagcttcagcctcctgggctcaaagcagtcctcctacctcagtctctcaaatagctgggactacaggtgcacccccaccacacccagctaatttttaaacctttttgtagaggcgaggttgcaccatatttgcccaggctggtcttgaactcctggattcaagcagtcttcctgcctcggtctcccagagtgctgggattacaggcgtgagccaccgtgtctggcgtacctgggtgttcttacctgccacctccccctaggcatgtctcatgtgttttggcaagatacaaacctgttgccctcagccaacctattggaatggaacgtggctttggtcaggaggcagccaggcactggccactcacccagcaacttgtcttgtccttccctcagatccagaagtggggcaacattgagtgggcccatgactatgagctgcaggagctgcgggcccgcaccgccgccggcaccctcttcatccatctctgctccgagagcaccacagtcaagcacaagctcctgaaggagtgaggcctgggcagagcacactcagcaggatagaggcagtgcagccacagctcccccggccttcagggctccccagcctgtggggctggcttccttggcttttggggactcggcctcagcgtcaccctgagattccccccgagacacagtgcgctagtacggctgtccggaggtcagcctgatttcaacccaggtgcccctggcctggccagcagtgaatgtaggagatgaattgtgcaagtgactttctctcgactctgattttattaaatatttctccaccctggaaatgtgctgagccctgttttcacgtatgcctctgcacttctccattcttcctgttttgt

SEQ ID NO: 85543 - DNA, 1004 bp, Homo sapiens
ccccgcaggcagtgacagggtggtttttgcctttgattcagaccacattgtgcaacacatcattggacaacccaacccagagaaacaaggatcagctgatccgggcagccgtgaagtttctggacaccgacaccatctggtaatggacatttagatgggcattccccttggattgaggctatttttcctgatttgcccagatggttatcagtggaagaagaaaccctctccatttattgcaaggacaaggaaggtggcccacttgactttggcacttggctgctctgtagccccttaggaggaggactcctcgggctacaatggtgtcagaacatggccacccctcttctctagcccagaagctgctccttaggctgggagggtggttatgcagctcttgcaggtgccgtgaccacaggccccttaggcctaggggggcctgtgaccttaaacttctgcccaccgacactttctcaggtaaagcatccttggcactatggatgctgataactaggagtgtccttctccagttctgaattctcctctgtgtctatgtttcttggctaattgttcagtgatgccaaaggaaagttgagaaacaatggaaatgattgagcagcaccgtgcctgctagcccaagtgctctaggatcctgagtcatctcacgatgacacaggaagtcagcactgatggctggaggcgtgctttcgaagggggtgacccatagctagtgggaacgcccactccatttatattagggttcacttgattgcagggagcagaaacccattcaacctagctcagacaaaaaggggattcttgaaaactatacagggatcctgacaggaaatgaaggacagttgggtcaccaggaaaggtagctggaagatccaatgtcagagctcctccctgtgccctactagggtgagaggaaggtgagggaggaaaggctggttgtccatctgcccctcccagcaccccagcttttcctgcataactcatga

SEQ ID NO: 85544 - DNA, 1109 bp, Homo sapiens
cttgaaggaaatgtttggagttcctgttggatacacaagcaagctggttaattaggttaattaattggagagaggggatgggaaatgcccttgggagctctgtatcctgccgatgtatcacacacgcacaccctgcgcacgcacactggctttccactcactccttagaggcatcagagtcttgcctgaaatgggtctctagctttgtcccactcagacaccgactttaggtttgaactcgttgtgctggcatgaggtggcactggtggtggggagggtgggagagcatgccgagatgctcctgatcagacttgtccccaggctgcggggctggcagaggtatgaccagcatgttctgttcctcccttctccctggagatcagatgttcccttcccccagctttaatcagaagcggttgattataccgtgttgagtagggcagaccttgaatggggatatgaaaatcaagccaatcaatcaacattagcagtaatgatacaagctggtcctgtcgcttcctgagttgtctcaacgttattttaaactgcctctttgaaaaatctttcttacagaaaggaagaggttttatcagaatgtcagcatcacacagggtgaaggtgagtgtctgaaattttgactgcctctttttttttttttttttgtgaatggttgggaacatttttcatcttcagctggtttcatggtgcgattatccttcctgctttttgtgagatatatttctgtaagggactcagagttggctttgtctgcaccaattcaagtggctaaatataggaatggtcacttgattccacttaacaaatccctgagagtttttcatttgatctttcaaggtggctttgagataaacctggaccacaggaagctgaaaactccccaagccaagctctttaccgtccccagcgaggccctggccattgcagtggctactgagtgggattcccagcaggataccatcaagtactacaccatgcacctggtaacaagttcacagtgtgaacctggaccctgagacccacccagggcttcgtagggtagaccctttaccaaattccgacaaggccctgggggctggtcctttgcctgt

SEQ ID NO: 85545 - DNA, 1051 bp, Homo sapiens
acttcgtctgggttacaggcagactctctcagaggtttgtggtgtctgtctgactgttttccgtgtctccactgcccaacacaagacctgcccagaagggacctagaacctgggccttcattcctccatcccgggcacttctgctgcaggtttcctgactttccctcctaccacaacctctgccatctgcagccttctctcctaaatagaaattgacacctccacctctgactgtggagtcacctccacctccaactctgatgaagcttagaagtagtggctctttcattgctgatggtgagtggtgtcagggtaagagtgagaatgactcatttcagtgaatgaagagcagtaacaccctcccaccattcaattagttttattgtgctggaggcaggaggcacggttgtctttaagacccacctgtatgtattggtagagaagctcaattaaagaagaaaaaggcccacctgaatgatgttcactgttcattgcaaaaggttataatattctgattaaattgtggtttataatatcctgataagggacatacaaagaaactgtgagaacacagagaatcgcttactcccatcttggggatgttcagggtttagaatgggtcttgggtgaaagggcgtttgtttaagctgagccatgatagatgagtaggagttcagcaaaaaggtgggagagtgttgggtatctagaacgtgtccagggtgacagcaaggtatgagggacttttccctgacactgcctgttttagaaaatccagaacttcacaggcagtttggcattgtggcaggagtgcaaatctaggatctgatgctggctgaacctctgaggtctgtgtgatcttgggcatgcaactacttcctcatttttctccatgcgttgaagtactaggttgcctttgaggatctttctggctgtcaagttctttttttttcttcttcttctgtttttttgtgtttttttgagacggagtctcctctgtcacagaggctggagtgcagtggcaccatctcggctcactgcaacctccgcctcc

SEQ ID NO: 85546 - DNA, 1035 bp, Homo sapiens
agccgaggagggtggcggggagggagaggccggggcgcgcacgcgcggggtgggggcgggaggggcgaccacccgcccgctgcctgcggagcaagcgctccggccgccaccgggacccagggacctgcgagcagggcctcccagtcctgagctgggtccccctcccgacttgccctcgcgcacacatacacacacacagacactcacagacacacaacacacaaacacacacagacacacacacaccccgccccttccgattggctcaggcgagcctggggggcgggagcaggctcaggcggcgcttccgcccattggcgggaggagaaaacacgtggcgcggtgcgcgagcggcccgctgggacttgtagtctcctcgccgaggcgcggcgtggagggggcggggcgaggtgcgtttgtgatgctgattgactgggggtgtgcgcaggaggcgcgcggcggcgacggcgcgccgtaggtgtcatgcggaagatggcggcgtccaagggaggttgagggctctgaggaggcgttgagaggtttccgtacagcccgaccgtgcggctttggggatcccatcgctctgtgtttcctgctccaggtttcgcgtctcgcatcttcccagaccctcgggcgcgatgtggaggagctgcctccggctgcgggacgggggacgccgtctcctgaatcggccggcgggtggccccagcgcttctatgagtccggggccaaccatcccgtctccagcccgggcttacgccccgccgacaggtaagaccatgacatgttcttttgggttggggccgagctggggtaaggtgggcttcgggcttcggctgtgcaaagcgaagtaactgaggcagggttcaggctcatgaggttatgcaggccagtcaggtctttttacagatgagaaagtgaagcccagacaagggcagacgacccgagagggaacagcgagtcacgcacgatacagtaattgatatttggcctgtgcaggttttctcaaagcttatggctgccctccctttaata

SEQ ID NO: 85547 - DNA, 1029 bp, Homo sapiens
cctgctcccgccccccaggctcgcctgagccaatcggaaggggcggggtgtgtgtgtgtctgtgtgtgtttgtgtgttgtgtgtctgtgagtgtctgtgtgtgtgtatgtgtgcgcgagggcaagtcgggagggggacccagctcaggactgggaggccctgctcgcaggtccctgggtcccggtggcggccggagcgcttgctccgcaggcagcgggcgggtggtcgcccctcccgcccccaccccgcgcgtgcgcgccccggcctctccctccccgccaccctcctcggctcccgcgcggcggcggcggttcctctcccactccccccagccctggctccgggggaccccgcgatgccggtccgcaccgagtgtcccccgccggccggtgcctccgctgcctccgcggcctcactcatcccgccgccgcccatcaacacccagcagcccggcgtggccaccagcctgctctacagcggctccaagttccgcggccaccagaagagcaaggggaactcgtacgacgtagaggtggtgctgcaggtgagcgccgggccgggccggggcccgagggcctcctcgcggcgctcacgggccgtgcccgcttcggctcctcgaccccgcagccgcggaacaggccctcgccgccggggcctcctgcacccggcgcttcccacccgggaccttcccagcctgtgtctcacactctccgagccccagccctgacctgccccttcggacccagagcccgtcgtgaccggctcctggcggaccccgaacactcccagacttgaagcccgtgaccggcccgtctgggatccggaagcccctcatgactcggagaaggcctgggtccttcctccccatgacctgtcgtccctagatcagggactgccaccagcccttttcagaccctgaagaactctccattggtttcaccagacttgggaccctccccatgtctgggcccacgtcagattctctcagacctgagacatgtcctcctgccccttcctcagttccaggaa

SEQ ID NO: 85548 - DNA, 1087 bp, Homo sapiens
gttgatggacatttgggttgtttccacttctggctactatgaataatactgctatgaacatttatgtacaagtttttatgtggatgtatatttcactttggtagataactacctgggagtgcaattgctgggtcacatggtaactgggttttaacattttgagaaactggccctgcattgttttacatttccaccagcagtgggtgagggttccagtttctccacatccccgccaacactcactgttcatcttttttgttgtagccatcctagtgtttttgaagtggtctctcactgtagtcttgatttgaatttctataatgactgtgctgttgtgcatcttttcttgtgtttttgttgttgttgttgttttggagtactttcttttctgtgattctagtgtaaagagttcctcaaacctttgtgagtttctgactgggtctcctctccaccccgcacttactgtgactcctctttcctcctctgccatctaagaagccagcagtagaagggagccctggtcgctgtgaaaggaatatttaaaagaacagccgttggacacagctgtgctgtgacaccttcttgctaaacacgtgccctgttatctttcttgagatgctcgcctgccgtttggtaaaagctgtatgcgttgtggtgtatttgagttcaccaaccattatcaagatcaatttgggcagagtagagagacgcttggttgaatggaggccaagctgaaattctgattcttgagcatgtgataatccatgcaaaatgttagccaatttacatttcaatttttaatcttattagcaagtatccttgccacctgatacacttttcagcagctgtgaaactccaaactatattgaattcaatgagaattgcatacatgaaatttaaagactcaggttagaattatgtgtcctttaataaaagttctttgctgaaccatgttagcgtggattagctgttttagataatgtccagtgccaaggtcagcagatgaggatatttaaaatgctttggcagttttcacagggaatacctttgtcaccagcaccaaactgtgaaggcactttggcttcat

SEQ ID NO: 85549 - DNA, 1419 bp, Homo sapiens
ataaaaggtattttaggctgggtgcggtggctcacacctgtaatcctcgcactttgggaggccaaggcgggtggatcacctgaggtcaggagttcgagaccagcctggccaacatggcgaaaccccgtctctactaaaaatacaaacattaggtgggcgtggtggcagccaactgtaatcccaactactcgggaggctgaggtaggagaatcacataaacccagggtgtgggaggaggttgcagtgaaccgaaattgtgccattgcactccagcctgggcgacagagcaagactctgtctcaggaaaaataaaaaagtattctaccccagaatccaccctggaaccttggagaattggtgtaaaagggacaaatgactgagccagttggagaaccagtggcttgagggagccttagtggtagacacagtgattttggagcctctttgggtctaaccttggaaagtaaaatctaccaagttatgatctgctttgtatgctagaatattaaaaatttatttgtggaaacatccaaattattttctaagagactagcatgtaacaattgaagtcaaagaagggctgtctgctgctggcaaaatccaggaaacccttcattctctgggtgatttagattcaggtccattgccacagcctgttggcaaactggctgcgatctaactctggtttggattgtcaggtagcagtgtctaggtactggaaagaagttaaagcaaagtttatttttcctttgtacaaaggttaaaaactctcactcaacatcttattttgatatttgggtttttaccataggagtatccaacccttacaaccttcttcgaaggagaaataatcagcaaaaaacaccctttcttaactcgcaagtgggatgcagatgaagatgttgatcggaaacactgggtgagtaaatctgatctgtgctgggtcatctaggggctgctagagaattgaagaaatgctgggagccagagaccttgtcccttattgaggattactggggctttgcaaccaagtaaaaggttgcactgcacacagacctcagttgttccatcttccttatgaggacagtttaaatacgatctgacctgctgcttaaatagcaaatggttgtctgatgatagcaaccccagagttccagccagaactctgctcagctatcagaatcttaacagtgtccccccatccttcccacctgtttgtccatcttctgtccactgttcctttcaaatcacctctgcttggggaaaaccctgtgaaacatgcaatgatgacctccggcttcggggctggcatgagatggagatgatgttgtgggaatctgcctgcccactggcttatcagggcagagccacatcatttctttttatcctggctgctgacagacaagtatagtcttgtct

SEQ ID NO: 85550 - DNA, 1103 bp, Homo sapiens
aaggacaaggctatcatgtgtttctagtgtctgcttagctagctggcccaagcccctagatcatgcagagacacaagcttcacaaagccctcttctctgagactgggcaggctgtttctaagctgttttgcatggctctttttgctacttcggatttacttgcagaggtcttctcattaatttttcttagctttcgtctgtttattttgtctgtctgttcaccattcccatcctttggccttttcctcagccatgttaacaaggcaggtgtagggcagtggggccccagctggagtccaggtatctgccccagggttgagtctgcattcaatggggtgaccatagggccccatctgttacttggtcttagctgcccttttgggagccacgtccctagctgtcatgccttgggaaggtgagtttacctgggcacataagcatagttctgagagcagcctctccttctctcagtcaatcggcacactctcttttctgctttcagggcaagtttctggctttttatcagtatgcaaaatcatttaactcagatgactttgattatgaagagctgaagaatggagactacgtcttcatgaggtggaaggtaagttcccaccaggtggccctccagactcccagcaagccaggccctgtatcgcacctacatattcactctaaccaagggctccccatgtccagtgctcgtcacagctggttgtcatggcaaagtcttcatggcagggtctttgcacgcctataaaaagtgggcccagctccagggcacgcactggttaactgccgatgtcccagacagctcctcctcgctgtgcttttggtgggtagcaagtggatttgggcctaggtggctgcctctaacattgtcttctccctttcctttctcccacccaagaatcttgttgaacccccaagttgaatcactccaagtgttctgtggattcaaggcagagccaaacttgctttgaacttagtcatcagttgtacccagatccctctacaggcttaaacaccatccgtgggccaggtgccctccaccacatccttttcccagagctcaggaaagtctcacctcctctacttccctc

SEQ ID NO: 85551 - DNA, 1041 bp, Homo sapiens
tgcatggttcaggaggattaaccaaaaaaagaaagaatgaatgaaatcaaactaggttcaacttgagaaatagaaaatgaatgtgcatttcagtccaagtatgtgacttgttgggtgctctgctttttgaggggttactaatgtcctttgctcagggtgcattagatgactacctcccgtttctgtctcctcccccttgcaggtatcagtccctcaatctaacccatgttcctgaacacagtgcacccatctatgaattccggtgacaacggttcagaacagcaaccaaataaaactgaacttggcaaaaaagaactttgccgagaaaattgtgtacctgccagaaccaggagaagtgtgttcctgtttcttcacgagcagactcgcatcacaaagcatgaatgttaacccacagaatccaaggagcatggctggcccgtggggcaggtggagggagcagtcttcgttcttcctcccctcagtggcagtttggtcttcacctgtttttaagctaccttaaacgcacttttccttcctgcacagctaacttctacatcactgaaatgcccattccttcctccgtcccacctccagccgaatagaaggtctgctcccggatcaccctcagccttggtgctcagtggtcccgaggccctagacccccaccccccgccagttgctttgtctggtagctcaagagaaggcagagccccagcacctctgtgccccccagagctctgtgcagggagttggccagctgccgcatcatcggccaccaagggcacaagaggcggaggctccagtccctgctgggctgcctcagtcttcagtgctgattgtgtcacgggtcagcgtgcgctgctgagccctgtactgttaacagtgcaaagctagtgagtagctgtcaggttccctgggcctgccatcagggatcactaaatttaaggcttccagatccctggcaggaacagattccagtcctgcttactcagtacatttgctccaaacttttcaacttgagggcaatactaaacttaaaaa

SEQ ID NO: 85552 - DNA, 1061 bp, Homo sapiens
tttggcgatttttttttaagctcatcagctatcgttagtgttggtgtattttacgtgtggcccaagacaattcttccaatgtggcccagagaagccaaaagattggacacctccatttatagtataaaatgaaagccactaggctttcggctcagccccttttccttacactgccagtcagctgcgctcagggacccgcagttcagagttcaacacgggcagattccctctcttccttgcttgctcctgccagccgcagccgtgggccagtacagcatggcccggccccgccccggctctttccagaggtccgcagcctggccggcccagcgggcggaaccgatagtgtctggcacttggctcgcccggactctgaatcctggagcaccaggcgcccacgagaacgctgttctctttggcttccgggcgcacgctactctgtcgccgccgtcagaccggaattgccggtgccgccgccaccgctgtctgtgcgcccacctctgctgctaccatggggatcttagagaagatctcggagatcgagaaggagatcgctcggacacagaagaacaagggtgagggccggccgggcggggccttcctttctgcctgcctcagttttcctgtctgtaaaatgggggaacaactccagcagtaatgctggggcaagatccgaggccgcggagaagttgccagacaagtgccgaggccgccctgcgcgcccaaggcagggccaggcgggagcgggtctcacgcccaggtctgactgcaaacgtaccccaagagatctggtcagtcccagaccgtgtgcccgagtagagtagtcccagctcacagagcaagcatctgacccagagagaggcggagctggggttcaaacctcagtctcctgatggctgggcctggggcctgggtctactctgttgttttgggaagtgcaagaggagacctctcaggaacagcctcacccagcagctgagagcccattggagcaagggaatcaggactctggagtctggaaggcctgggtttgagccccaggtccaccacgtaccttctgt

SEQ ID NO: 85553 - DNA, 1384 bp, Homo sapiens
cactgatgttacagtgtttggagtgaggcacatcccgggccttatctttttaatccctgtgcagtcctgtgaggtagggaccgggttcatgcccattctacatgtaaagaccctgaactgagagtatggagtttcctgcccaatcccaggacaccccggcagaggcaggattcaaagccaggtttctccaactcccagccacagtgaacggtggtctgagtggtcacatccacatcttcccagttccccactccctccctgcgacacctctcctgtcagctgtctctgcctcagcccaggaggttgacatctccttgcacacctccttacaccctccctgggtgcacagcatgtctgggtactggttccacgagtgccgtgggactgccacctgcttaaagttctctggggccaagagggcctggaggattgtgtggggttaggagaggctcctgatgtatatggggaaccccatcagaatccagatccctgcctctacctgagacagtcctgaggcctccaaggaacagatgggcctctggtgtctgacccatccaggacagggccagaggtgagccctctggctgggaggtctcttcacagccacctaggtcaccaagccgagggtgagagggtctcctcctgctgcctgcacctgcaggcccccagcccctggggcctctcccagaaggccagggacaaggctcctcagtgcaatgatctccttttctcctagtccacattcttgagtctgatgacctccacggccagcgaggcagcgtcctatgagttcaccactctgacgtgtattcctggggtcattgaagtaagtgggtgtgctgggcccagaaggagaaggggcgcatgcttgtgtttggacttgtgcctgtgcccaccctgtgtgtgagtctgggtggatgtccccatgtcaggacaggctctggactgagctgctttgccctccagcactgacacttctggggatcctagctgctggaccccagagatgcctggtggggcctggaactaggaggtcaggccagcatgtggctactttgcctggcgccccctgtgctctcctccccaacaccaccacagctctggtcactaattgctgcttggctggatccttctgcctccccatgaagcttcactgccttgggctgtgtttgctttgggcagctgagtggtatggccttaagttcccatggtgaaacaatttatttgtaaagtgctggtatcatcagtgatgagtgttgtgggattggaagatcttgagccctccctaggcggctactcagctcataggctgtggtctgcactgggctggggtggtgacaaggctcagacttggccacaggttggcatctgggtttccctcagc

SEQ ID NO: 85554 - DNA, 1002 bp, Homo sapiens
tccgggcctcgtgatctgcccacctcggcctcccaaactcctgaaattacaggcgtgagccaccatgcccagccgatgctattcctttttccatccctttagcagatatttttgagagcctattaagcaccaggtctgtgtagacgctggggactcagagatgtgcaaacagtagatccgtgcctgtaggatttgacattctagtggggagacagacaataatacccaagaaaatagagagtttgccaatggggctgagggctactggagagagaattctggtggccttcctgtgagaggtaaggggttggggggtggggcatgcaggtgcgtgggagcagtgacttccaagcagagggaacaggagatgccaatggtcagaggcaggagtgggcctgggtgtcagggaacagtgaggaaggccagggaggatccttggctggtggtagccatgggggtggggagaagaggacatccccagagctgtttggaaggcaaactcagcatattttcataccttggagaccccatggcagtccccaagcctggacccctggggtctctgagcctcacaggtttttactagtccctccctggtctgaggctcctagtctcctggagagagtggtggtcggtcctgctagtgactccattctgttcttgtctgtctctttgtcctccctcctggacgctcttgaagataaaggtactcagtgtgtgtgtgtgtgtgtgtgtgtgtgtgtgtgtgtgtgtgtgtgtgtgtgtgtctgtccaggaaaatgcgtgtggatgtgcctgctcctgtgtgggtggagggacaggcaggaaaggacatccaaaggcctgtcctaggcagggctggggcttgtggtcaggggctgctgtggggggccatggaggctggaatggggaagcatggggcttgctgtgtgggagttgggcagcatggggtgggaaacactggggggcactggagagacctcaggattctctagggagccc

SEQ ID NO: 85555 - DNA, 1050 bp, Homo sapiens
ctcagcgcctgggcaagagcagctccgtcactcggctctacaaggcgcacactgtggccgccaagttccagcagtcactcctggatctggtggaaaagatggagaggtggggtggggggcaggtgggcggagcacccagcctcatccttaacccacctcatgaccctcagaggttgagcgccttctttttctgaggcctcatgctgtcctcttcctgccactgccaggtgcaaccccttgttcatgcgttgcctgaagcccaaccacaagaaggtgagtgagagctgaggcctctgagagagccaaatcctcctgcccatgctgtgtgaccttgggcaagtggcttggcctctcaggacctgcatctgcccagcctagcactgggaatattcaccatgataatgccttttgcacatggctgagccaatgtgcagactccctctctgggcatccctacaggagccaggtctctttgagccagatgtggtaatggcacaattacgctattcaggggtgctggagaccgtgaggatccgcaaggagggatttccagtgcgcctgcctttccaggggttcatcgacaggtatcttggttacggtagttcctgagctctacaaatccctgcccaactccccatggccccaggaatacacaacccaggcagtacagggcttgccatgcacagttgctcaggttgtacacttcacaaggctaccacatgctaactgttaatgtggtagatacatttattgttttgcctttttttgtagttatatgttgtataacgtataatatgtctaatcaacgctccgcgttattagaatggttttagtagttataatgacaagtttccagcaggtggcagtcaagtgtcctgttgtactgaaatcatctattataacaattgtctgacacccagaagtaaagagtcttgaggatggagtgccttttttcagattagaataaactatttgtggagccaccactgggaccaggctttttggacacctggctgggggcagtaaccccatggtctagcagacacctcg

SEQ ID NO: 85556 - DNA, 1041 bp, Homo sapiens
acccgccgggcgacgtggacgagatccccgagtgggtgcaccagctggtgatccaaaagctggtggagcaccgcgtcatccccgagggcttcgtcaacagcgccgtcatcaacgactaccagcccggcggctgcatcgtgtctcacgtggaccccatccacatcttcgagcgccccatcgtgtccgtgtccttctttagcgactctgcgctgtgcttcggctgcaagttccagttcaagcctattcgggtgtcggaaccagtgctttccctgccggtgcgcaggggaagcgtgactgtgctcaggtaacccacccgggtggagggggcggccctgcgcctgctgccttagctacccaccctggcccagaaagcagcagcccgtaggagtctgcgttttttacagttctgaccagttcttctgtttgtagattgtagggagcgagagaagggttttgtgtttaagatacctatagcaagaaaatagggaaccgatgtggaaatcctgtccccgaaggcaggtttgacgggatcactgacttggctgagaattcatcgaaagccatcttttcagaaggctgttccctttgatttttttttttcccaccatccatttcttagcataagtccctttgtgattttccggttttccattctggccttccatttacaaatctatgctttaaaattttttttttttttaatttatctaaaagtctttcttgttctgccatttttggattccttaacagagaaagtagtcacaggcaaaggccccagagattatttaattgaagcacattctccattcccaggagggggagtgacttccctggagttgaacagattagtggttgggccaggcatacagagcagcacactcttaaaattcttccctcctggctgcagaagagcccatcagttctttgtaagaacgtgttacttgtagtcaggactgaatacaacagaatacagctggtctcttgactgtttggccttacagttgcgtgagcagcagaacttaggcttttggcctatattcg

SEQ ID NO: 85557 - DNA, 1100 bp, Homo sapiens
cacgaacccgggaggcggagcttgcagtgaaccgagatcatgccactgaactccagcctggcagcctgggcgacagagcaagactccgtctcaaaaaaaagaaaaagaaaattcagagctggctggccagttggtggatagccttcactgatacagtgctagctctctgggggatataggttcatctctgcaaatctctttcatggggctagtgggtgtacgtgtgccctttggtgaggccagcaaggccccctggacaggcttgctaccaggaaacacagatgggcttttcttcctaccgcctccacaacaaaatccagaaagtttgacagcagacttggttggagttacagcaccaccattttaactcgttgacttcggggaaattaagctttttgaggcctcagttttcctcatctgcaaaaccagtctaatgatgctatagagttgttatagaaagttgaatctttgtcatctattgaatgcttgaaatttagctaaaagtgtctcaggagatgggctaccttctgtgtttagtactgtctatcttggtgtgtacagaattgggacttggcaggttgaccttccctctggattcagaaagccccaggacttcttataaagttaggccatgggtcgtcttggaggcttgggtctggtaaataattgagcctgagctcacaatcctgcccctgggtccaggtggctggtctgctgcccccaaaagcctgaccttcttggtcctgtgggtctgtcagtaaggcaggtagccatagctggagagagacagtcaccaggctgggatcttggacagtccctccatctctggttcatcctggcctaggcagggcatggagtagatggaaaatggtggccatcttggaaatgtgtcataacaactcagtttccaagaccgtcccctagaggagagatgtacagtcctgcatagtttctttaaagaatttttcagggccaggtgcggtggctcatgcctgtaatcccagcactttgggaggccagggcgggtggatcacctgaggtcaggaattcaagacaagaatggccaagatggtgaaagcccgtctctactaaaaatacaa

SEQ ID NO: 85558 - DNA, 1041 bp, Homo sapiens
tgccgcagcatgcaagtcttttctctgtaatcgttggtaaccctggaaggggaggctggacctaaccttactggaggtgtggttaaagttctaaattactagttagataaccaagaggctgacaaacttctggggtataataattcatctgtgaggggagtcttccagttttcccatgattccctagtgctcctgcactagtgcactctgtgcttctgctcctggtaggccttgctagctgccctgtgccaagcatccacatattaaccttgaaactagaaggtatgaactctgtttggaaaggggctcaggtaggaagtgagctgcctcaggtcattgctagttggaatggcctttgagcagggatttctgacttgagggaaacatcaagtatctactatgtacaaggcacttgaggtgggcaccacaggaaatttagtgcccccttggtgcttcacatgtaataagtttgcactttgcctgccattccaacacaaagcagagtgaacactggtgtaaaagcacagggtattctctgggagccctgcaaaaaaaaccccaaaaacccaggccggtcgtggtggctcacacctgtaatccagcacttcaggagggcgaggcagttggatcacctgaggtcaggagttcaagactagcctgactaacgtgatgaaaattctaaaaatacaagaattagctgggcatagtggcaggtgtctgtgatcccagctactggggaggctgaggcaggacaactgcttgaacctgggaggcggaggttgcagtgagccgagattgtaccattgcactccagcctgggagacagagcgagactccatctcaaaaaaaaaaaaaaaattttttttttttttaaattacatccagctttgcgggaggaagggtaaaggtgagcttggtagatctggcccctgagctagaaattgctggccaggcagaaatggtaagctcaaaggctaggaggcagggaaatataggggacttctgtagatgaggaatgaaagagggaaggaggccttaggt

SEQ ID NO: 85559 - DNA, 2923 bp, Homo sapiens
tgatgctggagtggccagtagaggtggtggagcagagcagccatcttttaagtggggctgtatcaggctgggtttatttaaaagcaacaaaatgttttggttaagaaaattattttgctttcagtgtaaatcttcgcagtgttctaaacaaagttcagtcttctgctcgcccctttccctcactgatgtctgcacttggttgaggtctcctggagcctcacaggctctgctgttctccacttctcacctgccatccacgccctgcaagctcatgcaaacaccctttcttcctcctgcggcagagttgttcaggttgcctgggcaggggcttaaacagtgccagcccctgccatcccaaagctattgttaagccccccaggcgtcctccacccacgcccactagcctgccatgtccacagttccttgggctgctgaggggctagtgcagtggtcctgacctctcttatcaagagcacacttctttgctggttgctccttttgagcatatgcgtgtgattatttggaacagttagacttgccacgttgggtcagttttagaaattgtttctagctagagggactggtgtccttccaagtctagcatttggggtatggaaaattgttgtggtgtgtggtagggtttttgttttcttttttgagttttttttccccctttagtctcctggctttttcctttcccttcccttctccactggccagcttgggcctcatcctcatgtcatccttctaggaaggcgcctgccccatcttgtctgccggcagcatgcatccaaggccagagctcaggcctgcagactgggctggtgcctcctccgcttcagggtatgggagttggtgaaggggctttcaaaaaataataaggaaaaaaaggtaaagtctttggtagcttctatccactcagatcctggaaggcagcaaggttttgtggatctagattcattaggaatgtcttcttgtcagccaggccaggacccgggcttgccaagagcagaggccctcccagcaaccaggataccaccactttgggggctttgtgtacagaggtccgggtctgagacctcataggctgcagaaatctggggcagccaccatcaagaagcccctctcaggggccagaactcctttgccagcgtggatttctcaagtcgggactgcataattaaagcagttgcagttttattttttttacagcttttttcccaaaaatgatttgtagttgtgtgtgcagcacttcgccctgatatgtgtgctctacaataaaaaccaaatctaatatattttgaaacagttgtctgatgttgttgtaagagagggcttgcctttggtgcttccttaatccctttactttcttaaacttgaaacaggggttggggaggcagagctagctcattggccgccagcgtcccagaggagttggttggtcttggacactgggcctcctgtgtgcctagccttgggtttatggctgaaggtggacttgccctcaccccactgtcctttctcccactccaaggagggtgaacttcataaaccacaatgtccaggtgcccagggaccacaccttctggagttctggaagtccctcttttagatatgatcactgagaggctggtgctggtgaagggggagatggcaggcacaaaagcaagggagaacctggcttttgtggaaaatatgcgagtgattttgctcattaaacaaatacttggccaggcacggtggatcacctgagctcaggagttcaagaccagcatgggcaacttggcaaaaccccatctctactaaaaatacaaaaatttagccaggtgcgtttagctgtggtctcagctactagtgagactgagacagacaagaattgcttgagcctgggaggcacaggttgcagtaagccgagattgtgccattgcactccaacctgggcaacagagcaagaccttgtctcaaaaaaacaaaaaaaaaaattcttgagttcctattgtataccaagccacactgggaccccaatagtgagcaaaactctggtccctcctttcaagatgctcatgatagtgtggagtgcaggtactggcatgaagcagatgtttttcaatgggtaaggctggggcccagagggctttagtccctccagacttcagacctggctccctatgcctggtaaagggcttctatctagagtctcttactctgttctagtgctcagagctagtctgcttggccaaattcttgctgtggaaacttggataagctgcttacctccacatttaccagagaagagagactccagagtggggcaagtaactggcccaggcttggtctaaaaactagtgcgagggtctgaagagagaggggccagagtctcaagtgtggtctggggctagttgggcctggaggggtagacactgggctaggcagagtggaccttggatcccctggagaaggaaacaccggatctgagagaaagtgacttgcagaatgtcatccagagtataaatggcagaagtaagcatcccccactccatgcctgagcttctgactcttggggcatgggataggggctcagagaagggctgggggagtgcgaggaaccgtctttgtggaggaccctattttccattgccattaaaaagtcagacttctggccaggcgcagtggctcatgcctataatcccagcactttgggaggccgaggtgggcagatcacgaggtcaggagtttgagaccagcctggccaacatagtggaaccccgtctctactaaaaatacaaaaaattagctgggcatggtggcgggcccctgtaatcccagctacttgggaggctgaggcaggagaatcacttgaagccaggaggcgaaggttgcagcgagccgagatcgtgccactgcactccagcccagcggacag

SEQ ID NO: 85560 - DNA, 1036 bp, Homo sapiens
agcccctacatgcccttctcccagtaaagttattgccattaaatctgatatatcatctgctttctcatcctcaaatattagttggattaaaatttctcagctatagcagtacttttaaatttaatctgaatcattaatattttccttcactttctcttttttttgagacggagtcttgctctgccgcccaggctggagtacggtggcatgatctcggctctctgcaagctctgcctcccgagttcatgccattctcctgcctcagcctcctgagtagctgggactacccgccaccacgcctggctaattttttgtattttttagtagagacagggtttcaccgtgttagccaggatggtcttgatctcctgacctggtgatctgcccacctcggcctctcaaagtgctgggattacaggcgtgaaccaccacatccggccctcttcatcactttcttaaatctagacctgtgttcttcagtacagcagccactgatacttggctattgagtatttgaaatgtggctagtttgaattgaaatgtgcttttagtgtaaaataccagaatttgaagagttagtatgaaaaaaacaatgtaaatcattaagaactttatattgattacttgttgaagatactattttgagctgggcatggtggcctacgtataatcccatcactttgggaagctatggtggatggattacttgaagtcaggagtttgagagcagcctgaccaaatggcaaaaccccgtctctactaaaaacacaaaaattaggtgtggtggcgctcgcctgtaatcccagctacttgggaggctgaggcaggcttgcacctaggaggcagagattgcagcgagccaagatcgtgccactacagcctgggtgagagagcgagactttgtctcaaaacccccccaaaaaagaagaaaaaaaaaactattttggacatatgttaaatttggacatactgggttaaataaaataggctgaggcaggagaattgcttgaacctgggaggcggaggttgcagtgag

SEQ ID NO: 85561 - DNA, 1053 bp, Homo sapiens
tgtgtactacactgcacttcgcatcgtggggcctcagtttccctagctgtgaaatgaggctacttttctccatactgtgggccctggctccctctgccacatgggccagctgtcctgcctttctgcaccaaggtggagtgaggtggaggcttttccttcctttcccggagtgggacactaggggccagggaaaggggccgcctcagcccccgcctccctctgcactgatgttagagcagggcctcagcccactcctggctcactgctctggggacgttggttttgtcctcattcttaccccagagcccactgatggcagagcctctcagtgctcttcgaaattagagttatcttcaaaatacaggtgagaaaattgaggttctgagaggggtgacggcttgcccggagtcagagtgagctgcaccaatatctttcttgagttcttgtgtcagtggggttggattttagccttgaggggcagggatttttccaaggggctgctgtggtcctgggccagtgttgtgccaggcgccctgggctgccttgaggagacacttgtcttggaggaggctctgggacggctggacctggagtagtggaggcactgggatgtctcagggtttccctgcctaggtctgcagtgattgccgatgagagctgccaggaccctcacacggtggctgagaacctgctaggaacctgagaggggcccagaagggaagctggtgctccgtggtccccagatggcacctattttctgtgccggggaggctgtgagggtgaggtgagaggagaatggcccttcagggaaaggcagcaacaggcacagggctaaatgtcacttttttttttttgaaatggggtctcactctcacccaggctggagtgcagtggcacaatcacagtccactgcagcctcacaactccctggctcaggtgatcctcccatctcagcctcctgaagctgggactacaggctcgtgtcaccatgcccggctagtttttgtattttttgtagagatggggtttcaccatgttgcccaggctggtctc

SEQ ID NO: 85562 - DNA, 1040 bp, Homo sapiens
ttcccaaagtgctaggattacagacatgagctgccatgcctggcctaaatgtcatttcttcagccagtgaattggggtgtgcagtgggggctggagacagatgggggtgaagctcagcccactctggctagccttggggtggcggaaagtaagggccctccgctgaggatgaagcgtgggcagcagtggtggaaagtggggtggtcttggggaagggacttagtcacctaagtgggtaataggtgatcgctagggaataggcccctgattcctgagcttagggggtgggagacaggtcaggagtgagcagggactttggactctgagtcttgggttcaaatcccagtccagcccacacatcgcctgtggaatgtgccttctctgttaatactgagccccactgtgtgtgaggtctccaaggtgctggggacaacagtagttaccaaaaaggacaaatacctgttaactcaggtggctgatatagttgtgcaggagacagtgaaaagccaaaacaaaaaagtaaaatagactgtagttgggatggtagccagtgctgtggatcaaataaagtagggcgagggggtgagaggtgtggccagggcggctgctgcagccagggtggccttgggaggcttctctgaggagattactcctgagcgacaggaagtgctggaggaagtgcgttccaggcagaggggcagtaggtgcaaaggccctgaggcacaagcctcccttagctgggagccccaggaggatcctgagcaggggagggacaaggatctggctgtggctttcataggatccctctggcctctgtgggaacagactgtagtgagtaccaatccaggcacgtgacggtggggcctggagcagggagggaggtgacttctgtgtgttttgaaactgagttgatggggctcagaaatggactggacgtggggtatgagggaagcagatgctggacagtgcatgtaacctcctttcctcgtttgtaaaatgggaaggctgtggggatttgcgatgcagtgtcccgtctctgg

SEQ ID NO: 85563 - DNA, 1078 bp, Homo sapiens
tgcagccttcaggtgtccctcctgtgttggggtctccagtgcacttgtcctcaggctcaaaaagaacctgaagtgcagatgaggagactgagcctcagaaaggaggctggagcccggggtcctcttccctttttcccctgactgccactgcctggagccccttgggttgggaaactgaggctggagagggccagccctggtcactagaagctgcccctccccctgccaggccagccccatctccttgacgaccctggttcccgcccagctgctcctgtcccctcttttgtcccttcttcggagtttctcgccaggctcctgtagggaatctgagctcaagctccaggcaacggctcctgtgttgtcaccggggcaacgttgctgactcctccctgcaccctctgtcatggggccccctcaggccctgctgtccaccatcagccctggagttgccgggactcaggcactgacactgggcacttcaagcaggtcatccaccccctccaagtctgtgtgctcatctgtgaaatgggcaggctggagtctctcctccctcatgatggcagttgttggctgcctgctttggagggaggtgggttttttttgttttgttttgtttttttgagatggagtcttgctctttgttgcccaggctggagtgcagtcgcacagttttggctcactgcaacctttgcctcccgggttcaagcagttctctgcctcagcctcccaaatagctgggattacaggtgcctgccagcatgcccggctaatttttgcgtttttagtagagacgaggtttcaccatcttggccaggctggtcctcaactcctgaccttgtgatctacctgcctcggcctcccaaagtgctgggattacaggagcgagccaccgtgcccagaggaggtgggttttcttacccatggctgaagtttggcctgaagctgtgggaaaaggcagcctggactcttctgccccctggctttcttgtccaggcctggccttgcacctctggcctgcctgatcccatccggcaaggcgcagctcccagaacccatagacacacggagctgaagt

SEQ ID NO: 85564 - DNA, 1011 bp, Homo sapiens
ggcctggcctataacaggtgcacagtgtacctgtgctgtctacagtaggtgcctattgttttttgtaaaagtaggattccggtcagtgtttggcacgtgcagtaggtgcttagtgagtggttatcagatgagtgaatggaggggcgtgcaggcctcccaggaactcgggtagccctgacatctgccctccctgcagccatgaggacggcaccgtgaggttctgggatgcctcgggtgtggcgctgcggccgctctataagctgagcacagctggcctcttccagacagactgtgagcacgctgacagcctggcccaggctgccgaggacgactggccacccttccgcaaggtgggcccctcccctggccctgatgagctggtcctgaccccgcctggactcattactccttcccatccctctaggtgggctgcttcgatccctacagtgacgatccccggcttggcgtgcagaaggttgctctctgcaagtatacagcccagatggtggtggctggcactgcaggccaggtagggctgggtgtcccctgggttggagatgtcagggagggctttctggaagagatgagctggagggtctggtggaaagggagatggactggcacaggcaaaagccaaggtgggaatagggctctgggtggggctggctggggtgaggacagatgggaagtgggcctgtcgctgggggaaccacagtgttgagaggagggaactcatgtcagtgctgtgctccggcactcacatgacatacaggaggtgctcaatgtgtccttattgctaaatgggagatagaggctcagggtaagggtggacactttgccctcagagggcagggactagtgtgtcttggtcaccactgtgttccttgtgctcagccagggccttggtatacagtaggcattcagtgagtgcttgtttagctgatgaactgaagacagtcctagaaccaccttggtggtggctggggctgcttcagaggctccaggctgagt

SEQ ID NO: 85565 - DNA, 1023 bp, Homo sapiens
agccctcctgcaggcatttggctgccctgggggcccactgcctagggaagaggacaggtggggcccagcacctgtgccacctccccccctccacacaccatccttccccctcactttgcagagtatttttccttttttttttttttcttaaagacggagtcttgctctgtcgcccaggctggagtgcagtggccccatctctgctcactgcaagccccgccttctgggttcccgccattcttctgcctcagcctcccaagtagctgggactacaggcgcccaccaccacgcccagctaattttttctgtatttttagtagagatggggtttcaccatgttagccaggatggtctcgatctcctgacctcgtgatccacccacctcagcctcccaaagtgctgggattacaggcgtgagccaccatgcccagccctgcaaagagtatttttctagcgcctgggctggacagttgtttctaaaactaaactattttggtacctgcttctgggccagtccccagcctgtcatgagtgtgtgtgtgcgggcatggatgtgactgggagctctgctgggcacccacatctggggcctagtcaggtgtgtgtgtccggcggggggggggggcaggggggggggtcaagatgagtttccctgtagattgtaccttggggtttttttctgtcgttttgttaaaattagcgccattttaatattaaaaatactgatttttaatattgaaaataaaagcatttaatatctcttaaagggcatccacatctgctttatccctagcggaagagtgagggggcttcacacgtgcactcacactgtggagagagttggatttcccagacccctgagggcacctgtcagggtcatccccattggtgctgcttgaggctactggggactgtggcactggacgtggctggagcaggtggtgtcacctgagtacattctttgctagcagacagtggatgaggccccttcctcttcctcaccaagcctggggctgtgccagc

SEQ ID NO: 85566 - DNA, 1008 bp, Homo sapiens
gagtcagctgcgaacacccccacccctgcacactccccaggttccctttgagagtgaggacaaccagggcatcgtgtatgcctgggtgggccgggcatcagaccctgacgaagccaagttggcagaagacatcctgaacaccatgtttgacacctcctacagcaagcaggtcaggaggcgggcgggcaggcgggcacacacagaggagccagggcaggcaggggccctgggctggactggcctttcccgcaggttatcaacgaaggtgaggagcctgagaacttcttctgggtgggcattggggcacagaagccctatgatgacgatgccgagtacatgaaacacacacgtctcttccggtgaggccagggccctgaccctcccctcagtcctggcactgctgcttatgacctctggcctcaccttgacccttgattcccaggtgctccaacgagaagggctactttgcagtgactgagaaatgctccgacttttgccaagatgacctggcagatgatgacatcatgttgctagacaatggccaagaggtgtgatgttgccactagccctgcccatccaaggaggcgcccatagacttacttacaaatgggaattctcgggccaggagcaaggggctgttcccaggcacccatgcaaccgtatctcccctgctgcccccacaggtctacatgtgggtggggacccagactagccaggtggagatcaagctgagcctgaaggcctgccaggtaatctgggtggagggagggccgaggtgggcctgtgggcagggcagggtcatcacccaaggctcgctgtccccttgccaggtatatatccagcacatgcggtccaaggaacatgagcggccgcgccggctgcgcctggtccgcaagggcaatgagcagcacgcctttacccgctgcttccacgcctggagcgccttctgcaaggccctggcctaagacaggctggcacagccccaggcttggtgaggaagaggaaggg

SEQ ID NO: 85567 - DNA, 1084 bp, Homo sapiens
aaagctgatgtggccggtgccttggcttccagacctttctggatgacagcggctccctcaactgggagatctactactggattggcggggaggccacactcgacaagaaagcttgctctgccatccacgctgtcaacttgcgcaactacctgggtgctgagtgccgcactgtccgggaggagatgggcgatgagagcgaggagttcctgcaggtgccagcccgttaaaattgggggtgggcagagtggggttcccagggaactctggtgcaggggcagtgggcccaaggcaggtaggcagaacaggtgggcaggcagggagctggggttaaagggggtggatcaacgatactgtgcgggacctaaggcagaccgcagggtgaggtctaaggtggccaaagcctgggtcagcaaaggagagttctggaacgcggggcagaattcagccgggcaaggataagggtacaggctgggcatgggagctagaccagtgggctgacacaggggagctgagagtagggtggaaggggtgttgccaagagcagtgagaaggcagggccaaaacctgttattaggaggcaaggacacacctggatgccaaggaggtggggccaagggcgggaccagagtccagtcttgaataaattactgagcagtgttagccgccagctggttacacctagacatatgttcgcatgtacacacacgtggagtttatgcacacaccccacccgccccgagttttttttacccacattcacccaggtttccactcttccatgaacccacttgcttgtgtaccctgatatgcgtgcatctaaacatgctgctggcatctttacaaacgtgggtgaacgtgtccatatttttcatacatcccaacaccccgacgtgtgtatgtttatagacacagatgtgtatgttttattttagacagactctcgctttgttgcccaggctggagtgcagtggcacaatcttggctcactgcaacctccgcccccagggttcaagcgattctcctgcctcagcctcccaagtagctgggattacaggcatgtgctaccacgcctagctaatttttg

SEQ ID NO: 85568 - DNA, 1001 bp, Homo sapiens
ctggtcttgaatgcctgtcctcaaatgatcagcctcccaaagtgctgggattacaggtgtgagccaccacgcccggcccagttaactcacctttgtggatgaagaccacagtcccatgccagccattcccaacttgagcccctgagagcacccttcggggggcactgttagggacaaggccacatgacgtgggaacgcagtgttgcttctctccccttctggagatcacagtgcccgtaacatggtctcttggctctgagaagtccttcaggcagagaatggagacccccgccagttcctctgaccctacctgcctcccctccccaggactaggggttttcttgcccacttccccttgtctgtcacctgcctgaggccctggctggccctgtcttcacaggtgcccaaagctgaggaaacttgtcctgaacaagaaccacctggtgaccctcccagaagccatccatttcctgacggagatcgaggtcaggcatgctgggtttgagagggctcaagagagacaagcaaggggtgtgccctggagcaagggggacccagcagaggcctcctgagggaggtggccagtgccagggtgcccgtggggagaaggtgggccccacctccctgcatccagagtacattccacagtctcatttaagcccccagccagccccagaggtgggtgggaggagaacccagttccctgacctctcagccctggcggctgcagacaagagcaagaaactggattggtgtgtctgggaggtaggacccaggctcagtgccggctctgctcaccctatggggcaggtcctggatgtgcgggagaaccccaacctggtcatgccgcccaagcccgcagaccgtgccgctgagtggtacaacatcgacttctcgctgcagaaccagctgcggctagcgggtgcctctcctgctaccgtggctgcagctgcagctggtgagtggggaaaggtctggcctgggaacgggggctcctctcc

SEQ ID NO: 85569 - DNA, 1489 bp, Homo sapiens
tggccaacatggtgaaaccccatctctactagaaatagaaaaattagttggacggggtggcatgtgcctgtagtcccaactctcaggaggctgaggcaggagaatcgcttgaacccaggaggcggaggttgcaataagccgagattgcaccactgcactccagcctggcgacagagtgagactctgtctcggaaaaaaaaaaattacatgttcattttagacaaattaagaaatacaaaagtttataagggggtaaaattgcctattaagcatgatatttaacaattacaaagatgtgccataatttattttgccaaatctgttttttgtgtgtttttgatactatagttaacatttgtagacataaatatttttgtggttctccagttatttcctttgaagaaatccttagaaggggaattattggatatgtgtataaatgtctcatgggcttttgatagactgaggctcactaaatcattgattacctaattgaaaattaccctgaaaattactgcttaaatgtgtgcatgaagttgggctaaggccaccaggtgcaatgttgctgtctcttgtatttgaggagtgtcttgctaacttcttacgctttcatcttgttttctgcttagattgcgtttacatcaaagaaccacttcccagtctggaagggaagatgactcctttgcttatctttgccagatttgagttgtgagatgtgtcaacctaaacccatcctctccccaggacttgtttgcctggcactccatgttagtgcagggcctgaggagcagtgtggcctcttctgtgcaggacattaggctaaggctaccagtgatgctcctgtccttgagaggtgatattctagggggagtttcgtactcctcttttcttcctagggagatgaacagcgactgtacgagtttattgttcgccatttcctggcttgctgctcccaggatgctcaggggcaggagaccacagtggagatcgacatcgctcaggaacgctttgtggcccatggcctcatgattctggcccgaaactatctggatgtgtatccatatgatcactggagtgacaaggtaataaagagtggtccccagtgagagggaggacagttgtgttgtgagccctgagttctctagtggagcaggatcatgttccttgaaatgaggttattttttgcctgagtgtgctgatggaatcatctgactgttgcacctgccgctccctgtagatcctccctgtctatgagcaaggatcccactttcagcccagcaccgtggagatggtggacggggagaccagcccacccaagctgctcaccgaggccgacctcattgccctcatggagaagcatggcattggtcagtggctcctctgggtaactcgcatctcttgagctaaggcttacagtgtaccaggtacaggtttcctctagtcttcaaaccattctctaatgcagctgctatatctttatcccatttta

SEQ ID NO: 85570 - DNA, 1050 bp, Homo sapiens
ctggtggaacttgtcagggtcagtgagtctcatgtgctgcatcagggctggtctgtcagactgaccctcagagtggccagtgacaagccccaggctatgaggctgctggcctttttcctgtgctgtgctgccccttttggcttctttgagtgtgctagcaggagagccagctgcttttcatcccatgagggggtgcatctcatctcagaacttttctgaagcaggtaatgtaggctgccttcagttgagttggctacatcagatgagtgtttgcaggtgttagtgtgtgctttcagttgtttatagaccaatcagagagcctagcaatttctttttctgtttgtttgccttggttttaggtacatcagctatccccgaacagaaacaaacatttttcccagagacttaaacctgacggtgttggtggaacagcagacccccgatccacgctggggggcctttgcccagagcattctagagcggggtggtcccaccccacgcaatgggaacaagtctgaccaagctcaccctcccattcaccccaccaaatacaccaacaacttacaggttggtttccctgaatgtactgcctgctggaacccatagggaagtgctgggggtcagtagtaaggtttgaatttactctgtgggctgtgattgtaaaaacaagtgattttgagatctctctcatttcacaatcctctgcctggctttgataaagaccgcctcatccctccccgtggtgggcccccgtcttaatccagctccacatcccactctccatcagctcctgctgcttccctgctagtccttcataggcaacccctgtgcagacccccacctccactgtgagccttgtggccttcccagtccctggaactagagaattctatccatcctcccaaggctggctcagttttggttgcctcctgaaactttgctgccaccccagtcgtgccaccccctgtcactgcagtttcccacacagctctgcttgtctgtctcagtcatttcctcagccaggggcaggctctgcaggcacaggagcca

SEQ ID NO: 85571 - DNA, 1503 bp, Homo sapiens
agggtatgctttcttgtttctccaccatcctgtcatcgacctccacaaagtcttcaaagagaaagtttgttatatgctgttgttttagaagtgctctatcaatctgactggtcaggaggtaacacaggtctcctctgaacatgtgttcaatgtggctgagctgagccagggtctgggtgaaatattcagtgtcacagagctcctccaaggtcttcaacttcttgtcaaaacacttggtggactttgctttgataagttttggggtgtaggctggtctgcaggtgtaaaggtctgtgtcggcagactcatcagggttagaggtagtggatgcctggctggcctgatcctggatgtgctccatctcaccaggacacaaatcatgccccttcaacttccgatgagggtatgagcggatctgcttcagcaggtcttgatgttcaatgatggacttctccacactggccagttcattggctttctcaattgcctgagatgagtaaaagcctttgtcgttggctttcttctggatctccgtttctgtgtgtagcactgtcctggtgtaatccaagtctttcagctttttttcaagttccccagcaaatgccttcctgttgccagtcttcaagcactcagaagctctggaaaattcggctgaaagctcctggaactgctgcatgattttatgctggtctgcagagatataagccatgcaaaacggcctcacgaagccacgggcctccaggtcgtatagggtaaggtggtgcacgtatgcaaaggcgccctccttagaatctcccagcaccaccttggagtcctccacgaagttcagcttggggtaggcagatccaggaggatggcccacgaaggaagcctggtaatccacagacatgatacgcagggagaagtaattgagatcaaaagtgccaaaaactttggtgtcattggggatggtcagtaagggttggggtcccacctgctcagagaactcggaaataagaatgaagtccctcgaaaacttggccccggacagttttgaccaggggttagcaccctgactggcgaaggggaagagcggcaccgagtactcctcaggcagggccggctcattgtaaggctcttcttcatactcttcctctttggtgaaggccactacgtcaggggcgctgatcatatttccagatatatgaagaaaacattgagaggaagtgggaaagaatgcggtgttaatcgacgcgcagaaggcaggcctccggagaaggaagtgaagcccttacggccttctttgcgactccccgaacccggggtcctaggctgcttctcacacacccgaggagaagaactctagcagccccctcacagttgtagctcctccggagctctctgaggcctcatgaacgccaaggccgcaggcccaactgcccttctcttcttcgtccggcgagcgcggccagcacaagaaacctgctgcgaaatcacctgcactctccggaacccactgcgaca

SEQ ID NO: 85572 - DNA, 1063 bp, Homo sapiens
caggaagagccagtgcatgctggctaggtggatgctggcctggggacaggaggcctcacctcccaagcttctgcctccactttcccggcccttgcccttcctcctgaccttggcctgtctgtttcagagtggcctcccctgccggtgccggtaccctccatgccctgagccgctacagccgctacacgagcatcctggaccttgacaacaaaaccctgcgctgccccctttacagaggcaccctggtgccccgcctggcagaccaccgcacacagatcaagcggggcagcacctactacctgcatgtccagagcatgctcacccagctctgctccaaggccttcctctacaccttctgccaccacctgcacctgcctacccacgacaaggagacagaggagctggtagccagccgccagatgagcttcctaaagctgaccctgggtctggtgaatgaggatgttagggtggtccagtacctggctgagctgctgaagctgcactacatgcaggaatctccagggaccagccaccccatgctcaggtttgactatgtccccagctttttgtataaaatctgaggtcggtcccagacactgtgaccaagacctgtgactcagggtatggggaggggaggggttggcatgaccaaacagttgcctgagctggactgtttaagtttctggtgtctggcagcatggttcccacgtggctcctagtagtttttaagttggacatgggcagaagtggagcctggctccctctaaaggcgtctggagggatggtgacagctacatttggctccctggtgaagagtggcccctggatatggagggggccttggttttctgaggactggcagccagggcagaagggaagccaccagtcccttggtggggcagggtgagggcaggaaggccaaagcctgatgggaggagcacactggctgtattcagcattgccggacacttgagtggcaaaatgaacgagggtgacagccaggtaactgttgtggtttggtggaaaacaggagggcagaacacccatcgcctccttcagaccc

SEQ ID NO: 85573 - DNA, 1111 bp, Homo sapiens
cgaagagggcttgcatcacgtcactccagtggttccctccttgtccaagtcctcgttttaagggcatggcccgttggctccagccgttggcttctgttcagggtccttgctcccatcagaggtgtttgattttgctcctggggctgcgatggagaaccttttgtggcagatggtgctgcctacatctcattggttctctgtacctgtgcccgttgcgcatgttcacagacaggagagtcgccagcaataccttggcagcctttaaatgtgaaacgtctgttacttgcgctggaggcagaggctgtgcagggagcctgcttctaatcgtgggctcccttatctgttacggttccctcccctcctgttctagatgctgattcgttttctcactggctggttaattgctgtctacttaggcctccaaggccataactgtgcaacattttatctgagaaggaaggaaggtcagaaagtgatcactggcaccaccactgtggcattcctgtcacaccaacacagaaattcacagctcatactgttctcacctgggaaacttgggaagggctgatgagtttggggcagatcctgaattgcagccacacttggccttctagaagctgaagttgtgccctcaagtggtcctaagtagaagtccacttgaggtatttgctggcacacaccctcaagggtggttcagaaggtcctgaaacctaaggcaaaaggctgctggggcatgaacagaacagaccgtctcaggggcagccatgtaagtggcaagcagggctggtctccctcaaggtggttcttcattaagtaaagatggcttcgtgactagtgtttagctcccagatttatatttgggttaaaaactaacttttcaatgtggcagtttcaaaggattacttgatgcaaagtatgtttcctttcaaagggatcttgacgtggtaccaggactgagtcatgatttgggcagaggcagttaacactgggaagccctgcccctccctatgcccccttcactccggggaactgaaacctactctgagtctcacatctctaaacctcagtgctgagacctatgcagtgggactaatctcatcaagaattttca

SEQ ID NO: 85574 - DNA, 1824 bp, Homo sapiens
ggtggtgtagggcaaagctgttagaaagattgtagcgttttactctccctgggctttcctccgccttgctgcaacagagaggaaatgcccatgtccacagcttgtacacactgccccctcactatcttgttatccagtggcatgccaaaggagaactgaattagcttctgaggcttctgctgtaaatcagaagtgtatgttagtcaagagtaaacaagatgcacccagtatggtgggagggttttgctgtcagtagctcaaagtatggtgtagaaatggcctcctccctccatcctgggaagtcccagtcccatcctggtgtgagaatcaaccaggctttcctgctccacctgagataaccaactccctcccgtaatcaggaagccaaatgtcaccttcccaaagaaattttattttcacgtagctgaagtgcaaaacatagatgaccatttttaataagcacaatcaaatttttaaccacagaatgtctacaagaattatagctttaaaaaatacaaccaatttttatatttcaaaaatatttgaactcaaataaattaatttcttaaaaagtacacttctcatactatgtgtttggcattgactctggttaactcttgtgcagcaacacctacgagatgctatcacacacgcgccagctgcactcctgcaccagccgctgcaacgactgcacctcacgtggtggcggggactcacattcacaagacgggacgggaacatgcagtaataaaatagctttttaaaaaataacacatataaattcatcacataggattatgcttttcactgcaaccttgaaggtggcatttatctcaatctgtgactccagctatttagtggcagacaatcccggtgaggcagcctgtggtcccaccttgtaggtggcagcccctgcaatctggggtctagcctgtcggcgtttgctttattgtgggtggagcagctgctgcagaatctgtgagttgactcaccagtccctacagttctgctaccaaagtggtcttcaatttaggggcctgacccctccccagctggagacaagctgccatctccagggctcgctgtaaacagcctccactcttgggctgaataagcactcccaagaagctgggcccctaccaacagattaatcggctgcagagtgctcatcccctccccacacccccatccacccctgcctcctcctcctttccactgctttaaccaaaccttaatgaggtaaggccaggctaggtcagggctcaaaggaaaatgggctcaggaaaacttagtttgcccagccttgtcagctgagattggttttgctttccagccagaagtagaaacttgatgctttttcctttttgcagtgttaaaaaccatatctccagttttattatgttccatcacagttttggggcaaagccagaaagctgacttgtttgcttcaaaacacaaaccaaggcactgtcttctgtgcttttcagggaggtgggaaggtaaaggagactgcccactataggggctcagttcccccaaaggccttgcacaccttctgataaaccccctggctgaggcaatcctactggctgtgcagacaaagatgtgacagcagcactagatgctgacccaacaagcagtgctgggcctgggcggtggggcatgttcagcactgcgggcagcagtcagcacatgcaagacattcagtgagcagagggctgccctcggcctccaactgcagccgccctggcgcgtgaaatgaaattggtgggccttcctaggattgtaaaatgggacttgtcatttgtgtgaggttgaaatcta

SEQ ID NO: 85575 - DNA, 1305 bp, Homo sapiens
ggaccataccttggctgtctcttggctgtgcctttgtacttggccctgaccctgccagggagcaaaaagactgatgtagagctgttggaggtggtacattcatcagatgagggaggtcagggcctccggaatccagaggctgcatttctctgtgggttgttaacaaaatattgatgacgcatctcagacccagacagatgttaccctcatttttaggagcaaggggcacatcagaccactttgtgtactagtaattaagtcagagtggccaaacgtggttgtgcctccttgtgccttgggttctactttagtttctgaatcagttgtactccttgctagggacagccagtatcctcaggccagttctcttttgcccacatgtccctttttaaatgcaccaccatcacagtggtgacaatgtgacttagggacagagccccgtttatcttgtaggtgacagaagcgctctgcggcccagtggactgcggctggggaccccagcactgacgtcccgtggacttttggaaaaagacttccaaaaagtagcccactttattcacagaggtaaggataaaagtttggaagttgccacatcttattgtgtgtatttagtttctgattgtgatgagtagctgagaccctgccactgaaagacaattctgcaccaaggctgagtgttggggtgggagacagcaaaaaacacatgtaaatcaccttgtctgagagggttataaatttgggctgcccaggacatctgtccaagggtgggtgcatctcagagtaattgaggtaagcatggagaccttgtgccctgccacactccccagctgggggacattctgacatttgtgcctcggcccccagccattgtaccccctttggtgtgtagtgtggggtgactcatttgtgtcttgtggcacagggatagagctgaccctgcagatccagagcgacactggtgtcagagccaccctgaaagagttcaaggagagactggcaggggataagtaccaggcggccgtgcaggctctccgggaggaggttgagagcttcgcctctctcttccctctgcctggcctgcctgacttctaaaggagcgggcccactctggacccacctggcgccacagaggaagctgcctgccggaggacccccacctgagagatggatgagctgctccaaaggggaactgttgacactcgggccctttgagggggtttcttttggacttttttcatgttttcttcacaaatcaaaatttgtttaagtctcattgttagtaattctgggacaggttattaaagg

SEQ ID NO: 85576 - DNA, 1056 bp, Homo sapiens
aatgcccgatgatctgaggtggaagtttcatcccaaaaccatcccccgatgccatccgtgaaaaaactgtcttccacataaccagttcctggtgccaaaaaggttggggaccactgctttaggtccctgtttcttaaacttcaatgtgcacaccacccctggggctgttggtgcaatgcagattctgaccaggccttgggtgatgctggtctgggagccacccttggagttgtgagggtttaggccatagtccctgtcaccatgggcatctcatggcatgggcctgccctctccctggtgactgtgtcattgtcactctgccatctgaggacccgatgcacatggctgagacagataatgcttgcaaatgccctctttggtgcctggtgctatgagaagcactatgtccagtatcttacttaaacttcatgacagccctgtgaattattggtctttttgttacaaatgggcatctgaggtttcacaatgttgagctgcctgcctaaagccacacggcaagtgggtgggcacagctggggggctgcaaagccaagctggagccctagctcacccgcatcttgaaagggatccccgcaacacagctcagaagcagaggccccagtgctgtcagcacccaaggcactaccccagcttaatgaaggttcaaagtggaaggatcctcctgtatgacctcgggccaggtccagaaaactctgttagccttgctgttgtcaccttaccactttgataataccatcagcctcacaggatccgggaaaaacctaccacaggctacagtgtctggcacctaatgtgctctgtgaacatgccccttaccccccaaagtaaattgaactgctgcccaatattcatgctgccttcaggggagcctttaccatcaatgttagggaattgcccaagcaacttgtcagagaaaacaagccaggagcagcctgaggaagctgtcccttccccatgggagtgtcaggccctctgctgtatgatcagttacccctttcaaaagtgctctgtccttcctttcacattcttaggcac

SEQ ID NO: 85577 - DNA, 1430 bp, Homo sapiens
aaaaataaaaaatttttttagctgggcatggtgctcatgcctgtaatcccagcacttggggaggccaaggcaggcggatcacttgaggtcaggagttcaagaccagcctggccaatatagtgaaaccctgtctctactaaaaataccaacaaaaattagctggacatggtggcatgtgcctgtagtcccagctgttcgggatgccgaagcagaagaatcacttgaacctgggaggcagaggttgcagtgaaccgagatcacaccactgcactccagcctgggcaacaagagtgaaactccatctcaaaaaaaataaaaataataaataataaaaaatttttaaaaatatatcattttggaggaaaagataatccaacgcaaaagcaaggggtgacattgaaaagcaaggaagcttgagtaaaaacaggaatgttgtttgactcatcatctgtgtatgattctatcctagcctcctgacccattgtctcttcttgtccaggggttgctgtggcactgaagcaagctatgactctggaatttaaagtttatcaacaccaggtggtggccaactgcagggctctgtctgaggccctgacggagctgggctacaaaatagtcacaggtagagacacagatggtgttcagcaggcctgttcttgtggttgtattaaggcttgcttctcagtttgtgcaaccaggatgtggcccaggctctgctgctgcagctgcaatgatgggcccaccttgggaggaggtcagcctcgcctccaactggaaagcctccccctgcctcagaccagccagccgcccccttgggtgagccacagatgatgggaatagtggttgccattggtcaccagcataaggactgcttgtcctcagaacagctttgcaggaggatgacctgaggctcaactgagaggttgggctgtagtggtcacacacctggtaggtggcaccaggactgtgtggtgatgccttgcactgtgccaggggagtgtcttctctcaccccgctgagctgggggtgcaggggctctcccctcccagtttcctgcatattcctggggagttggcttgctttaggcatgtttgcttggatctgtacattctggagctgatgggctgtgaatgagatggacttcccaggtcagggccccactctggggtgccatccacctcacagtcactgcagctttccacggagaacgcatttttttggcaggcagcatactcagtcctccggaggaagggcgactttatacctagtcccacaagactgccgattgtgctagcagtggtgtggtccaggaatatgggtcctgctgtgtgtagacctgagtgcccactctctgcaccgtgtcctttgccctttacagggattacaggccctctgatctaaggattggggagggattacaggcctcctgg

SEQ ID NO: 85578 - DNA, 1050 bp, Homo sapiens
cccaagtagctgggactacaggtgcacaccaccacgcccggctaatttttgtatttttagtagagacggggtttcaccatgttggccagactagtcccaaactcctgacctcgtgatccgcccgccttggcctcccaaagtgctgggattacaggtgtgagccaccgcgtccagcctgtcctttcatttttaaggccttgttctagttgtgttaagaagagatgccatcagaggaggcaggtggacaggtgaggtgctgaaaccagtattccagccagagtcatccatgatgtgttggtttccaaaaaataaagatactggtctgccctcaggaggcaagggtcccctctgctccgctgtgttacaaatcagttctccatgccaggataaaggccaggcttgtgcttgattcttccctggccagtctgggtttgagcctaaaaagaaaaagaggggacagcccctatgatcccactgtgatgtttttcttcctccaggagtgaaaagtgtggatcccaagactggcaaagagattctgtacaacctggagtctcttatcaattctgctgtgttccctggcctgcagggaggtccccacaaccacgccattgctggtaaaacatcatctgcctctgctcatcctgtagcccctaattcccatcccacctgtcctccaaaatcgtgtgccaggacttccacgctggggaaaaagctggagggctgtctctgtgcaggagatgctaacacagagtagggcatggttgagactggcctaaggtagggacagtagggaatggcatccactccacgtgtacggccacccagaggcaaacctgtgggtcaggccgagttttgtaaagtacatggcaccctcttagggaaggaatctgacagttaggagagggcaaagcacaggtgagagagattggggtccagaccctgcaggatgagtccccttgcccttgatgggcctggcctgtggcagtggaggaccctgtgtctgatcctcacaccctgcaccagtgccacgccagtgactcctgagtcaga

SEQ ID NO: 85579 - DNA, 1129 bp, Homo sapiens
atttctaaaaagaagacatacgaatgtccacaaatgtatggaaaagtactcaacatcactaacaggaaaatgaaaacaaaatcctaaataagatatcgtctcaccacagaatggctaccatcaaaaaaatcaaaaaacaaaaaacaaaaaaaccagaagtaaaaaatcctggcgaggttggaaagaaaaagaaaactcttatgcactcgtggagggaatgtaaactagtaaaaccatggaagtttcttaaaaagctaaaaatagctctccgccagatcgccgccgcgccgccatcttggacaccagccgtgtgcagcctatcaagctggccagggtcaccaaggtcctgggcaggaccggctctcagggacagtgcacgcaggtgcgcgtggaattcatggacgacacgagccgatccatcatccgcaatgtaaaaggccccgtgcgcgagggcgacgtgctcacccttttggagtcagagcgagaagcccggaggttgcgctgagcttggctgctcgctgggtcttggatgtggggttcgaccacttggccgatgggaatggtctgtcacagtctgctccttttttttggtccgccacacggaattgagatgctcctttaaataaagcgtttgtgtttcaagttaaaaaaaaaaaaaaaagctaaaaatagaagtgtcatatgatccaacaatcccactactaagtatttatccaaaagaaagaaaatcagcatatcaaagggataccagtattcccatgttgattgcagcactattcacaacaaccaagatacagaatcaacctaaatgttcatcaacagatcaatgtggttgatgagtaaagaaaatgtggtatatgtccacagtggaatactattcagccataaaaaaagaataaaatcatgtcatttacagcatggatgaggacattaagtgacactaagtgaaataattcaagcacagaaaaataactactgtatgttttcactcatgtgggagctaaaatttaaaaaaacgttcacggaagtagagagtagaactgtgggtattagaggctgagactgagaaaggtaaaggggagtagaagatggggagaggctggttaatggatacaagattacagttaca

SEQ ID NO: 85580 - DNA, 1039 bp, Homo sapiens
ccggcgctttcttccttctgcagctgaggctgcggcggggccggggctggggtcggggccaggtaggcgggcgggagccagtggcgagcggcagcgagggctggctggctccggcattgcggggcgcaggtgcaaggggcggggagcccgcggcgccggcaggcggacgggtcggggtccctgggtggtggctgcttgggggctcactggggcgatctcgcgcccgcggcccttccatttttccctcccttcttcctctcccgccaggggtcggcgggggcgggggacgggcgtccggtgcctgggctctctcctctccctgaggcgccgctggggagtcgaaccctgatgatgggacctgtggtgagcagccctgaaagcaagcccagacccagccattctccgtccctaagctgacacggagcccctgattttaatttacctggctttgctagttacgaatatatctctcacctcctaaaggatgattttatccaactcagaactcaccccagcagagattgagggggaaccgtgatgaaatttttaagtattctgcttgatgataataatttttctcttatgttaatgttggctccgtttgggtgtttagcttttgaaaggagtatgaaaatgcggaatggggctttggggcttgaggtgtgatctctagtgtttaaaaaatttaattgcacaaatagaaataattcacccacattattgaaccccactaaagcatatcctttttgtccatattcctttcctgctgccctcgtgtgtaccattattactcagttgtgatttgagctcgttccacttaaagtcattcatagatacttttgcgtcgtgttgaatatttattgaatttctattctgtgttttacttaattactttattatggaacctttacacaggtctggtgtacttgttctttgaaaagtcttatgttgaccaccatcactgagcatatagctttttccttatttccttgggataattacccgaagtggaaataccgaatcaaacttctgttttctt

SEQ ID NO: 85581 - DNA, 1446 bp, Homo sapiens
gcttgggagtttgagaccagcctgaccaacatggagaaaccctgtctctactaaaaatacaaaattagacgggtgtggtggcgcatgcctgtaatcccagctactcaggaggctgaggcaggagaatcgcttgaaccggggaggcggaggttatagtgagccgcaatcgcgccattgctctccagcctgggcaacaagagtgaaactccatcttaaaaaaaaaaaaaagaaaaaaaagaaaaataaacagcccttatgtttgaataacttgtgaagtgaatagtcacaaaacatgactatgttgatagtcatttccaagtggatgctccccagtccactccaccatgtcattttgagggtggtcttaggttaggattctatatagaagcctatatctgaagtctagaacgtcagagaccacatgcagggtgttgcaggccattttaaaccatgagagataaggaaagacttcaggaaatatcctggaaaaaatatacaaaggcaggagagctatcttgaaatagtttggaggccatcctgtggaaaaggaatttgatgtttcccataaatctctaaggagagtacaagaaccagtgggcagaagctgcaggaagaggaatctcagcatgttcttttgtttgtttgtttgtttgttttgagacagtcttgctctgtcacccaggctggcgtgcagtggtgcagtctctactcactgcaacctccgcctcccaggttcaagcgattcacctgcctcagcctcgtgagtagctgggactacaggtgtgtgccaccaggcctagctaatttttgcatttttagtagaaatgaggtttcaccatgttggccagactggtcttgaacttctgacctcaggtaatccgcctgcctcgctctcccaatttgctgggattataggcatgagccacggcgcctggccacagcatgttctaaggaagaatttggaatgatgggccctcagcggatgtgggcatcagaccctggggctgttcaagcttctgttgagtggttccttggcaggattcctacagatgggctttgaacaaaagatttaggagggatgggctgaactacctctaagatctcttcctacctctaaaatactttcattctaagtgttccaactcctatcaggaatcctgctgtactttaaggagcttcttatttgaaggttagggggtgtaaaaaaaatgcccctccccccatggctgttactgtacttatatggtagataatcaagatgttagaagtcagttcataggtagcatgtccgatatgcagggcactgtgttaagtgccttgcagaaattttacagtcacctgtggggtcagttttcacagttgtatggatggcagaactgaggctaagagattttgagtattagataacttatgcaagtcctcactgtgagtttaggggaagtattt

SEQ ID NO: 85582 - DNA, 2358 bp, Homo sapiens
cttatcgatttacgagtctccttaaatagtaaagatactgggtttcttctattactttttcagctttttccccctttctcttctctaggcggctaggggtggagatgggcaaagtgcaggtttaccaggaacctaacagaggtgagctatcttgggcatgtggaacattgacctttttgtgaaatgtggcatattggctccgtccttcatcctttactattgaaacgatttgattcagttgtacatttccattagcaagaagtcaggcaggcaaggtagaacagagtggttttttagctctcactaataccagctagatatctaaccctggtgcaagtcatttctggggcttgaactgcagttctgagacttcattcagtaaaagctgcagacatatttgaaccagctggtcaactgaatgaacatgagctcaactgttgcttaaatttatgtcaccttaggaaggatgagtaaatcctgtcaccttagacaggatgactaaatcctgtgtgaccgcagttttagttagtctttatttgcacctaagctgccttgggttagacttcataaaatattgttaagaaatactttttgctaattgatacatgtcattacataattctcccaagttgtaaaaagaagtgttatttaacctttgtaggtccaggtgtgctggctcatgcatctaatgccagcactttgggaggctgaggcaggcagattccttgagctcaggagttgagaccagcctgggcaacacggcaaaaccctgtctctactaaaaatacaaaaattagccaggagtggtggtttgcacttgtagtcccagctactagggaggctgaggtggaaggatcgcttgagcccaggaggtggaggctgcagtgaagtgtgatcataccacagagtgagaccctgtctcaaaaataaataaataaataaatagaaagtgatctttgtaatttctttagcaatggtggatatttgaaattattttaggccaggcgtggtggctcacgcctgtaatcccagcactttgggaggccgaggtgggcggatcacctgaggtcaggagttcgtagaccagcctggccaacatgatgaaaccctgtctctactaaaaatacaaaaatttgctgggcttggtggcaggcgcctataatcccagctcctgggaaggctgaggcaggagaatcgcttgaacccgggcggtggaggttgcagtgagccaagattgtgccattgcactccagcctgggggggaacaagagcgagactttgtctcaggggaaaaaaaaaaaaaaagaaattattttagcaggagcgatggacagcttgcatgggcttgagagttacacaccttatccttgacaagttatttaacctttctaaactataaataaactgtaaattagggctgttttgaggattaagtgggataacttgtgtgcctaccagtttttggcacacagtaggtgctcaatatatacttattcctgttccttttccactagaagatttaaaaaaacattttttttttttttggtagaacaagggtctcattatgttgcccaggcttatctcaaactctgggcaaaagcagttctcctatttcagccccccaaagtgctaggattacaggtgtgagccaccaggcctggcccctctacaggattttatcaaatatttacatattataaagcctacaggaggctttgataaaaaggcacaagttttgctgttcccatgtttatctccgttcctgcctcttttctgtctcccaagatccctatgtggcgtcagtagggaaaaagtataattaaactctgcaaggagagtttggagaagattcttcctctagaggggattgaatgatgttctttgtctggagtctaggagggaaggtgaaagggagaagcagtggcataagactccaggagactggtccactctccaagtttctgaataaagggagagaaaatacttggtgtttattgggaaggaaggaagtaatatttgtgaatttcttactgttaccagatactgaaaaactgagttcaggagttcagggattgatgttaggtacgaggtccagtttgaatccagatctccctgactctaaagctcattttcttttcttttcttttcttttttttttttttgagacagggtctttctgtgtcactcaggctggggtgtagtggcatgatcagggctcactgcagcctctgcctcctgggctcatgtgcttctcccaccttagcctccccagtagctggtactacaggtgggcaccatgctgccaggctattttttttttttttttaaatatggagtcttgctctgtcacccaggctg

SEQ ID NO: 85583 - DNA, 1004 bp, Homo sapiens
agagagaggcagacagggtaggcctcattgtggaggtgacatttgaacagagactagagaaggtgagggagagtcaggtgactaggtggggagaaaagcattgcaggcagtgggaacgcctagagcaagccccttagcggtgtgagctgctgtgggaggactgaacagggtcaggtgtggccaggcaggaggggaggggcagatcctcaagtttggactggagttgtaaatttgagagttgccaccatctatgaagctgtgaaattagatgagaagcccaaaggacgagagggaacagaaagagaggacacatgagcaagtcctgggacgtgaggctggggagaagaggaaccagcaaaagaaaccaagggtggaaggaggacaccagagaggggcattctggaagccaagtgaccgtggacatggccgcatggaggccactgatgacctttatgaaaacaaagcttcactggactatttgggagagactgagagtagataaattggagatagtgtaagatgtacagcaaaggggagcagaggggagagtggttatgagtcgtgttaatggaagtaacagaatgtttgtggccgatgggttatcagtggtggaggcaggagaggagagagaattccttacataggtgtgccatttggagggattaattttagggccactggcatggaaatttcctctgactgatgactgagggcaggccgactcctggggcacagatgcacatagtgggagcttgtggacacgctcctctgagagtacttaagtagggtggtcagttgagagcagatgatgggggatcttatggaggcctgagaaaagaggaatttattggttggtttttttctgccttgcaccttaggttgtataaaggcatgagtaacacactgctgacactttttggaacagggaatactgtgttgtagatcccttgatgagatttgctgtgtctttgttacagggacgtgaacaccaccatcatggagct

SEQ ID NO: 85584 - DNA, 1050 bp, Homo sapiens
atcatagtaattctttctggagacattttaaatgggttcaaacaattctcctgggttcaaacaattctccggcctcaacctcctgagtaactggattacaggtgtgcaccaccacgcctggctaattttgttttgcatttttagcagcgagggggtttcaccatgctggccaggctggtcttggctcagatgttctgcccaccttggcctcccaaagtgctgggattatgggcatgagccaccgtgcctggccatctttgggaattttttttaatctgttaagtatttcatcccttctatttcttttattattttcctttgggaactattaggtcctgaaaattttggatctagtctctataacttttaaaaacttattttactttttgcatacttatatatagcattctggggaaattccttgtcttgatcttccctggtttgttcttaaagttgtgtttattctgctgttaagccagccagctactgggtttctttagaccataataacttcttccccctagatttatttttggttctttttcataataacttgttctttcttttttttttttttaatttatttttttattgataattcttgggtgtttctcacagagggggatttggcagggtcatgggacaatagtggagggaaggtcagcagataaacaagtgaacaaaggtctctggttttcctaggcagaggaccctgcggccttccgcagtgtttgtgtccctgattacttgagattagggattggtgatgactcttaacgagcatgctgccttcaagtatctgtttaacaaagcacatcttgcaccgcccttaatccatttaaccctgagtggacacagcacatgtttcagagagcacagggttgggggtaaggtcacagatcaacaggatcccaaggcagaggaatttttcttagtgcagaacaaaatgaaaagtctcccatgtctacttctttctacacagacacggcaaccatccgatttctcaatcttttccccacctttcccgcctttctattccacaaagccgcc

SEQ ID NO: 85585 - DNA, 1162 bp, Homo sapiens
gggccgattatcctttaacaaattggttgcttcaacatgttatgactgcgatatgttaaatagccatttgtttggactgcagtaatttggaatttgacagtcagcttgtattcagattgaattggatatccttgtactttgaaattacatgtaattaggattcttgttgacgagatatatagaaacatctttacactgcatcattagtatttgctggcagagataagagctaatcaccaattatccctacttttttcctaaaagaagtctgtgtggctcacaagttagtaatattttttcataggcaggttcctttcttcattttccaaaggagaattttactttgaactttttctttttttggaaaactttcaactagccaagcatttttgggtctgttggaattttcctttttgttgacatgcagtaatacctgacttcttgtctgtcacagatcccagattacaggaatgcagtaatcgtggccaagtctccagcctcggcgaagaggtaggtgggaatctcacaacctctttctggatctacttctaaggattgtatccgtgatgagttccaggcattctaatttgaacttcagtggttcccagcgatatctcttatttttcttccatggactggtattttaagattgttctgtcaactccatttattaagtaaacattttaatttcctctcttttttttccaatcccactctatgattgccagacatacttccttttttaagttatcttccacttacactttcttttatttttattattattattatttattttattttatttctttattttttgagatggagtttcgctcttgttgcccaagctggagtgcagtggcgcgatctcggctcaccacaacctccacctcctgggttcaagcgattctcctgcctcagcctcccaagtagctgggattacaggcgtgcaccaccatgcctggctaatttttgtatttttagtagagatgaagtttcaccatgttggtcaggctggtctcaaactcctgacttcaggtgatccacctgccttggcctcccaaggtgctgggattacaggcgtgagccaccacactgggccttatttttatttttaatagtagaaacagagttttgccatgttgtccaggcaggtcttgaa

SEQ ID NO: 85586 - DNA, 1264 bp, Homo sapiens
catttcaggtcaggagttcgagaccagtctggctaacatggtaaaaccccatctgtactaaaaatacaaaaaagttagccagatgtggtggtgcatgactgtagttctggctatttgagaggctgaggcaggagaatcgcttgaacccgggaggcagaggttgcagtgaactgagaaatcctgccaccacacttcagtctgggcgacagagcaagactccatctcaaaaaaaaatcagacaaaaaaaggcaactttatgatttcacttacgtgaaattctagataggtgaaactatagtgacagaaagcagatcagctgttgcctggggcaacacttagtgaaaaatcactaaggggcataaggagatgcttgtggtgatgacgttccttatcttgattgtgctaatgcttatatgggcacatacagccttcagagctcatgaaattatatactttagatatgcacagtttctcatatctcagttttacctccctaaaactattaagaaatttgtgcttaatactttggtgagcattttatgccctttgccccatgtagttggttctcactggtaggtaggcaggcaggtagaattagcagctttaggtgagacagagctgagcggaggttccttcactcagtcaggctctcccggccagtggcttgcagaccaggccaggctgctgcccttctttggtgctgctgcagagggaagtgtttggcatgtggggtctctacagttagtcctggtttctaagagtctaaggctgttttattctctcttttctttagtcctttgggagacaacattctacttatgttctcttaatgttttgtcccctaggcattagcagaaccaagggctgcatgagttttgagcttgtgtctggtgttttccctcagggcacagtcttttgctgagcgcctgcgcctgggaattgcagtgattcatggagaggcgcaggatgccgagtcggacttggtggatggacggcattccccacccatggtcagaagtgtggctgccatccaccccagcctggagatccccagtaagtgtgctgctgcctctttcccactttcctctgattttaaggctgactacactgttgtctgtgtggtttttttcctcattcttcgtttttttttagttggcaaaaactcattaacacctttcttggccagatagtagcgaatgcatttctgattaccttgtaaattgtaaggccgtttagaagcagtctgtccttctttgcaagacct

SEQ ID NO: 85587 - DNA, 1037 bp, Homo sapiens
aagttttgttttactttttaatataaaaattttggtgtgtgtgttttattccaaccagtgctgattcctaaagaaaagcccccaatcacggttgtgggtgatgttggaggaaggattgccatcatcgtggtatgtagacctcttttattattaattctagtatttgccattgttattctgttgattgattgattgattgattttattacagagactcactgtcgcccaggctggagtgcagtggcacaatctcggctcactgcaacttctgcctcccaggttcaaacgattctcctgcctcagcctcccaagtagctggaattacaggtgcctgctaccacgcctggctaatttttgtatttttagtagagatggggtttcaccatgttggccaggctggtctcaagctcctgaacttaagtgatccacctgcctcggcctcccaaagtgttgggattacaggcgtgagccactgcacctggccaatttatttgttaattctgggcatataaaggcctaaggatagtagtatggccagataattcttattaaatttgtgccttgtgctaaatgtttgctttggcccagaaattggaaaatgctattgtttattttaaaattgctcactactggctgggcgcgttggctcatgcctgtaatcccagcactttgggacgccaaggcaggccaatcgcttgggctcaggagttcaagaccagcttggacaacatggtgaaaccctgtctctacaaaaaatacaaaaattagctgaacttggtggcacatacctgcagtcccagctacttgagaggctgaggcgggaggatcacttgagcctggggctcagaggttgcagtgagccgagatcatgccactgcactccagcctgggtgacagggtgaggctgtgtctcaaaaaaaaaaaaaaaaaaagtcatcctgtcataacatgagatattgttctgtgatcaaagtaaagtacaagctgggcacagtggctcatgcctataatcccagcactttgggaggccaaggcag

SEQ ID NO: 85588 - DNA, 1027 bp, Homo sapiens
ggtggggtgtggccaggccgtgccttcgcaagcctatgggggtcactctgagagccgtccttagggatggggccagctctgtgggcaccaccacatggggcatggggtgggcgctgcccatggttacatgggggttggtggcagcatagacgcatggcagcagcggccaccacatgcagaaccccccacagtgtccagggccttcctgagctgcttagtgaatcctgtaccagcctgagaggagcacagtgccctgtcatttgcagaggtgggaatgggcttggtgcaaccaacttgcttgacatccgactcagtctgaccccacagtatgcacctgctctctgcccccattcacttcttgatcccagggccctgtggccacagtctgaggcccagcggctatgggtgcacgggggctgggcggaggaagcagggtcatgtgcctgaccagcgccccctccctctgttgcagcttcacgtggtcggccgcgcggacggaccggaatgtgatctctgtgctgtctggccaggtggtggagatgtttgaccggcagttccaggagctgtacctcatgtcacacagtgtgagcctcaagggcatccctatggagaaggaaccggagccggagcctattgtgctgccctctgtggtccccctggtgcccgcgggcactgtggccaagaagctcgtcaaccccaagtacgcacttgtcaaggccaagagcgtcgacgagattgccaagatctcctctgagaagcaggaggccaagaagcccctggggctgaaaggcccagcgctggctgagcatccaggggaactccccgagctgctgccacccatccacccaggactgcttcacctggagagggccaacatgtttgagtacctgcccacgtgggtggagccagacccggagcctggcagcgacatcctgggctacatcaatatcatcgaccccaacatctggaacccccagcccagccagatgaaccgcatcaagatccgtgacacctcccaggccagcgc

SEQ ID NO: 85589 - DNA, 1041 bp, Homo sapiens
gctaggggaaaggacccggggccacctcaggtggtggccgtcccagcctggcatggtcccaggggctcccgtctcactaccacctggaaccagcctgtctcacggtgggacctggagtcagataaggtgcaagtgggagaggccccactgacccagctccacatggggtctggggagtcccatctggcagtggaatatggggttaatttaagggtgtgggctctgaaccaggccactttctcactgtgtgacctcatgcaagtctctcaacttctctgaacctcagttttctcataatgataacatctccgttatggataagtgcacagtgactggcatattggcaacgtgaaatgggtacctctgagtgtgtcgtgatcagagagcatctccttcacatctctttgttgttcccctcagcttggacctactccctgctcccctgctcctcccatgccccagagtcccttggggagcaagtcctagactcatcctgactcagaccaaagcctactgctatgagaggagctcagacctgttgaatgtctcacgtcctccccctcccatgaaccttccgtggcttctcccttggcctcagggtaaactcttaacacttcagactcaagatctggctccacttacatgtccagcttcatttactttatatcctctccgatgaagcaagcaggcccctttctctcatttcccgtctgtgccctgccttccagccagcccactaccgccaaatcgccccgagtaccttctagcccagcggaggagagagcctgctctttcttttttcttttcttttctttttttttttttttgaggcggagtctcgctctgtcacccaggctagagtgcaatggcgctatctcggctcactgcaagctccgcctcccaggttcatgccattctcctgcctcagcctcctgagtagctgggattacaggtgcccgccaccacgcccggctaattttttggtatttttagtagagacggggtttcaccatcttggccaggatggtctcaaactcctga

SEQ ID NO: 85590 - DNA, 1390 bp, Homo sapiens
atcattagggttcagatgagggaaactgaggcccagaactgcagtaatttgcccaaggtcacgcagtgatactgtgtcagtgcagaactagaagctaggtctccaggctctgtttaccacatttaataacttttttatcttttagggagatgttcaggaccctaccttcccctttatttttaatatttatgcaagaaagtgggcaggaaaatatgagaagtaatgagttattccttttcacctccagaaaatatcctgtgaaagaagggattggaacagggtgttaaaatgatgggaaaaggtgaattttaagaatccaagcttcctctcattatgtaatataacgaagatttggcagaaaacgtgcctcttgtagctctagatacagaattttaggtgctgacaaaatcttatgctgaatctggcacagcagtgattgagttagcattgataattaagttttcatctgtatttaaatgaacatcaaaagggactacaatttgcttctgaatggtacttgttcggtgcttgtttttgggacaagtgattgtgttggggaagcgcacctaaacttttaaattttttatttatttatttttttgagacggagtctctgtcacccaggctagagtgcagtggcacgatctcggctcaccgaaacctccgcctcctgggttcaagcgattctcctgcctcagcctccggagtagctgggattacaggcgcacgccatccaccacgcccggctaatctttgtatttttagtagagacgggatttcgccacgttggccaggctggtctcgaactcctgacctcatgtgatccgcccacctcggcctcccaaagtgctgggattacaggcgtgagccaacactcccggcctaaatcttttatttatctgtatttttacttttacattttaaaagcttatttatttccctggttttaaaattgggctagtcatctttaccagtctcactgggctattcttttgtaagcagggaatgagatactggttattaaagattttggtaaagtgtaagttactgtaaggcatgattcaggactgcgtcccacaagtccccggaccaggagccagttcggattgtcttgtgggatgtaccaagtttccctggtttacagaggctttttgcctctctgaagcctgagctggccagatggagagctctgtggaaaacttccagcagtgtgtgttgggccaagcactcgaggtgtgaagaaatgtaaaactttcaagtgataatatctagcatcgtgtatgcagccttgaaaaatgacccaacctttgtagaaattctctgttatcactaaccctcttccataatgagcggaggatttcccaagaattgggattctgataagagtcct

SEQ ID NO: 85591 - DNA, 1119 bp, Homo sapiens
tatacctggtgaccctgagccttggagaagtcaaagggcttggatttggggaatttttttttttttgagatggcgtctcacgctgtcacccaggctggagtgcagtggcgcaatcttggctcactgcaaacctctgcctcctgggttcaagtgattctcctgcctaacctcccgagtagctgggactacaggcgtgtgccaccatgcccggctaatttttgtatttttagtagagatagggttttgccatgctggccaggctgatctcgaactcctgacttcaagtgatccacctatcttggcctcccaaagtgctgggattacaggtgtgagccaccatggccggccttggattcggggaagttgaggctggaaaagatgtgaggaattacgtagtttgtatcccttttttgtctgctggacttttaactcatgtattcggtgtaaacagacctcttctgtcaatactttgccgtctagctcgtccgatgtttggcccctttttctctgctatcctaccttcaccaacccacacagtctgctggtgcacttacgacattgtccgtgtatctggggctcttgtgacactgtgacgtctttgaggccagtggtcagcttgtctttacttctccagtaccaggctcggtctctgatagatggtagatgctcagtaaaggtttgtcaccagtattcctcgaggcaggggagcacatttttatggctccctactgttctgtcgcactgttgctgaaatcactactgttggttcagcaattgtgtgtcagttgcataggtttatccacctcatctgcaggtgaggaaactgaggcctagggagcttaagttacatgctcgaggtcgcgcagccagtaagtgatttgaacagatctgttggactccaaaatgttattatacctgttacctacttcgaggaccaagtctcatggggatgaagagacacactgcaagttaacagtggactgagggaggtggggtgatatgattaaggtggttgaggatgggaagagcacatttgttttttgtcagatgcattgtgaaatgaatgtttatgtccatctgttgagtttttgaaaattgacaaacttgccgggcatggtg

SEQ ID NO: 85592 - DNA, 1098 bp, Homo sapiens
tgggaattgtgaataacgagatttctggctctttcctaaccttagaacctttgaaaacactgtggtttgaatgtcaataattaatggatcattttagctgagagacactagatttggtgtttgatctgaaaaaaaaaaaaaaaaagcctaggccagccacggtggctcatgcctgtaatcccagcattttgggaggctgaggtgggcggatcacttgaggcctagagtttttgagacgagtctggccagtatggcaaaaccctgtcttgaccaaaaaaatacaaaaattagccgggcatagtggcatacacctgtagtcccagctactcaggaggctgaggcaggaaaatcacttgaacctgggaaggggaggttgcagtgagtctccagcctgggtgacagagcaagactcttgtctcaaaaaacaaaaacaaaaaacctgtcttcttttgaaccagatccgcaacattgttaaaatgctccctatccatgcattggattctttctgtgactcattcccctagtacctaggtgctggagcctgcttcgttcctgggcatagaaagtccttttcctgattctgtttcctgttggtcctggtctaggcagagtgtgcttcactttcaagccctctagagacaggacaggtaacttaattctctttctgttcaaagcaatacaaggaattggacatgcaaagggctgtaaataaagggactccccatcttctcttcatggtaaccctgctgatatatagaacagggaaaagtaggctcatcctgggggacggctgattgtttagggctaatgcatgatgtggatttaaaagcatttataattaatcacttctgagtgcaggcttcatttttcctcttggtcccacccctcttaggtagttgcacgttgcagcagctcgatagctgagaacaccaagtggtacagttaatttggcttcaaaggccatgtggcagatagctttggaatgaggtgtgggtactaatgggcctcctggctgggtggctttgggcactttaatcactgagctttggtgtcctcatctctaaaggggggctcgtaatcactacttcatgaaataga

SEQ ID NO: 85593 - DNA, 1865 bp, Homo sapiens
ttaaagcttgagatgggatggggtaggtgcttgagtgtgtgctggctcctgcagctggtgacgggtggatgcctgctgggagcagtgagctcccaggtggccagatggccactggctctgatgagacagcagccttggggtttggttttctgggtagtagggagcagggtaggtcttgagtgggtgccacctcaagtgtttgagaagggggccctgcggagtaatctctgtgggtgggggcctggcccagactggcttcctgagactggctagatagcagttctagagatggagaatgaagagaagccagagttgagttgtgtttagggagtaaagggggcctcagtgctggctgggaagtttggatttgactccctgggagcctgcaaatcatgtggcctggaaagctagaaaaatgcccatgatggggccctaccccagaccaatcaagggggagccagtaatttttagaagtgcccccagttaattctcatagtctgtgtgggttgagaagctgagctgtgtgcttggaggagcctctgggagtgtcagggattggaaggggaaaattgaagccagaagaagcctttgaagtaatgtggtgcggggactgggttcctgagctattgtagaatgactgtggattggctggtggaatcagggctggagaggaactggcagaaatgatcaccctggctgaaatacgcctctaagctaccttggtaaataaagaaggacagcttagtagaaagtttaaacaagggatgggcagaagagactgtgatccacctatttggcaagcctcctttcaacctgcattttagccacagagcaggcacagcaggttcttatctgttctctcaagcttgctagccaagttcctccccacaccctaaattgtaatgactgcagcagatggtacatgtaaaattttaaattacatttctttaattttattaaagatagttgtaatgtggagttactaatttagatagattcagtttattagtcaaagtctagaagtgggattttacatggtacagttaatgcatgtcacagtgtcattgtaatatatggtatttcagtcaaaaaatgagtttatagtccacttcatttattctttacttaatgcttattgagcacatatgtattatgtgctgttggctgggaacgcctgagtgaataaaatttaagttcctcttacatttcaaaatagtttttggtctgcagatggtggctcttgcctcagtaacaagtaatattagctttgggagatagctgggggagggaagtttagaaagtggtgtcagacactagaatggaacctgggaaccagagaaggcttcgaggaaatagtatgtgagtcgagtcttgaaggaaaagtgggagttctcagggacagagatgagaggatccctggccgagggagctgcattatgcagaggcctgagctgagcaaggagggcgcagaggaggaagagctggacatgtggcagaggcccagctgcctgctgaccagactctccaggcaggacaggcgagcttggtgaggtttgactcatgggctgtggttttcacgtagccttttggcggtgagtgggcaggactgtgggccttccaccccacctctaatcagagcatctctgtgctggtgaaagtggggagctaaaaagagcccacttgagaagtgttcctctgctgttgaagaacaaccgaagttatctggagctgcagtgagcaagctggcaccctgagggtggctgggagggagaggttggaggtttcttccagaggacctgaagagccctcacttttttctgtttgcagtgagatggatgttccctcctctactccaggccagtttc

SEQ ID NO: 85594 - DNA, 1048 bp, Homo sapiens
atttgttggtcatagttgccaatattaaaaacaggagatcttacatagcctcctagtcttgcagcttcattgacaaatcagaacacttggcagcctggggcctgtactgttgcctggtaacagtgggtcagagccagtgtcggcgccatctctagttggggcttgcgggtgccagttctccacagacttccaccctccacatggtgcctgcttatttcccctggttgtctggtccctgctctggggacacaggggcttacacagagtccagtcagggcagaatccccaacgcagggtggctgagtttgtctacctttctgttcataccctgctacttgcccccctgcacctcccccctcacttactgcctctataccctttccctgaagcctcttctgcctctgcctggcacacactgtccctcctcctctctgtgcccttctctctctgacccagggctctacattctgcagcatctctggtgctattttaggtgggattgtttgtgccatgattccttgtctcttgtcccctccttttctggcacccaacactagtacattctgatgccttcccttttatgtcttgcattggtgtttgtgaaaagcaagtctttatagtgtacctttagagcaatatccattaaaaaccaggatcacacaacaagcatgtagttgaacatctgtgtgccttgcactctcctagacattgggaatgccatggggactcctgccctacctctagttctagaagagggataggggaaacaaatggataggcaatcacagtgtcagcttcttactgcatctggagaggcaggatcttgcttccttcagctcccaagcctggaggtgagctctctttgcactgtgtgttgggtggggttgtttgtggggctctgttaaaagcgtttcagtggaagatccctgagtttgcagacatcgcctggacccccagcttgtagttgaattttttttttttgagaagtgcagttgtgtaatctcagctcactgcaacctctgcctcccaggttcaagcgatcctcttg

SEQ ID NO: 85595 - DNA, 1023 bp, Homo sapiens
caccttggcttcccaaagtgttgggattacaggcgtgagccactgcacccggccaggtagttgagtgttgagcaggcaacttggaagcttggatatcatacaggttgagtatcccttgtctgaactgcttgggactagaaatcttttagatagtagacttttttggatttttcagtgtttgcatatgcataatgagatatcttggggatggaacccaagtctaaacgtgaaattcatttatgttttgtgtataccttacacccatagcttgaagataattttatataatattttaaataagtttgtgtacaaaacaaagatttgactgcattttgattgtgaccccgttgcatgaagtcaggtgtggagttttccacttgtggtatcatgttgctgctgctcaagaagtttctgattttggaacattttggattttggattttcacattagggatacctaatgtgagagagactaggccgcacagctccctgcactgctgcctggtggtctgaactggggctctgattgttttctgaggggccttttgtgtgccttctgtgaaggggcctgcattgagtgagtctacactgttgggctcagtgtggagcatacctggttgagccaccagagtttgacagcttaagggcagcctgtcattttatctacagagtatattaatgataaagatctttggaaacttacttaaaaacaaaatgaaacatttcatgatggaggatttcaaacagaaaaatagaataatttagtgaactcccatcacttagctttaacagttaattctaggctccccctacctcagatgattttaaagcaaatcccagtattcactttattggaaaatgcttcaatacatatctctaacagataatggactctttataaacttatttttaagtgaagactgaccaccagccttcctaattctgattttcatatttctgtgtttgaagctgattttttaaaattgtggaataatgattatatttacacaaaatcttgattga

SEQ ID NO: 85596 - DNA, 1084 bp, Homo sapiens
cgtgtggacagcgcggtttgtgagaccctgtgagcagggttcccacacagggaaaggtctctggttccctgcccactggtgttaggcccacctgactggtcacagagccaaccccagccttcccacaagagtgcagccacaggggtgagaccgctgtgtcaatgagtctagccgacggcccaccacgtgtgtggcccatacacattggaagtctatgtgtgtgccacatcatattaccaactggtggatatttaagaaatccatttgatagaattaaaaggctactgtgaaggaatcttttttccatttggaagaaaaaatcagtttataatttggaatggggaaacaaatattatctgccttcaaagaaaaaaattcattatataacatagcggctgctgaatcaagtcttggaaatttgtgattttttgaaaaccgccctataaggcttatggaaatacaatttggaatccattagcttcaggtgtttctccttttggtgatagggaaacatggttttgctgctgtttttgtcaaatgtgagagtcgtaggttattgatctggcatcttttgagtgttgggtcttttttttttttttttttttttgagatggagtctcattctgtcacccaggctggagtgcagtggcacgatctcggctcactgcaagctccacctcccgggttcacaccattttcctgcctcagcctcctgagtagctggcactacaggcgcctgccaccacgcctggctaactttttgtatttttagtagagacggggtttcaccgtgttagccaggatggtctcaatctcctgaccttgtgatctgcccgcctcggcctcccaaagtgctgggtttacaggcatgagccacagcgcccggctgagtattgggtctttaggggtcaaaacttttgatctttgcttgcagtttttgtttttttctcttttacactctccctgttccctgattaaatgaaggccaggcttgcctagttccagggaaaaggccaagggtgcctagagcaaggtggatgggactttgttcgcagatgggccttgagagagcgacccctcgctc

SEQ ID NO: 85597 - DNA, 1627 bp, Homo sapiens
agaagagaagtggggcccatccctggggcccatgagagtggttttgtttggacaagtcattccggaaagcgttcactagtaaggagggagttccaggatagaaattacgtgggttggccttgaaagctggttggtggaaaaacctcacatcttccaaggagcgtcttagatgggtatgatgatattggaacagagaagggcaaccacatagaagtaatataagtagaatggaggtttaggattgagcacttctgagtttcacaggaggcattgtggctgagagcttcatcccagttctgtgatttgctgtatgttatcctctctcttgtgtaatgcctgccttgcaaaagtgcagcaagatcagtgccatgaaacccctgggtcagtgcctggcacatggtaggcattcagtaaattatagctgtcaccttggtgcatttgaccagcagcagctgagtctgcagtcactgagtcaccagacctggccttcctgaggccttgggcttatgttttccttgtgaggcataaatatgctgaagaacatccctgttttcttggcctggtcctccctgtggtggctgaaggaaagaggggggctggagcgagaaggggggttaggggcatggatgtagccagtgtatatttggagggcaagtaaacagttcttccttggcctctcggcacaagtttctaaagtagagcgatttctgagtttaggagcagctgggcagatctgcacacgcacccagttgtcagtgctggaaacgcgcccctttattattatttttctaaacaaagcaggacaatggcagtgtaaacattgtttgaacaaaaagcatttggccaatggagataaaaccaaaaggaaaataacaactttgatttccttttggttttgtgttttgacatttggtagcatacttctaatcttttaggaattataaaaattatatggtttgcgaactccagtttgtttatgctgttaaatttagtgcgaagtaaactaaaaaattcccctcctgttgggatgtcagcttgctcccatttttgtttttctttgagaggcatggtcaaaggaccagtgggacctgaagagggcccgtcaaaagcatgtgaggcatgtggggaaacctgtagtgaagcagaaagtgcagccttatttcctacagctctctcatgttccttatcttgctgattctcgctggctgccatttccattttacaaatgaggaaactaaactgagattcagtgaggtgactaaaaggtgctgggtagagcagtgatcttttcattctgccaggtagttattttaaaacttaccaatattcataggccatgttttatgttcagtgagggcatttgtggtttggtaagggtgtagagaggatcagagagcttggaggaagggagagagaaaggggggagtgtgtgagcaggtggggctggactcggtgccctgtagagtcattcattcttgcagcagatgtgtgccaggcactgtgccaggcccagcatgcagcatcaaggagacagtcggggtctctgtcccttgagagcctgcagtccagaggtcgtgggaggaaggaaggagggtggagggaaagccggaagcccaggcgagctcca

SEQ ID NO: 85598 - DNA, 1053 bp, Homo sapiens
atggcatgatagccaaaaaaattagtaacaacccaaatgtccatcaactgatgaatgggtaaacaaaatgtggtccatctttacaaaggaacattatttagccataaaaagtaatagaatactggtacataatgcaacacggatgaaccttgaaaacactgaacctgccgggcacggtggctcaggcctgtaatcccagcactttgggaggctgaggcagacggatcacgaggtcaggagatcgagatagccaccacgcctggctaattttttgtatttttagtagagacggggtttccccgtgttagccaggatggtctcgatctcctgaccttgtgatccgcctgcctcggcctcccaaagtgctgggatgacaggcgtgagccactgcgcccggcctaaatgttcacatattatttcatttgtgtgaaatgtccagaatagggaaatccatagggagtagatttgtcattgccaggggctgggagtgaggacgtgtgtggtgaccactaatggatgttgggcttaattttggagtgttgaaaatgttttggaataatagtgaaatagtgatgattgcacaacattgtgaatatactaaaaaaaaaccccgttgaatcgtatactttaaaatagtgaatttaatgctatgtgaattatatctcaatagaaacaaaacaaaaagatccccccatatgccatagcagtaatacctgacttcgtatatgttacttaaagtgagtatttgaatttaaaagtaagttgatgtgaagaaaaatatgaagcaagcagtagagcagctttttttttttttttaaaaaaagacagagttccactctgtcgcccaggctggaatgcaatggcacaatctcagctcactgcaacctctgcctcccgggttcaagcgattctcctgccttagcctcctgagtagctgggattacaggtgcgcattaccacacccggctaatttttgtatttttaatagagatggggtttcaccatgttggtcaggctggtctcgaactcctgacctcgtgatccacccacctc

SEQ ID NO: 85599 - DNA, 1206 bp, Homo sapiens
agccaccgcgtccggccaatcagcttttatagtaaggatttgaatgggctaattcccgggacagtgcttgcacatagtgggtgctctgtaagtgttagtcattgttactattgagaagagatggcaaaaatcttgaaggtgaacaactcaatttggcaagtgcagatttcttgtgtgcctagtgaggccctgttggtgcagcctcagcctgccgcagcctctgcattcccagctaccttagtggcaggtgtgtctccctgagggttctcactctgcccgcagaggcctcctcttccatactcaggcactcatccctctcattcttcattgcagtgcccttgatggccccaagtcttgtccttgtcttctcaggagctgcctggagcacccagttgcagtgttttgttgctcccccagtctagacagggtgccacatctgtgcttgttcagatcccctgtagctgctggcatggggatctggtcacacagtgagtgtgtgaaaaatacttggcaaacctgtgtcaactaaactatgaatacatctttttttttgaggcagggtcttgctctgtcgtccaggctgaagtatagtggcatgatcatggctcactgcagcctcaaactcctgggctcaggcgatcctccatctcagtctcgcactcccagaagtgttgggattataggcgtgagccaccacacctggccttagtacatctttataatgacaaaacgatgttataaatcaggcaaaaatattttaaaaatatattgcagagtttgtatatcttatgaatgagctgttctaggaacagactctagaaaaagctgacccacgtgtcccaggagacatgcatggctatagaagcacttttcacagtagcaaaaatctggaaataacccagatatccatggacaggaacacgggtaggcacatggttaaatattggcatgatcacatggtacacagcggtgacagtgggtgagtgtcagctagctgtgcataacaacagagagaacctcagaagcagtatagaatgccacaggcaggctggggaagactgcatactgttcagttttactagtgtgtgatacaattatgttcttttttaaaaagtgagggactgaaaacccaataccagggctgtttgccttagaggtcaaggaggtggggagagggaagtgaggggagccaggtggctggacatg

SEQ ID NO: 85600 - DNA, 1054 bp, Homo sapiens
actggcttcttggtgctacagagcggtcgcagcattggccctgatccctggattcccatctcctctcactaccacatcatgttatttgcattttggcatgatttttaaaagaatgctgttcataatttggtcatttgtaagactgctttgaggaataggagaggtaggggagcattcaacaattctcatttgcctttatggagtgttgctgcctgcactttgtgctgtcacagtgtttgatcctctacactgagggggaggtgcagctccttgccatacccctgttttcctggattggcaggaacagccaaaaccaggtctccagaccccatcttttcttcacacagtctttaaaaagactgcatttcctcacctgcccatgtattctacacccacaggctgctcctcccagagactaaatgataagggcatgttgataacaagaaattaaattccttgtgtatgttttggtacttgctttctgcttttagaaaattgagtacatatcaagttctaggaggccaagtgacatctaatttgagctctgctgtgtctgttccagtggctctcagatcctgggagaagctgcctaggtggcttcttgagggtggacctcctactccccttcaggagcctctgcctggtcatctcgtcctgcaaataaagtggccattctgtgggtctgctcagccttttttttagaggttggttcttcctatgcagtcagcccttcctggctcccctttggcagtaggttaactgacacctgcagggatctttcttccttagaagaaagtcccaggggagacaagtaagcacatgggcagtttaccttttcctgctctactgtctagaagtcaagtctgaaatgtttgtttttcttcaaaattctttaagtatatgagtataaaggttttttagcccagtttttggagactgataaattttttattaaaaaaaaaactattcatttttatagacagggtcttgctaggttgtccaggctagatttgaactcctgggctcaagtgatcctcctgcctcagccttctga

SEQ ID NO: 85601 - DNA, 1082 bp, Homo sapiens
atttgatttctctaaccaacaagaagtcatcagaatatagatgcccactttcagttagtgaagatgtttattttttggctgaatctcactgtttttctggtatgagggaaataaaggatttttttcttttcatttctctacgggatgagcaacagttattaggctttaagttattgctagcgtggctgaaacagagtcataatagtcttttctcttttggctgaaatgatgactgttgaaaagaatgtagcactgtccatattgtcctaactggcctgttgtcttctggagagcccgtgtggtttggtcatgtggtctgtggtctcagctaccccaactgggcctccttgtaatgatcgttgtacccttttctccggtaggaagatggagatgtttcctcactcgtggactgcacctcaggaaagataaagccagtgaattgaggattgcggagtattgcacacattcaggtgtcctgcagtggacaccatgacactgactccagcatgcctagaaatcaccatgggggcttaagagagtggcaccccctcagctctgcccccagaatgactggatttttgaacagactcccaggaagttctgatgtatctggttgatggaccacactggtggaacactgtgggaaaggtggggtgtacccctttcccaagcattctctgtcatctgcttttagaaaaataaagtacatgtagaaacataggaggctgccagacatacataggtggagctaccatctgaggtgaagatgttcaggtcaattaattcacccgtatttattgattgggactgggttttcacaatgttgattgacctgtgattgttaggtttggggaggggagtggaaagacagctccctgacagccgagcgtgatcttcaatgatggctgctccccatagtttccttagggacttgatgtagaccccagctgaaaggtgaacatcctcctctcagcacacgatcagccacaccttggtggcacagaggcacggggtgtagagatgtgtgccttcaccacaggcccacctgcactgcttggaactgtgaaaagcctctgtctccc

SEQ ID NO: 85602 - DNA, 2004 bp, Homo sapiens
ggcaaattgtccttggtctggattgagttttggttataaagggacttttagtcccttggctgctctggttcagggatctctaacgccctttgctgctctgggcctcattctgtacatctgggcagacggtgggcagaggcaggtcttttctgcttccttgtcagaatgggtctggcagcaaaggagttgtcctgctgcacatacaatggggagttgactctggtagccaggaggaaacaaatgctctttcttgataatcttgtttctttaatctcatattaagtgtttttctgctgactgagcttcaggtctcttgaatggctcagtattattctacttcagcaaaaaaacttgtacaggttgctagtgtgaacaaggcctccctgccaaacatgcaaatgagagttgctagtgatctggttgcatggctgggtctgcattgagttctggttttgcatgttggattaatttgggtctttgccttatggtcagaagaggtttcagggaacagagtggagttcagggcctgatggaagctggtctctgtgagtcacattggcatcctggctgttcattggaagtggtcccccaacaggtgtttctccattttcacagtgctattccagccacagtgtggaccccacactcagagagacaggtggccctagtggcctttgggggacagggtgaggatggaggtggggattgtagaaattatatcttctggctgctaaaacaaaagtgcagatccctagtaacactatgtcagcatagcagaaaacttctttttaaaggaagttgtctgtagtttgacagacctcagtcaacccttacttagtcagtgttctgttaccagaccatttactaacatttcctgcttttgcaggtttcgatttgacattgtaccgccaccactagcattttgagaaatgtgttaaatgagagatttgcatattaaagtcagatttcctgcttctaggaattctgaattattaccgagcttggagcaggttaacatattcttgtcccatatgtagttgtcatttttcttcttagtttgaactgttttgcttaagcaaaggttgtgaccttggttaaaccacttgaaaacaatttaaccttaatctccagaagcctcaatgcagggttaaattgcaccaaaacaaatgaagattgccctttaagaagtgaaattgttttatttctctcaaggatcctcttaccaacccccagagaggctctctttggattgagttggtcccaacctgccttgacttcctctgtccctgtgactgtggctgtggctttgatgcaggccaaggggagctgccattctctttatgtgcttttcatggtcattattctcaagaagccagaggatgctaagcaaggagctgaaacagcttcatgttccatgaacaatttgtggaactttgcagatgcaggggttggaacagtggggatgcaggagcctggtttgatccacccctcctcctcataccgagtccagggcctgtagccataggtcctgctgggctaaatgatactgctgcagttccagctgtgatgtttttggttccctcagaccttacgcttgagctgcatgttcagggtcagaatgtggtcagtgggcttttcacagcttccaccgcagtgggctgcggggttgaccccgagtggccttggcccgtacctcctgcaggggctgctgcgcaccctctaatggcgtgtctctctgtgtgtgtgtgtgtgtccctgccccacagcgcctgaggcctcgctgtgcccccagcaccgcacaggggccccgctgggtcagagtgaggagctgcagccactgagccagcgccaccccttcctgccgcacctggggctggcctcccgcccaaatggcgactggtcccagccctgcctcacttgtgaccgcgcagcccgaggtgggacggcggtttgcttttttccttactagaaatgctgggcagcttgctgggggtgtgcttgcca

SEQ ID NO: 85603 - DNA, 2088 bp, Homo sapiens
acagagagttagctgtactgtcaattctaggtcacggtgtttgaagatacctaattcaatgggtaactaaaaatggggcttctctttctactaattaataatgtatcctgatcagagccttacaactgtagcaggttaaactgaaaacagattttcactgtttcctacaagaaaatgctctcagtctaccattggtcccaagtgggttctctgctacagggaagaaaggtgtctgttctcttctactcttcttacaagaaggggcacgacagagagcttttgtgcgacttccctgataaggtgaccagcctttattcagccctggaaacagttacagttcattcatgcctcattaatattacagcttgtttgacttgggtatttgtgtaataactatatttaactctaggatattttccttcatgtccctgttttcccctaacagtttatacaggattttggcttcttctaaactgacattagaaaacgtaaggaaggccagctctgcactgtaaagaatgtaaatgataaaagcattcgttaaagggtcacccagaggcattggagttacatgcccatttcacccccccagatagtcagaggctgctgttctcagcaggtcccgcggaactctccatggagttccctttttgtttttcccatgttctacccatttggtaactgacaaggtctgttttgagccttggtggccaattttgtgttaccctggccctctagctctcccgctggcaaactggctttcctgggacgtttgcatgttaaatacagcctggcaggcctgcaggctggccatcttcccccactgcggctgtctttggccctgcctctgcaccttcgcctgtgccattccgttctctctgcttggatatcgctcccaccacctgccccctgttcccccaacctggcaagttgcttaaggtatccaccccgtgtggatttatgttgtccttcagccctgataggagttgaagataaaaatgagtatttttttctttgaagatttctcatgccccagatgagttttgagcaaacaagtgttatatggattgcatttcatcctttaactgttgggtgtggcatcctctccacatctcactccctccccgtcagagggtagggggctgtcggagtccagggcaaagattctggccatgtttcttctctgttctttcttgatgcttcacaaagggttgagtataaggtaagtgcttaatctatgcacaccagtggatttgtttggagcacaccttcttggaaatcagcagtgggaaggtcagaatgatgccggccattcagaaaactgtcaggtgagatgcaggctgtgattcaggagagatgtttgtgaggggtgcatttgggactgcagaccccacagaggcagaggaggcagactgctcagaagccctcttcacatgagagcagccacagccgggaaggcctcttgtgtgactggcgataatcatgaggatgtctgaggagagctttctttcatgtgccatatgtcatctcatcctccctgtgcccctccctctctctcacctcccacatagatctgtagatctgaccttggaagtctcttgaattgtccatcttgttccatggcctcaattcagtgccagccttctgaccaatttcctgctgtcattatctcccagtctcacctaccctccatcttcataaaggatgccctggtcctgagtctcagcccctttagatgccaggccctgcagggccatcccagagcctttgacgttgcagacctcagttgcttccaccagctgtgtcccctgccctcagtctgggggtcctcctgttccggcggaagcattccagaccttcccaggcctgctgacgtctgcctgcaggcacagctctgggctttccttttgaagcctggtctacctgccctctgctctgtatttattgagttcccatggggcaccaggcactgagcacagaacagagccccttgccctcgtggagcttatatggtaatgggaaagaaaaacacaatataaattattcagcatgttatgtaatgagcgctctggaaaacagcaaaacaaa

SEQ ID NO: 85604 - DNA, 1083 bp, Homo sapiens
cgacctgtgcatgcacctgtctgtgcatgcatgtaagcctccacccaacaggtgtttgtcagccaggggtgagtgctacaagggagaggtgcagaggtgcagagtctgacacagcatcaggatggaggggaaggaccaggtccgggaagccgagctctgactacaaaagaggaggtgggtgcgctgagggaacagcctgcacggagacccgggaggaggacagggcaaggaaccatctaaagcagtagctccaaatctctcagagggcaggtcttgttctgagagttttagagaagctatggacccttcctgaaacgggggcagaggtgggcacatacttctaaaactacaataatttctaaaagcatttagattccctgatcgtgaaacatcctgatggctgtgtaagccccagcacccagcaccatggtttatgttgtgaatgttaagactcccgtggggtttgttacatcagctaggagttcacatctcattcattcaataaaaactgtctttccaggagctgcttagaagtatttaaactagctaagtgcacagcaaaagtgtctgcatttttatctgcatttctttctaatcagtgtacaaagctgcttacagaacgaaaatgtttggggtcactgcagaaatgggcgggcttcattttccatgatctcgtagtaacactacgagagacaaaggtcaactctttttttttttttttttttgagacggagtctcgctctgtcactaggctggagtgcagtggcgagatcttggctcactgcaacctccatatcccgggtctctaagtgattctcctgctagctgggattataggcacacgccaccatgcccagctaatttttgtatttttagtagagatggcgtttcaccatgttggccaggatggtctcgatctcttgaccttgtgatccgcccgcctcggcctcccaaagtgtgaggattataggcgtgagccaccgcgcctggcctcaaaagtcagctcttgaatgttggtgtgcctggagtggagtctttggtctccagatgccctccacctgtttgaaggatgctctttggttc

SEQ ID NO: 85605 - DNA, 1044 bp, Homo sapiens
tcgtgcctcagcgtcccgagtagctgggatttcaggcgcgtgccaccatgcccggctaatttttgtatttttagtagagacagggtttcaccatgttggtcgggctggtctcaaacttctgacctcaagtgatctgcccacctcggcctcccaaagtgctgagagtacagtcttgggccaccgtgcctggcccccatttttctttagtaagcatgcattactttacaacagcgagaagggaaaggagcaattagagtggccttacaaattgtcaagcctttggttgcagttatcagggctgtctccaatgacctttggttaaaaaaggtagatgggaccaggggcagcacagggattcctctcctctattagaagttggtgttcagagaggaatactggggatagttagatttgagtactgacaagttcatcccggcattgtttgtgtgtctataactggcaacattctaaagctcagtgacagtgggcaatctcagttgtggcctctctgtccctgcagtgggaaacaggccaccagtaactgcccaggtggatgcatgtggcttcatggccagcagcccaggaagaaggtgcgtggtagcatccactgagaaacatagggacagacggacggtttgagcccattttagttaatatttataataaaatataagggagcaagttcaaactcccgtgctgatcagtagtggcattgtccctgtgaatagctactgtgtagcagcctgggtaataccatgagaccctatctcttaaaaacaagaaaagaaaaaatacaaggaatatattatttatatttaattattatattatataaaagcttaggacaaccctgtcttttgcatatggtgactttgccttaaataaagatagtgaatcatttctgttaggaatcatagaaatatgcagccattttccggaagcatacacagtggaggtggaatgatacgtgatttttatcttctttctaattcctttttgggttgtcagatttgtgttttataaggacacacattgcttctataa

SEQ ID NO: 85606 - DNA, 1053 bp, Homo sapiens
ttgcctgctggatgggtgaggggcagggcagtgcttcttgctgtctctcacccacttgggtctggtcgattgtggtgggtgtccaggctcctccagccctcagcagtgatatccaactggcccttgccctcctccttgaggatggtggcatggtgttccctctttgttttgagtggttttctgctttgggagaaggaaagtcaacctcccctcaacctcccatttgcatcagaaatggcttgtgccttctctgggacatgtttcaactcttgcagcctcagcgttacacccagcgtcccagctgaaggaaccaaaatacacagcatggaacatccaaatcaagctgctgtaattagatggaaattatgatgtgcttaccaccactgctgatgaaaaggggatacatttgctataattctgcttgttacttaaagcaatagaaaatccgtttaataggctaaatgaatattttaaagttttgcttaatgtgagatgtaagaggaattgtggtgggaagttcaaaatgtgagcatgacacaactggtttgatttgggtgatgatcttgggcccacgagtttcttaatcactgggcaggagcatggcccagcaggctttatgaaggcttcctggcctggtgccctgggaggcccctcctggtgtgctaaaccctactgggcgtggctgacctgtgggctgtttgggaactttgtatatcttgtggcatcttgcctgtatctcctggagtctctgtttctctcagaaccgtctcttgtgtttaactcggttccctagatgtttgctaaaatgtaccaagtgacaggctgtgttctgctgtgcatgacccctgagacaacaggtgattattgtccctgttgtctgttgtcaaggccctgctcaggagcgggcagggcaggaacacagcgtaatagcagtactgtgtagtccaggactcgatggaggttatttgagagcatcctgggatgagatgagactcagtacaggagtccaggagtgtgaggtaagcattttggaggaaggccacttccgttgag

SEQ ID NO: 85607 - DNA, 1007 bp, Homo sapiens
ttaagaatatggtttgagctaattaaaagctatctgaggatgggcacatgtggcttgttgactgccagttggccatctcttgccacttgcccagcctaggaccttcttggttctgatgcacttggcattattaccagtgacttggggaggagataggccaccaaagcccatagacattgttaataggtttgggacaggctcagtgcttatggcaccatgtcctgtagttgtcacaccatcctggactgctgcaaggcccttctgtggccctggcatgtcctggaaaagtcaccacaaattccaatatggagagatagccactgttaaaatgttagcttgtctgcttcctgtcttttttctgggcattatgtttttactcagttgaagctatattgtatatataattacgtgtgtatgtatgtgtatatttcaatttgtagtgtcatgagcatttctaggcatcattagaaattctaaacaataccacgctgtaccatcatttactaagcagcctagtgatgttcataggggtgtttttgcagttctggcactctgctttcaatagaaaaatacattaaaatcacagtgatttcttttaattctgagattcttttctcagtggtggtgttgaccagctctgcaggagaatggccctctgctagctcctgcattcactgaagcgtgttagcacaccctctgcttccacattccatcagcgtagcctcagagcaagagtgtggtattggatttattgtttagcatctagttaaatccaatagtgcaaattttcagggtcacccctccatcctgagactcattcataaattagaaagattggagtcccttcccctaacagtgttagctgtgccctctggatgaaagaaacactgttttgaaagccaccatttgtagtgagccccatcattaccagttttttccaagcagcactaggagcaacttggccaagtggccttgggaggaaatgctcagggttgaaaggagggaga

SEQ ID NO: 85608 - DNA, 1089 bp, Homo sapiens
gatggctgcctgtgacccgcatgctggctgtagtggctgtctgtttctctatctcagagggaggggccatcctggggccaggcctggggactgctgaccaaatgttgcttggatagaacaaggtgaccgtgggagaccagagcttgtctccaccacgcatctgcccactcaggcttgtaagtctgagctgggtgctcacatggggcctcatttttgaggagggcttggtgagaggtctgggtgcacccagagctcagtgtttcttatgcatcctgtctgcccatttgagtcatctcagtagcttctaaaaatccaaatgctcaggcccaccccagaatctgtgtgtatgcagaggacagcatcagtattttactaaaatccctaagagcttcccaagaagaaccatggttgagaaccactagtctggtgccccctggcccagggtgcatgaataccactcagtctaagacacttgaaagctccatgtcttagataatcaggatggagattatgggccactctaatctggttgtgtttctgagcccctgaattggacatttatccagaacctgttagaagtggtcactgaactccagtgtgcagagatgcagataaactgcaaagtccctgccagcctgaggtcctgtgggtcccttgatccttgtgacctctcttcaatccctagttagtgatggagcacaccctctgtgtgtcaggcttggatctcggggatgggcagcaaagcagacccagccgatgttctcatggagcacatgctttggcaagggggacagatgcagtctcacatgcacacaagcggcatgagtgccctgagaagggttttgagctgggtttagagtgggaactgcatggcgggctggcatagaggctgcagagtgggggctgggccttcccagcaagtgccccacatacagtatgtcaggggagccagtttgttcgagatgtgatgctgccctcagcttgacccagtggctaggaggtgaccaccaacactcagaccccctttgctgtgttgttcacctcagaagctcaaccctttgctctggcacgcacagtggctgcctctgg

SEQ ID NO: 85609 - DNA, 1057 bp, Homo sapiens
aaaaatatttaatttttgtttcttcacttttgttttttaacttgacaagatgattttgagatgactacagaagagcagagggccaagaatagccaaaacaagattgtgatttgctgtatcagatatcaagaattctcataacactgtttgtgaggataattaagaaggtgcaagtggccaggcgtggtggctcacgcctgtaatcccagcactttgggaggccaaggcgggcagatcacaaggtcaggagatcgagaccatcctggctaacacggtgaaaccccgtctctcctaaaaaatacaaaaaataagctgggtgtggtggtgggtgcctgtagtcccagctactcgggaggctgaggcaggagaatggcatgaatctgggaggtggagcttgcagttagcgatgattgcgccactgcactccagcctgggtgacagagcgagactccgtctcaaaaaaaaaaaaaaaaaaaagtgcaaggacggaaataggtaaatgtagagagcccagtaataagcccacaaagacttgacttacgacagaggaggccctgcataccatgctgcgaggagtggatggactctagtccatgctgctgggatgagtcaagaagaaggtaaccataagggacgatcggtaaaagactcaaattggcaccttataggagaggaatcatgagtgacccatgagtatatgaaaagatgcacagcctcattaaagaacagggaaatgcacatcaaaaccacaatcaaataacttttcagcccaccagattggcacacatgggaaagtaagctaatactaagcatcagagaggttatgaggcaactcctggggcggcaagactggcacccactgctggatggaacataaactcgtgccaccatgtggaaatagttgtagcattccttggtgaaggcagaggtacccatgacccagcaactcgtgtatacatgtgaacaagaacaagcagcaaaaccaaacgagtatccttcaacagaggaatcatgacttttttttcatagaatggaacaaaacaaattccagctccac

SEQ ID NO: 85610 - DNA, 1114 bp, Homo sapiens
ctacagagcctgggccgaggtgggagggctgcctggggccccttgtctgaggagggagcctggattctgtggggagataggtttgtttcagatagtccatcgaagtggggttgagctcaggagccctttgcaagccccctgtatggtggggagcttggagagaacctctttcagctgcttcctctggtcattactagaggacagggagaggttatcctgggacatcctggcctagcatgcttccttaccagggttgttggccctgggccccagctgtgtccctctttgctggcgtgggacagtacccttttgatggctgtctcacctggcacagggcatagaccctggtgtggctggcagtatccttttcccttctcaccccagctgcccagaccctctgaaggcatttctgagccctgaccctgccttccaacaggtaccaagccagctgcctccattgacccatggggggtgcccactggagccaccgtacaatctgtccccaagaactcggacccctgggcagcttcacagcagcctgcctccagtgctgggaaaagagcttctgacgcgtggggcgcagtctccaccaccaagcccgtgtctgtctctggtgagcccctcactcacccactttcctgcctggcctctgagcgcccacgggccctgcagccgctcctggctcctaggcatcagccctgttgctttgcttgcatttgctcccctcctcccccttagcctttgttcctgatccccagatcccaggtgccccagtgtgagagtgagtgagtgcgagttcccaggctttgtgcgctggtacctccctccaaattgagggggcttccacctgggtgttgagagagaagactgccctgggcccacagcctgtgggtcctgtcctcacccctggggggctgggcaggctggcctccaggcactccttctggtgacttcctacagaccctcatccaagcaaccagacccagcttgatgcacctccaccactgccagcacccctttgccttttggggtgagggtgttagaagcagtagcaggtgggcatcccacaccctgtcctgggaggccaggctccctgtctcccctcccagcgtgc

SEQ ID NO: 85611 - DNA, 2054 bp, Homo sapiens
tcctgtaccgtgaagcatcccgtcgtggcaatcacattcctaccggcctggctcagcacagcctgtgttgcctctatgggctgaattttaaaagacacaatttgctttctttttactatcaagaagttcatgtttattgtggaaaatttagtaaatggaaaatgtaagaaaaaaaaaaaaaagtaaattgcccatgcctagcttccaacccaaaatgacatcttggtattctggaggaatgagctatacacactcttttataacctgctttagtattttgataaagctttctttgcttatcattaggtattcttctgttcctgcatgctggtgtttcgttatgtggacacttgatttatctaacccagcccatgactggctgtgtgtcgtcacgtggcgctgtcaggcaggcatgtccccaggaggccatgttttgtgttaagtacacagtcttaggctctccctgccacactcaccctgccatatgtgtccttgtcttgtagccgaatctgtgacctctctgccatcccaaaacaatggaactaccagccctgacccctttgagtctcaacccctgactgtcgcctcaagcaagcccagcagtgcccggaaaacacctgagtccttcctgggccccaacgcggccctggtgaacctggactcactggtgaccaggcctgccccaccagcccagtccctcaaccctttcctggcaccaggtaggctctcatcccaggcttcatccattgcctgctgtgcctgggaatgggtgtgcagcaggcctcttgggggctcttcccactgtgtgacggggaaggggtgggactagctggaatctctagatgattacgtatgccctcgccagtgctgcatggggtggggtgtggaagccgttgtcagttatgtggggagtgtatgggtaggaaatagctcctctcctctcagttgagactaccaagcagaaactgtccctgacttggtgcccccccagttgtgagaccctcgagggaatgtcagttctaagacaggtggagtagggtgggctgctgggggtgaggaagagccagggtttggcgtgtagcattcctctctcgggaaaaatgtaacttagcccttgggtacaagccttcctccaggtcccttgcttccactcctggtgccagagtctgccccctgccctcagggctcaatgttggctgccggccaagcccccagctgttcaattgggtatccagggccattatggcctggtcccaccctcctcttcccttcctgtgtgcatgaaacccttgtgacatccagccccttggcgcccctcagcctgtagagcccttccttaagcccaggctgttacacactcagtttcccctgcctggaatgtcctccctcctcttccctaatgaaagcatcttcctcatcctttgacacctagctcagatgactcccttctaggaagtccacccagcccccttcctcacggggtttccccaaagccttgggcttcccccagggcaggaatgtgtcaccctcaggtgttcagccccaggctggccccaccatgtagggatctgaggatcttgggccaccgtccctgacagtaccttgcagaggagaattaccactgaacttacagaggctgaggttggggacccttgggcagaggtgaggtgtgtggagttactgggtcctggccaaccctgaggtcctgagatgggtgaggacatggctgcccccaggggaggtggttccctgggtggaactagattagtttccagcctcctcagccagccaggagtctgtgtctgccccaggaggccttatgcctcttctgcccagagagcccttgaaggccctgcaggagctccagtggtcatctgtgtctgtcagctcttggtgggcacctggctggaggcctgaggcagctttgttggctgcacaccagtcatggttcctgggggctgcagccaagatggaggaggtttgggcaactctgctggacatacagggccattctccaggccacacagggtagggccaggctgcatgggagagtt

SEQ ID NO: 85612 - DNA, 1614 bp, Homo sapiens
tgacggctcagcctctgcccctccttctgtctccccaggtgctcccgccacctcggcccctgttaaccctttccaggtgaaccagccccagccgctgacactgaaccagcttcgggggagcccagtcctggggaccagcacatcctttgggcctggcccaggagtggagtccatggctgtggcctcgatgacctccgcggccccacagccagctctgggggccactggttcctctctgacaccactgggccctgcaatgatgaacatggtgggcagtgtgggtatacccccatcagcagcccaggccactggcacaaccaaccctttccttctctagtgcctgggcctgggacccacccagagcacctgtgctggaggatgccgagcagggactctcgtctgtgggacgggatccaagagtttggggattaggggtattagggcttttcagctccagcttcctgatgaaagggctgtctttacagccccaaccctcagaccctcgccttccaaggcaggcccctcagcctggcctgctctcaccacctcctccaaagcactgaggtcctggcagggctcctctgaggccttggacgaggacgtggagtcatcagtgttgcccttgcccctaacctcagcccgagggtctccaggatgttgcctggcccaggacttgggacagtggccttgtctttgtcctccccaccccccagccctagggacaccccaggcagtcctgggtgtggacacgatgaagcaccggctccataagacaccttttggggaagtggttgtgcatattttatttttctttgactcgtgtgagttcaaagtaaacaccaccaccgtggacaactcttgaattaaatccactagagcgagctttaaaactaatctgagcataacccccaacgtggctctatgcttgtgtacctttgcacatattttgtttagtacagtttcatatttgagtttgcagaattatctaatagtctttttttggctaatatttttataacgtggttcttatttaactgtctagttttgatagaatttaccaggtctggctgaatgaagatgttggcacgtgtcattttagtggtttaaatcctcttatttatggttttaactctaagaaaattttaaaaggaagagatgtttggatgacaaaaaaatgccttattgaaaaactaaagcaaattctttataggaagaaaatatgggaatttgattacacatagatgatgatgtttatttaaaaaaaaaacaacagcaacaaaaaatcctagcctccagttgccttttcctttctttagctcctgtttttggtgaattactaaactgattgactttcagcctttttggctagatcctgagaggctatttttcttacgaatataccaacatcctgaaagttaaagaaaaaaatctaatgtatgaatgtgactcaccaatttttatcaactaattccttttttttattaaaggcatgcagggattaacaggacttctgtttacaatggaaatctgaaatggaagaaacatctttaaccttgtgtgtctgtgatctcctctgtcttaatccacgctcaggctaaagatggggataatgtg

SEQ ID NO: 85613 - DNA, 1512 bp, Homo sapiens
tggagacctaaaaataattctcttgtattttggagatgaagaaaaaagtcattcacctgggagggatttttaacaaacatgcactaatattacctccctcttccaaactcctactgtcctcacctcacccaccactgtaaaagtattacgtcgtgcattaaagaccagaaaagacttgcttttacccagggaggggacattcccccaatcctgtgtctgggcagcttgcctggtggatgtttctggccctttttccaccatgggaatttctcacctctagctctaagggcagctgaccacctgccagcccctctctggttccagaagattacccttcgcaccggcacaggagagatcttaaatggtctctgggctgctgggacatgcaggctctgagtggggactgcacccactcatgctgttcctgaggccgccctctccagtcccaggagccgtgtctagagttcctgaccagccaccttctgccagaactgcaggcctgcggctgggtcttaggctcccgctgccatttgggtaagccggtggctggtctcgtctgccgggggaagggtggggaggtgcaatgggatgggaggcaggatgcttgcccagaaaggtgctttccttcagacggtgcagggcctgggccagccttacaggtcagtagactagactcgactacttggggtcagtgattcttttgtaacgagtctttcatgatgtgactttgaggccccaacatgacagccactgggccaccgggacccaagaagacagccccctgccccatcttctggcacaggccatcccgagtgcatgtccctgttgcccactgcactgatcatgaagccaccggccactgccacgcatgttgcacctgtgccatcgtgctccctcctgatgggcaccgtggtggaggaagtcacccagctgtttctcagtcccagaggccggtggctggttttgaacttgtgttgactgttgatacttatttactgtataaatataatttatcatttgtaccatgatgcggtttctggctgtgtccttctcccaccccatcttcatcagtcctgtgccactggagaggtgggagatgagggagccgattcttgtggagcttggtctgcagttattgaggccaccagcctggtcctagtgcccgcgtgagctgggcatttggttgcccctgaacctcagggaaagggggtgggaggcgtgccttttgtgaggtgctgagactggtggcctgcacgggtgtgctgggggaagtgctagccactgccctttacccttctgtgtccgccctcttaatgcggccttgtcactggtggaggctgctttggatgaggtggaagtgacagtgtgccgggtccccagaggcttcctgtgctctgcctcctcttgtgtccatgctgcagaagagctgctctgggaagccactgcctgtcagctgaggcaacagagggagggagtgcgtggagctgcccagccaactgcgtgttcctgaga

SEQ ID NO: 85614 - DNA, 1784 bp, Homo sapiens
cagtggacaagcctggtcaattttcatcatagttcttcaagctgccactaccaaacaatggagatagccccaaaaggaaacctattggccagccctggtgtagtccaaccccatcttttatctgatggggaaactaggtctggagacaaaagtgatttaaccaagttcatggaaaagtcgtagagaatctaaaacgtgatgctcttcttccataccatgccgtcagcccctatggggtcccagggtaaggctgttacctgtctggaatcggaagggtgtggtgaggatggggcttgtccctggagtgtgatcaggccaacccatgcttctctccttccttccccttccagctacgtggtcctggacctgatggaaagcgacctgcaccagatcatccactcctcacagcccctcacactggaacacgtgcgctacttcctgtaccaactgctgcggggcctgaagtacatgcactcggctcaggtcatccaccgtgacctgaagccctccaacctattggtgaatgagaactgtgagctcaagattggtgactttggtatggctcgtggcctgtgcacctcgcccgctgaacatcagtacttcatgactgagtatgtggccacgcgctggtaccgtgcgcccgagctcatgctctctttgcatgagtatacacaggctattgacctctggtctgtgggctgcatctttggtgagatgctggcccggcgccagctcttcccaggcaaaaactatgtacaccagctacagctcatcatgatggtgctgggtaccccatcaccagccgtgattcaggctgtgggggctgagagggtgcgggcctatatccagagcttgccaccacgccagcctgtgccctgggagacagtgtacccaggtgccgaccgccaggccctatcactgctgggtcgcatgctgcgttttgagcccagcgctcgcatctcagcagctgctgcccttcgccaccctttcctggccaagtaccatgatcctgatgatgagcctgactgtgccccgccctttgactttgcctttgaccgcgaagccctcactcgggagcgcattaaggaggccattgtggctgaaattgaggacttccatgcaaggcgtgagggcatccgccaacagatccgcttccagccttctctacagcctgtggctagtgagcctggctgtccagatgttgaaatgcccagtccctgggctcccagtggggactgtgccatggagtctccaccaccagccccgccaccatgccccggccctgcacctgacaccattgatctgaccctgcagccacctccaccagtcagtgagcctgccccaccaaagaaagatggtgccatctcagacaatactaaggctgcccttaaagctgccctgctcaagtctttgaggagccggctcagaggtgccttgtgggcaggtcgggtgggcagaggggagacttggacttggacaaggcttcaggcttttaccttctcccctgcccaacttccccgcagatggccccagcgcacccctggaggctcctgagcctcggaagccggtgacagcccaggagcgccagcgggagcgggaggagaagcggcggaggcggcaagaacgagccaaggagcgggagaaacggcggcaggagcgggagcgaaaggaacggggggctggggcctctgggggcccctccactgaccccttggctggactagtgctcagtgacaatgacagaagcctgttggaacgctggactcgaatggcccggcccgcag

SEQ ID NO: 85615 - DNA, 1118 bp, Homo sapiens
accgcgcccagctgaggtaggttaatgcacataagcctcacaataatcctgggaagtagtgaggaactaaagcccagagaggtgaagtaacttgcccagatcccacagctaggcactcgaactctagaacgcctccctcttagcctctttcctgcctctatacgaaactgggtatgaagagcccaggtgggtgctggcaactgctccacagggggcctggtgccaatgtggacgttgttttagcaaccccactcccaccaccctccccacccccaacccagtcctttaacaaactggccacagcatcacagggtccatgcttgaggtgggcagggcaggaccagaaccttgcccattggacccttgatgatccagtctcatcttctctgctccaggttttccagaagagattcaatggctcagtaagtttcttccgcggctggaatgactacaagctgggcttcggccgtgctgatggagagtactggctgggtaaggcagggaccaggtgggctgaggggctgccccagggccaggtccttgttgaccagctgcccctcctccccagggctgcagaacatgcacctcctgacactgaagcagaagtatgagctgcgagtggacttggaggactttgagaacaacacggcctatgccaagtacgctgacttctccatctccccgaacgcggtcagcgcagaggaggatggctacaccctctttgtggcaggctttgaggatggcggggcaggtataacccgctgttagctttgggaggggctgtgaggggaaagaaggcagggctggccctgcccagtcagccccaacctccttcaggcccctccttcaacccttctggatctggaagggccacagctggctccaaacaagctcaaaccagcttgggcctcagccctggggagcagccatcctggccctgctccaggcaactctgtggtggagcagctgtttctcttcattgcagaagcacatcaacccaacatctggctcagggagggtgcccccatcccgccaggctgccacgtgatatctctcacagtcgtcattgtcaccctctcccggccagctcggggctcagttccctgcctcagcagccc

SEQ ID NO: 85616 - DNA, 1050 bp, Homo sapiens
tttgaagattatgccagtgcagaagcagacccgtgccggccagcgcaccaggttcaaggcatttgttgctatcggggactacaacggccacgtcggtctgggtgttaagtgctccaaggaggtggccaccgccatccgtggggccatcatcctggccaagctctccatcgtccccgtgcgcagaggctactgggggaacaagatcggcaagccccacactgtcccttgcaaggtgacaggctgctgcggctctgtgctggtacgcctcatccctgcacccaggggcactggcatcgtctccgcacctgtgcctaagaagctgctcatgatggctggtatcgatgactgctacacctcagcccggggctgcactgccaccctgggcaacttcaccaaggccacctttgatgccatttctaagacctacagctacctaacccccgacctctggaaggagactgtatttaccaagtctccctatcaggaattcactgaccacctcgtcaagacccacaccagagtctccgtgcagcggactcaggctccagctgtggctacaacatagggtttttatacaagaaaaataaagtgaattaagcgtgaaaacaaaacaaaaaaaagaaacacagtgaccttcaagaggacacagataattaaatgaaatttttaaaaatgcaacaacaagatgagaaaatcaacaaagagatagaatgataaaaaaaagaaagaagcggaaatttttgagctgaagaatatagcaactgaattgaaaaattcactaaaagagttcaaaagcagacctgatcaaacaaaacagtggactaaacaacaggtcatttgaatctttgagtcagggagcaaaaagaagaaaaaatgaagaaaagtgaggatagcctaagagattaatgggacatcatcaagcagatcaacatacacattaaaggcattccagaaagagaagaaagagaacttatttaaagaaataatggctgaaaacgtcccaaatctgacaaaggaagtggacatccaaattcaacaatctcaaaacaa

SEQ ID NO: 85617 - DNA, 1033 bp, Homo sapiens
ccactgtggtggccctaacctcagggtctgatgtgacctgctgaggacaatgagtgtgaaagtcttctttcctgttctctggggcacagggaaaggcatggaagtaggagccacgagctgagaggggttgggagctttgaacttggttacagaggacacgtggagtttccaaggttgggaaggaaggcaggggatcctagacagaggtgcagcagagcctgttcctaggggctggggcccgcagagtctctttacgccactgcggtgggaggggatgcagtgagatgatggcatcgagaggcgggctggcccagggtcagcgtgcgcagggccttgtgttctctgctggggcatttagttttgggaaattaactaattgggagaggaagaggggagagttatggacatgatccaaacaaataatggtgaaggtctgtgatgaagagtttgcgttgtgggagcagtgggagatacgatgatgggtgggttctgtagaaatggcaggggttgttgggcccccagggtggaaggagtttctgtcctggggcccttccctaggaagacagggcaaccattagctgagtgtagaaccaaagagaagcagctgggagtttggagaaagtgaatgccctcggagagggtggagggtgggaacagagccagatggtatcgggggaagggagactttcaagtaggagagtcaagagggctttggaggagaaggtgactccactggacatggagacgcatgcgtgttgcaggcttggccacctcttctcgttctcccacgagcctgctcctctgccttccattccatcgcaatgggtggaattccgtggcctcagccatttttgctcccagtaacctgtcctttttgtccctgtcacatcctcgactccatctttccttccctcccacatctggtcagtcacctggtcctatagcttctgcctcctcccaatcctccatgccaccacctgaattcatttctttcttccttttttttttttttttttgagatggagtctctgtt

SEQ ID NO: 85618 - DNA, 1050 bp, Homo sapiens
gctaagttttgtattttttaatagagatggggtttcaccatgttggccaggctggtctcaaactcctgaccgcaagtgatccacctgcctcggcctcccaaagtgctgggattacaggcatgagccaccacgcctgacctctgtccctatttaaaaacaaaaacaaaaaaaaaacagacaaaacctgggctcctggtgagtcagtccatcccccgacacccagaggaggaacatggttgtgcagcaccctcatgtcgcagaggttggaagctctgcagcaaagcccagtttgtgctaagcatcgtaacctggggctcagtttccacagtagcgtgggagttcccggctagacaaaggggatgttgcaaatcagtcttttcaaaacttttaggaccaagttttcccaccaggtgtgaggcatgaggctgcttctctgcacgtgttctcgctctgcagtttctcactcattgttgcaggtttcctttttattttaggtccctgcaggcttcagtgtggctgccagtgtccgggtaggaaacgctctgggtgctggagacatggagcaggcacggaagtcctctaccgtttccctgctgattacaggtgctgagacccctttacccgaggctcttggtgcagtctctgcatgcaaaacccaggctcctccacttcctgtggatcttcttgttcactgtgttgtttcttctgccgtttttaccttcagtgctctttgctgtagccttcagtgtcctgctgttaagctgtaaggatcacgtggggtacatttttactaccgaccggtgagtgctaggattttcttgaaatgtgaaatctgtgataaagaaatggttcattgagaaaatttgttctctaaaatcaggctgttcagaaacattgctgtttgaaatcatatcagtaaaaagaaaacatctcactcacacctgtaatcccagcactttgggatcacctgaggtcaggagttcaaggccagcctgaccaacatggtgaaaccctatctctactaaaaatacaaaaattagctgggtgtgg

SEQ ID NO: 85619 - DNA, 1057 bp, Homo sapiens
tggccagtgcccttctcatcaccctcatcgcactccgcagcctccacctccctccttgtgcagccttagctctgtgcccccacagagctccccacaaggccatacacgtggtcggtgtgaacagcacagaaggaagggggcggacttgagcaccttcccacatttggaagaaaaaacttaatccacagcatctgaaattaccagagctaatctttttaaaaagtacggaaataaatgactgcccagctttgatttctaaaataataatttggaacatattggcagttaataaatgatgatatgaaaacctggacatttatctttggggtgagtagtgactgacttaaagcgtggcttgttttgattcatctgtacttggcaggctcagaggtggtgagaagtcaactgatacctacagggaacttccagttcagtatgttcctttatgtggcacatttttctcaagttcaataatattttaattaaaaatacaggagttgttcaaagaatagtattgccaatgcaaagttcattgggcttgcatgatagtgcagaaaattatttagctgagtttctggtgcgattcatagtttggatttgccaattgcctagctaatgcaaatattatagaaatctaatttatttttatttttaaagtaatgtattttatgtaacacaatatgtctaaaattattgcaacgtgcaatcagtataaaatattaaggaaataatttaaattctctatattatatcttttaaactttaaattgacaaattatagttgtatacatttatggggtacagtgtggtgttttgatatatgtataaaatgtggaatgattaaattaagctaattaacatacttatcaccacttattttttatggtgagacatttgaaatttacttagttaattcaaaatgtgcagtacattgactacagtcaccctggtgtgcaattgatctcaaaacttattcttcctgtctatcagaaatttgtaccttaacaactccccattcccatgccctcccctccttgccaccagtccctgctaacca

SEQ ID NO: 85620 - DNA, 1525 bp, Homo sapiens
tgccaccatgtccggctaattttgtatttttagtagagacggggtttctccatattggtcaggctggtctctaactcccaacctcaggtgatctgcctgcctcagcctcccaaagtgctgggattacaggcatgagccaccgcgcccggcttccctgtgaattttaatggagagggctaccttatttctctagctcctgggagagtgctccctggagcacccaagccagcgctggtaggatcatcggtgttcgtgaaggagtgagtggaggggcactctgcgataagatttcttttatttattcactgtagcaatagtgtcctgaattaactttctctccactattagcacatattccttttatacatagccctttataaaaatgaaaaaaaaaatcccttttaagctgctaagttcctttttcctcccagggtgccctgaaaaccttgaaggaattttaacgaacgatgttggaaagacaggcgagcctcagtcagatcagcagatgcgccaagaagaacctttgccggaacatccacaggacggcgctaaattgtccaggaaacagctggtgctgcggcgagggcttctgctcctgggggtcttcttaatcttgctggtggggattttagtgagattctatgtcagaattcagtgacgtggtaggaaagaaagtcaggtcaagtgatgcttttgagcttacacacaattcacaggcccaccagtgacaatttactgtgagttaatgtcattcaggtgtgcccatggattttgagggctggaaatgcaaagacacatttttctataaaaagaaaaagcaactaaggttaaaagctatattgtggcccaagacactgtctgaaagatgacatgagtagtaattcaccactatctgaaccaagcaaggatcaatgtgctgactgcattggccaatggctttgatacttctgctatttttttagacacaaacccataaactaactgcttaagaattcatactgcttgaattatgtaaaatatattttacagtatatctttccttgggccttagattactattcactgggcaaatggtatttgtttttgttttaattttttttttaatagacggaagtcttgctctgtcatgcaggctggagtgcggtggtgcgatcatagctcactgcagcctcgaactcttgggcttcaagcaatcctcctgtgtcagccaccagagtagctgagactacaggggtatgccaccatgcccagctggcatttgttaatcttcatttgaggtctagatctaggcactgtggacactgaaaaacagttgggaaatctttcgagctgtggaaatccaaacaaagactgataattcctggtaggggtgtgtgcgtgacgtactgcagcctcaacctcctgggctcaagtgatcctcccacctcagcctcctgagtagctgagaccacaggcgtgtgccaccacgcctagctaattttttataccagggtctaccctttgtttcccaggctggtcttgaatt

SEQ ID NO: 85621 - DNA, 1593 bp, Homo sapiens
tagtatattcaatgtctgaggtacgaaaactgaaacagtgtagccagagttgctcagtttgcaagatcctgctctcttgctcaataaaacttgtctcagccctagtaattggtgagatcacctgtgggttctcctatgaaatatttttaaatgtaatttcacatatactaactgataactgagggttattgtttataacgtattcttaggtaaacttcataatatgcctttacttgacataatatgcctttactggacataagtgaataccccactattctctgcaaacagatctacctatcttgggaagagaagtaactgatggaatcattttgcctgatatcatcagaccagagagccagacccctcgactgatgagaccagaagaaaacacccagtatgcaatgtccaccgctggagaggtcctgacagtgaggcagctgatattctatcatggaatggctttagctcttgctgtcactttcctttcagcaggaattttcattaagagttttcaatgaccatggctaaaatggtagaattaccaccattctacaaactagaaatgataattatatgccatatgttaagtatgaaaggtgaccttgttatttggacagtttttactcttaactgtggatggaaagaatatcagggatgtttccttggttattccaaggaattgcactatcctattggagatcaagaaaggggctataattttaagtaaagttttccctgttaattttatcatggtttctaaatatacaaattagattttccttgatgtaaaggttacttactctttcttatttcaaacatctttcttctcctggggagtggttcatagtcctgtaaaatattattgctgatctattttctttgtatttctctatgaatgtacttaatcttgtcagtgagtgtatattaagtgcttgttcaagtcctatctcaggtattgccatataagcttttataaaatggaacctcttaaaatttacaatgtatgctgacaatatttggagctatacagtcaatacaaaagattaacttttagcatttttgccttttaattaattttgtggcaactttcatttaaagtagaaaataaagtagaaaataaagagctgtgttctcttctgctactcagctcccagaatgctggcagctatggtggcctcatcctcaaagcaaaagagttttagtcttttataggaaattagaccagcccaaaaagaaaatccttaaaaaaatctgaatattgggtattctctcacacaaagcccaccagattcccaggagaggagcccacagtggaaagcacccaatgtcaccagtgcttcccttagcttatttgtctccctctcttgagtgttaacaagcaacccagtattatcagattatttgtgaaaatccaattataggagaaagcaaccagaaaaaaaataggcattatagggagaaaacttacatcttcaaagaggtaacgcaaaatatttcaactatgatatagaataggatgctatagaataaaacattcagtcaggtatggtggtacacacttctaatcccggcactttgggaggctgaggc

SEQ ID NO: 85622 - DNA, 1641 bp, Homo sapiens
ctcctgaccttgtgatccgcccgcctcagcctcccaaagtgctgggattatagacgtgagccaccgtgcctggcctatcatcttgtttttactttttatctgcattacatgtgtagcaaggctttgctctgggtttgtgatttttcccttccccacaatcccctcaatcaaagattattttaataagtcgtaatagtggtagtactagtagcaactatgaaatttcttttagagtacttttggtggaaaggggctgtgatattaaataaacaagatggggtaattaagattccaaaaagtctgtgtcatttaatcatacttgaagaactaaatgtttgtgtgagtatgtgtgtatataggatgactcaagaaatacaataagttccctgtcctcaagagttttaaacttgactgggaaacagaacatacacagatgaaatgtgagtgatagttataaaccagtgtgttaaggatgaatattaagatgcaggtcaaaagcatgattgctgtaatatataaagtgtgttcagagcagacctttattgctcaaggaaatcttcctgaaagaggtaatatttaagcctggcttttaaagggtgtggattactaaagaaggatttactaatggtattcgactagtgttactactccctgaaataatctttgatttttttaaaagaaatatattagagaattagcaagcccttaccaggggcgtgaagggtgcaaaaggagtctgaatggcaaacagctagtctgataatgccagttgttgtcactacaggtgtacctggtgtgagtgttctgacattcagggccaagtgtatcatacttactctgcaagattaactgtgattctcttataacagagtgaattcaatgtgtacagtcaggaagtcattactgtccttggggaaattgattttatgcttgagaatcttcctgaatgggttactgctaaaccagttaagaagaacgtgctcaccatgctggatgaggcctatattcagccacagcctctgggagtggtgctgataatcggagcttggaattaccccttcgttctcaccattcagccactgataggagccatcgctgcaggtctggtgccaccttatgtctatatacctttttagggaggcttattttctcatattaattggaaattaaggatagtggctaattaaatacatttacttggtgatttgcctttgtttacaccaccagtgtactgagaattcatacataccatacatatttttaaatgggctgctgaggagatttgtgtggctatgttttgaagcacctggggaatgaacctgtgggagtgtaaagatgtgtgagtcagcaggcccaggagtttggagtcaggcatccatgttctaatatggtttcagttgctggctctggcttcggatgaaccatttgattctgtctgaccagtttcttcattcaaataaagactatgagagtaatgctagcttgggtatatagcaaatgccaggagattaatttctcactttgcaggatccagatagagagatgtatgttgaaatggctcacttgcccaataattccagggcagagaggacaatctaagggcagaagtgggagaaaagcgatagaaagctggaggagtgg

SEQ ID NO: 85623 - DNA, 1042 bp, Homo sapiens
aagacatgcatgacctgtcctgtgggagccactcttcaccagaggcacttctgcacacacccgcgtctcatgcattttccctggtcaaattcaaccatttgttctccttagtgtctttgttgctgagctcatgtaaaaaaacactggagtctccagattagttctatgtgggttcatgcttcccagatgccatcggactgtgtgttctcctcttgtccttggtcagttccctctcccatccctcacagggactggtcttgacactctctgggttttactgaatgttacatgtttatgttgaagagattgctgatgttagacgttaggatttatttggcagtgcaagagtttgtgtttctctttctttgaggatctctatattgttattaatggtggtgttgaggaaaccacggagctcctgaagcagcgatttgaccacattttctatacgggaaacactgcggttggcaaaattgtcatggaagctgctgccaagcatctgacccctgtgactcttgaactgggagggaaaagtccatgttatattgataaagattgtgacctggacattgtttgcaggtgagtctggctctctgattttctgaggttttcccagcacaatggagacttttcctgacaatgttactctttgtacttgaaccccataccttatggctccaagatacattattaagctttggtggttgatgtcctcaagagtaacaggagtctttcactgtctcttggcgccactgtcaaaaatggtgagctgtaagtcctgacatcatgtggttgtccttaggaattttaaaaaagttatatctgttctcaagattacagctagatctagcaagaaattttaacgttcttctggccagtgatctgtgaagtacataatccaaagtattgtgtgtgcctaataaaatctttaaatgcccatttgagagggtattatgctgatatcttaactgagatcctttgtgggcaaaacaagtgttcctcattttttaactgtgaataacatcttgcatctgaaaattag

SEQ ID NO: 85624 - DNA, 1022 bp, Homo sapiens
agggctccacaaagaggaggatggccttggaggctggctgacatcctgctttatacctgaacatcttgcaggcagagccaaaagccacaaccaggagagtctgtaccgaactctggtcatccaggactttcctttggctggactggaagaggggaaaggacattgggaggctgtttctcctcttttcctgcagcaggcaatggcttcactgtttaccaagtactgtttgccgtgagctggcctgagaacttccctgctatgtaaaatattccacctcatttggaaaatactttctaagttccaaacaactgatttagaaatgagtttttaacttttttataaaaattgccagataaatatatgaatctattttagttgcaagacattcaaacaacacaatgtaacaaatgaatatttgactgaattactgaattatatagctgttctggatgttttcccctcagacgcataacctggggaaaatacatgaattgtggccaaacctgcattgcacccgactatattctctgtgaagcatccctccaaaatcaaattgtatggaagattaaggaaacagtgaaggtttgtattaaaaacatctgattccactgattttaataagataaggagtcaaattaactattcgcaggcagcatccccatttgtttctcccttcaggaaaatttcaaaatcatatgtgactcagtgaacttattgactaatatgaaaatgctatgtgtaccatagaatatatgctgggagcaaggttgcattggtgttaaatctacttaaactgtctagttgatttgttgatgattagttgtggcatatactttttttaaaaaagttaaataatcgtgtgtccgtggttttgagggaatgttgccaaccctttaggtataatcagagagactctttggcatattggccattgctgctgaaggttatcagtttttgtgtatgtagagggcctagggtggccagtagtttggaggagtgacttaattaaataactacttaca

SEQ ID NO: 85625 - DNA, 1049 bp, Homo sapiens
cacagtggctcactcctgtaatcccagcactttggaaggccaaggcagacagatcacttgaggccaggaattcaagaccagctgggcaacgtagcaaaatcttgtcgctacaagaaatacaaaaattcaggtgtaccggcgtgtacgtgtggtcccagctacttggcaggctgaggtaggaggatcgcttgatcctcctgggaggcggaggctgcagtgagccaagaatgtgccactggactccagcctgggtgacagagtgagaccctgtctcaaaaaaaaaaaaaaaagagaaaattatgtaccaggaagttcaggacaatagttcactatgtgttccaggcagagtaacttgggggatgaggtgctagggtcttgacatggaaattggactatcatttttagtcataggactaaaaatggatccagatgagcacatgaagggagagttgcccagattcagggtatgtgggaagagagagtggttaaagatacttgtgagattgaaaatatttgggaattggagaatgcttagttgagtgtggtgatgaattcaatttcaaaggaataagggcctctgcctccctttgaggcatttatactcttaacacagtggttctcaagctacatgttaccctagtgagccatttaaaaacaagtttgcaagccttaccctccaaagattcagctcgtctgaggcctccaggtgattctatgatgcattcagcattgaaaactactgttggtgactctcgagtcagagcccaggcacatgcattttagcaagctgcaccagtgattccgaccacccagacttgagaattgctcttggtagaggttggatgaacaatgttcattttgatttgggatgaaattgggaactctcacaaggctttgaagtgatgcagcaattcagtaattttgtttgttttactaagtaaatattgattgtatgattattgacgttcttttaccttggtaatttaccaaagctgtattttgatccttcgggtggtttcaccatcatgtgtaagtggtggaaataccag

SEQ ID NO: 85626 - DNA, 1108 bp, Homo sapiens
ttggcaaatggtttctgtaaagggctagatggtaaatatttcaggctttgcagatgttagggtctctgctgtaactaccgaacttactgtagggggaaagcaggcacagccaatgtgctaacaaataggcaactctgatgcagagcaagacttctttccccagcctgctcccactgtcagccccaggaggtgaaggcctgtgggtggactctaagagatccataagaacctttggaactatggacaatgacagatctctgtgtgtgtgcatgctttattttctggtcctcgacctgccaaaaagctgaaacttgctactatcatactactgttaaattacttgaggggtggggtgttagattctgtgaggatataaaaccagattgattttggggcatggctggattttgtacttactgaaattgaattgtgggtctttgtgacatttatatactcctgttgttttaaataggaattttatggagaaaatataaaagagtctcctgattatgaaaggatcatcaatcttcgtcattttaagaggatactaagtttgcttgaaggacaaaagatagcttttggtggggagactgatgaggccacacgctacataggtaatggaaattctccttttcctatgggaagatggcaatttggcagtttttgctgacactacttattaacactagataaactattaaatatatagcatttaattgttaaagtactaaatcctgctttctggtatactgtacctgtagcttttgttataaactatttaaaatgtctgtgtttctgtgtattgaatgatgccaccagcgttgctccagttgttcatatttacacataactccttttttcctcctaacaatcctgagaagcagaatagaacttgatgtaattatctgtagtttgtggatgggaaaacagcacaaagaaggaaatagcttggccactattccacaattaaccagtgacggtaccattccagaaataatgttttggtccatcatgcttgaccttattatttgtgtaccttctttgtgctttttcttctttgccttgaatatgtattactttgaatgttaagcacatttttctacagtaa

SEQ ID NO: 85627 - DNA, 1013 bp, Homo sapiens
tcctgggtattgtagccgctgtgcttgtcaaggtgagtccctataacccatgagtgccattcagtctggtcctggcctgatggctgccagatgcatattctagcaggactctacattaacttgtagagtctaagacagggtcagtgaaccacagcctgctggccagctacccgtttttgtcactgaagttattggaacacagccacacccacttgtttaatcatccacagctgctttcatgggacagtgacagagctgagtagttgcaacagaggctgaatggccctcagagcctaaattattacagaaaagtttgctgatctctggtctaagagattaaaacagcgtagaacttgattgcagaattctgagctgtctgatcaaagggttagccctttgatccttttggtattggactttccttgtcacttacagctttgttcttgaatgtgcatgaaatcagcttaccacagaggtgaaggcaagaactctggtacaacagctttggtgagggatattttattaggcttgagtttttttcctccaaagttcactacctgataaagtttatctttggtgattagtcattatagggatgggcttgcaaagaggccctcatgatagctgccttctcaaagcagtttgcgtattttgagatgaaagaggaaatccgtaattaaagttaagatggaatgaggaaggcaattgtgtctgtggtgccctcagccgttcaactgaggatataacattgaaaatattgaccatatcagtgaagaatgggcttggaaaaggcaatggtaatagttgtgtttatgttttgtttaaaatttgaaagggggccggcgcagtggctcacacctgtaatcctagcacttcgggaggctgaggcaggggaatcacgaggtcaggagttcaagaccagcctgaccaatatggtgaaaccctgtctctactaaaaatacaaaaattagccaggcatggtggcacgcacctgtagtcccagctactcggga

SEQ ID NO: 85628 - DNA, 1071 bp, Homo sapiens
aaattagctagatgtggtggcatgagcctgtgttcccagctgcttaggaggctgaagcaggaggattgattgagcctgcgaggccaaggctgcagcaggctgtgattgcaccactgcacttcagcttgggcaacagagcaagaccctgtctccgaaacaaataaaaaatactgtaataaaagtacttataaacatactaatcctctttcaggaccctaaagttgcaggttagtaggtcttcaaggacaaatctgtaagtttcttatttctgtagtgcaagtaaaatttcactttttgaaactatagagagatccctttctgattagcctacagaacttaaagtgagggaaccatttcctctcacagacaaagaggcctgggatattaggactttggggtttgagagcatcatggggcagacagatggtggatggtctggacaagaagcgagtaagccactgcggttggtcatactgaagggaattgatggcaagaggatcccctgagcaagtcagaagttactctcatcagtcgttcatggtcacaacctgaggtactctgctgagtgggcaaggctgaagaagaggcctgtggaatgcagcattacctgctggacagagcagggcaggcagttctatgccttggagctcctgactgcagggactctgtccccacactcaaaaagactcagctcactcaatgagagaatgtgatttactttatagaacgtataatcaactttgttgaataatttgttctattaaggctgtctaaagtatgtgatgtcttcatcatagtatgaagtgttgaaaattaataacgagcctagtttaggaaaaagctgcttaaaactgtggctctaagagagtaatcataaaataccttagataaaattgcactatggaattttcattgagtatgtttaaattattggcttgtctactaatacacatctgcttcaaaatgaacatatttcataaaattggcatcaattttaatgacgctcctggtatggaacctcagatataccctattggagacaatcctttgatcataaattctccccaacta

SEQ ID NO: 85629 - DNA, 1846 bp, Homo sapiens
taccaggatgttattacttatcacatacaagcccaataatctggttttttaggcagaggtggtggactggttggagtgtatgtggtcctgctacattttgagtagccacaggaggatggcagttctaagagtatttgcagttatgagcaagctagttatgtagcaagctagctgatgtgcttacctaaattttaccactttgcagcactaagctagaagtcatatctaaactattaccaagcagaaagaagaaaacatattcagaactgttaactttggggcaaagatagaatagagatgacaatatagtgatttttttcattagttcttcatttttgttattttatttctagataaatgtagtattgagagaagactgtcggcgctctgccatagcaccgcaaccgtgtgagcagcaggctcatcccgtggaccggtggtgggaacgtgaggtgatgcctttgggattacagcttgagttctgtcaccccatccccaggaaactgtagcttcttaactggtgactaccaaagaacaagcagtgatttgaaaaaggaaaaacaatccaaaaactacatatttgtaggaaatctgccttattggagaaaatcaccctttccctttttctttgtagaagcaggagcaagagtgtttggctcccagtttggacttggtgaataaatgtaccttagaactaggataatcggtacagttattcttaaagataattaaaaatgaaacaaagtgagtgctcgtcactgggttcatcagagcagtgtgtgaaattccatgtgtttgctgaggtgtaaaggtaaatgtattcacccctcatccaggcagtttgatatttggagtaagtttgtttaaatctgagcatgcatctttaaacagctcaggaagaaatagcttaagaagaagtgaaacatggatcttggaagaaattttgaaatcttcaatttgatcctaatatggatacatgttaatcttccaaaatctttcatattgcactaatttattaaaacaactgtgtattggattttgtaatttaactaaggcacaatggacttgtttaaaatattttacttgattgtatacatagaccctttccagaattcacatgtaatctccagtgaacttttaagtggttaaaacttgtattcatgtgaacctttgcacattttttttttttacttctttatctacacctacagattttctcagtaatgtttttgttagcttttggttccattttttattgtgcatgcagaatgtacattgatgcctgtgaccttaggtttattaaaggctaggtttatttgggcagtattagaaacaaaatcatggatcaagagatactcttgataatttgaatagggccaaaacaaagttggtgacctaaaggcttgttagtgatgtggagttcctacatgcagtgagtggaaaatgaagttcgttttctcttaggaaaatgggcagctgtcttctgcctaatgtgtatttttcatgttaattctgacagttcaccaaatagctagtcatggagaatgcaggcagttaacttaatatccctccaggaatggttcctacgttgtgtattacttggtttcttttacttacctgcttgaatacttgaataaaccattcaccaattttaatccttttattttaatccttttacataaaataatctgaactctttgacaaattgcacagagctctttggcattaatctaattttaatgtactgataaaaacaaacatggttttcctttactttgacaaagtaatgtaatttttaccttatttatctgtatgaaattccagtagttaatttgaacatttattt

SEQ ID NO: 85630 - DNA, 1032 bp, Homo sapiens
tatgcacgtaatcagggattctgacataaggagaatcactgtgccccacagtaccctcagagagacctaaatctcagagcacccaatagagtggagggaggaaatagcactttgacttctggtaactaattctacatatatgtatgtcatggacatagtctacatatacaggcctctcctgtgtatgaaattgcatttacacaaagttgttaactgttacgataccaaaggatgaaaaataagccaagtggccactggtaatgaactaatttattaggatccatctctgataatggaatattacacaccttccattccacaaagagtgaaggagttccctctgtgccaagatagaaagatttccaagttatattataaaatgaaaaaagtaaagtgattaacagtatattgtacagtggttctcaaagtttagtctgtggatcccttcagagggtccatgaggtcaaaactattttcataataaaaattagacgttatttgcttttttcattacattgatacatgcactgatagtacaaaatgcaaagatggataaagctattggtacctttgcctgaatcagggtggtggtacccaaacagtactattagtctttgtattcttctccactacacacttgcagtacaaaagaatgtccttaatgaggcagtaaaaattaatatttttctttgaaaaaatctttgagtgagatgtacacataaagcacttttgccacatattagagtagttatcttaggaaaagcattgtatgattgttctagttccaagttgagctagctgctttgtcatagaataccctttttaccttaaaaaatggctgataaactatggttatgggtatcaagcagctattttgtcaaaaatggtaagtctttccactttgaagaaaacaagtgatgataaaacttgagcttttaagcaaaaattggaatgttggaaaaattcagtggtgaatacaagtttgacagcttctgttataccttgacaggtgtttcttttaaaattgagggt

SEQ ID NO: 85631 - DNA, 1098 bp, Homo sapiens
atttggctcctttgtatttctttaatatctttttcttttcttttctttcttttttttttttttttgagacagagtcttgttctgttgccaggctggagtgtaatggcacgatcttggctcactgcaacatccacctcccagtttcaagccattctcctgcctcagcctctcaggtagctaggactacaggcaggctaccacaccggccaatttttgtatttttagtggagacgggatttcaccatgttgttcaggctggtcttgaactcctgacctcaagtgatccacctgccttggcctcccaaagtgctgggattacaggtgtgagacaccgtgcccagcctgtttaatatctttttgtaattcttattctttgaattgtgtactgctattaattcattttcctgttgcttgttgttttcatatcggatgttaggaagttgtattagttctcacttgtatttaagtgctgcccttttccagacagaaatggaggtggctactttgtaatagagaacattataacaactattagtgcaagattgaagctatgctaaaagtcaacattgggcttttgaggtgccttactcctgcagatactcaaaacaacagcaagcacaatacaggaatcttctcaatttgatgctgtttctcaaaggcaatttagtgctttttttccttctttttttttttttcagatggagtcttgctctgtcgcccagcctggagtgcagtggcatgatctcggctcactgcaagctccacctcccgggtttatgccattctcctgcctcagcctcccaagtagctgggactacaggtgcccgccaccacgcccagctaattttttttttctatttttagtagagatggggtttcaccgtgttagtcaggatggtctcgatctcctgacctcatgatccacctgtctcggcctcccaaagtgctgggattacaggcgtgaaccacagcacccggcttttttcccttctttagatgactcttacatggtcttcgtggtataaatgtattggtatttgtgaaaccgcatacacgttttagtttactatatggaaggcaaaagttaatgtttatgta

SEQ ID NO: 85632 - DNA, 1103 bp, Homo sapiens
gaaaccctgtctctactaaaaatacaaaacattagccgggtgtggtggtgggcacctgtagtcccagctactagggaggctgaggcagaggaaggatgtgaacccaggaggcggagcttgcagtaagccaagatcgtgccactgcactacagtctgggcgacagagtgagactccgtctcaaaaaaaaaaagaattttggccgggtgcggtggcacatgcctgtagtcccagcactttgggagaccaaagtgggcggattacctgaggtcaggagttcaagaccagtccggccaatatggcgaaaccctgtctcttactaaaaaaaatacaaaaattagccaggtgtggtggcgggcacctggggaggctgaggcagggagaaatgcttgaaccggggaggcagaggttgcagtaagccaagatcgtgccactgcactccagagcaagactctttctcaaaaaaaaaaaaaaaagaattttgcatggggaaggagagatactgttcaccatctggaatggtgcttggatgtggcacttacaaaatcaggagccagcactgcatggacaaacagaagcatgtgggcctgagatagcaggtaccttgataaccctgaagacatccttggtttctgcatctattcctgcatccttgcattggactacattaatctgtcagttatccttataatgatttttgattttttttttttgagatggagtttcgctcttgttgcccaggctggagtgcaatggcacgatctcggctcaccacaacctccacctcccaggttcaagtgattctgctgcctcagcctcctgagtaactgggattacaggcatgcgccaccacacctggctaattttgtatttttagtagagacggggtttctccatgttggtcaggctggtctcgaactcccaacctcaggtgatcaccctgtctcggcctcccaaagtgctgggattacaggcgtaagccatggtacccggtctgttttttgattttttgaaaccagtctgaagtgagtttttttaattacgtgaaaggagtttggctaaaatactgccatactgccctaatgcctaatgattatgtattctc

SEQ ID NO: 85633 - DNA, 1024 bp, Homo sapiens
actttttttttttttaaataaggtgagcaggatgactggggagagagaaacatttgactttgactgcctcccccattctttgctgtgagctggaaagtgtgcagttggtcgtctttcttctcctttctttaggatagtaagagactcactcactgcacttctgctcagttggcttctgcatcgggatcacacagccatcagcaggactgcccagttggtgagcacactccattgaccacgtggcgccagcgcttcctcaatgcacatgattgagaggaaagaaagttctcttagatgttactgcttttgctcagactttgcaaaaaaaaaaatatatatatatatgtataaatatataattattaatcacttttgtccttgagaaagtcttgaatgaacagagaatttattccattgcaatatttgattgtatagaggcacactgtttcatcgacagaagaagcaaaaaggctttgtgtaagtttttggtactatgtaccacctctgttattcttttaaagctgaagtattcatgtacttaaaccatattatatttaattgtgtttgattttaaaatatatatatatgaattctatttaaaattgtgtcaactttctgctttcagggcatttatggctcttctgttgaaatatattgatctttccaaatattttcatttgctttctaaaaacccagaacatgagccactactggactttgccttgtgtttgaagtgtatggcataaacccaaggtttttattagtcatctatgctgtgattaattcattttgttcttttaacaaaatatttccatccacttcacattgcttcaatctttaacagaaaagcaatataaaggttatagaataaaatgtggttttgggcaactcttgctgcctctgcatgttttggaataacaatttctacaagactctaggctgtttaaactagtgctttcagttaagataaattctaatcatttctttgtatatacattttgtgcttctgagctagagatgccaa

SEQ ID NO: 85634 - DNA, 1016 bp, Homo sapiens
agtgaatgtctgcatgtgtgtctttaccatccctcttgaatatgctctagggttaattcctagaagtagaattactctattgaaaattggcaatatttttcattctaatatctattgccaacatgggaaagcaagtctggatgccagtccttgttatatgccccttgggtaagttacgtaacctctttaagcttctgttcactcatattttaacaaggaaaattacaatattttacctcacaaaattgtagtcagcttctggctgtcttaaactctggtatatagtaaacactaagtgttggtgtccatccttaatttgtaataataggtcacttgttagagaaatgcaccttaccattttcttttcttttcttttttcagttatgactcaaaacttgagataaaggaaatctgcttgtgaaaaataagagaacttttttcccttggttggattcttcaacacagccaatgaaaacagcactatatttctgatctgtcactgttgtttccaggagagaatgggagacaatcctagacttccaccataatgcagttacctgtaggcataattgatgcacatgatgttcacacagtgagagtcttaaagatacaaaatggtattgtttacattactagaaaattattagttttccaatggcaataacccatttatgagagtgttttagcctactggaatagacagggaccacatcctctgggaagcagataagcatagaactgatacttgatgcacactcgtagtggtaactcatccctaatcagcattgtaaagcaggtgccagaggtggtttgctttgtccttccaaagcaggtgagtcagccccaccgagagccaggcagctttgagtggcagcgtggtgctagcagcttcagcggaacagggtgagagttaattatgcagtcttcttgacagcggcattaatttggaaggaaactgacaagtcatgggtcaagtttcagtgacttcctccttcctctgatggcagtatatagtt

SEQ ID NO: 85635 - DNA, 1032 bp, Homo sapiens
atattggacaatgggcaatacagggaaaccatggaaaccaaacagagcccagtagtcttgctgaacgaaagagttaaatatcaaagttcaggccaggtgcagtggctcacgcctgtaatcccagcactttgggaggccaaggcgggtgaatcacttgaggtcaggagttcaagaccagcctggccaacatggtgaaaccctgtcttagccgggtgtggtggcaggcacctgtaatcccaactatttgggaggctgaggcaggagaatcgcttgaaccagggaggcggaggttgcagtgagccgagatcacaccactgcactccagcctgggcgacgagcgaaaccccatttcaaaaaaaaaatcaaagttcagagagctcaatttgagtagaagttgtaggataaggtagcagaaaagaggaagctgcccagaaagaaagccgtagagatatttagagagattcccatggatccttggcctaggagtgatctgtatatgtgtggggtgaaaacgcatgtgtccaggtagagaaccccccagaaattagtaggctgaatgattgctggaacatagggctaagaaaagttcatggccagaaggatctggccagagtagagagacttagtaatacacaaggcattgggtagtgtcttcacagaggttatgccttactactgaagataaattagtcctagagtacaagcacctgaaccaagtttcaaagcaaatttttaaagggtcaaattacctaacaactgcatgccaaaacaaaggcctaaccctctttacagtaacacaacaaaattcagcacttcacagtgtaaagttagaatgtctgacgtccaggctgggcgcagtggctcatgcctgtaatcccagcactttgggaggccgaggcaggtagatgacctgaggtcaggagttcaagaccagcctggctaacatggtgcaaccccgtctctattaaaaatacaaaaacttagccaggcatggtggccggcacctgtgatcccggctacttgggaggctga

SEQ ID NO: 85636 - DNA, 1093 bp, Homo sapiens
agaaggtgagtgagttgggaggtcaccagagaccatggcaaggacttgaaagtgtcagggacacattggaagttggagcagggaaatgatgggatttatgttttgtttttgttttatgtttagtgtttttaagggattgctctatcagctatttggaaaatttagtgtagggcttcaagaagagaagcagagaaacaacattcttgccatagtcatagtctaagtaagggatgatggtggtgtggattaggctggtagtggaagaccagtccagttcgggttgtatttgaaggtagaggcaaaaagattatatttctaccagcaagcccatctatgaagttacttgtattattaatttaattgagacatgcccacataaactaataaataggaatttctgcagtttggttaaacacccctgtatatcctggttcttcttttagttgtccagatgtctctttaagtcaagtattttttggtggtgtaggagcctagagattgaatttattcacccaaaaggcatttgagtgattactatgtgccaggcactatgctgaatgccaaggatgtaaataagagggcgtagtctcagtctgttttactccagcttggttcctttttaatgaccctgacttgttaagcatatcagttatcctacagaatgtttaatcttctgtactttcctggttgtgttatttagcttatttctctttccttgacatttcttgtaaactggaagttacacctatagtcttgatgattcgtgttacacattttagattagaacacatcatgtgttgtatatggtgtttttgaaagcctctctgtatattggtctgtacattaaaatgttgcctgaatggatacacataaaatttaacagtgattacattagagatgagaagaaagaggtgccttttacttttcaatataccttttcctctgctttttgaactttcttgccctatgcatacgttattgcttaatcatccacctcatctcttcccctgtggctttctgttgcatttggaatgaaatctagcctctttgctgttacctgtggatgtcccttgctggcctctatcaccttact

SEQ ID NO: 85637 - DNA, 1053 bp, Homo sapiens
tggatgaagctggaaaccatcattctgagcaaactgtctcaaggatagaaaaccaaacaccgcatgctctcactcataggtgggaattgaacaatgagaacacttggacacagggtggggaacatcacacgctggggcctgtcgtggggtggggggctgggggaggaatagcattaggagatatacctaatataaatgacgagttaatgggtgcagcacaccaacatggtacatgtatacatatgtaacaaagctgcacgttgtgcacatgtaccctagaacttaaagtataataaatttaaaaaaaataaatatatgtggaaaatattaataggtcaaaattcaaattgttcatttaatcagaagagtagtttagtcaaatccaagggttagacaacagaaatcttttttgtcaagtgcattctttgtgactgatttcattttcttcctggtttacacaggaagatttcagaaacaaatgtggatccgtgacagatggtatctagaagtttttagtttggttgaattgacagtattttattgagtaaaagatactaatttttgtaagaagaaaaattcaattttgataagtatgtttaagattaagagctattggccaggcgctgtggctcatgcctgtaatcctagcactttgggaagctggagcaggtgggtcacgaggtcaagagattgagaccatcctggccaacatggtgaaaccctgtctctactaaattagccaggcgtggtggcacatgcctgtgcacccgcctccgggtttaagcgatcctactgcctcaggctcctgagtagctgggattacaggcgccatggctaatttttgcatttttagtagagacagggtttcactacattggccaggctggtctggtctcaaactcctgacctcaggtgatctgcccgccttagcctcccaaagtgctgggattacaggcatgattcaccatgtctggccatttatcttattttcttttttttttttttttttgtttgagacggagtcttgctgtgtcgcccagagctggagtgcaa

SEQ ID NO: 85638 - DNA, 1044 bp, Homo sapiens
agagcaaggcctaccttttgggtgcttcttttacaaaattgtcttggctattcttgtgccttttttcttatttgtgaattttagaattgtgaattacctgttgactcaccatgttttgtaaactgaggattttgaatggaattgcactcaattaaagattatcttgctttctgtgcagcaatgttttatttcaaataatccctactttaaattacttaggatagctataaattgtgtttctggctttctagatttagatgaaacgctttaaattgattgttttctcctaaatttaaaactgattgttagaagttaaagtcttctgttcattcttatttaggaagatgacatttggaagagtcagtgacttggggcaattcatccgagaatctgagcctgaacctgatgtaaggaaatcaaaaggtttgtggtgtttttatacttcatattaagcctttactcacattagtgattgactgtaagtcaaagaccacttaaggtttaaactgtttattttgtaaagtaaccactgtatctttcaccttgtgtttatagtcagaagtaagtacaagggcttcctgtagtcacatctttatgcaatctcctctgaatcaaaagttagtgaacttgctttgccactccagaaggcacatgaatatgaaaaagcattgtctattttcttatttaatggcaaaatacccgacctaagttggacttaatgtttgagaccgtttattttattaaattatattttttctcttttcttttttttttttgagacagttcttgctctgtcacccagaccggagtgcagtggtctgaccgcacctcactgcaacctctgcttcctaggttcaagcgattttcctgcctcatcctcctgagtagctgggactacaagtgcgcaccaccacacctggctaatttttgtatttttagcagagatgaggtttcaccacgttggctaggctggtctcatactcctgacctcaagcaatccatccgccttggcttcccaaagtgctgggattacaagtgtgagcc

SEQ ID NO: 85639 - DNA, 1001 bp, Homo sapiens
actcttggcctcaagtgatcggcctgcctcagcctcccaaagtgctgggatccttgtattgggtaaaagatgaatattgagggctgcatggtggctcatacctgtaatcccagcactttctgagactgaggtgggaggagtcctggagcccaggagggtgaggctgcagtgagttgtgatcgcgccattgcacttcaacctaggaattataggcttcagtcactgtgcccggcatgtacattttaatattgtgctttcctcttttagctatagtatgaggttacatttcagagtcattgttgttaagcatcttaatagtgatgaggttgagtgaaagttacttctatttcaaacactgaagaaaattttgtacaaatctgtcacattccaagcccaggactgattgtttcatatacttctaattttacaatttctattgtagtccagtgtgaaaaaagccagtattaaaatactgaaaaattttgatgaagcgataattgtggatgcggcaagtctggatccagaatctttatatcaacggacatatgccgggtaagcttagctcatgcctagaatttttacaagtgtaaataactttgcatcttttaaattttttaattaaattttacatttttttctaatctattattatatgcccagaactttcacttagagtgtgcagtataatgtggtggttaagtataaaggctctggagtgacttcctgggttttaatcttggctctgccatttattggcagccgctaacctcttggtatctcagtttcttcatctgtaaaatgagaataataaagtgaaaagatgccaacatcatttactctgggctgcataactgatacttggaaaaagtattcctttgagtttaagaattaagttggttattcattttagcttgtaataaaaagatagtgattcataggatatgccacttactgaaatttaccacagatccaatcataaaatcactttctcttccctaaag

SEQ ID NO: 85640 - DNA, 1006 bp, Homo sapiens
gtcaagaactaaggatggttggcaggcagatagaaaggtagcaagttgacccaactatctctggggaagtgggaacaaagaaaggttacatcagcactgtcatcacatagctctatagttctaggcctgcaggctcaatcaagtagccttgtataagattctctggaggaggtgctgaaagttgcttatacttgctatggaatttgattttacttcggatatctttttaccataggtacttctccctccaagccacacatcctcttggatttgatgatgttgtacgattagaaattgaatccaatatctgcagggaaggtgggccactccccaactgtttcacaactccattacgtcaggcctggacaaccatggagaaggtaacccagaacttcaaacgtatcaaactacaagaagttttattggtagaactcataaaatataaggtgggaaaaccaagcagaatagcacagtggaaattgaagcagtccagcaaagtgattaagagcagaggccttgagtctggcctggtatgtacagtcacgtgccacataacattttagtcaacagtggactgcgtgtacgatggtcctgtacgattataatggatcaaagctggtagtgcaataataacaaaagttagaaaaaataaattttaataagtaaaaaagaaaaaagaaaaactaaaaagataaaagaataaccaagaacaaaacaaaaaaaattataatggagctgaaaaatctctgttgcctcatatttactgtactatacttttaatcattattttagagtgctccttctacttactaagaaaacagttaactgtaaaacagcttcagacaggtccttcaggaggtttccagaaggaggcattgttatcaaaggagatgacggctccatgcgtgttactgcccctgaagaccttccagtgggacaagatgtggaggtgaaagaaagtgttattgatgatcctgaccctgtgtaggcttaggctaatgtgggt

SEQ ID NO: 85641 - DNA, 1056 bp, Homo sapiens
aattttgagaaacctaattaaactactgcatgtaagagagtgcatgtttttaattatttggagctattttaaaaccacagaatttgaaacttgcttccagtgcataaattgcagaccagacttcagaagagaaaaaaagtagtaaattttttcttatgctcatcatttttactttagtcacttgataggattgcccagtgaagaagcatttgcaacagacaatgagtatattaatctttttgaggcatacagtttagtataatgctctttgttaggcttcaacaagtgaaattattttgttggaaagcaaatgactattaagtagaaagaggattcccagtctcacaaagcagtaatttagacactcgattctgcctctttacaagaatacaggtactcagttgatttgttttctcactccctttctttgctataagtttaaatcaacaatttgtttaggttaatatgtcctcatggaatggtggaaatgatcagatataaaatatttggtttggttagtttactctttatatgtttgctggcaaggaaccacaaatccagtttagtataatttttactctagttcactaaaagtttgcatccagctgtgtaggtagtgtttgtttcttgttaacttttttttcgtctaaaagaatactttaaaacttttcaatctcaaatgactgtaacttgctgacaggtgttaacagaagaagtagatctttttgttttttgcttatgacctgtattttaatatttgagcttatagattagagattgtgagagaaatctgtttatagtcttattttcccttgtgtattttttcttcctagtacatggaaaaagaggatgcagtgaatatcttacaattctggttggcagcagataacttccagtctcagcttgctgccaaaaagggccaatatgatggacaggaggcacagaatgatgccatgattttatatgacaagtgagttatattgatagatggattcagcagatacttattgaacatttgatatgttttgtggaaataaagatgaataaactcagtct

SEQ ID NO: 85642 - DNA, 1039 bp, Homo sapiens
tcatgttgctccaataggggctgtcttcaaactgatgttttctccttcttagtgcctcagagtagatcctgttcagatacgttataacaggttaatatgagtttattttggtgtaaaagtactttgaaattcatgcatagttttttcatcatatgcattttccatagctttgaacacccccatgtaactctcctcttccacaaaccaaacaatgaaaaagcacctttgtgatggaagtttattttgcaataggaactcacagtgatctaagccctgctattcatgaatataattcattactggagtccaagttgctttttggtttttgaagttctcttcttcccttgcaggtatagaacaagatgcagtgaatacttttaccaaatatatatctccagatgctgctaaaccaataccaattacagaagcaatgagaaatgacatcataggtaagcagtgcttgaaactatggcaaaaaaaaaatgacaaaaaatgcacagaactgacaattttcgttattgactaagataattttttcttaacatggaatttagcagttcccttcctaatttgttttctgagtattttttatatcggattatagctcactttaaaagtttctcggctgcattcggtgcgagggtctttgcctgggccagatgggctgcagtgtagcgggtgctcaggcctgcccgctgctgagcagccgggccggcgggcggctacgctaaccggcacagaccaccggatggactggccggcagccccgcaccagtgcacgaagtgggcgggacagaaacttctggggttggaagtccagtgaggctaaaagccggtaccaaagtctctaggcatcagggctgcagcccaagagtctcacgaccagtgggcaactggatggccagacaggtgtctcagtggtggcctctccgtctcagggcttcatcccacttctcagtgggcctgacgtccctgggcaccctggatgtctacctgcattagccagagccatcacatggcctgtgacttgccttttttt

SEQ ID NO: 85643 - DNA, 2527 bp, Homo sapiens
agaccatcctgaccaacatggtgaaaccgaatctctactaaaagtacaaaaactagctcagcgtggtggcgggtgcctgtaatcccagctacttaggaggctgagtcaagagaatcgcttgaacccgggaggtggaggttggttgcattgagccgagatcgcgccattgctctccagcctaggcaacaagagtgaaaagtctcaaaaaaaaaaaaaaaaaaaaaaaaaagaatttacatggtctgaattgccattaaaagagatatgagaattattgagtaacaaataactttttaataatttaggcaagttttggacgattgtactttgtttagaaaccaaaagcatagtatttgtagtttttttatttactttagttgctaggaagtaaactttattcaaggtctctggtaccagttgttgctaaaagtgattgactaatctgtcaatctgaaattatttgttgctgaactgctaattcttttgcttctatcttttaggcagatcttgtctggactaccagactcaagagaccaaatcaagcctttctaagacccttgaacaagtcttgcacgacactattgtcctcccttacttcattcaattcatggaacttcggcgaatggagcatttggtgaaattttggttagaggctgaaagttttcattcaacaacttggtcgcgaataagagcacacagtctaaacacagtgaagcagagctcactggctgagcctgtctctccatctaaaaagcatgaaactacagcgtcttttttaactgattctcttgataagagattggaggattctggctcagcacagttgtttatgactcattcagaaggaattgacctgaataatagaactaacagcactcagaatcacttgctgctttcccaggaatgtgacagtgcccattctctccgtcttgaaatggccagagcaggaactcaccaagtttccatggaaacccaagaatcttcctctacacttacagtagccagtagaaatagtcccgcttctccactaaaagaattgtcaggaaaactaatgaaaagtgagtatgtgattttcttgtgtgtacatatgtgtctcactttctttttttaatttactaagcagaacttcagatgaggaataaaatgattggaatattttttttctcctctaactacttgtaaatttgggagaatttggagagtgtagtagagtcagatcagtgtatggaaaaggagcaggagtgactggaccttctaagaagtgtgttatcagaattagtaaatgaagggtcaaatgtcctacttttcccctccactgattttgacatcaaaccattatccacatagccttatttcctccctcggtcttaattttattaatattttactgcactttgcagataaaatttttaaaaaatttttaaaaattgccaataagtgacatttattaagttcagtgcttagtgtatatttggattttatttattagtcacaagacctttgtgcaggtagtaggcatgattatctttttttttttgagatggagtcttgctctgtcgcccaggctggagtgcaatggcgcggtctcggctcactgcaacctccgggttcatgccattctcctgcctcagcctcccaaatagctgggactacaggcgcctgccaccacacccggctaatttttttgtatttttagtagagacggggtttcaccatgttcgccaggatggtctcgatctcctgactttgtgatccgcctgcctcggcctcccaaagtgctgggattacaggcatgagccaccgcgcccggactgattatcttatttacacatgagaaaaccagggcttagaaaggttaggtaacttcctctaggttgtacagtaaatgtggacctagaagcattttgacaagagcacctgtttttttttcttctctattagtttagaaattatatactcttaattatcacctgggattttgattagacagccttcatgttctttttcatcttaaatgttctttgtgtcttaaagggctaagtgatttcttcagatcttttagttcactcattctcagtgaactaaaatgaggtctaatctgctactgaatcaagttttcagcatgttatttccttcctccctccctccctccttccttccctcaaccaggctcccgaggagctgggattacaggcgcccgccaccactcctggctaatttttatattttagtagagacggggtttcaccatgttggtcaggctgatcttgaactcctgacctcaagtgacccacctgcctcggcctcccaaagtgctgggattacaggcatgaatcaccacacctgacggcatgttattttcatcgcaaagttactgtaagctgggagaagtggcacacacttgtactcccagctactcaggaagcttaaggtgagaagattgcttgagcccaggagttttgagaccaacctgggcaacacagcaagaccccagctcaaacaaagaaaaaaagttattgaatttttt

SEQ ID NO: 85644 - DNA, 1046 bp, Homo sapiens
tttctggctgggtgtggtggctcatgcctgtaatcctggctacttgggaggctgaggcaggagaatcacttgaacatgggaggcagaggttgcagtgagccgaggtcatgccactgcactccagcctgggtgacagagcaagactctgtctgggaaaaaaaaaaaaaaaaaaaagagtgttttctttcctattttccaccacttgattaagttacttttcctcttaagtattttttgctgagtatgctgacttaagagtaatgttacaaaatttaatttttaaagttctctgaaagcccctttatgagagttttaggctatcaaattgtgtttaattcttaacaattttttgaaaaattatagcttcaatatccgtacattccccacaaaaaagcactaaaaatcatgccttgctggaggctgcaggaccaagtcatgttgcaatcaatgccatttctgccaacatggactccttttcaagtagcaggacagccacacttaagaagcagccaagccacatggaggccgctcattttggtgacctgggtaagtaactatcattttttattaacttgtattagaaggatttgagtacaatatgtgaaacttctgtcataggatacagaactatataattggaaagtgctttggaaaaaatgtatttaaaataacagctacaagtataatgggtagctgtgttgtgttcctgtaaatatagaatataaagcatgcccagtagaaaaacaagcatttccagaagaaatatatctgatcactaaatataaatatatgaaaaagatgtctcactttattactgagggaagtgcaaattaaaataatcagttaatgttctcctaacacattagcatattttttaaagtttgacaatttgaatgtcagtgaagatgcagggaaatacccctcctatttagtgataatataatctggtgaagactctttggaaagcaatttggaaatcagtataaaatatgcatgtcatttaggccactctttctaagacctagccctcagatatgctcattcat

SEQ ID NO: 85645 - DNA, 1052 bp, Homo sapiens
gagctgttgcaaacagtccatgtggagggtgtgagtaagatgtttcccttgaatttgccagaattacttttttgttgttgttgttgttttttctgagacagattctcgctctgttgcccaggctggagggcagtggcgagatcgcgcagctcactgcaacctctgcctctcgggttcgagtgattctcctgcctcagcctcccaagtagctgggattacaggcttgtgccaccaagcccagctaatttcttttgtatttttagtagagatggggtttcaccatgttggccagactggtctcgaactcctggcctcgtgatctgcctgcctcagcctccaaaagttctgggattacaggcgtgaaccactgcacccggtcccttgttaagtttattttggtgggaagcaaaggaggtttcagcttttaaaaagtttgaaaattattgctctggtaataattaaagatttgagagtaaatatgctttctagcagaaagaataaaagaagaacagatagcctcaagaaggggagccaaagaagcaggctatatctgacacactgggtgttgataaatgggtattaaaagaatgagagcaatgagcagatagaagaggaaattaggagagtataataccatggagaccaagaaagatagactatcaggaaggagtggtaaaaataagttactagttctaagagagatgttaagagggaccggggaaagccttgtacaaatgagttagtagcattttacattatatacatctaattaagaaacaatgcgagagtctcaccattcctatagactcttacttgtacttgtctgaacacgaaaactggcttttgtttataaataagctaaaaattattttgctccaatttctcatgaaaataaaaataaaccttcttttaacattgaaaaaatagtttgaagacagtcactcttcattttgtaattcccacaactattattgaatgactgaaattatctttattctgaagccaaaggggtgatactgatatttcttcagactactaaaaatatattttat

SEQ ID NO: 85646 - DNA, 1050 bp, Homo sapiens
acatattgtctatggcttcaaggataaaggagagtgtgacagaaaccatatggtctggaaagcctaaaatatttatgatttggcccttaacagaaaaagtctgttgatctgagatatatgagaggaggcaggaaattattttttgccagatgatggataactagcatcatttacagatcagtctatcttttcccaactaggaactctatatccgaaattcccaatatacctgggtctgtttctgtgcatttgttttgaatatataccataagtatcaagaatggaatggaaaccaaatggaagcctatggcaaaataatgctgcctcctcaatctttataaaaccagctccctcttgacatttaagctaagatttgaatgtcatctccttagaggacatccttaaccactcaatcttaacagagatgactgcctagaccagggtgttaattgtcacagatggtgagacgtggtaggatttcgatatgtgtgaggtagacctaacagatttgctgatggatcagatatagagtaggaggaaagaagaggttcaaagatgtactaaagttttgggctgagcaactaaaaatccaaaaatgcagccgggagcggtggctcatgcctgtaatcccagcctttgggaggccgaggcaggcagatcacctgaggtcaggagtacaaaaccagcctgaccaacatggtgaaaccctgtctccaaaaattagctggtcatggtggcgcatgcctgtaattccagctacttgcgaggctgaggcaggagaatcacttgaacccaggaggcggaggttgcagtgagccaagatccgccactgcactccagcttgaacgataagagcgaaactccatctcaaaaaaaagaaaagaaaaaaagccaaaatactacttcttgagaaaaactgatgagcaggtttaaaatgactaaatctggcataaaattttagatattgtaagttgaaggtatctactggattaagcttgtccatcccgcggcccaggatggctctgaatgtgcccaacacaaattcgtaaa

SEQ ID NO: 85647 - DNA, 1058 bp, Homo sapiens
acccctgacctcaagtgggcctcccacctcggcctcccaaagtgccaggattacaggcatgagccaccgcggccagccagaaatgggttttggaaaaagcactaaacaaaatcgaacttggtttcatatgacagctctgctgctaactgtaacaggggcagaccagttaacctacttttctgtcttctgtcagctgagaattagatgattcccaaaggcccattgaactctgaatgactttaaatacttcttcttaagtgggtacacggttttggtaactgatgccaggtgatgaatgcatgaaagtgcttaatgaatgaaaccggtaaaatagtaggaggaagctttattggtaaggcaggggtatacctaatagctctctaatttattggtattgaagtggttaacttttgtttttttaaggggggaaaacattctaagaataatgaggcaaactgcatattgcacaagagactgttgtctctattcaacaaataccttttgagtgtccagagtctgccaggtgctgtgctaggccctcacgattgagtagtgaaccagagaatgtccctgcacccatggagcttattgtctactggggtagacagataataaataagcaaacaaatcttctctcttctccctttcgctccatgtaagtgtgtgtgtataggtgtatacttacaagttgagtaaagtgttatgaaagattaagaggagaaatgcattttggttagatgttagaggactcagcaggtgaccttgaaacttagagctgaaggatcagtaggaggtaactagagaggccagggaatcgcatgttcaaaggccaggaggcaagaaagagcatggtgcccttcaagagaggaaagaaggctactgtgactggagcatagatgtaggcaagtgttgggtgattgagagctctacgggccatggttaggttttattcctaatgccgagatgccaaacatggtggttcatatctgtaatcccagtattttaggaggccgaggcaggaatatagcttgaacccaggagttcaagaccagcctgag

SEQ ID NO: 85648 - DNA, 1054 bp, Homo sapiens
cccgcccccttcatctgcatcctgccggaccacctcaactgcacaccgcccgccaggcgcggcccgcccccgtcatctgcatactgtccgcccacctcatctgtatttccttcttggctgccagaaggccccgcgccgtgggcgggacgcaccggctgaccggctgcaggcctccgcccgcggatgctgagaaccgcagctgcacaaggtaggctggaaaaaccccactgcggtgaggcggaagcctagtgccgccggaaaggcaaaatcctgctcgtgtgaagctagacctatcaggacaagagaaacctaggactagcgcaggacaggcgcttaataagcatttctttgggtgaatgaatgaatggatgaacaactcgaggaggtggtgaagaaaaataacgctaacaaagacgtactcacccaaaatgaatactatggctaataataaaaatgcataccaatcgtaagtagaaactgttctgccgctgtcggaaattactaaaatggaaattaccctgaacgactttcatccttcatctgacagtgaaaacacttagaacaacgaaatcttgcagtaaaaatatttaggactaaaaaaaccattagtggtatgactggttctatctcgtgcatcacttgaacactacggtccattctcaggtgtcacgcatcaacatcgtaggacaccactgattactcctaacgcctccaaacagtgtgttcacttggttccaggatgctaccctctcctagttttctgctcactcccctagaagcctcttcccagtcccctttgttggttcctcctcatcttgacccaccctgggcactaaagctcagccaacagacctctttcctatatactctcttggtctttgatttaccaacttgtggctttcaaataccatctacatatctccaggctggttccctcttctaactccagactcatttgtccaactaccttcttgacaccttctcttgacacctccacttaggttttttaatagtcctctccatctccataagtggcagttccgttcttccagtg

SEQ ID NO: 85649 - DNA, 1015 bp, Homo sapiens
ttttcatcagtcctagagcttgattttgaagaacatggtgatgcagcaaaatatttcttaattatgcctttgcctcgttttcagtggagtgaagaaacaggatcagctggcctgagaaagtgcgaagcacagagttttgtatttaacagcgagtgggctttatagctgtcttcactgtgtttttggaattggctgattgtccacagaattcacactggttcgatgtctaaacacttcagtgatgcaaaaatcagtttgggaaatagagacacttgaatgaatgggttttgagataaaaatctgtcttgtcatcctcctgaggtggagcagattgcattttccagctgaggctgtgactctcccttgtcccacatgccctcctacagtgtgactctgccacttcctctgttaagggatctacttcttgaatttgggcagccctagaaccgcttcagctggtagaagagggtggaagtgctcctctgactgctgaggctaaattataaaaggctgtgcaggcccctcttgtttgcgggggcacttgtgcttggagccgtgagccgttctgtaataagtccaaccactgtgaggctaccatgctggggagactaccacatggtgctccagcccacagtccgtggagctgtcatctcagccagggtttcggatggcaggagccacctcctagtgtctatgtaagaatggcctagccaagctcttcccaaattcctgaccggcaaaatgatcagaaaataaaacggttgtgttaagtgatgaggttatggggaaatttgctctgaaacagtggtggcaggaatgtaagggttagtaaacagcagcgactctgtgatgaaggaattcattcattcatgttggaaagacctttgcagagccaacctccactactccttgcacccagattgatggtcccatgaaccagaagcatttgtctagtgataatcacaggagtcttcaagtgtggtgtcctgttttgtatttttatttatttattttt

SEQ ID NO: 85650 - DNA, 1035 bp, Homo sapiens
tacaccagttctatgtgctgtattaattatacaggtttgagtatcccttatctgaaatgcttgggaccagatgtgttttgaactttggattttttttttgtattttggaatacttgcattatacttagcaattgagcatccctaatctggaaatctgaaatactccaatgagtgtttccttttatggtcatgtcagcactcagaatgtttagggttttgtatttttttctgaattagggatgctcaacccgtaccagtatactacaccagggaactgactcggcattggtcagaccacattttgaacactttttggttgacttcccagcatttaaccccgtcttctcccaggaattctctttagctaattcccactttaaagtgagtcagcatatcaccctggtctcagtgagtcaaggatggcagagactcaatcagaatgagtgttgagtagatgttttttggggtgcctgggagagagtccccgctctttgctggatttgatggtgtgcagatgtgagccctggagctgccagtaccatcacatagccatgagggcaggcagcttattgatgaaggtgacctgtggaggaagggaggagcagaagatggagagaaattgaccctgagagaacatctttcagttgagccagacctgaagttggacttgatcctagactttcagttatgggagtcaaaacctctttttattgttgtaagcttgagttgggttttctcttgcaaccaagagatttttaactcacagaaacccacatctgcagtgtttctgagattctgggtaatatttcagagggaccttggtaaatcagaagctctctaggcagtttatccaatgaatggaccccgggacctatgaggcctggtgggaagaattaggaatgttttgagtgaagatttagaagaccaatggggaaacaaagctgcctgcagacattcagatgtcacgtggaagaggcaataaatttgttctttgtggttccagagtgtttcagaactggaatcggtgtgtgccat

SEQ ID NO: 85651 - DNA, 1032 bp, Homo sapiens
gttcactaaagcctgcaccctcagctcctccttattctcagtgtttggtgcctggagactgtgggctttattttcccacagtgctgctgggagatttctgttcagaggtgccaagctctctagttaggcaatgaggatttcatttggcctacacaatgggcaaggaagctaaggcgcagtatgcagagagaattctgggacgaagcgctcctccagccacttcagtttcaatggaaatttgatgtccctgcctgctttgcacttttcaaatggcctgtcaggagttgccctcccagagctgcttggcattctggcttctcctggagatgactaatggcagctggttgtgtgggccgcctgctagaagctagtcagaccataccattatctctcctcagaaacactgaggctttgtctgctgccctatctcccctgcatcctgacacagagcggtcactgtgtcctctccaggcctgagccccttcttagtgttagggggcttttgttcagaagctttattgtccccctctttctggagtgctgttcatagtggccgtggtacagcatgagtatttgggaaacaggaggagtagatttacaagcattttgaattctaatccaatttgctgagcaagtggagtgtgaggaaaattaattttgcattcttcccaaaaaaagtaaaatggagatgagatagaaaatgtttatccctttacaaaaatcatctttacacattgacactgctgtttgcttttaacaaaggaagtaaaatgggtgagtaatttggttcatttgcatgagtgtaggactcttttgtgtttttttccctccatttgatttgcaaagacaatttctattgacttttagtacaagttaggtatgaatctctagaaagcacaccactgagacgacccaaaagacagtccagctgtggaaaaaactacttttctgtcatagtcaaggtggggccccaagatttgataacagacttagttccttatggctgtgcatctgcttgctgaattgcctcaa

SEQ ID NO: 85652 - DNA, 1126 bp, Homo sapiens
gtatcaaaaaacagaaacccttaagtaacttcacagcttctcacaagggcttgctgcataataacaggcagatatttttatattcactttacagattaacatatgaagagagggagaaattaaatcacttgaaaagaacaatccagcatgtatcaagtggctgagaccaaaccctacccttggtcaaaccatcacaaacagttgtttacccctccgagagaggagaatctagatgtgtgtgttgccaccagcataggagtgctcttaatatctgcagtcggggagagcatcccccccacccccaagcacttcctctttgcaggagcactcatctggagatgcccgaggcccattgcctttccttagggtgctggttaatgtctaatctaattctttgatccaagcttgtgaagtgacagtgattcttttggggagaggatggcaagtagcatgactcagcctccaggcttaactttatcttccgagtaaggagtttgggggtcctgagactttattttcctttacatgtgtctgacaagcatggtgtgggggtggggtgggtggaggaggtgacccttgataggattctagaggggtctgacttcagagctgcctgcttatcctctgggccctgcgtaggaacctctgctgccatatgccttgggcacctgatggaaaggagtggctttctctgtcctctctgcaggaacccttcttgggaagtttgtttgactctatttatagtgcaattccactggctccatatctacagaaagttgatctttgaaattgagagatgcatgagagtgattccttttttcaagggaaacgttgaaaatcacattgctgggtgtctaagagtgtgattcttgacctagagaagttaaactctaaggagctggccagtcagacatgttgggtggtctccctgtagttccagcttcagagggctgaggcaggaggatcacttgagccccggagttcagcctaagcaacatagcgagaccccatgtcttaaaaaaaagaaaaaaaaatctcaagggaaatgcaaaggagctggccagcagagagaccagcaatgtgaatagggcctggatcccctgcagtcgtggaagggtaggctttg

SEQ ID NO: 85653 - DNA, 1039 bp, Homo sapiens
tggtgtttctgccaagggctctaaaggtaccattacaagcacgctgtggaatagtgatcagggaatgtgggtggtgtcatgtgtctgaactagtctgtgggcttcctgagagccgggactctgctgtacatatgcataacaagctctctgtcagtatttgttgggtggatggataagtgactaggacattccatctggagggcatattgtaagtagtcttcattgctaaggaagaggtttgtgcattattttggtaaagcactggagtaccaccaagtttgtgggattttgtttcggattttgaggttgtacagtgagattggacctgcattttaaggaggattcatcagaaaacagtggtatataaggattgaagaggcattttgaaatcagtgtttaagaaggactgtcacagggatgtaaaggaatggttggcagagggagaggatggcaagaccagcagggtggtcactaagagcttgtctttgttcccacacctctgtcacctcctccctttccagtgcccctggtcgcccaggccacagcaaacctctttcagctgcttcctctccccttgtgacttccctgcttctctgtgttggttaattttctgatgcactgagcacatcctgctgcagaccttgcagaaatctcacatgactctgtcatctgcactcctcatcctggtcttctagatgccccacaacttagcaccaccccacccacctgccagaatggccctgttcctccctccacctgagcctgttttagtttctgcctttgtaatagaacatgaccatgtctgattgcaagtctttatgtataaggttctagcctgaatcgtttttcttttctcctttcatactccaaatactgcttctccttcaaggtcaaacctttcatgaagttgtacctaacacctggcacattgacatatcccttctctgactttggcgtcttacacttttttgggtgtttagtttttgtactgctttgtagtgtggaacactgttgcacagtacatgccattgtctccatt

SEQ ID NO: 85654 - DNA, 1651 bp, Homo sapiens
gacaggaggtcacatgtgtgaatggcctgtgtctgctttacagggttgagcaggctgagggtgtgtgcctctggggatgctgggctgacagcaaatcccaacagtatttcggctctggactgatttggcctttagtgcttccccaggcctctttcatcggcatgggaaaagcccttaggggtgggcggtgagggcacatttataactaacaaagaagaatgcagttgccccagcatcctactggtcaccttaagtggcagcagagccctccccagcggtgccccagtccctcagaagtgctcagtccggcccgagtgcccatctggtggctctgccgtgttcttctgggcggatctgtgtgcactacacagcgagtgagggcgtggctcacacagttgtttgagggaaatgggtaatgcccatcccttgctgttttaagtgccaaatagcgtgttagcgcccctccaacaaaggatcatccttccagtgagtcaccgagaatgacagtgactgccattactattcaaagtacatctctgattgctgatctgagccactggttcagagccaggttctagaggctgcaggtccagccccttaccattcctggagaggtaggagctcagtcccttcctccaagccagacctttgcagaggtggcaactgggctgcacgggtcagcagatccctgattctcaagccaccttgagacaagaactccgcccccctgttagtgcatcccagctgcagctctgcatcagaacctacagtggacccttttgaaaacactcttggctgccctagttggttaacttcagaatgtctggaatgggaccagagatgcagttcacatgttttgtaagttctttaggcgactgaagcacagctgcttggagaaccactgaggggtggacaccttcccctggcagccacaaggcaggcagcctgcgggagctcctgagcagctgttgggcgatggtcattacatcacccatgcctttgtatttaaatgaaactcgacacatagaaccaattcaacctgaaagttactacttctgctgattcaggcacttgtttgaagcattttttttttattaaccctgtacttcttctttgcccaccattaaagtgggggaaagtaatatcccaagtagttgagttgagctgttggttgttagatttaagctggaattagtccagggttttatgtggggaggcagttgctgtcttgggatacccggagtgggagtgggtgttttctgtgattggttctgttttttatttttacttatttattttgagatggagtttcatccttattgcccaggctggagggcaatagcaccgtctcagctcactgcaacctccgccgcccgtgtttaagcgattctcctgcctcagcctcccatgtggctgggattacaggtgcccatcaccacacccagctaatgtttttgtatttttagtaaagagggggtttcaccatgttggcccggctggtctcgaactcctgatggcaaggtgatctgcctgcctcagcctcccaaagtgctgggattacaggcatgagccactgagcccggctgtttttttgtgttttttttgttgttgtttgtttgtttttttttttgagacagagtcttgctctgtc

SEQ ID NO: 85655 - DNA, 1203 bp, Homo sapiens
aaggtgagaagtcgctgttctctgcattgaacatggattgaattttccttgtctgatggtaacccatggcccccgccctgcggggataacattctcaggagcttctcttgtcctagccccttctcatttcaaaaatattagtcttttattttcctttttcattcagtttttgttttacagcttttgtagagaccaacccaagtagatgcaggtgggtgttagataaaaacacacatccccaggggacaagccatccagcggtgaggaatctctgccatgttctcttccctgctgcccacaaacgttacggagactcccttagcctccccctcctcttccccactgaggggcagcttgtggagatggaggactcgggcccatagatgcagaccccctaccaaatctagcaatagttctcacccttccaaagctcgagtgccattttgagatgacctaccaatgacatgcagtaaaggacataacctcacagcctttttagaagcatttcgaatatctacagttgcctcaattcacggggcatttcactcctctgatccaggttagaattttgctaaatctgtagcatcctgaatagcacactaatttttttttttagcacactaactttaactacattagttgagtgtagttgatacatctgtggcctcgtgtctataaagagcacactagattgtacccagcacttttggatatgacatgctaattagatgtatttaactattcataggaaagtgtatgataaatgactgtaatatttctaataaatatattttgtttctaattatttttttctcactgacatttatcaatattttttcaaagtgccacccttaaactgagtctgttttcagaccagcatcttcatgcatatatccttgtcgggtcacagtctccactgcagctgctcttgcgggtggtgctggaattttccacagaggactgggctcctgctggttcctccgctgcccgtgtgcagctttcttgctcaggccacaggcttacgtgaagatcacccttcaaggcctacccaggacactgctgagctgtgcagatgtgcacacgatatgtgcaatgtgtgactaaatgccaactgagaccccagaaaccactcgcagggggaattatgccaagattgaggaggcagggtgaagatactttttttctttttctggtttttttttt

SEQ ID NO: 85656 - DNA, 1683 bp, Homo sapiens
aaaacaaataagcacgtatataattaataagtaaaaatttaaaaatcaatccctttgcaagctgcaataattaatgaggttgtcactaaccaatcagaccatttacatcaagcattgtggtgagacagtctttcagttagtataagagtaaacagaaatggcgaaaaactaattcttcacaatactaggatttagttaaattgaattcattttataggtgggtaactattcgtagaccttgaagttctgaaatacagagttaaaataagagaaagctttctggaatcaataatattctagttattgcttagttgactcattgtgacatgcttccaacctgggcatcaaacaaggatacacatcaaatcggactcagtctggttggctccttgcgctctgtagccgtggtggcagcagcagcagacgtcggcggctgggctgccaggagcagttccactgggtttcactgtccgagacttcctttggggcactccagcaaaccaaggtggagtacgaatggaaatctgataagcaagggcttcagcaaatcctgcagctattgaaggagtcccagtccccagacaccaccatccagagaactgtgcaacaattctagaaactggaacaacttaatcaatatccagactttagcaactacttgatttttgttcttacaaaattaaaatctgaagatgaacccacaagttcattgcgtggtctcatcttgaagaataatgtgaaagcacactttcagaacttcccaaatggtgcaacaaacttcattaaaagtgaatgtttaaataatattggtgactcctctcttctgattagagccactgttggtatttcgatcacagctatagcctccaagagagaattgcagaattggcctgacctcttaccaaaactctgtagcctgttggattctgacgattacaccacctgtgagggagcatttggcacccttcagaagatttgtgaagattctgttgagattttagatagtgatgttttagattgtcctctcaacatcaggattcccaaatttttacagttcttcaagcacagtagtccaaaaataaggtctcacgctgttgtatgtgtcaatcagtttatcatcaggactcaagctctgatgttgcacattgattcttttattgagaaatctctttgcattggctggtgagccagaggtatggaaaaatgtgtgccgagcacttgtgatgttgttcgaagtttgagtggatcgcctgctccctcacatgcgtaatatagttgagtatatgctacagaggactcaagatcaagatgaaaatgtggctttagaagcctgtgaattttggctaactttagctgaacagcaagtatgcaaagatgtattcgtaaggcatcttcccaggttgattcctgtgttagtgaatggcatgaagtactcagatatagatattatcctacctaagggtgatgttgaagaagacgaaatgattcctgatagtgaacaggatatatggccacgttttcaccgatcaaggacagtggctcagcagcatgatgaagatggaattgaagaggaagatgatgatgataatgaaattgatggtgatgatacaatttctgactggaatctaaggaaatgttctgttgctgccctagatgttcttgcaaacgtgcatcatgatgaac

SEQ ID NO: 85657 - DNA, 1051 bp, Homo sapiens
ccgcacctggcctatgagtggtcttttaattaggaacaaatctaatggaaaggagagttgactgaagttggcccacaggattgtgagctgggcagtgccttcatgaaggcttgccaccttgggacgccccagtttactggggtgtcttgcggagtgcagaaggctttctggcagctgcctgggtttggccagaccctgcctcccctcccgccggccaacccctagtccccttcctgtctccacttgcattcaggggtggctgctgttctgagaacattagaactgggaagagagatggagtcacatggatttttggtgggcattattctaaactttcgtatccaagttagtcccccttattccactgtggcattgccgttctaagcagttacctgatgcctgctgctgaagagctgctcacaggaggcggcggcggccctggcactgccccttgcattaggtcttgtgtttgatgtgttcttgtgaatttactttgtcagaacaaaatatttacgcgttgggttcaggaatttcttttagctccccatctggctgtgaaattcaggaaacctcccgttgcctagtaatcaccccatgtaggtgtacattgtgacaaagtgcatctgaccactaaggggcccccttggtgaccccagcacattcacagcagtgttaaaatggcctgcattttggagatgctggctggcctttcagtgcctcccaggaagacacatggcctttccctcttcagatgcctgaagggagtgctttgaggcaggtgatgtgctgggagtgtgggcggcctccctctggccccggggccctctgtggaccttggctccctccgtggacctgggcttcgtggtgagcactgcagcctccctgggcattccctccagcgccagcaccactgcaacatatagacctgagtgctattgtattttggcttggtgtgtatgctcttcattgtgtaaaattgctgttcttttgacaatttaagtgattgttttgtttactgtaagtttgaaaataaaaatgaagaaaaaaattc

SEQ ID NO: 85658 - DNA, 1566 bp, Homo sapiens
tagtgttaaaatacggagagtatggaactcttcacctccattttctcagcggctgtgaagcagcctcctagcttcggaagtacggacactacgtcgcgttttcaagcgtgtctgttctgcaggtaacagcatcaagctgcacgtggaagcatctcgcggttttctagaaacaggcattttcttatccctctcccgctcctttttccacaaaggtgaatttcataaatgtaatactagtaaagtgaatgaattactgagtttatacagaaatttaggtaacttctcctttagtctcaagagcgagtcttgctttttaatgggtgccgtttatgttgctgcccgccctgtgtgcctggctcctctgggtgccttggtgtctgctggtggctggcagtgggcgcagcggaggagagttgtgctgcagctcatacggtgtgtctgtcatctcagtctggagtaaatgcagtgtctgccggtgtctgatgggttctgtccctcgtattttctttgccttctatcccattgcctggctaccgctgcctggcagccaagggtgttggtcgcgaagctggagtggcctctggtggagcctgcatcttgtctcgtctgcctctgctttacatttggtgtactttcgggcgtggtggcagtaaaatgacaccgtgattgagcttgtcagcagagctgaaagagaaagtagaaggatgtgcattgtttcttgtaagatatcttgcatgtatctgtgtattcaaattcaaacagagatggtttgtccatttgtccactgagaaattagaaactagggacaagggggaggaaaagtactgaaatacagtttatgaagcaagtgtgtctcgggctgtgcttgtcccaggagccccagcagcatctgaactgaggcttcttcagtcctgcaggaacaggatcatctgtctcagcggtgggcagatgttttcatagacagccagggagtaaacactgttggctctgtgggctgtatggtctctgccataaatagtacagagatgtggctgtgtctagtacaacttttagacacagaaatctgaatgacatatattgttctgtgtcaagaaacttagattttttttttaactatttaaaaacgtgaaacctattcttagctcacaggccatggagaagctggtggggaccagacccagctccttagctggctgggctggggagggggtagtgacagtggcagctgctactcactgctcagtgtggaaaacacaggacttggcaatcacagcccgcagaaccatcatgtgtggcagaagcctgagggatgcggtttcttgcccacgtgctctgttcattttctgttgtttttctgcacttaaagaattcacatggaagcatgttttataaaatgaattaccagagaaacagagatgggccgagattttcagaaatggtcccatgtgaccaagttctgctgtttgggtgacagtgctttgaagatctcctttgaggatgtgcagtctttttttttttttttttgagatggagtttgttgcccaggctggagtgagtggcacagtc

SEQ ID NO: 85659 - DNA, 1035 bp, Homo sapiens
cgcctccagctgctggtggttccacgtgttccttctgtggctgtcactcccctggcttccgggtcacatggccagctcccctgactctgtgtccagttccctctgcttctctgtcatgaccgtggtcattggctttaggacctaggcagatcatccaggaggatctcatctcaacatctttactttgagtctctgcaaagactggttttacaaatgaggtcccagtctcaggttctgagggttgagacgtggatgttgttatttgcagggtgttattttttggtggccacagtcccagccccagcaccgtggaaagcatgttgctttttggtagttagcggcctcttcctggtgtcctctcatggctgtcccacccctgtggcacacagatgacctcctgaataaaacaagaccagagtcagagctccatatcatcagtctgaccacgatggtcacgtactgagggaggtgacagtactgttctaaggtcagggtctcaaagatcttggtgtttcctgccaaacacagctgtaggaaaatgcagtaaataatgtgcatggcttcctgttcccagcactcctctcccccatctcaccaggggaggtgctggtcatgaaataatgagcagcaatctttgtcccttttgaggaggcacctgcctaggttgtagaatggattcagcgtaccctttcaagctaaccctttacatgtgggaggaagagcaccttcaccatctgctttgtcacaaaccaaactcacattcctccagatccagctcccattaccagccctattcaggacccaccttggaagaaccaggggccacgccaggtggcctcaggacccaggtgtgctctgaggcaggggcctccacagcttgagcgtcagtgtcctcacgaaacatggggagatttctgcctgaagcataaagtgcacctcggtgcagcatctgcatggtcaagcttggataagtgttggtttcacgagagccttgtgtctctgggcctgatgattttaatgatgctgaatcctgcc

SEQ ID NO: 85660 - DNA, 1064 bp, Homo sapiens
ctttgttaggtcaggggaccctctcacccaacctcagtgcatgctacaggttttttgtttttgtttttgtttttttcaggcatggggtcttgtgtatgttgcccaggctggccttgaacccatgggctcaagcgatcctccctccttagcctcccaagtagctgggactacaggcatgggccaccgtgcctggctctgttctttacttcagttgaagtttaaaaaccctggacatgatccaccgaaattatttcagaacccgaaatggactgtcacttctaaactgcataagacgagcaaatatcgggaaaggccagtgctgcctgtgtcacgggggccattttctataaggagcatagaccgtttggggccttgtctctgagtattagaaaccgagtttgctctgagcaatttggacctcctcgctgtcccttaactactgaattccattagtaggagattgtctcaagatttaaatcctgtataaatatcgagagtaaatttcccagtctgcaagttttcattttttatattgttaaataaatttctagcaaggaactggccttgtgaaatgcagcattgactgtccagtgcaggccaccgggcctggcctgggcacgctctgtgaaatgtgcaggggtctccagtgttgcctagggtcacaggccccaagttctagatgcagctgagatagacctgtggattcagagcctctgacagggcccatgagtttatcctcctcccaagtccctcagtgactgtgatggtctccagactgggaagtccttgcttgaggagcgcccctcgccttccgagttcacacacacccctccccagggccaccttgggagccaggacacgttgggtgtgagcactgctgctcttgctcctgccccatcccacctgagtgtcactgtgacaaagggcacagcggggaagggatgtgggaacggcttccaccccgggttgcctctggagctgggtgggtgtcagtcctcacagccattgttttccctctgcttccagtggagtctccaccaccatcgaccccttctgggacatca

SEQ ID NO: 85661 - DNA, 1001 bp, Homo sapiens
ctgtgagatgcagagccccagctcctgtctggtctgtgagatgtcctcactgtttcaggaggtgagcgccattgacttctgcaggggaacatttctgttactttgttttcaccttcaaaaaaaaaatttaaggtggaccatgataaaggaagatacatttagaaccttttgtagtaagttaatgtttaatatacatgtctattatggaaaacacagttttccaaaaagggaagacctggcgtgatttttggggacgcactgctgactcagaacaaggagaagccctttgagaggcttgtggcagagacttccctggtgggtgacatttgtctctaaagacgggtgattctcccccttcctcttcctccatggtctaccttcctggctcagaaaggcacgcatgtgtcaccctcctgtgtcctcctggtatgcgagtctcctccaccgccaggtctctctaagcatgccccatcagagcctctgtcctcatgagctacgcgctgcacgttggctgttcctgtgggctgcacgtgtggcgttcctgtccacttctgtccccggcatcagagcatggcagcgttcagagcaaggcgttcacggctgccgcctcagccctcaccggctccgtgacctagacatgcttctcagagctgaagcagctcagttacctcaactaataagcaggctggtgcctgttcttcaggtgccttgcacaggagccagccaacagccctggcctgttcccattcgtaacctctgcgagagatgcagccacgccagctcactcatgtctgtctggtcactggtcgcttttgtgggacagccacagagttgagcagttggacagaggctatccaacctgcaaagctgaaattatttactgtccaagcctttcaaaaacagattgccagcctctggtcgagcctaaccgatttcctcaaagtacctgcaatgtgccataactgctggggacacggcccaaataggagaaaggagggtgc

SEQ ID NO: 85662 - DNA, 1196 bp, Homo sapiens
ggcccgacctgcggcgctccagctcatcgccccgcctctttgcggcagagctcaggccggcgcaaaccggttcagtgctaggactgacgtctcgcgccgcccaaccgcagcacgcccccgcctccccagtcctctggaagagacagggaacgtctagccgccagggtcccgggaggcggctctgtaccagacggactatactgagagcctatgacaatagccgaaggtgccggggggggggggggggtggcctactaccaataaaggaaggggaggggcgggccctcgttagcttcccccccctaccacgcttcctcgggcgcgggtctacccagagcctaacgggcgcgcgagtgtgggggaagggcctggcgcgggctggagactgcgcagtgcggtgccggccgggagggggggggggggtgacgtaatctccgtccgcggccgcggcgccccgccccgcgacaccctccgcgaaccgcgagagcgcagcgcaggcggtccgcagcagccgcagctcgggggcggtgcctgccttgcagcctcccctcggcgatcgcgcagccccatctttgtccggcctccgcgctttgttctcggcgcccgggccttggccagcctggccagccgccgagcagcccccacgccgcgctggcgtcgtcctcgcctccctcgccgccgccccccgcgcgcggccgggccttgccccccatggtgtcccggccagagcccgagggcgaggccatggacgccgagctggcggtagcgccgccgggctgctcgcacctgggcagcttcaaggtggacaactggaagcagaacctgcgggccatctaccagtgcttcgtgtggagcggcacggctgaggcccgcaagcgcaaggtgcgcccggcagcccaccgcgcggcgggctcggggccttctgccgctcctgaggccggccggcggaggggcccttttcctgccctcttcccttcccccgttgcctttccctgtccttcctcttcctctctccttctgccctctcttctctttaccccttccccctcctttccttcccccctcaactctctcccttcccttatctcctcatcttcctatccttcccctctccccccttcccccattcttcctttccctccccctcctctctgtcccctccccctcctctctgtcccctccccctcctttctctc

SEQ ID NO: 85663 - DNA, 1045 bp, Homo sapiens
cataacaaacccaggagggaggtcctctcacaacttcagctcagaggcgaggacactgaggcccagggcagtgaggcccctttgccaggctgccaagtgactgggccagggtgtcacccaagccaggctggcttgagggttcatcctcatgacccctgcactgccgctgttgtgctgcagttagtgtttttcaagtggtctctgagttttgagaagcgacaggctgcatacttggctcttgacccccatgacctcggtggcactgtgcctcagccccaggttgtcaatttgaaattgggtggacttcacaggcactggcctccaggggcccacggaggagtgttcggaggggtttccacccaacacgcctagtggggctctgggtcccggccccagaggctgagccctactatccttccctgagctgaggcccccacccctttcatacctcaagctcatcctgggcagtggctgggccctgggccattctggacaaggcagggtggtcctaccctgagacctacctggtacaaagacctgggattgcagtgagaaaaaagcttttaccaaatagccatccagccgggttgaactcttcccaagcccccacccctcaaccagcttattacatgcaagttttaagctatccttgcctggagccttctcttgccttttgtcaattgctgtaattttctggtaaagctatatcaacaaaatggcaaccattcctgcctcccactgtttatccctccttcccctaggaaaccctcccacattccctgttttcaggatcttggtcccgtgcaggactccaggcagcacccacagaaccctggagtggcacaggcctcggtgcctactctacagctttcctgagcacttctcagattccacacaaagggtccttgggacccagcatagcctgcaggcaagaacacctggtcagaacttcctcttggggcagggatggtaccagtagtgcctggtgaaaagcttggtgctttagataccaccttaatccccagttcatacaatggaggcttgg

SEQ ID NO: 85664 - DNA, 1810 bp, Homo sapiens
ttgttcatagtattcttttataatcatttttataatctttataattttttttatcatctcatcatttctgtaaagtcagtggtcccactttcatttctgattttagttatttgtgtcttctgttttttccttgtcattctagttaatgctttctcaattttgttgatcttttcaaagaaccaacttttggcttcattgatttttattgtttttctgtattctgtttgtttatctctgttctaatctttattataatgtttccttcctctgctggttttgggtttagtttgctattctttttctagttccttaaaatataaagttacattattgttttgaggctaagtgatccgtgggacacatagctcagatggcctgccactcagaaagtgaatttgtatctgttgtatttgaccaggtgcagacacacaagccttacttggtgaccttcgacctcacagactctggggccatagttgcagcagcagctgagatcctgcagtgctttggctatgtcgacatacttgtcaacaatgctgggatcagctaccgtggtaccatcatggacaccacagtggatgtggacaagagggtcatggagacaaactactttggcccagttgctctaacgaaaggtaacagtcttgagaaaagagcagtgataagtgatatgttggcattctttttacttcacttggatccttttcagctaaacgttccccatctccatcctctctgttgccctggagtgggtgttaggtgttattgttacagtttgggtatttgctttatagcttccaatcaagatgttctctttagtgacagccacatttgtgcagcattacctacatgtctttttcatggtgcctgcaaacccctacaaggtggggatatttttatgtcccaccatggatttcagtccaggggagaggctccagcaggaaaagggaactgagctaaccatttgcagtgacctctgtccctgtttccttgcctctctcctctctcctgctggcctgctggcactctgctgggcataggaggctggaagttccaacatagtcctctaccctaaggggttttcaccattctccctcattctgactaaatatcaaaagcaaggtcgccttccatcagcatcgggtgcaatgactggaagtagggcgcttgcctaagcctctgcatctgtcctcagcactcctgccctccatgatcaagaggaggcaaggccacattgtcgccatcagcagcatccagggcaagatgagcattccttttcgatcagcatgtgagtacttctctctcccacaaaatgcttggctttattgttttttcctgattataaaaataacacatttactatctagaatttagacattgtagaaataaactatccagaatgcaaaggcacttgagaatgtgttctccagagccacatgcctgggatcaaatcccagctctactttctgtcccctgtgtgaccttgggcaagtatccccacttctctgtgccctgccctcaagtgtaaatggagacagcctcagtcttagcccggaggactgctgtgagcgctgtgcttggagctgccccagacactaagcactaggcatgtgctagccactcctactgttaagatttttagcttgtcccacagatataaccatgccatcactttggggcatatgcttccacagttttttctacgtataattcaaacatgcaaaaatggaatggcattattcatattgctttgtggcttgttaatctcacttaatgtatctttctacatcagcatgtatggatttacctc

SEQ ID NO: 85665 - DNA, 1012 bp, Homo sapiens
tatataatttataatttttttcctgaaccatttgaaaggaaactggagacatgatgctcatttattcctatttcagtttgtttcctaagaacaagggcacagtacacttctcaaagtcaggaaatgaacattgttataatactgtaatcttaaataataaaaccaggttttaaagctgggcacagtggcccacgcttgcagtcccagctgaggcaggaggatcacttgagctcaggagctggagtccagcctaagcaacatagcaagacgatcacaaataaaaccaggttttcaaaacagagagcgtgaatggtagtgaatagttgggcaccaggccatgcccaccccagcgcactcagtcacctgcctctccgtccacatgtgtagatgcagcctccaagcacgcaacccaggctttctttgactgtctgcgtgccgagatggaacagtatgaaattgaggtgaccgtcatcagccccggctacatccacaccaacctctctgtaaatgccatcaccgcggatggatctaggtatggaggtgaggcccggtttctcttttctcctatgaaaatctgtcggtcagccacagtgagacatgctgctcttacttcagtgattctttggtcattttcatttggaagagaacttttaaagtgaaaaaaacttgacagaggtgttggttctagatatggactattgaataatcttcttttaccccaccatggcctacccttagtgtgaacgtcaccattgcagcattcagaacaggacctctgtgggcaggactcaagggctaaaaggaagttgccaagctgaaatgccaacagacttccaactaacccattcgcagatcccgagtccaaggagtattatcggcatcgggattgagtgaattgacctcatggcaagtgtagggtgtttgatggtctgtctctgtcccataggcttgagaaatgactgattcagggccagtcttcaggatgaggccgagtgcagcagtctcagcacct

SEQ ID NO: 85666 - DNA, 1064 bp, Homo sapiens
cagcagtgaggtgggagggagcctggagggccttggcttctcgctgcttccaggctggttgggactcgtggacgcacccacccatccgtcccagcaagcgatggagcctgcagaggggtctgggtggatgtgggtgccagctgggcttgcaggggggccggagggggtgagggggtgggatctgcccactgctgtgtttccagatggggcagtcggttccaggaccggggtttccactggaatttcctctgtgggaccaacagtggttttcactacattcaggatggcgctggcctgctgggcagagaaaggtaccgcactagggtggatttgggtgttggcgagaacattgtgtaaccccagcttgacacctcccttttgctttgagtgttcctgagggaggaagcccgcctctggtgcccgccccaaggtgtccctggcctggctttgacagtcagtaggatgcacagctgacttggaagcaactccatttccgtctcaagattgggacacgatttggtcctccacccctaccttgttatctggcctctctgctcctgttgcctgatggacttgagaccagaagggagttctcttggccaggagtgctcccacctgagagtggaggccccgcccctccccgcacacccagggccacagccagcccattgcgccaccgccactcatttctcatctgagcacgtgggggcactgctcggccttcagctttccagcgccagtgaagaccctgctttgggtgtgcttgtttgctgtaggtagcttctaaaatgctgcatctggctggatgcggtagctcatgcctgttaatcccaggactttgggaggccaaggcgggtggaacacttgagcccaggagttcgagaccagcctgggcaacatggcataaccccatctgtacaacaaaatttttttaattagccaggcagccaggcgtggtggcacatacctgtagtcccagctactcgggaggcagaggtgggaggatctcttgaacccgggaggtcgaggctgccatcagcagagatcacaccactgcactcctg

SEQ ID NO: 85667 - DNA, 1004 bp, Homo sapiens
cggtttactgcagcttctgcctccggggttcaagcgattctcctgcctcagtctcaagtagctgggaccacaggcatgcaccaccacgcccagctaatttttgtatttttagtagggacacagtttcaccacattggccagcctggtcttgaagtcctgacctcaggtgatctgcccacctcagcctcccaaagtgctgggattacaggcgtgagccaccatgcccagccttatcttagattttttaaagttatatgttaaacacatcaaaagttatgtttacaatatgtgaaaagtaataaacatgccacagcatgatggcccttaaaaacataatgcaaaatgaaagaagccagttgttgaagaccacgttacaggattccatttaaatgaaatacccagaattggcatatccagagagttgggaagccgactggtggttgtggagggctggggagatgtgaagggaccactaattggtacagggtttctttctgagatgatgaaaatgcaccaggatcagttgtgctattggttgcacaactttgggaaagccacttcatcgttcacctccgatgggggagttgctctgtgaattctatctcagtaaagctgtgaattctatctcagtaaagctgccattaaaaaatacaaatcaggccaggcatggtggctcatgcctgtaattccagcattttgggatcacctgagatcaggagttcgagactagcctggccaacatagagaaactctgtctctactaaaaatacaaagttagctgggcgttgtggcacgtgcctgtaatcccagctgcttgggaggctgaggcaagagaattgcttgaacccaggaggtggaggttgcagtgctccgagattgtgccactgcactgcagtctgggtgacaagagtgaaactccgtctccacaaaataaataaacaaataaaaataaagaaaatgagaccaggtacaatggctcttacttgtaatcccagtgctttggg

SEQ ID NO: 85668 - DNA, 1003 bp, Homo sapiens
attcgtgctgactcaaatctcagctccatgttatacgagtgctctctcccgttgctgctcacacctggttagcatctgcttttgctgaagctgagggaaacattatctggtttggggaaggggctagaacagagtgacactttgggcacacttgccagatttgccagcggctaccaactctgaagcatgcattgtacttaaaggtcccacccagtgccagactgcctgcagtattactgccggcgctgtgtgttggatggtccagtttagcacgtgtagcgtgtgggttcttgctttaccttgttgagtctagaaccacagctctagaattagtgctgaattaacacagcagttcagtagtcaccagctacatgtggcaattacatttaaattcattaaaattaagtaaaatgaagaattcagctcctcagtctcactagccacatttcaagtgctcaatagccacttccggcctgtggctaccatattggacagcataggtggaggacatttccatcactgcagaaagttatgatatggacagtgctggtttcgactaagataggaggggtggaaatagcaaaatggtagtgcttgcatgttgatttttctctccactccattaaatctagggaaccaacagtgtttgtaatgaagaacatcagactctgagctgtaacctgaattcttgtccaaaattcagcacactggcaacgagcacatcaaacagattgccacttgtcctgtcggcgtctttgagacacacttgcccatctaggaaagcacagtgcaggtatctgtgttctgccaccgtgtgccagcccggaccagctcacagacagccctgcctgtcttacttgggctgctcggcttcactgtctcagggcccctgaacctcccagagccctccgtgattgttggaatgtgagtatagctgtgtgctcttgagttcctgtttttataatcacgtgaagatgtacttgatctgcttctgagcatgata

SEQ ID NO: 85669 - DNA, 1065 bp, Homo sapiens
gacgttggcaagcagagtgtctccaagatggccgcttggggaaggaggcgtcttggcccgggcagcagtggcggcagcgcccgagagaggtgagatccaagggcttgttgcccccagtgcaggcggctcagcggccggagagcccagcgcggcctccgagggctgcagcagccttccttccctggtttccccgcgctccccctaccctcgccgggcatactgggttccagttccggaggatccgggatccgggtgggagcgaggtcgaaggcctcggcggagagcttaggggaaggggcgttagccgggctgagtaaggtaggcagcggccatgcggggcggggcccgaggccgggccgtgctgaaaggaactggcgcccagcgcaggcctcagggacccgcctagctgcccgcgggccgatcggctgctgaagcacccttcccgcctgggcacgcgcgtggccatctcggccgcggccccagacgtgtagaggaaggcagggcccccggagagagaaagaaggggaagccttcacagagcaggccggccgcggcaggggtagtttgatctgcacgtttactagggagctttagctcccgccagatgtgtctcttccgagcccagagccggccacttcctcgagggaagattctgaagacttttggatggttctgtgcaagcgctcctgccgtagaagtcctttaaagtgacctttcctaatgaatggtgtgtgggcagggagctaggagcgtgtttcttccaacagggacctccatttgaataactgatttctagaagatgagattggagtagtttccgtgtttcatgttcaagttgcagtttttgcatctgggaagcagtttcagctagtggaaaccactagaagctgttcagccactagaaatttgggagaagatgtattggtggagccacctggattaactgtccgctaaagcttgattgttatagcagcggtcagcaaaaaaggaaaagtttttgttttgctggttctccccctccccgtctttttggtgaggattgtctaacagaaaagttatcttcct

SEQ ID NO: 85670 - DNA, 1403 bp, Homo sapiens
gcccagagattcccaggtgctgctgcctcagacctgtggactctttggaggatctcttacagtttgtgaacttctcagttcctctactgctcccacagacaacgttgctaaacatattaattggtcccataaatacttgagcaaaacaaatgcgaaaatctgtcccgaattcagcctagaagaagcccagccctgcgcgtcacacttctgtgtagtggaaccccccttcccaccccgccgcaggccacagcaggagggccagcagacggaaaggcgaccctctccttgttgaggattcctttcgatttccttccagctgacattctaccacagttttagctgcttgcaatcctctcaccgtccctcatcacctacagtgtgtgattcaaattccttagcacaatcaagaagcccctccttagtttggaagttgcctagctctccaaattcaactgcctacctttcccgtctggaacttgccaggctagtaaattcagagggtttgcagatacgtagatgttctatgctttacctaaaatgcttttacctcccagccaacttttttttttttttttgagacagagtcttgctctgtcgcccaggcttgagtgcagtggtgcgatcttggctcactgcaacctccgcctcccaggttcaagcaattctcctacctcagcctcctgagtacctgggattacaggtggtgccaccacacccagctaatttttgtatttttagtagagacggggtttcaccatgttggtcaggctggtgtccaactcctgacctcatgatccatccccctcagcctcccaaagtgctgggatttacaggcatgagccacggtgcccagctctcccagccaacttttgtccttcaagaccttgtacctgtctggtctctaaaaagtacctggccttcctgttgagtcatacagccctgcctccaagtgtcagcgtagttcatgctggagacctcttaacagttccatggtatgacactgcggatatggctgtcttttctttgtatcagtgtggtgattcagagggtatactagggattctagaacgcacttctggctcaggggctgcttgtgtaacttctgtttctcagctgcctggtttgtatcatgggatgatagtatctcccctcagaggattgcggtatttcatgaggtgatacgtgtatggaggccaagtgctgttttatattttaagtgatctacatcttgattttcacaacaactgtataaaagtgatactgttggccaggtgcgttagctcacgcctgtaatcccagcactttgggaggccaaggcgggtggatcacctgaggtcaggagttcaagaccggcctggccagcatggtgacacctcgtctgtactaaaaatacaaaaattagc

SEQ ID NO: 85671 - DNA, 1033 bp, Homo sapiens
tgcagaggccccgggcccaggaactgagactagggctttctcatgaggcctcatcaagctcccgcaggtatgacctggcctcctcgcctcgggctgccttaaagcaccgctaacccacgccaaggggctaggcagggcttcgcggggcctggcccaaggtctccagcagagcaataacatcttcccaggttgggttgccacagacaccgtgccctggagcccccagcccatcccatctggtgctaccctgtctgcctggcagcctagcctcacccctcctgtccggtcacctgggggtccttggtaaggatgccgccacatggggccggtttatgcacctgggcgagaacctgactggggcaggggatgctcaggggcctgcaggtctcccacagagctgcttttctgcccgcctcaccctgtgggtttgtatttcttgccgggtcaaaataggcagtgactcgtgccttccctcctcagggccggcggcagggtgtggacccagctggccgctggaccgtccccttcctcattctccaagctcatcaacaggtctcagaggaacatttccataaaaggtgtggcctggcatgcagtgctgtctgcacgctgtcgcttcccccacagcaacctgccggtcagccttaactggtgtggaggtcgaggtggggagggggaggcgggcttccctccctggtgtctggcctctttttgctcagccctcagcacagccttcagcgtggagagcgagaccctgcgtgtcactggggcttggctgaggtctccctgcaggataacagtgacttcaggaacccagaccccagtctgggcggctctaccttcccggctggcccagcccccacaccacagttccctgccacctccaggcacaaaagcctctgaggccacagcccagctatgaagctgagtggctttgtgcggtctcctagggaaggggcagtgatgccatgcatgagatccgctgtgccataagaagttgcttcctttagaatttctggtccaatgcagggag

SEQ ID NO: 85672 - DNA, 1163 bp, Homo sapiens
gaagggtggccagggagccgggcctggggaggcagcagacaatgctaccttctggtgccggctgcaggccctgaccactctcctctctgcccggctcccaggccgccctggacttcgtggtggaggaggacctgaaggcccatctcacctgctggtacatccagaagtacgtcaaggagaaccccctgccgcagtacctggagcgcctgcagccgtaaccctggcctgcaggcgggagcgctccctgccggactcttccacgtggcctttgcctggccccacgtgctctcaggaacctggtcccactgggaacagactcagagttatttttgtaaggacactcatctgtgccccacgtccagatccctggaggcagctgaccaatgatgggcggtgacccggtaaccgaggcggcaaggaggccaggtagtcccggcacctctcactctgcagagaccagcggcttcgtgggaggcctgtgggtcacacgtaggggctagagccagcctgcatcctgcccaccgggctccacttggagatcagcaggagggccagtgtgggacccctgctgccacctctcctgggcctgtgtcctttctggaaattaagaaggtgtgctccagagccaagaggagcaataagaaacctcgtgtgccagcttctgagggtggcagtgccagaccccacctgccagcggtgctgcccctttctcagacccccatgcccagtgcaggcagggccctggaaagggtcagctctccctgacagagaccagcagagtgaaggactgagcactggccaggctcaaccgtacgtgcggttcacacatgtgaacacacaggatgcagtctacaggcgggctggtggtgggtgccgggggtgttttcctctccttggtacccccatcttttttttggcctctcgtgtaggttctgcaggaaaccaaggccccatccccatgggctgctatcccctatacccctgtctgccaggaggagatccaagggggcctgagcagctgcaggcccgccccttgctggccttggccacctgcctgagccttctccgaggagatgccttggggctggggtgggagtgaagctgactattctccaaaaaccaccctcagcatccaagaggaagaaacatcagccacaggggtt

SEQ ID NO: 85673 - DNA, 1111 bp, Homo sapiens
tttatttcatagccacacaccacagggagaggggaaactgcatttcccatatacagatggggagactgaggcatggggaagtgaaatgacttgcccaaagtcttgcaccacagaggtggaagagctgtgattcaccccgcaagtatttgttgagcacctaccatgtaccaagcactcttttaggtgtcggggtctcctggggctgacagtttagagagggaaatggacaagaaatagagtcagttttaaagtatcctggaaaacaagggctttcatgagaggtgcagggggcagaggggaggctgtgttgggcagggctgctatttacaatcatgtgtctaggaaggcccctccctggagggtggcatttaagtgaagacctgaaggaggcaagaaacagagctgcaacagggaagagtgttccaagtggagggaatagcaagagcaaaggctctgcagtgcctgcgatgccttgtgtgtgcaggatgggtcaagaggtcatggggagcaggtggtgcagggcctggaagccgttgtcctatgggctcggctttgactctgaggctcccaggagggtcctgagcagaagacagatgggatgccccagctccctctagctgctgctctaaggggagcaaactgtggggaccaggacagagcagggaggtggttactttactagtccaggcactgcaaacaggcgtgggagaaacgtctagatcctggacagatgtggaaggaagcatggctgtgacttgcttgtgggtgatgagggaaggcttgagctcaggcttgtctgatgccatatcctggttctgaaatgcaagcttgtcattactttatagatggggaaaccaaggcgcacagcctgtaggcagctaagccagaatcaagcccccggcctccatctgaggacggtttctgaaggttggaggcagctggaagagacccccacctcctgggcagccccttccttagccttccctttccctcacaggcagggctgagtgtcccacttgctgcaaggaaaggaacacttgaggggtgcagaaccctggaactttctgcgtcctccctaacccccattttgcagccaggaagactgaggccc

SEQ ID NO: 85674 - DNA, 1004 bp, Homo sapiens
catcccactgaagggacacagaccatggattcagtttggcccagcagtcaggcactcaggctgaggaaatagtgtgcccaggttcaaatcctgctctgccactaatttattgagtgagtcactaggtctctttaagcctcagtttcctggtctgtaaaaggggacaataacacaataacagccacctccctggagtgagatcatttatgcagtctcgtgcttcatacctgctgggtgctcaacagtccctgcttgcctctggctgctctcccgcttgggcaggcagcaggagaggtggatgagggtttgctgagtgagaatgtgagcaagtgatgacatgagagccagagaccctgcaatcgtatctcaatgcgaaccttctgggccgtgggactctcagcaaccgcaaccagatggcctctttgagcctctgttgtctcatctggcaaatgggaatcagaacctagacccgggtgctatggtgtggctctaatgaatgggagatgtctgcaggcacccagcacactgggctgtgggtgcaggccaggtgatggggagggctatgatgttgtctctccgacaggtccaggagggggaggccacctcccacgcctcccctcccatgagcagtgcggccaagcagcctaagccagctggctggttttgataaatgagtattataaacaccaaacaacacacaaagggcatcccagtgctctggtggaagctggggctcctgcggggggtcctgctggaggggacccaactggtaggtatggggcaccaaagaagctccgtgagcaggtgctcctggcagttctgggctgggagacacatcatcgtatccacaatgacaaaatgaagtgataaataatagtagtaatcataataatgataagagcacccactattgggtgttgatgatgtcatttaatgctccaaacaaccctgagagaagatcttggcagaatacttctcagaggcttgcacccagagcatgcaaa

SEQ ID NO: 85675 - DNA, 1048 bp, Homo sapiens
gagttccccaatctgactgtgccacttacagacagaaagaaatcaagagatgtcactatagcaagccagcaagagacctttgtctctgatggttcttgatggtacttcttgagctccagtggtgcagctgtgcatcccagtctggccctcacctggtcctcatgtgtggccctttttacatctccaacccattgcctctgctgttcctttccagggatgctcttcttgcttctctgcctggtaagctcctactggtccttaaaagtccagtctcaaaatcacctcctctgagaggccttccttgtccccacccagatggagatggctgcatcacccaggcaccctcctgggacttttgctcatgcatctatttatagcactcacatggagttttgtgattcctgagctgtttatcgggctcctgactaatccccaaactccttgtatgcgagggcctgtctgagtcatctggccgccaaggaggttggcacgggactggagtcgcttcaccctggtctgtggatgctttcctccttccttttttcattcctcaaatatttatcaggcacctactatgtgcctggttctgggctatgcattgggaacacagcagggaatgaggctcggatggtctggagggagagctgtgttaaaaactgagtcagtaacaaagacatcagcagcataagtgttgtgcctcagtctggggaccatgatgagaaggcctcttaggggtgttcatttaggaagcggtctgagggatgagagggaaccagccccaggaggcttgagtggaagaatgttctgggcaggagcagcaagggtgaagctgctgcggcaggaccatccctggcacatttgaggggcaatactgagactcttgaacatcccaagaagcagagtgcacaaggcggagtgtggccttgtgcagaagtcaaggctgttggccagtgcctgaacccagaaaactcgctggactagccttgcagttctggtagaaaggaagctgctcctggatgcccattttacagacggataagcacaggtc

SEQ ID NO: 85676 - DNA, 1039 bp, Homo sapiens
cccctatgcgggtgctctggctacaccccagctcggaactccccgtccttctctcccccagctcttcttatccttataggccctatgttgccccttccctggctggcctgcaccctgtcctgcagccctgggctcccaggaaccttccttgtcctcccacccctccctaaggtacagccccctctctaccggcctctctctgtcttgagttgcaagcttctccctgcactgggggttctcaccccatcttattcttgtcctggctgcctgggatctgggccagccgccaggccagggtgctggctgtgcaagggatttgctcttctccaagtagctggccttcctggaaatttttgtgaggtggcagcagcaggatttgtcatgcggagggggaaggatgaaactcggagggcaaaaggggaattttttttttttcaggaagaggaaaggatgtttttggtgcgtcggagtttcagtaggctgggttgtgcgagagatttccaaaccggacatagccgtaatgaatgggctgcctcctggctttctgaacctgcagctgcttcaccccagcaagctccctggtgtctctgggcctcagtttccttttctgtaaattggaagtaatcgcacctgcttctgtggacgtgggagtgtggtgtggggtggtgaatagtaaagagctctgaggcgttctctcagcgtagcacctggcgcagagccggtgctcaccagggtacactggctgcacacatctcgctattgtttccattcttcttgctggaaaggcctccactgctggaagtgcagcctcagagtgagcaggaggaagcacctagcagcgggcacctagtgggcacttcatcaggggtcagccgctcttctgttctggagggtgcaggccaatgggagccctatgtgggcctggggagggcatgggctcttcctggcccctgctgctggctgctatggtggctggagccgggtgggctggataattatgccttacataagtgggaggccggatccctgaccattgccc

SEQ ID NO: 85677 - DNA, 1035 bp, Homo sapiens
agcccctagccgatggggcccctgcagcctgcgggtgccccctgcgcatctcccaaccttcctgtcaggagggtcctcaggagttcactggggaagagggagcaggtccttgcaggcagggagccatctgccagggtcagctggcatgagggtgtctgtcggtcagcagggccggctgttgccatggagctggtgcaggtgcatcctgaagctctggtggagggacccagcgaggctgtgtgctaatcctcttcctccctggagacacctggaattagggatcagatagaggaggctggcgcccgaacctggcagtgcaggcagagttggagggtgggggaagcgggcaagtgggtggtgggtgggagcccggtgaactgtggctgagtgggtgggcacacgtcggagagggggctggggctggggctggtgctggggcaggcagtgcaggtggtgcagacacgggcagcccggcagcctggctgagctctgggtgtcacccacagggagacgtgtggatctgcatggagctcatggacacatccttggacaagttctaccggaaggtgctggataaaaacatgacaattccagaggacatccttggggagattgctgtgtctgtgagtggcctgggtgggctggcggggggtcctaggtgcataggcagaggcccagccctgccagcaggcatggagcctgcctattgatggtgtcttgggcagagctgggcatcaatgtgccccctgaacctgggcagctgccctgcataggcccttctcctccaccccagaccagagcctttgtgcttaggagacctccgctcctggggctcctggagccccacagatttggcagatccaggtgtctgagccattgattccaactcttgagttccagatcattttttaaaaaaggaatttagtatttacaacagcgtcatactaaaaatgccccggggcagctcacagaggtacaagctaagttgggggaaaggttagcatccaaaatgtgtgctttttgagtctaaaaagt

SEQ ID NO: 85678 - DNA, 1002 bp, Homo sapiens
tctcaaaaaaaaaaaaaaatcatgtttgaggttacagaaggaataaggaagagggcaacttctctgaacttaattaaatagagcaagaattgggtaaggaagaagcggccgggtgcggtggctcacacccatggtccccgcacttttattgttgaccataatcagcaacagaggagcccagcagagtccctgggcagtctgacccctttaattgtggactaacttctcccagaacccatgataaggagtttctctcctgattgaggataccaagtgtgtgactgttaggcagagcattgcagccccattttggtgttgatatggaaattcctaggtcactatgcagacaagaaaaccaggaccccaggagccagagaaacttgctgcaagtctctagtttgctcctatgaatgcccctccaccctggaagaagccctagacagtcctgtcccttcttccctgggtgcacgtgtcccctgctgctaggcctggggcaatcctggggtggtttggctggcccttgggggctgggcttcctccctgccagcctggccacagctgcactattctctcctagcctgaggaagaaccccgcagagcgtatgagctacctggagctgatggtgagtatgggcgggaggtgcctgccctgctcttcagggctggctggggctgggtggggctctggggagagggctgcatcctgcacacagatgggtagctcctctggctggccctgtgttctctcctttaggtgctcggtcatttgtttgctcctgcatacctggctccctcctccctccttcctgcatgccaggccctgggaagggtacacaggcagtgtgtgacagaatggggcagaggggccaagggtggcatcagggaaggcttcatggaggaggtaccatttgaactgagcctggaaggatgaataagggttatctcctgatggagaggctgtcccaagcagaaggtccagcatgggcagaggcctgacgtgtg

SEQ ID NO: 85679 - DNA, 1016 bp, Homo sapiens
accccactccggccctccagagccccacagccccatctgcgggggcagtgctcacccacaccataagctactgccatcctggcccagggcatctgggaggaaccgagggggctgctcccacctggctctgtggcgagccatttgtcccaagtgccaaagaagcagaccattggggctcccagccaggcccttgtcggccccaccagtgcctctccctgctgctcctaggacccgtctccagctgctgagatcctggactgagggggcctggatgccccctgtggatgctgctgcccctgcacagcaggctgccagtgcctgggtggatgggccaccgccttgcccagcctggatgccatccaagttgtatatttttttaatctctcgactgaatggactttgcacactttggcccagggtggccacacctctatcccggctttggtgcggggtacacaagaggggatgagttgtgtgaataccccaagactcccatgagggagatgccatgagccgcccaaggccttcccctggcactggcaaacagggcctctgcggagcacactggctcacccagtcctgcccgccaccgttatcggtgtcattcacctttcgtgttttttttaatttatcctctgttgattttttcttttgctttatgggtttggcttgtttttcttgcatggtttggagctgatcgcttctcccccaccccctagggtaccagcaggcagagccttgccctctgctcaggctggggtccagtgggaggggcccaagatctctgctcagagaagtgcagggggagccttccagctcactctccctgaggactggcttgacaggggctatgggtttgctttggtgttgtttttaaaaaaagaaaatatatttttttgaaaaaacgactgcccatcccgggtcctttccctgatgggttggggcagttacctggttgctgttttaattaaaaaaaaaaaaaaaaaaaggactaaaggttgtgtgagattgtgtat

SEQ ID NO: 85680 - DNA, 1035 bp, Homo sapiens
ctgtttcctggtgtgtcctcagtgtcccctaaccccaatcaccaccactggtgctccacagctcactccttcctgcctggctgctgaagtggcagcatgaggctgtggagaccttggggacccccgcccagccctctaattagccttcagccatgcatcattggacatggttccatttgcttggccagataggagtgggaacccctttctcagctgccccagggagcagttccgccttggctgtgcattaatgctgtcctagggtcagtgggcacagcctcctggatcctgcctgactccccctgcccacctggactgagccctccctcctgcttgggcagccaaagcctccctctcctgccctcacctgcagcccaggcctctttgaaggactcaggcttggagaggggccagggaacaaacaataaagcttatggagtggaggcttctaccagagccactctgggccattgttccttgagcactttctatgtgcctggtgcactctgggtgtcagggccctctgtcgattcccaccacactcctccctgggaccctcagggccctgcacagtctggcctcacttccaggactcttgctccctccccggggccacgctcctgcttgccttgctgtgcttccaacagatcaggcccactcctacctcagggcctttgcacatgctgctatctctgcctggaatgttctttcccagatctctgcacggcccctcccttaccgctttcatgtcttgcccagatgccaccctctctccaggacctcccctgattcccctgtgggacactgcagcctccctttcccccatgttccttttcctgctttatttttctctgtagaacttaatgctatctgccacaatatattttatttgctgatcttgtttactgtctatctttcccttggaataggatctcctctttttggacctattctaccacagctgtgtccccagtgcctaagcggtaggcaggagatggcaggcgcccagtaaacacagagagtgaatgggctgct

SEQ ID NO: 85681 - DNA, 1038 bp, Homo sapiens
cacgcaggtggactgcacacacccatgtgtgcccatgcaggagctccctggtcataccccacacttctctggtacccgaggccctgcccagtgcctcctctggccactggagccttctgcatgtgcagccgagggaatgaatgcgtcctcccctgcctggcagcccccgtggccagcagcatcccgaggccaggccagacctctacggcccccactgcccacagcatgctgggccatccctccaatgggcttccttgctggggataactctgaggcgtgttctatgcccaggaggctggagcccaggtatcctcagcggtgacctgctcatctatgcagtcatttttggctgccgtcctgtccccatctcatgtccccactcccttcctggtgcttcccgctgtcacctgcaaagtaaactccctactcccaaatccttgactcaagatctgtttctggggaaaggactagaatagaacacacccttatcctaggtcgtgtatcggtgtacacatgtgacatgttgccagcaaagatgcgtttacagagctgtggtgtgagagcaggcatgtgctagcatgtatcatgtgtgtggtgtgcatagcacatagcactgtatgctggacctgttctgggtactgtgcatagactaacatctgctggaccagggaggcagaatgattaggcccattccacagatgtggaaactgaggcaaggatgaatccataaatgtgtgccttaggggtggagccctggcaggagctgggacccaccctaggaggtgagaatttgtgcaccccctcagcattgctgcactacccaccccaagccctgcagatgctggcaggaggctggaggtggaagcggctgcattcatcttcagaccccatggagcgaagctgccgtcccccatgcctgcttctggccttgcaccccagcgactgtgtgcatgcgcccttcccaggatgcctggcccccagatgctggccgatcatgtggcctttgggctctggattccctctctgagcttatttctt

SEQ ID NO: 85682 - DNA, 1045 bp, Homo sapiens
tgcctctacagtcagcaggaaaggcttctccaggtcacgggcaggcactgggatgtaagtgtccacagcatccagtagcttctgcacagacttcagacctaactcagggtcccgaccctcaagggcagacagtagagcctacaatgactggggtctcctcccctttatagccaaactcagtgaacagctcctgaatctccagttccaccagctccaccatctcagagtcctggacagcatcagccttgttcacatacaccaccacatgctccaccccaatctatttggccagtaataagtgctctcgggtctagggcatggggctgtcattggctgctaccaccaggaggcagccgtcaaggggtgtggtgcccgtgatcatatacttaacataatctgcatgacccgggctgtctgtgtgggcatagtggtgggcgacagtgctatactccacatgagccacactgatggtgatacctggagcttgctcctctgggggcattgtcaatctccttgtacttcttgaacttagccccacctccctcggctagaatctttgtgatagctgcaatcagtttggtcttgccatggtccacatggccgatggtacccacattcacatgtggcttctcacacacgttaagtcttcttggcccccacagccaggccgtggcacaagagaggcaatgccagggctttcagcagcagcagcagaccctgcagcaggaaggtccggccggcagcgagaccgctgaagtgaggcgtcgcgcgcagcaaggtggcagccgccattgtggtcatactctcacccccggaaccaagaaatggggaccaggagcccgagcgtgcagcagaggaagggcgcttgtaggtggaaacaacattcaacttcttaatgacaactatttcctgtttttttttcattcctgtttcatcaattatggatgatgtaatattatcacaatagtaaataccagttacaattaacaaaccggtttgggagcaaggctgactcttggtgagccagcaactcctctggttggag

SEQ ID NO: 85683 - DNA, 1182 bp, Homo sapiens
tgctggctcaggtctgaacaatcgcagctggacaggtggtgcacaacgatgttaattttcatcctgtctttttcatcagtgcatccttcagttccctattacttgtgggctggggagttggccaaattgagtgaaaacctgaaatgtctttttgttcttttggttcagccagtttaagttccatgcaatctttaagctaggaggctaataataatacaattctctgcttgcccttttcaaagccacttcagcttataaactccatattagaccatccaggcccagaagacgccaccggcctacaggcagagtcagcggaaccagcctgggctggatctccccctgcgaggcccccaggcaacgcccgcgccgggccggggagatcacgtcccgtgcgtcgggaggcgggggcctcgggctgtgacgtcacgtggccgcgcccctgccgcccagatatctccggcgccgcccgccattttgactccagtgtctcgtttgcagtcggcgctttaggggaactgtcttcctccgcaggcgcgaggctgggtacagggtctattgtctgtggttgactccgtactttggtctgaggccttcgggagctttcccgaggcagttagcagaagccgcagcggccgcccccgcccgtctcctctgtccctgggcccgggagggaccaacttggcgtcacgcccctcagcggtcgccactctcttctctgttgttgggtccgcatcgtattcccggaatcagacggtgccccatagatggccagctttcccccgagggtcaacgagaaagagatcggtgaggattgggaccgtgggtgggcgcatgagggccgaggagaggcagggactccccggaggaggtttgggaggaagcgactccaagtctgagggaagagctccagtgcgccagggccagcccactagcgaggaggaggaagccgcctcggtgggagttggctgaggggtaaacggcaccgacgtggatgcagcacctactgtgctccctcgcggttgctgtgtggctggggcgggcaaggaccccggtttcttcgtcggaggtccgcgcagggctcttgtcctgggagttcttggctcagggcatgactgtcgagtggacagggaagggccactcagggactttaggtttacaatggggaaaagtaaacttgtg

SEQ ID NO: 85684 - DNA, 1059 bp, Homo sapiens
gatcgcccacctctgcctcccaaagtgctaggattacgggcgtgagccaccccgcccagatttccggttttgttttctaagagatggatagagatggatagcatacctacataaagtagaaccatccactaagtgttcccccactagccccctgatttctcttttcttttctttctttttttttttcatatttaggtctcagtgttatttcctggatacgttataaaaacttactagctaagtgccagatatctagaagaacttttgctttttctgagctttttttaaccccagtttttttctttgtttctttttttgaattatcatttggatacaaggttgaacatttctctgcgtagctttttaaatctatgaataaggatttactttttttcttttcttgggtgttaattaaaagccaagccaagtttagtttctcaaggacatacggagagtagaggcaagatttccatgaatgattaaataattctgtgatactactgccttgagctactgccctttttcacaaggcactgccacagatcatccctttctggttatgaaattttggggaggaatgtaaagaaggagctaaatctggtttgcttggttcagcagtgactcagatggtatgttactgttttacagatattaataatgtagtgttgtatcttacggctgatttcccatggcagcctttcccttaataaggtcattaaatcatacatttctgttgctaacattaaacagttacagataatgtaataaaggtttaacttaaaaattttttttcaaagcactttattacaaactttgtgctaggtttataaaattgtaccagtatttaatctgagcacttaaatcattttattaaagtgccaaaggcaatttgatatacctgttatccagcaaagaaacacaaggcaattattagtaaattttaacagattaatgcatttatttggtaggttttataatggctctatttcttgagtttgtatatatttgagaattatgttataaatatgttattatttcattgtctttgctatctatttg

SEQ ID NO: 85685 - DNA, 1047 bp, Homo sapiens
gatgagaacgtaatacaatgcaaaagttaggacttttgtaattgttaggtctaattggtcattacattattattgaccagttttttttacggaaactttcttaaaaactcttgcattgggaaattttagggaaatcactttatcaaaacttggagatagtcattatcgttaaggggtcttcatatactgcataccccccgttagaggatggaatgcagaactcactataccctgtctgcatagaagagggaagaaactcaatcccaaagtaatatggaagcagtctcacatgtattgttggttatatatgatatccagtatttttatttttccttttagtgagattacgtactataggtgaacttttagctcctgcagctccttttgacaagaaatgtggtcgtgaaaattggactgttgcttttgctccagatggttcatactttgcttggtcacaaggacatcgcacagtaaagcttgttccgtggtcccagtgccttcagaacttgtaagactgttacttttctgtattttgtatctgtttgtggaatttaccattttctctcagtgtagggtaataaaaacattttgatatttaagttttactttatagatgatgtcgtgagttttaatcatgggctgaatatatttattggaaattttgtgtaaagaattctttgggccgggcgcggcggctcaggcctataatcccagcactttgggaggccaaggcaggcagatcacttgaggtcaggagtttgatacccgcctggccaacatggtgaaaccccatctctactgaaaatacaagaactagctgggcgtggtgtggcacacctgtagtcccagctactcgggaggctgaggcagaagaattgcttgaacccaggagccggaggttgtagtgagtcgagatagcaccactgcactccagcctgggtgacagagccaaataatgtctcaaaaaaaaaaaaaaaaaaagaattgtctggtgttatttatacattaagtttttctgtatgttaaaagtcagattgtgtctaacaa

SEQ ID NO: 85686 - DNA, 1053 bp, Homo sapiens
tttgaggagcttaacattcctaggccagggaaataacaagcaaagaaataatttgattttatattttaaagttcatgcctgtaattccagcactttgggaggccaaagctgggggatcacttgagcccaggagttttagaccagcctgggcaacatagtgagactccatctctccaaaaaaaaaaaaaaaaaaaaaaaaaaaaaggccagccgtggtgacttgtaactgtagttccaactatttcggaggctgaggtagggggattgcttgaacccaggaggtcgaggctgtagtgagccaagattacgccattgcactccagcctgagtgacagagtgagaccctgtctcaagaaaaataagaacaaaacaaaaatatattaatactgtcttttttttcccttttctatcatatttaggaaaactcctccttaacttggtagatcatactgaagtggtcagagatttaacttttgctccagatggaagcttgatcctggtgtcagcttcaagagacaaaactctcagagtatgggacctgaaagatgatggtatgtcttttttccaagctatgaactaggatttgtttcttgatactactatggagaggtattgggaacatgtggggcatttgactttaaaaatgacatgtgatcaaagttccttttctctgccttaacacttaggttcctttcctgaatagatcaaagaaaaacataaatgtgacccagaataggagccaacagttattcgaagtaaatgatctgatattattcagaaactaaccacataaatctgtatcaactatctgaggaccaaatatggatcaggtttgggattttacaggaaccagtctgtgtttatgtcctcttagggagggttattaacttactgtattggctgagtgaaaatttaggtaggtcttgaagtaacttagtatctaataaaatttaaattgaaacatgacctacataccagaacttataacatgtgaatattagtaaacgttaaattggctaggttaagaagtgcttttataaaaagtgaaagatt

SEQ ID NO: 85687 - DNA, 4236 bp, Homo sapiens
cgctcactgcagcctctgcctcccaggttcaagtaattcttgtgcctcagcctcccaagtagctaggattaccggcatgcgccaccatgcccggctgattttttaatgttttttagtagagatgggtttcaccctgttggccaggattgtctcaaattcctggcctcaagcagtccacctgcctcagcctctcaaagtgctggaattacagacaagagccaccgcgccaggccccagactttttcttgaagggctagatgttgaatatttgaggcttgtgaaccatgctgtctgctgtagagcacaacataaacacatggacaggattgtgttccagtaaaatttaaaacctaagcagctggtgtatatcggtaacccttgttatagataaattgctttcagctataaatgtttgtgatcctttgctttactgctgttttgaaatactgctcatttgaagtggattctagggttaatacagattatttctttttgttcaggaaacatgatgaaagtattgagggggcatcagaattgggtgtacagctgtgcattctctcctgactcttctatgctgtgttcagtcggagccagtaaagcagtacgtgtcaaagttcttgtacattcattatgaattggattatgataatgtgtgcataatcattttaaatctaagtaacctatgaagtctgtgctcggtgtcatgaatattttaaatgttttatttcatgatgggggagaatttgcatgaaggaaattaaatatagttattgattgccaagtgagaagttggattgtttttagagataatagataataatgggcatatcagggttttttttttttgtaagtctagaaaagtttatgtgctgtagaagagatctagtctatatgttaagacattcccttgctaattattttcttctctgttgttctatttttttggtccagtttgctgtttttaaagttttgagtcccagctggtcctgtacatttaactgaaaaaaaagtaacttaaaataatataaaaatagcactcatgtatgtcctacagttataggtgaaatttgatattgtttgtcttacatagcatacctatagacagcttaagtaaagtgactgttaagagggttatgcttattgatgaactcttgtagttgtttaccagctctgttagtatagttaaattgatctcagtagcttcaagtatttataaaatggttgaagtccaaatacatgtgataattacaatacactttgaattaatggagggtgggaggctagttgaaatgcattttatttacccaaggagtatgttaaaatgatagttataaatgttggaagtttaaagcaagatactcagtttagttctttacaaatcataagaagaacaaaattagatgttgacattgctattttaggctgtgtgttttccatatgcttcttgctttccctgtcacaggtggtggcagcaatattggtgtgattgaggttatgctggcaccactcgcacacaggcgcacaatggtgttagctgggcagaaagagtggcatctctggctaccgggctgggggcgacctttaccataggatgaagtaaccttgcattcggctgcaaggtgtactgtacgtacacaggtgctggtcgatgtccactttctgcttttctttctttctttttttcttttttaaagtaatttcccccacagtaaaatacactgactcctgagtaaattgattttccagttttatggaattgggagtctgacaagtgaaaccaatttaatgtaaagtatttggctttcaaatggtttctctgtgctattttttggaattctttcagattccagagatatcttacgtctttgattcaatttaaaatttgtacttattttcttttagaaataatgtattgtgtctgtgcagaaaaaaaaaaaaccaaaaaggattgctttactccaagaggagagattgtcttaggataaacctccaagctcacatttaatataacagactgaagtaaacattagaatcctgtttagagctattctgcacagttaactactgatctttagaatctaaaattgtatatgaacttattcttaaataattgaaccgttttatattcaaatgacttatgatcgtggttagtttgggaaaaataagatggttaaattttgatttattgaaatgtaattgtattattttcataaaatagcattttcattttgtaatgtggtttaacatccttgttgtttgccaaagaaatttcatttggctgtgaatattctatttgcttgcagtatctgtttctcttcctaggctcaagttggtgacccaagcctattgtaaacaagtgattatctcaaagggagatgccaatggagtaacaatttgttaaccttacgttttctgtctgtatatttttttaaaaatctggtagtttctggaaaaaaaagagaagggggtttgtagtacttaaccctatttatttccgtatattttagttaattagtttttggaataaatggatttcagtatagctttgtggttaaattgcattgcctttattttatgtttaggcttatttttaaattaacatttaacagaaacatttgaaatagaatttgcatgtctgccttaattaacttaaagactgattttaatctgactatgacactgagcatattctttaaattactcataatttataatgcttaatataatcttaattaaatttagcagttttagtataagatgtgccattttgtcctctgtatgtctgaatgaagctataacatttgcctttttattgcaggttttcctttggaatatggataaatacaccatgatacggaaactagaaggacatcaccatgatgtggtagcttgtgacttttctcctgatggagcattactggctactgcatcttatgatactcgagtatatatctgggatccacataatggagacattctgatggaatttgggtgggtacagcatgaattattttagtctataattcatctccacctatcaagttatgtgaataattacaatcaccaatatatgcaacctaaaattacagtctattctaatttaaaatgttggtattatttaagcccttgactaatggaaagccttcgatataaattctaaaagtaaatttggctctcttgatacaagtcttgctacttaacagtacccagctctctatagaagtactaattatgtttagagtttttgttggagaaaaacagttaaaaccaaagttggacttaatcttactgtcttaaatcataaaagattttttttttttttgacagagtcttgctctgtcgccaggctggagtgcagtggcgcaatctcagctcactgcaacctccacctcctgggttcaagcagttctcctgcctcagcctcctgagtagctgggcttacaggcacctgcaaccacccctggctaatttttgtatttttagtagagatggggtttcaccatgttggtcaggctggtctcaatctcttgatctcgtgatccacctgccttaacctcccaaagtgctgggattacaggcatgagccactgcgcccgaccataaaagattagttcttttcaggtgactttaatttggatgtatcatctctactgagtcttctcagttatattaattaaggctactttaaacactattcaaagacagatgtactttgtacctgggtaattttgttttcttgaagtgactgatatccactgaaaacatatatttgacctcaggcacctgtttcccccacctactccaatatttgctggaggagcaaatgaccggtgggtacgatctgtatcttttagccatgatggactgcatgttgcaagccttgctgatgataagtaagtatgtgcattatagcttgactgacttactattaccttttacattcttaagccttaaagcctttctgcagttaagagttttaatgtctcttcctcaacacaagcccctgggagattttgttgtgtcttaaagaatatcggcctgaacaattatctgtgtaaactaaagataatgcatgcctctccctgtgttccttgtttaacttgtttaggcatagtgggttgatttttagtcagcttttagcccagcttacagagattttttaaagtaatgtcttaacaaaggttgaagcagaaggaaatttctaaagtgaaacaaatagtaaaaccaaaagaatta

SEQ ID NO: 85688 - DNA, 1962 bp, Homo sapiens
tttaagggggcttttagcagctagtaatttattgtcagtaaaactctaataagtgttcttcatagtagtgttaccttgtcatggaatacatcattggttagttcttcctggttgggttttaatgtgaagtttgtgactccactactcacatgtattgggtgatagttgtttgagctgtagcaacactgaaatacatatacttgggtgactaagcatgtgctttgtttctgtttaggacacatgacggaagtgtgtatttttgggccactccacggcaggtccctagcctgcaacatttatgtcgcatgtcaatccgaagagtgatgcccacccaagaagttcaggagctgccgattccttccaagcttttggagtttctctcgtatcgtatttagaagattctgccttccctagtagtagggactgacagaatacacttaacacaaacctcaagctttactgacttcaattatctgtttttaaagacgtagaagatttatttaatttgatatgttcttgtactgcattttgatcagttgagcttttaaaatattatttatagacaatagaagtatttctgaacatatcaaatataaatttttttaaagatctaactgtgaaaacatacatacctgtacatatttagatataagctgctatatgttgaatggacccttttgcttttctgatttttagttctgacatgtatatattgcttcagtagagccacaatatgtatctttgctgtaaagtgcaaggaaattttaaattctgggacactgagttagatggtaaatactgacttacgaaagttgaattgggtgaggcgggcaaatcacctgaggtcagcagtttgagactagcctggcaaacatgatgaaaccctgtctctactaaaaatacaaaaaaaaaaaaaattagccaggcgtggtggtgcacacctgtagtcctagctacttgggaggctgaggcaggagaattgcttgaacccaggaggtggaggttgcagtaagccaagatcacaccactgcactccaacctggacaacagagcgagactccatctcaaaaaaaaaaaaaaattgtgttgcctcatacgaaatgtatttggttttgttggagagtgtcagactgatctggaagtgaaacacagtttatgtacagggaaaaggattttattatccttaggaatgtcatccaagacgtagagcttgaatgtgacgttatttaaaaacaacaacaaagaaggcagagccaggatataactagaaaaaggatgtctttttttttttttttactccccctctaaacactgctgctgccttaattttagaaagcagcttactagtttacccttgtggtataaagtattataaattgttgtgaatttgaagaatccgtctactgtattattgctaaatattttgtttatactaagggacaattattttaagaccatggatttaaaaaaaaaaaaaaaaactctgtttctgcaggggatgatattggtgagttgccaaagaagcaatacagcatatctgcttttgccttctgttgtttatcttacctgcagatattaagaatgtatgcattatgtaaaatgctcaattatatatttttgttgagttttttaattaaagacttgtaaaaaaaaaaaacagtatattgcaaatgtttcttaaataggttaggtggagtactttctctctgtctccattgtaaggttgatggtacaccacaggcaaattaagcaaaaaggacaatgaagaaagaatgcaggactcaggcgctgctctagaattcattcagggctccccgagtgcagcagctcttatggtggttttgtttttaggagaactgttgtaataatgcatattttaaaagcatagggaagctctagaacacaggaaggtgactactaagcaagagaaaagtatcttttagtggggaactaccagcctat

SEQ ID NO: 85689 - DNA, 1582 bp, Homo sapiens
aggcacgtagacacatgaaagagaacagggaagggaattacagggcaggtggaaagtgagcttgctagggagagggcaaggtgggggaaccacagttactgacttgccagctctactgggcactgttctgagtggggaaatagttttatcataggtatttgtgcaaggtattatatgaaatctttaaaatggcactggaaggggtaggtattatcccaacctataaatgcacaagtcggggctttaagtgtttaagtaacatacgtgaggtcacatagaaagttgtgagctggaacctggcatggtgactcatggcttgcaatcccagcacttggggagatggagacagcaggatcgcttgagcccagtagtgggcaaaaaagtgagactctgtatctaaaaataaagttgtaagctgggactgatgctaccattaccctgaaatatgtttgtttgttcaaagaatttggatgatcaatagacaagttttgtgtcccagaggaataaggaaatgagaaagttgaaagtgctgaagaaaaaagcccatgcgcttcaccgtgagatttgggctagctaggaaagggaagcaggaagcaagagagcggctgataaattgggaggagatgtgagaagttcaagagtctggacatcttaaatgagatacatgcattagaagaaaaaaagagaaaacaacaacaacaaaaaagagtctggatgtcttgatgagttcctaagtagaaatgacagagaagaggaactgaaaaaggaagtcatgggccaagagtggagtattacaatttcagacttctagtatggagcagcacagttacgggtgtggacaagtgaatgtcttggagtagaaggcaaagaacatttttgcatggaacatggccacaccataccttggtgtgatctcaggtattggataggttggctgtagatactcagtgaatttggaagaagggcctagagatctatcgatgatagaaactgagaaacagaatgtagaatatcagcttgtgaagaggaagggtttggagtgacaggagagcagtcattgagtatgtgaggagctaggagaacatgggaatcttcattctcctagagcaggctctatttgaaaagccatcagggaggtagtttattcagaaaatagttttgcttagctaagataaggatgtgattatggaagaaatgtgagagaatgttttatagtagaaaggaggttccaggggaatgagaggaacctagaaagtttcaacagtagtgtcatgagttaatagaaaacaggaagcaagctgggtatgtgcgtttagaggtggtgtacattttcagcattataaatggatagagatgagtggcaatagttactttggtccataggtttttggtgtcttaactagttatggatctctaccactaaaggaattgcctgttgaacgttgttaggataagagtactgaaggcaaactgcctgggtttgaattttattctgttcctttcgacctttctgggttcaaatcctagctctgcgtattaagttcttttaagctgatgatctttgagcaaatgtcttagcttc

SEQ ID NO: 85690 - DNA, 1100 bp, Homo sapiens
ctcaatttctcctcccccaaaccctccccccgccccttattgctaattgcctctgccagctgtcataaggccctctgtgatcgcggtaattattacaagaccaatccttcctccaggcatgccacaaagccgaatccttgtttgattccaaatgctcgggggtgactctccctcagttttattttcttaaaagctataaaaccacaggacattggaagaatacagtcagtgctgggtattattattttttattacagttggctaaagctgtactgaccaaggctttgcttaaaaaacaaacaaaaccccctacaactggcctttctgcatgcatgctgcagttttccaagtattgagagaaactgattttttgaacacagctgagtgtgtttgctcagcaaagttcagtttttaagctgacaacaatagggggcctgtgaggctcagttccgggaggaggggtcgctgtctggcagagtgtgcgtggttggacttcggtgttgctgggcttggagaatgctctctgtgttggcctctgtgggattgtccccacgttgctctgaagtgctcctggcttccagagtgtgtatataggagaaccacttgctgtgcattctctggaatggccttttgtcctaccctaacttccggagtccctcattttgatggcagtgtggcgttcatgacaccccagagcatccagctatttaagtgttggagctggtttattcagtggcttccctcctgagtgtttgtttagacgatcatccctggcagcagagaacccatccaaaggcccacaggggatctgcagctccctgttcttcccaccgtgatgtggattcgggttcactccacttcctgaaaaggcagggcctgggttgttttgggggatgggaatttagacccctggagtgagttccatggggctgccaccagctagtttagatgagtcacttcatcccggaggcctcagcctcctcacctgcaaaacaaggaggctggagtggatctctgagggctctggaagctcgaaattctctaggttagagaaggagacttggttgggtgaaatcaaatgtttgtgattgtttttatac

SEQ ID NO: 85691 - DNA, 1053 bp, Homo sapiens
cagctgactcatctctgtactgaggtgtgtagggacttgggaaatgtgtcttgatttgcacggaactgtgctctgtgctgtcagccttcaccgtggtaactgaaactcagttctctgatgtaaagcctggcagtcccggcctgcttgggggcacctggacccctgccagggaaggggtcctcagacttgaggttgccagctcagatgtggggctgctgatactaggtatgagtgtctaggctcccagttatgggaaacaagaccaagagacagccatgggaaacccccttcttactgagctgcctgccctgaccctttctcccctgactgcggactctgatttgtggctctggttgggaatgtagatttggggacattgtgctcctcatgggtttcttcccgtaggatggggcaaagaaggggttatgagattgagcagatgcttctgggagtctagagtgtactcacatagcgaggtgtggacctcatgagagtgcctggaaatagcctggtggaagatgttggcaccatttcgtttggaggaggctgaatgactcataagccccggggggctctgatgtcattgaattaggggcctcctttgaccagggttaaccagcaccttgggttccttgcatgtaagcttgttgctattaaataaatgggaagtgggctgggccccgtggctcatgcctgtaatcccagcactttgggaggccgaggtgggccgattacctgaggtcaggtgaccagcctggccaacatggtcaaaccccgtctctactaaaagtacaaaaattagccgggcatggcggtgggtgcctgtaatcccagctactcaggaggctgaggcaggagaattgcttgaacctgggagacggaggttgcagtgagctgagatcatgtcactgcactctagcctaggcaacagagcgagactccatctcaaaatgaaaataaaaaaaaaatggaatggaaggccagaatcctgggaatgtatcagtaataactcagggccctatcccttcctcccacagttatggctaatgtgaa

SEQ ID NO: 85692 - DNA, 1050 bp, Homo sapiens
gtctggcaggatttgttatcttagcacccagcttgtcaaagccgtagtgctacttgttatagcaaacaggcccctgtcaccctgtggctgcaagccaggcaatgcttatgttccaaaagtcagacctgctgttcttactataaagctctgctggaccatgggtggcttctatctttggatgtaaggatgggaggatgagcagcacctcatgctgtgtaagagcacaggttctggtggttgacagcctggattcaggctgcactgcctttctggctagctgtgtgtctttgggcaagttgcttaccctttctgagcaatagtttcctcatctgtgaaatggggattataatggggtcgtttttcatagtaagtaagatgagccatggaaaagcacaatgccttgtgcagaatgagaatatttttatattataatattactatttattttatcgacaagtgtttaattagcacccattagggactgggcactattcttagctctggggaaaatagcagtgaacaaaatggacacaaatgtagaccttgtggaacttacgcttcagtgttgggaggagacattcagatgacaagtaaatatcacctggaatcccagttacttgggaggctggggcagaaggatcacctgagccagagttcaagaccagcctgggcaacatagcaagattcccatccctaaaaataccacacacacactaaggaaaatgtgttatctgttaagtggtaaaagtgctgtggagaaaatgaaagcagggaggggtgcctagatggtggtataatttaaagtgaggggtcaggatgggtttgcagaggaggtgatatttgagtaaagacctcaaaagggtagagaagggctccatggggatacagctggaaaagagctttggaagctgagctcatgtggaagccaaaggggagtgaaccagggttgttggaaaaccctggggccaggggtgaggccacaaggggccctgggcatgacatttagggaggtgcttgctttccagtacccactgcactcacgggtctctg

SEQ ID NO: 85693 - DNA, 1039 bp, Homo sapiens
gtcatcacacacacagatgtcagtgacagaggctgggtaagaacatgagcatattcatactgttacatcgaggaaaaatacacagtatttaagattgcatgtatgtggcatttgtagtcctgtaaatatgtgatgatatgtatgcatatggggaaaactagaggtgaaattgaaatgagttatttgtggtgggactgtttttcttttgcaaaaattcctttattattgctataattgcattccttcatttattaaagtaatgaatatttgagcacctcctagctatcaggctctgagaaggtgcttgggtagagcagtggactggactgcacggctcctgccccggggggaccatgctcagtgagcgattcttgagcccccaccccttctcagcgctcaaggattgaaggctaatgaagtggtgcaaaattcaaactttctggaataaaacggagagttggtcctccaggttctctgcagggcgcttgttgagccagtcccagattctgctgagaaacagggaagtttccagagttgccaccccctcctgagggtagagaactcaggggtagagctggcttggcaccaaaagggctccctgagtcttggctgctgggacttgagcagtgctggggcgctgccggtgagctgtgatcccatcttctcagggagcgcccctgcctgtttgactgtggtgccgttggtatgagaggttgccccaggaaggagaccgcagctgtgggctcatctcctgggtgcccaacactcacagggtccacattgcccgtgatgtgccctgggaagcccatggttgactcagaaggactgaaatgttagacagccacagatggtcccactgcccccactctgagaaaagccctctggctgtttggatgagggtggtggcgatgaggacatttgtaactgcagcacacatgtaaggcctgctgtctatgttctgggctctcagatagcactgggaatactgtaccccaccagtcccctccatgacaggaaaggggtcccgatccagacccca

SEQ ID NO: 85694 - DNA, 1390 bp, Homo sapiens
ataaatgaaataagtggagggaaagtgaaggaaatgcatacagttgttaaaggtgagtggtttgtccaccatcagtggatagtggcctaatacttaacttattttccttttttctttcccaatttttcaataaacctacatgtctcgtgttggggggaaaatcatgtcatccacaaaaaaatattttggctggattttcagtacttcaaaatgtgacagacatttctcccatgttatttttgtgcccactgccaagttttaaccatttcattgcgcaggccttgtccctggcttaatgtggttatctgctcatgtgatgtggtttgagtctacaggtaaaaaaatagattttttttttcaagtgtgtgaactaggaacttgagaatgatgagggagaaaatggaaaattcacatagcaactcatcaacaggttttttgaagtgaaattatgtgctcttaaaaataatctaaaaccaggaaagagcacgttagagcctatcagctcagttgtgaggtagaaatcacagacccagctgggcacagtggctcacgcctgtaatcccagcactttgggaggccaagacgggtggatcacctgaggtcgggagttcgagaccagcctgatcaacgtggagaaaccctgtctctattaaaaatacacaatttgctgggcatggtggcgcatgcctgtaatcccagctactcaggaggctgaggcaggagaatcgcttgaacgtgggaggcggaggttgcagtgagctgagattgcgccattgcactccagcctgggcaacaagagcgaaattctcaaaaaaaaaaaaaaaaaaagaaatcacagacccatgcttttcctctgtgactttatgtgtcatttctttcttaggtgactggactgatgttctgttctagatgaaactccttgaggggaccatttgaaaaggcttgatgtgctgcccaaagcccccttcagagctgacttctccacccccagctgccgtgagccttggctgctgacagctcatagctgagtccctcccgtgaagtcaccttctgctgaagggtacatcctctcccaaggtgaccccctccaacgtttagtgtccattgtaataatgcgtctacaaaaatagaccttttgaaggaagagataaggaaagctctattttcttcctgcagctctctttgagggcctctggatgggaattcctagatggagaactccctgtgttgcagtggtggagggtggggagctggggatgtgtctctcttgtatctgcagtgccaggtttagaggaggctgacttggggtgtgagaaatatttgctggaagcagacagagagcagtgaggtgccagtgaccttggtcagtcccagtgttggaggctccagt

SEQ ID NO: 85695 - DNA, 1532 bp, Homo sapiens
aactatatcacatacccagtcccactgcctcccagtgtccctggtcagaggcattcataacagcttttagagattttttgtgcatgtgcacccataaatgtgcacatgtgttccagcctttaaaatttttgaattgtgaaatatcatacattcaaaacatatataaagtttaaagaatgataaactgaacacccatgtacccacaactcaggttaagaagtgaaatattcccagtctctagaccccttctgtgttccacaatccttttactgaagtgagaatatgctatttatgctctttttactttttttacttctgtctggctcacatgtcttgttttttttttaatagctgataacatttcctctatctggatgtaccattattagtagtagttttttttaagcaatttcctcttgatagttacttagggtgtttccaatcttttgctgttaccaacaatgctgcaataatttttctggcttccaagaactgacattaattagaatgtgctatgagaagtcctattagctgagcatggtggctcactttgggagcactttgggaggccaagacaggaggattgcttgagtctaggagttagagaccagcctgggcaacatggtgagtccctgtctctattaaaaaataatattaggccaggcgcagtggctcacgcctgtaatcccagcactttgggaggccgaggcaggtggatcatgaggtcaagagatcgagaccattctggccaacatggtgaaaccctgtctctactaaaaacataaaaattagctgggcgtggtggcgcatgcctgcagtcccagctactcgggaggctgaggcaagagaattgcttgaacccgggaggcggaggttgcagtaagccgagaatgtgccactgcactccagcctggcgacagagcaagactccatctcaaaaaaaatttttttttaaaaaatgtcgtgttgtctcagcatctctgacctgtcagtcctttccagagcaatacagaaacatttgcagcacgaaagccctgcatggctctagtctcctaacatgttgatgtcctgtgccactctccctgtacctgggtggtgccagcattcctgtctgatgccatgcctctctggaagcccctgggggccgggcccgtgggagagtgtaggatcctcattggatcctcagctgggtgtctgccatgggcgtgcccacatgcagggtgtggagaagtatgctgatgggaactcagctgcaggcttggctccaagcagagttccttttcttttgattgtgcaacatccctgcgagggatctgggtctgcccttctgcttttcttcatcttcctgcagtggggaatgaggcagggggcctggtttgggggttcaagcccaggccacttgagcttttgagacgaggctccttgtttttctttgcttgctccatctgccactttcccttttctcttctcttttgttctttctccttttctctttcttcatcccctctttagactacaattcctggtaaccc

SEQ ID NO: 85696 - DNA, 2192 bp, Homo sapiens
ggaaatatattccatgcggggagggaaatgggaatgatcttactttatagatgccacttcatagaaagcattggcactgggattgccagcctttcccaaagcagtgtgtgttccttcatcattctgctgatgatgatcatttatggagcaatttactatgtgaggtacatgataaccccagtctcctttaatcctcgtgaaaccctatgaagcaataagggactattattatccacactttatacatataaatgaagaaagtgaggctttgtgaagttgaatgatgttcccaaggtcacccagttagtaaatgctgaagctggagtcctcagtcttagttattaatgtaagcttgcttttcaggacagagagggctttggaggaccaggaagggctccaattctgaggcaaaggctgtgaaacaccggggtcaggcaggaaatcatgcccttgaattctttaacagggcagattttttaagtcagagacattaacgatcagctccgtataatgtttatggcctgtgtgaccctgccccgtggtgctcggtagaccccactgcccatgtgtgcctgatgattccatttctgtcttgcttattgcaagtgaccttgaattacctaaaacccagggaaatgtgttcttaatctgcccttttaacaatgctgattttacccttccaactcagatttaaataacctttccttctgtgttgtcgtgagtgtaaagaagcagcatcatgaaaaagcccagccctaaactctctgtaattatggggtatggtggagagggaggggcactgaaaaggaaataatggggtcgtgagaccattggaaattgcactggttatattcagtagcagagctggagatttttgcctgctgctgggaaaaatttaaaaagcaaaacaacctctgcctcagccttggaggtttagctgttgaatttactccctttaatttgaggcacctgaggctcccattttgtggtgtgattggctggactttccaccacttcttcctctctctggccagagagaaacttggggacgctgaggtggtttgtagcagctgtcatcaatgtccgcctttcatgtccacagtggtttggagcagaggcccagaaatgcttggggagtctctgtgaattcagaagaagtctccttctcccactccgctgtctgacagcaggttaaaaaaaaaaattacaaagagcttccaggaacaaaaagtggagatgattttttttatggcccttaaagacttgaaatttgcaggagaaatgccgtgtggttgcgtaattctatatgtggagtatctggaattattcctggagaggcgggcaagcacccagattagagatgtgtaaagtgcagttttgtcttgcagtccaagcaggtgagcattcaggcctgtgggaaggaaggaagggaacagcaggtggcagtaactgggaagcttgcctctgagtgagattaactagaatgtatttttccgctgcatttaaagagccagtgaaaggggcagatttacccagggtcacgtgcctggtcagtgccttaaatggacccagggtgtcagccccctctgcctcgacttcaacagagttaatgtttccccagagactaatagagggaccgatattagggattccggggacaagtacgaacaggtctttcgatttacatttaaaagcagtagagagcaggaaggagatttctggcatttgtgcagtttaaaaaccaactagacaaaaaatcttgatggagctgtttcccaatcagcctggcagtcctctcagcattgacgtcgtgagaatgaaagcttctctgagagtgccattgggcggtgtcccttccaagttctccaggaagcaaattttggaccctggccgctgactcagtgtggcctgctgggtggctccctgtgcctgggaggcggccctgtcagtgtccctgggctcagcccataagcaagtgccccaggtgatcctgctcccattcagtgactggagaggcagagggaaggggctcccgggcagtgcgggttccaggtgggcacagctggtaagccgggcggctgggcagggctctgcttcaggtgtgcagagtgggtgtgagttctgcacagcacaggaggtggtttctgcccttacccattgggcagggaaggaagcttgagaaatcagacttg

SEQ ID NO: 85697 - DNA, 1048 bp, Homo sapiens
tattcagccttttgtccagtttggtatcgttaactcctgctcaaatcctgcttgtggtcgttggtgcagttcccatctatttctggttgtctttctactgagcacgtggaagcattgcactctcctaccttcttcagttaggtgtggatgtgtgacttgttttgaccagtgaactatgagcagaaagaaacatgacattaaagtggggaaacttttagtgctcatgtgatttgccacattccttcctcctaccctctcgtgctcctagatggtggaggcgccgtcagcctagtcctggtgtaaggaggtgcgggtcggagctcctagtcaactcacgatgaacacgtagtatgaatgagaggtaacctctgttgtttatactactgggatttgggagttgtttgttaccatggcatagcctatgcaatcctgacagatgtactctaagaagaacaaaacaagaagttggcatttggattaggcaggtgggtatctggatactgtggataaaagcccaagcatccagtattttatgggttgtttcctatagtgaagatgttgtgcttggccccgtgggaagtatagagaccctggcaggttgcttcatagaagaaatggaagggagtttaaaagatgagtctctgaggtctggagaggtttaatgacttacccaaacatctgtgaaggcacctgccgggatccagcagctgtgcccagcctggctctgtgaggctggtccgcagtcagccggccattcttacccacctcagtcagtggtttcaactcagttgcaggtctgtgaatatttccagggcaaagtctgtctttaccttcccagggcctctcgcaggctgtggcacagtcacgtttgttgagtgagttgggatatgggggggagaaggcagacagtgagcagtgccatgatggggtgcagctgtggggtttgagggttccggggaaagagatgacctgaggaggccggcagagaccctggagcctgcttgaagggtgggtacagacggggatggggcctgggcagggagaaggg

SEQ ID NO: 85698 - DNA, 1044 bp, Homo sapiens
aacctccacctcccgggttcaagtgattcttctgccttagcctccccagtagctgggattacaggcatgagccaccacgcctggctaatttgtatttttagtagagaaagggtttctccatgttggtcaggctgatctcgaactcccaacctcaggtgatccacctgcgtcagcgtcccaaagtgctgggattacaggtgtgagctactgtgcctggcctttgtttggcttttaatatggctactagaacataccaagtacatctcttggatagtcttattctagagcgtgtagcctggcagctgctgtcctgccctagaaggggctatcttggcttcagaggggagaaatgaaacccatctgggtacctccctaatctcccacgtgcccccagtctcctgctccccaacctgccaccttgattacaaaggagcaagtgccctgggcagtgttcactgtggcagccaccctgctaatacattactctggggtcttgggtcagcaagttaggttactgagggagcttctgttggggtggagtggcttgttagggtggactttggaggcgtggacatgggtttgaatgtgtctaactggacagaggaagccatgagccctgtgtggaatcctggctctgagcagttagaataatggttatcattgactgggtgcctatggcctgccaagccctatgctgggaacttttatcatccctctgaatcctcccactgacctggaaggtgctgtgatgtccattttgcagatgaggatcatcaagggcctaagttgtaacatactagcctggagtcctgctatttgtaagtggcaggagcttgtagtgaagcccctctctgactcaagatcatgctctttgccccacatcactcctctctgggcttattgcctcttctctccaaccctcagtttcctgatgaaaacaaaggggactggacacttgctcacaggaggtgcaggaagggcagggacaaacacaggcttgagattcagcctgtcttcactgggccctctttcctaggtttgggc

SEQ ID NO: 85699 - DNA, 1065 bp, Homo sapiens
aaaccatccctgattagactgggaaggtggcggtgctgccccaccagggctcttcctgaccgtggttatcccagtgacctctggcacgtcacttcacctcaatgagcctcagtttccctcatctctaaaagggagtgttggtggtgataaaacttattcactgaagagttataaggaccgagtgagtagacgtaaaaaggcttggttgccaataaagcatgaggtaccagcatgagtggtcattttgtgtagtttaatggatggtttttagacacgatgaaattggaaagagtgtgggagctagagagaaatctaagtcctaacaccgaagagctgagtggccttagcttaaggtaatttaggtaacttaacctccccaagcctcagtgccatcgtctgtgaaatagggcatttgagaggatttgagtgaggctgcactgccgtccgttcagagcagatgctctcttgctggttcatttttccaaatgcatgggttgggggtatgatgtgcttggcagaagcctaccaagaatgcttatctaatgtcttttaaaagtgtacagataaccatttcctggctcaattctctgcagcaaatgcactttgatcctcctctgagcatcccgcattgcctgccaggcacccttctgagccagagttatcttggtatggagcgccgtaccacccaggagccatgtagcatgttccccattccttgattctcacaactgtcttgagagcagggagaaagctattatccccatctgagaagacagagtctcagaaggtggggatgagcctgcctgtgcacactgcacacagctcttggaaaaacagtctagaagctctaaaaacaccttttctgtccacttcctctgctgtttacttctttcttaggaaaaaagtgagaagggtgaggagtttcctggctagagattctagtgcatcttgctcctgcagaatgtttggctgtgaagaggtaggccaagaaacgtggggacgcctggctggggctggaacactggcaggcagctgactggactgtcatgacatctcagagccaga

SEQ ID NO: 85700 - DNA, 1028 bp, Homo sapiens
ctggcagggctgggctgtggctccatggctgaggtatctgcatagggagaatgtgtgatttagaggcagcttggtcagcttaggaaatggaggttcctgaggcaaaccttttcagtgcccaagcagggttgcctaggtgagggggctctcagggtcagactcctctgcatcccgtctcaccggcgagaccgttggtgtgatgagctgcaagcatccaggtttgtttgcttcctgccacacgtggcaattcttaaaactagtttttggtgttaggataagcacacccgacaaacatctgctgaagtgtaagcttgctcatcagggagaatactctgattgatgtggactttctaggatagcagagcccaagtggctttgtgcaattgatagtagtcatgtgtatgttaagttagcttgagccgactcttcagggctggagtagaccagatcctgaaccccttatcccctcatcaaggtcctggtgtgtctctagcctttgttttgatgaccccagcaaaattccctgctctttctccctgtagtgacttctttgttgctttctgagctaggttaggtttccatcactaatctgtggagaaaatgtgtatatcccaagccatttcctccttcagaggagcttatgattttggcttggaaaatagagatgaatatactcgaagcatccagggaaggatgaattgctgtacccttgccagtttccagtggaacataaatgtgagcatttcttctctgaagaggaggattccaggcatcctggaggggtgataaagtggcataggattcaggttcaatcaagatgtattgagaatggccaggtgcagtggcttacgcctgtaatcccagcactttgggaggccgaggcaggtggattacctgaggtcacaggagtttgagaccagcctggccaacatagtgaaaccccgtctctactaaaaacaaaaattagctggatgtggtggcgtatgcttgtaatgccagctactcgggaggctgaagcaagagaattg

SEQ ID NO: 85701 - DNA, 1049 bp, Homo sapiens
tgaggctggactcgatggcaggcatgcaggtgagcatccctgagccagtgagtgagcccagtgtgctgtccagcacccacatcccgatgtagctttgtttttctttactcaatgttgaatacacagtacatcccatcagaagtctggaagggtctgtagtattttcagttacacatgattgtattttgtggagggaatgatgtgctttagggacattgccagctttgggtttgtgtgtgaagattgggacatcagtcacccttgtgctatcagggatctactctaattcctagcctctgaaattttcactgacaatccaggtagaggaagtgatatggtaccatacataaggaaaagattgttaacactactaggttgacaaatgagtattgacatgattctgtaactgagggagcctgctactatacatgggaaactggtgtccatgttagcctgtgccttggattcatttactcatttatatgttaacatctgtgacatctgtcacaacagatttaaccccctgccctgcttctgagacatgaagatctgggccactgagagggtcctgtggcagccaacgaccaaagtcagggttagggtgacaacctataataggccttggcatctggctgctaacatagccaagatcatgggtttgagagttgcccacagaagagatctccccatctcaggccctgcaattttagggtggagctgactttgtttgcaaagtcagtcgtctggaaagaggtgttttttgcaaaggtgcaaaaaagcctgggtggggtataatccaaacggcacctgccaaaagtcttcatgctcctccttttcgaggtcattctgcaggctgagcaggagtaacactaacagagttctatttagtgagcactttatatgttctggacattggactaaacactttgcatacatgagtctgcagcaaattctcagcagtgctatggggcatgtattatattttctctgctttacagagaaggagactaagatgatatgatctagatcctgccacacagctgatgtgt

SEQ ID NO: 85702 - DNA, 1023 bp, Homo sapiens
aaagggcctctgatcccaggccctcagctttagcccctgcacatagccctattttgtgcagggcgggactttctcatttgccagtcccctagaagtcaagtgtcacccaaggttaacgcagctttttggctgtggctcaccctcccacgttccatcctgacccacttttccttttgaatgttctttaaacatttaaaaaatttaatgtattcattttgactcaagttctagtgtgggatcttgtggataatactgtttctttttttaaaaagaattaaaattttacaatcacgcattttgtaaaatgttacaaaacatcctgggagtagggaaacccactctgtagaagccttcccatctcctctctacattttgggagtaattgggggacacaccagtgcccaaagctggagtagctgtgtgtgtttctctaatgcaggacacatccggccattttcacacaggagcctggttttagaaatgtgtgttgatgatgcagagaaaggtgacaagatgtgggtgtgcccgcaagcctgtcctgctgactgtgtgctgggggttaggtggggaggtgggaaaggaggaggagccaggcccagggccaccagcaggtggagcccaacagcattgctatgtgtttgggggttgccaaactctggcccttgggccaaatctagcccagcactattttttgtagagccttgtgaactaagaatggtttttacattttgaactggcgggaggaattaaaaacaacagaatatttcgtgacccgtaaaagttacatgaaatttgtttcagtatccatagttaaattttatgggagcacagccacacccatttgtgtacgtgttgtctgtggctctggtggtgccacagcagcagagtggagcagtttcgacagagaccatgtggcccacaaagctgaagagactctgtgtggctttcagaaaaagtttgcctattctcacactatgtattatacctctggatttatagaaggaggaatggggcctttccacg

SEQ ID NO: 85703 - DNA, 1140 bp, Homo sapiens
taaagtgcttgagatcagtgctttttactgtaactgaaggtgatgagcataatggtgtttaaaacaaagactgtagctgttttttttttggattgaacaggactgtcttgaagtcacagtattttggttactccaggcttttctattccctaagccagctccattagggggttgacttggagcatctgtgagtccttagaggaccatccatatggcgttgctcaggtgtgtgcagggcagcagtcagggccctgagaacccgcctcccggaggctccctctgaacagctgagcagcctctgcagtttcacaccggttttttgttgtggttcccctggttactagctctaggatgcacgcagggaattaccccaaaacattgggaagatatggctcttctcccagaagggtccattttcccccgaagatatgtcacagggagggcaaggaaatacatttttattaaagcaaacgtggacacattttggagcagaatgcatgatacactcttaacttttaagcaaaagcatgaggattcagagaggcattttgccttcccatctggggtttggggagaaaccacaccccaactcttactacttccctcatgctttaggtgtgtgtttgcctcctttggaacatttgagcagtgtgggatgggtggaaatgccaggcccctgctggtagtctgcagacacactgtgtccgggggaggccttaccggtagaggcttctaaggttctgatcccccagaaattgtgcacaggatgttgggcacatgtgtgcatttccctgataagaaggcccacggcctctatcagattctccaagtctgtgaggtcccagagatgttgacagcctgtggttcagatgaccttcaaaggcagaagaaagccctagaagaaggtcgagggaggtcttttggctgagcggggagagtctttgtccacacaggcaggagagaggcctttgatagcttcagccactgccacttcctgtctctctttttgcagaaaagagcggggagtgagccgtccatggcggccctggggccaccaatctccctgtagcactttggttccatgctggagtaacctttggttctggtcttcctggacgtgggacttttagcgccaaaact

SEQ ID NO: 85704 - DNA, 1050 bp, Homo sapiens
cccaggtggccctgatgcaccccagtattagagtttattgctaaaaggaacatgccctgtcactcctggtatcctgggagtcatgtttctcttctctctcagttctacttggagcaagagctttcctgggctgcaaatgagaaaacaattcctaggaacccacagcagtactgagcatgctgggagcttgggacttggagatgaatgagccaccgttgctgctccaagtaggactacttggagtgtagctgaggccttggacgcagtatgaccaggggcagctctgccagggctgttggccaatcagtcattttcatttcttgttggaggccaggtcctctgctgaactcatttcctagctagtgttaccctaattctgatgaagatcaatggggctataattcttgtttttgttcctctttgcagcattaacagcagcaaagttgtaccccggtttgaaaggtttggcttgggcgtcctggagtccagtaatccaaagatgtagccagccatatggtttttcgctgctgatctctttctttttaaaatgtgtttctgaaacatcccaacaaccaccacgacaaaaaaacactgcctgcccagcgctgcaaaccaggagcacacgtcctagattcagactgttggccataaaccccactcgggagatggagctgcacctgctatttcttaaaatgacaccaccaacaaccaaacctgtcatgacagacagcaaatgtttacacgtatatttctcctgagtgaacctgatgttttacaataggtaataataaaaacagtctgtgcagatgcactggcactgacggccaggatggcggaaatggccatcccctctgaggaccttgtaggcggtgagggacccatgctgggccagaaggaagacaaacatggtaattgcagctgttcttggggtagggcggggagcccagaaggtctgatctggcctctgctttttggcccaagactccatcagggaaatctatctagggctctccccttgtcctttcaaagggatactgccccttcctcgtc

SEQ ID NO: 85705 - DNA, 1033 bp, Homo sapiens
taaccaccagagccgcagccccctgggtttctgtctaactcgaagtcttgaatcctagctagtttggggttgtgagcagtgtgtagcaaagttgatctctccatgtcaccaaatcaaaacaccctctgtcatcctacggcatttcctcttgaggtcacagagaggaatggcaagccctggaaacctgtgttattctgtgttgatttggtgtggggggagggtggagacgtaaatgtgaagccagttggagtttgtgctatgcagcagtgttagccaggatctcatcagcgtgcaaacctagcatcttctgtggccacaagccacacacttgctttttttgaatgtgatgtaaaatttgtacagtaaagtttttatattttctatcaactacatttgtcttccagacatgctattaatttaaattaaaatggttagtattaacaaacatgctgtatcgggtttttttgccactggcaagaacatgccctctgtgctaagccaggcctgggtgtctggagtttgtgaataaagttataccaaggtgttctggggcttgtctttgctttggtcagttccagctgagtcctggggaccatttggatgggtggcatgggaatggataggtctggggtgactgaacccctggtctatagattaaggagctccttccaaaggaagaagttatgccaggacctcagtggcaggtgtttctaaacagatggaggaatggagaaggcacagcgtcaatggcccacaatgcgcagaggaagatcatccaggccccagcagcaacaaagccatgagcaggcccagcatctcctgagctggagatgccttagccttatggaagccttggagggatgaggtggtgttcatctgaatccaatatctaggagcccctcattgccagttatatatacagataggtggagaagaggtactttctaaacaccatctcactttaatcctcacaaggccatgaggtaagaattgtgatgtttcagctgaggaaaatgagaaacggagaggttaa

SEQ ID NO: 85706 - DNA, 1047 bp, Homo sapiens
ggtattcacactggggcagaattatggaggaaacattcagtatgttttggtggaggaagggagtgagtcaggaatgtagactggcgtcttggcccttagatgctggtattagaaggacctagagagttggagtgtgaccatacctccctgtccttctaactcactctccagagtgagttatcactatcctccctccccagccctgtcagcttcctttttcactaaagaagaaagggagtccaggcatgaactagagatttggctgcccagtgcctcctgcttgggtttcaccacctccaagaagcccctgcaggaggcaggtgaggtccagatgatggaggcctgagatttctccagagtcctcctgcccctgttggcttccctcctccacttcgaatctctctgtcttgcagtataaaaaacaaaactgagagctccgagggtgagccttcctggcctctggaagttgagaggcccctcttctggagctcagcagcagcagctggtttggaagagccattggccttgttggctgaaagccagaaatcaggggagaagctgaccttgctccagaggctcctcttgccgcggccatgttgctagcatcctttatgtttgcacttccagccacttacgatgtgaaatttggggagaatgtagtatttttttgcttcttttgtgtgttttttatttttgtgtttttgttcttttacttttctctgaaagtgattcatttattctggagatctctttatcattctctgagtcccagagcagatgtcccctcaggtagcaacctgtacagaagaaagcacgtgggttttagaaccagacagatctggatttgaatcccagatgcaataagatgaaggtgaagtgcctcacacaggatgtggcacatgacagtgcctgaagggctcccttcaaggaagccgtcctgccccgccccctcctctgctcctgcagcgccctgcacagctctgctccccgcatgcaccgcatcgggtctcagttttttgtttgcgagcttgccctgtccctgcttgt

SEQ ID NO: 85707 - DNA, 1044 bp, Homo sapiens
atgaggggcattcagaggtggaatttgataggaattagaaaccagtggcatggggccgggtgtggtggctcacgcctgtaatcctagcactttgggaggccaaggtgggtggatcacctgaggtcgggagtttgagaccagcctgaccaacagggagaaaccccatctctactaaaaatacgaaaattagctgggtgtggtggcatgcacctgtaatcccagctactcaggaggctgaggcaggagaattgcttaaacccaggaggcggaggttgcggtcgagattgcgccattgcactccagcctgggcaacaagagcgaaactctgtctcaaaaaaaaaaaaataaaaaaagaaaagaaaagaaagaaaccagtggcatggggattgaggagaaggaggaacctgggttgactgtgatgattttggtttggttgcctgggaagatggaggagccatcacagaggcagggagccaggatgcagaggccaagatcaagtccaaagggcagggcaagggaggcaagtgttgccaggcccagaggcattgactgcagttttagcaatgatgctgtgaggttcattgccccttaaataatagcaaacctacgctttaaattaaattaaaacatttttagtttagctcttctaagtggacccacacatgtattctctactagttattactgagaatgactaagtattataattgagctgaaaataatctgccgcccatacttgctgggttggttactaagtattgcttgagtttttaagtaatgaaacaaagttgtgctctttccaaatgttaattttgaggactgcagatggtaaccatctgttccgcgactagcattttacaatatttgattactactttatatagtttggggaagcctgccagtggagtctacccatcaggtttgggactttggtggtatgtctcctgtggttgctcctgatggtcttggccacccttgaacgggttcccctctgatttctgggtggtgagtcggactggcatggtcatgattgatagcaggagg

SEQ ID NO: 85708 - DNA, 1474 bp, Homo sapiens
ttgctaggggaggtgagtccggccgcggcggaaccggcggctgaggaggcggcggctgaggagaaggcggccgcggcggctgaggagaaagcggccgcggggacggaagccgggtgggggggagggggggagacggagcagccttgagccctgcggggccgttgcgcgggggacccacccgctctcccccccaaccctcctcagcagaagcagccggcggcgggggcaggagtcagcccgcttccgaccgtaccccgcccgcctcccggggctcctgttctttggccccgggaccctaaccttctcccggggcggttccctccgtctgggcgtccgagcgctgcccacatctttcattcctccctgcacctccttcccttcacttttgccccggctctctttctcctctctgtcctgctgtcgcctcctctcctcactccagcctccttccctggcttattctgcccaggaaagtttggaacccccgccccccctccccaatcaggtcaacctgactaggagtagggggagatgtaggaaggcctgagagttcggggggggggaagctggaagctggtttcccagaaaatttccccccatcttctccatttagggtggtgggaattttttttaatcctgtttttgaggaggtggtaggtgtttagaaaaggatgtgggaatggaaggggtagatgagtcaaccctctttcaagattccaagggtggtgtgttacctgatccttttcgtgtgtggagttcagggggtcgggaggtttggcctttattcccacattcaaagttggaacctcccccaaattaagaatggagttttagtacccacttgtggcaggaatcctggggggaaggggtccttttttcctttttcttttcttttttcccttttttttccttttggcaacccacacccttccacacacgctcaccccaaaattaaacaccaagatcctctaacttgtttggattgactgatgaagacataaagctctatgttttttgaggtggagtgagtggtttttcttcatttttaaatggccaaatgacagcttgacccagtttgctttccaatcaaagggcatttattttgaatgtctctttgtggcgcaagagccaacgcaaaaatgatggcggcttacaatggcggtacatctgcagcagcagcaggtcaccaccaccaccatcaccaccaccttccacacctccctcctcctcacctgcaccaccaccaccaccctcaacaccatcttcatccggggtcggctgccgctgtacaccctgtacagcagcacacctcttcggcagctgcggcagccgcagcagcggctgcagctgcagccatgttaaaccctgggcaacaacagccatatttcccatcaccggcaccggggcaggctcctggaccagctgcagcagccccagctcaggtacaggctgccgcagctgctacagttaaggc

SEQ ID NO: 85709 - DNA, 4140 bp, Homo sapiens
taatattctgaaacccaaggtaaagatattagtgaggttttttactttttaactgaaacagaatgtatctttttaatttaggaagcaccttatgaattggaaacaacttttttctaaaatgattataatggaacataaaaatgttctcccagtgatgcatcctttgattgaaaccgccatgtaactaactaccggggtattataagattcacttaattcaaacatatattcatttaatgcactttgcaagtattcttctggaatagcatatgacaagaaactgtatttgcccacatttccttggggacatacacccaggggtactaactgatggctaaaaaagtggcatgcaattttgagagagattgttgtttctccatgtagacaaggagagatatttgtagaagtgatgcagcattttaccagatttatcactgaacaatttagtctagctgacttgatttatctttctgttgaatttaactagtggaataacttatcagtattggacagttgtgtaaaagtagtgaattactcattagcttgctggtaaggatggtgctgtgacagttcaattaaggtttcattaacaactgtctgctgtattttatctcaaagtaagagttccagtttacctggtaatgtgattgtgggataacctgagataacatttgttgccactgatagaatgttgtttatgggttatcaagatatcatatacaatttgaccttctttttgagacattacagcctccaaacacccacatggacattttcataatgcaaaaacaaaacacaaagcaacccacaaatagtaacttcagtcatttggtgagtaatataaatctacctttttgtctgcagttcacatttgccagaggaaaatgctgtggttaaagatgtaacaactttgggacaaagagtttcaggggctcataattttgagagatggaggaagttgaccgcatgagagtggtttgaggatcgctgtgcctagaccgtttttgacattggcaacttaacatatcagagatggaattaatggcacatattgccaccttggtaaaagtgagtctgggaaaagacttttttataaaattagcattttggtttgtgacttgcctgattaattaaaagatcaaaaatcctgggattcacttgctctgttgcctttgtgtactccaagtaatgttggaggtctttgaattttattattctaataacttcagcaggttacttttatctgtctttcaaaactgtagtgatagttactagctctgtgatctcgataaattatttgacttctctgttcctcatctataaaatggggataataatagtacttatctcaggattgatgtgaagattaagtgaggtaattcttgtaaaccaatgattacactgtctagcacacagtaagcatcaataaatgttagttgtttttattgtagttattgttggtagaaaaatcaagctgttgtgttaatgtgcatggaagtgtcttcatagattgtcagatttatcaggtgaaatcagcatgcagactatttttggaggcatgactctaaataacgtagcgtgtcccctcagttgtactgtatgtcagggagatttgaaaatggttgaatttaaagccaaggggaaaatactctgtgctgtcctgtcaactaattaaaaacaaataaaaataatacacatttgtatggactttgtaggtgttttagtcagatcatctgcactgttttagaaagtattatggatttatatactgggaaattaattttttcttttcagaatgtaacaaatgaaagacatccttattgtcgaagtagagattcactttgcttatgtttggatgaaaaagtgtgaattgctaaagatcccagtgaggtgggagaaatatagtgatttaacaaaaaaattactcagtataagcccttgtgcatggtagagattgtctagcttgctcatcttgtgaacatgagaggcatctttttttcttatgttttgtctggtcctcttactccacataacaaactaatttggaaaaatgcagaatgcttttgggatatgtttggggaaaatcctggagtaagttgcatcagaaagagtagtatactaaagggtattttgttattaactgtgttttacaggttgagaatctgtagtactgagaagtttctccactatcagccgagattaacagccacagctggattctttgggggctctgctttgtgaaaagagctttgaagaagcagagcctgcaccataaaaaggaaacggttgctcttctagacataacaaagcatccgtatgaaactagaaatgtggaaatctgtattgttaattttaactacaaacgaacttacttttggaaattacaggttcatgatcataaagtagataaagagtagagaataaaagtaacaatctgatgattctgcacccacttcttggtggttgaaactccatagcctataacgttgcaagtcattttgtacttagactcctgaaaagattatccaaattatgttcaaaaaaccacagcacaaaaaataaacttgttttattcttggggagaaatttcatgttatactgtccaatattaatttagaaaaaaagacagtttttttttttaaggcatttcagaaacattgccctttcaagcaagttagaacaatatccctcaacattaaataccatctttttagccatcagtaccactgggcatgtgtcataaaagagaaatgggggcagatatagctccctttcatatgctataccagaacaaaaatttgtaaaatgcataagtgcattaactgaatatgtttgaatttaaattctgggtttttaccttcaaagcacaggcagctgtagatacaaaaagtcctctaatggagtactggaatgtttcattgtcttcacaacttggagtgtcagagttttctctgccttctatattgtaaaactgagtgactattcttggtcgtttttattagatttattgatgtccaagcaatacaagaattaactgttcatatactgtatgtttccttaacatgcttatttggtttctttgatggagattgtcaaggccaaagaaactttttcatttgtcatccaaccaataaatggacagaagctgttagaagctctttaattatgcgtctctttgggttttaattctgagtccctgtgcctctgtgctactccagtgaattatttgttgattgggccatctaatacaggtcaacaataactaaaatagcttgtcagtgtgatcctgatattgcttggaagtaacagagtgtctgaggcaacagttgtaacactgtcagtgagcacataacaagtcatgatagacatagtcagtagttgtaaggtacctagtgcagaaacagaaaaaactggtactctggcattatggaaagatgacttctaagtgaactctactgagattgaactttaactcttagttgtaatggtgtgagtagagggagtatatatggggatgtctgccactcataatgattggtgctctttacctaaacccagttttgaaataatttggctaattgagtcatatctactatgaggcagtgaaagtttttaacacctttggaactcactagtctatatatttttattgtcacttcgctgtggaccagcacttttgcaagcaccaaatggggatatttagtcttataaataattttgcgaacctctattaagctgctgctgctgttgtctgtattgtgcttagtactgaggtatagggatgtttaagtcaccatattgctttggaggagttgacagtcaagtaaacaatatgaacaatgaaacatgcctactctcagggtgtcctcagccttggtggagaggtgaaactaaatttgaaaccattaaataaaaacttaagaatatattattttcaggccaggcatggtgtctcacgcctgtaatcccagcactttgggaggccgaggagcggttcacctgaggtcaggagttcaagaccctcctgaccaacatggtgaaatcccgtctctactaaaaatgcaaaattagctaggtgtggtggcacatgcctataatcccagctacttgggaggctgaggcaggataatcacttgaacg

SEQ ID NO: 85710 - DNA, 1082 bp, Homo sapiens
gatttgtaaatggattattataattcattgccataaatgcagcaatagagatagtccctggacattaagggcgtgtagaggagggatttctatggaaggtcaggatgcttcctaaaataggtaattcttcaatgagttttaagaatgagagtcaaccaatggggaagggcagtctaggtggaagggcctatatgcaggagactacagggctggagatgctgaatgtgcagtgcagtgggtggtaggaagtgtaagctagagctcaatcatgaagaggttggaatgtcatgcttgaggcactaaaaacagctttttattaataaagcatatgtggacatatagcacataaacagttaaatagcatatctgtggtattaagattttacgaggggatgattaggaaaatagcctaaaaaggctccgtaggcgggcaatgatgagaaaaggttaaaactgcgaatggcaactactgaaagtttttaagtaagagagacttcgtcagatttaatttttttttttggatatgtaaaatagaagagtagagagaactgagatctgtctgagtcttagggaatgttctcagttgtaggtggaagaagctactggaagcagaactaaagggcagttaggaaaatgtgttcacaatgattgacaatctaagtatggcagaagattgttaggaaaatgggagtgatctttggtgctgataaaaagtcaaagaaggccggccatggtggttcacacctgtaaacccagcactttgggtagctgaggtgggcatatcacttcagcccaagagttcgagaccagcctggacaacatagtgaaatctcatctccactaaaagtacagaaaaaaaaaattagcctggtgtggtggcacgcacctgtagtcccagctactcaggagtctgaggttgcagtgagctgatatcacaccactgcactccagcccgggcgacagagtcagaacctgtctcaaaaaaaaaaaaaaaaaagtcagaaaattaagatggagaaaaggccaaaaggccattgtatttagcctgatagtaaatagatcattgatggcatttgagagag

SEQ ID NO: 85711 - DNA, 1019 bp, Homo sapiens
tgtcaatgaaggtaagattacttttggagcaatcagatccacttctggacctggagatggagtcagttttaaatgggagggatgaataccagcagtaaatgccaggaatgcagtcattaatgaccaagatactgcatttgtctgacttgtgtcagactcagaagaacttgagtgggtatatttatggaacaaactggaataatgatctctatagagaagtcctgtctgtcctgagttatttggaggcatttttccttttcttttctgaagctttgtttgcctaaagtagcagaaggtaaatttggtacctgatcgttgccatgtttgctttccttcccagttagagcagatatctcctattgatttctctttttatcctctccgtattgtggttttgttatctggataaggttctcagtcttgttttcaatttaagtagtatagagctcagtagtgtcaggcagcagacttcttacaggggaatggacaacacagaaactttttgtttatccattctttgacctaaaattcttgctctgagctacagaaaaaaggtgaaaagagacatttgaacaaatagataaaattagtcatttgacccagattgcagcttttcttcctgtctgcatggataaaaatgatccgtcaatttacataagcaggtgatttttcttacatgctaattttcttaatgtaccatggcagagagttgcagatttgcaaattgtgtaagttaattgaaataagccaggtgactttatttcactgtattatcttaccagtacaaaagtacccaaagggtacaattatcaggtgattgtctcattgcacatctaaattaacatgcagcctggtgcagagggtttttccccactttcttctccacttccctctcttttctaattttttaaaataggaaacttgatttctatatttacttcaatagagctggaaatttagtaatacagatgcggaggaaatttgagctttattaaaagtaatccagaagctataaaaat

SEQ ID NO: 85712 - DNA, 1075 bp, Homo sapiens
ggtttgggtttgaattgcctcagagaattatgtgagcatcttcaaccatgtttaattgattggcttcctctgtgttcattttcccaggttctgcaggttacagtaattggggttatcctgaagttaactgggtgtataccatagccagcgttcaaagtaaatattgacaggcattcttttaaaaacacaagctaattaattataacactgtttaaaacattttaataaaattgaaatttttgaaaggtgcaacagttggttatagggattctttgcagaagatttatgaggacaaataatgtcgaccaacaaagcacctttctttattaagactttcaatattaaacttaataattaatgttacttaatttctcagatgttataatattcacttagtgatatatacagggattaaattatactccttatagctttgaaataatgatttggaaaagaatcataattttaagctagtaaaagttgggccagtcttgtttcagtttaaagaaaaataatttacaggaacttttagaacaaaagcagttaaagaatgacctgaggagaacatttaacatttaaagggatagtatgatttagtagtcaaggctgggcgcattggctcatgcctgttactccagcatttgggaggctgagaccagaggattgcttgagccctgggctttgtagcaagagctcatctctacagaaaataaaaaataaaaattagctgggtgtagtggcacacactttcagtcccagctatttaagaggataactctctttaaatcctagctctgcccctcattatctgtgggtaaattattttatctctatgtacctcatggtcttcatgtatacagcggagatagtaatagtattccagtaattgtagggttgttgtggggatttttttttcttttttttttttttttgagacggattctcgctctgtcaccaggctggagtgcagtggcgtgatcttggctcactgcagcctctgcctctcgggttcaagcaattcttctgcctcatcttcccgagtagctgggactacacgcacacgccaccactccca

SEQ ID NO: 85713 - DNA, 1023 bp, Homo sapiens
aggtgggagcatggcttgaggccaggaggcagaggttgcagtgagctgagattgtgccactgtactctagcttggtcaacagagccagatcctgtctcaaaaaaaaaaaaataaagtactatagttggttcttgccattatgtattaaaagatcccgatttcttcacacactggcggaatttttatgagaggacacttgttattatttattattattattatttagacccaacccgatggtattggttttgttttcttatgtttggattttttatttttttttaagagtgagagctctaatctaaaaatagtatatggtaaccaactatgtccagaaatagtcctttattttgaaaagaaatagtcctttatttatactgttttctataatctacataaagttaagaatgctattgaactgtttagggaaatacccttttctttgcagtactgtgatctatgttagaaaaatagagatccagttaatagaaactgtgtccaaagtcttatctaatatatcaaaacataccaaagtagtctgcgatgctagagtagaaaaaaaagttcaattctaagctctttattctgttttataaacgtatgaataaatggcaatttagtgtatactagagatcctttttcaaattagtgaacaaagaatggtttattccagtggtatggtggcatatgtttaacaacaggctctctgaaaaataaaaaagctgtagtttagggtttgctgatctctgtggtgtaaatactataatggccaatttcaaaccactaatgtgaagtcactaaatgctgaattggagaaagatatgcactagcacgcccttatatggtattttcatcatacagataaaataggtgttagataaccttaagagcataaatcataataaaataactagggagtgatgattcctaagtatttgttacctttgttttaaatatgatttattttattctaagtttatataacatagttttttatggttatgtttcacagtcagcttacaa

SEQ ID NO: 85714 - DNA, 1411 bp, Homo sapiens
tggggttttgttatgttgtccaggctgttctcaaactcttgggatcaagctctccgcccactttggcctcccaaagtgctgggattacaggcataagccatggcgactggcaacatttttagttttaagaagtcatttcttatctttttctctttgttacattgttagtctgataacacagtgagaacatcttaacctcaaataaacactgttgagtactctcaatgttggatacttcagtttatagtttaatatggcatccaagaggaaaaagaatttaaaatcgaggatgatttatatatatacacttttttcatcagtctattcattttctcatctcatttctcggggtttgggtttaaaaaacaatcaattttttgaactgttttgtaaaaagtattcactaaaatttagctctcctgaggggaggtaattttaccatctgatagttcttttatgttttgtctctgtttacataaagttcctaattcctgttctccaaagatactgcttatatagtcaaacttgtagaagttttattccctcaccctcataaaaattcaattagtaatatggaacaccttattcctcactctttattctctggagctttgcgacaaataggaggttagcagaaaagaattgtgacaaaatgagaaaggcttagaagtgcatttggaagctaagaataattaaactgaacgaaatgagacaagagtgttgatttacctgttgaaaaactgcaagccttgacaaaaggtaaaataatgttttatggaaaacctaccaaagtaatgggtctgttctttagccctttgaatagtttaaatagctgtgatttcagttcagtagttgggtgaatgttcaggtttgagatgtcaaaataatctactgaacataaatatacgagtttgcaacacttttagtgataatttttcaggaacatagtaggcttatcaaatttgctgatcagaggaagtcaagaaggatggctaacatagtagttaacaggtattcagagagctgaatttagagtcatctttaagttagcaaactttttttttttttttttttttttttaaagagacaaggtctcactgtcttgaactcctggactcaagtaatcttcccatcttggtctcatgagtaactagggctatgggcatgtaacaccaagcctggctaatttttttattttaaaatattttgtgtagagacgagatctctctgtattgcccaggctgctctcagacttctggcctcaagtgatcctcctgcctcttttcccaaagtgttgggattatataggcttgagccactgcacctggtagttagcagactatttattgaaggcctgtatactaggctttgagtcctgagggtagactgggaacaaaattaatatcatatg

SEQ ID NO: 85715 - DNA, 1851 bp, Homo sapiens
tcctgttgcctgaatttaaatgttttttctatggtgaattacataattatttcgtggccattatatatttgtcctgcagttttttattatttttttacgaaaagagatctaagggcctttaggtgtccattggcaaagctgattttataaatatgtgtttcttttgcctagcatcttttcacatatttgaagatatatagatgggaaaagagcagtaggatgaaaaagggaggtgagaagaattcttcgtagagagcaaaaacaggtgaggaaagcaactagtgtagcggttgggatgacttaacaatagagggaaggcacaggtcagagaagaaggcaagaggaggtgccaacacccgaggttgggaggtggacaccaagctggctcatgatgaaacaagctggcgtatttcacttgtaaatgtttttataatatgcacttttcattttaacatctccaaaattaggatgtttcttacaattgtttgctttttatttttgttagtacataaaataatggcacatttaccattagtggcattttacagttaatgaaatatggtataattttacattgctcacaaggagtattggctgtgttagcctgctagtttacattatgtgatctggcagacaaatcagtttttaaaaacattcagaaacagactcagcattcaggtgatttggacaactgattgatgttattccaaaagaaacctctctctaaggtgattcgtgtgaaactagcaacttctttttgtaaaaggtctgccactggataggctgtgtttgcagttgccacaaattctgaatcaaaggcaagtaatcattaggtggaaatcaaagtaacctttctctacccctgtgatttgaggggctatttccctgaagcatgtgcaaattatttgttaggcaagaacaacttgtatggcaacttcttagcattgcttagacaacatctctgtacagtttgtgcctcaggttcatctctgttttgtattcttgagtctctttggaattttgacacagcaattgagctctcagacttacttattttacaaaattgggcatttgagtaaaaagtgcctcaacttaaaaactgttcttaagttttcttcttttgctttggctactataaagcccagagtcaaatgtgcaccctcctcagttaagggatgtagagtttcttagcttatgttttgggtacagaccactttctcggtcccttcacccccacttcataagcttcctacccattttttcccccttcctcaaacccttattcctcctcttcccgcaccctttaatcttacactgtatgcttctgtcttagctacctcccgtctgttttggaatggggtgggatatagataaaagctaaaaacgtcaacagataaaatctatctttaaaaaacatttacccatacagtgaaaaaagcacattgaaatggtgaagtgaaaagcccagttttgttgtcctttttttgtatatgtcttaaatgaggtgagttgttttgaggaaaggcgaattttgctttgccaacatttgtgatggctttagtgtgttggagctaaaaaggattgtgagctctttcaagttacttctaatttagagacactagatttttaaagaaaaggataattaaaaatttggataactttaaaagatggagttactgtcaaaataccaaagactaggtagcttataaacaacaaaagtttatttctcacaattctggagactaggaagtccaagatcaaagcttctgcagatttggtggctggtgagggcccatttcctggttcatagatgatacattctcaatgtgttctcatctgatggaaagcaga

SEQ ID NO: 85716 - DNA, 1058 bp, Homo sapiens
ctctttctttctttttttttttttttttttttttttggctttgtacttctctttcttagacaaggtacaaacctcctttccctgccttctttccttcccttgtttgccacctgtattagtccgttttcacattgctgataaagacgtgcttgagactgggaagaaaaagaggtttaattggacttgcagttccatgtggcttggaaggcctcagaatcatggtgggaggcgaaaggcacctcttaacatggtggcggcaagagaaaatgaggaagataaaaaagcagaatcccctgataaaaccatcagatctcatgagacttattcactaccacgagaacagtatgggggaaactgccctcatgattcaaattacctcccaccgggtccctcccacaacatgtaggaattatgggagtagaattcaagatgagatttgggtggggacacagccaaaccatatcaccagccctggaggataaaagtcattcctgagaattaattgtcttggaatacttaaattataaacaatttctaaggctattaggcatctgatactatcagttaatgcaaaacattaatctggagataaaattaggcatcttgatcagtttgatgccgagaatgccattatattaaactttgcattaatatggagggaattaataagaaaatgtttggaaactttagcttcttttgccagtggtgtgttataattctttcatactggaaataataaactaactatagattttcatgtttttatagtattaaccttattttaaattcctatcataggtctctctcataagtttcgaagaaagagtaattctttttaacaaatatatagatgcacagaaagttctgcttctttctcaagcatgttatagttataggaaaatatgaaacaattcttaagaggttgttcttccttaaggtatgcatttgttatttcaccaataaaaagaattcataaaaaaaaaagtgctatcgattgaagcttataaatgcctctactcattcaatcagctaaaattatgaaatggtatactgcttta

SEQ ID NO: 85717 - DNA, 1057 bp, Homo sapiens
tcatttgactactttagatacctaaataagtggaatcatgcagtatttgtctttttgtgactagaatatttcacttagcatgacatgctcaatgttcatctatgatgtagcatatgacaggatttccttttttaaggctgaataatattttgttgtatgtatataccgtattttctttatttatccattgatagacagatgtttccatctcttggcttttgtgaatcttgctgtaatgaacagatatgcaaatatctctttgagatcctggcttcaattcttttggatatatgtcaataagtagggttgctgaattatatggtaatcctatttttaagtttttgaagagccttcatactgttttccatagcaactggaccatttatattcgcaccagcagtatacatgggttccattattttcacatttttgccagcacatgttattttattgtattctatttttgatagtggccatcctagcaatacctcattgtggttttcatttgcattttcctgatgattagtgaggttgagcatcttttcatatgcttgttggccatttgtgtatcttctcttttgcccatttttaaaatcaggttattttgttgttgttgagttgtcagagttccttgtatattctaggaagtaaacatatatgatttgcaaatattttttcccattctataggttgccttatcactctgttgattgtttcctttgctgggcaaaagtttttgagtcctgttcatctgtttttgcttttgttgtctgtgcttttggtatcatatccaagaaataattgccaaatccaatatcatgaagcttttccccaatattttcttctaggaactttattgtttcaggtcttatgtttagatcgttaatccattttgagttgatttttgtatgtgatataagctaaggatccaacttcattcttttccatgtggctatctagtttccccaatattattattaacctgcaggtcagcgacttcagatctacaaactgctgaaattatgtgcagtattttgtgcatgtttgtgtgtgtgta

SEQ ID NO: 85718 - DNA, 1545 bp, Homo sapiens
tttgttttgttttgttttgtttccttttgagatagagtctctctctgccacccaggccagagtgcagtggagcgatctcggatcactgtaacctctacctcccaggttcaagtgattctcttgcctcatcctcccgagtagctcggattacaggggcctaccattatgtctggctaatttttttatttttagtagagatggggttttgctatgttggccatgctggccatgctagtctcgaactcctgacctcacatgatccaccctcctcggcctcccaaagtgctgggattacaggcatgagccactgcgcccggcctgaaattcacgttgttttttaagtaactccttaaatagaaatgttccatctgcaacttattaagattggcttcttctgacagacctggccaaagaaaacagctttctgggtaatcttgtgtttcaaaaacattattagctgttaaaaggggggaaaagggagggatgtgtgtgctagcataacataaaactttcatttgagttacctgaattataaggaaatactttggcaaaatgcatctttatatgtcccagcagcctgaatgtgagtttctgctaatatgttcatcccctttttatcagttccctttgtctgaaattggggtgcctccctgcccttgtgaataggaagctgggaaaaagagtaggtggggttaaaagggaagcacagtcccctgtgtttcccgcagattttcttattgcaggatcagtttggattgtgagctgaaactgaagagcagaatttaatgttgacctctaaagttgatgcccaaaagggtttgtcttcactaaagcctgtctttttgaattgagtagagtgcttttggctgtaaaagctttgaaatgtaaacactgaggaaataacatgtttgtaatgtctacgtaatataacatatgcaggtgcacatcttagaattttctcacttatcctaaaagatacctaaatagaaatttaggaggaaatttttagccttaagaattggctatactatgtagtctaatgccaaggtttccactgtggcccttcctaaaaagtattttggttggtcataaaaactgtatgcagaggactgtctatttggaataatagtcacatggtttagaaataagtagagtttaaatttaccttttcccacactgttcttatgataccattccttctgctgcttgacatgtggaaatcagcttgtgcatttgttttcagttatgagcacctgtgaagcagcttgatctgtagaatctaattttatttgtttaattattagatgaaaaattctgggtatcaggatgggtgtctgtcccttttgtatctgtgacagtgcctaacatagcaccttgtaggtgattgataaatatttgttgaatgaataaacatgtatcatccttctttgaaaaatacatgaatttgtggagactttgattactttttaaccaagtatgtttttggaacagagaagagtattatttacattatactgataagatgttgctgttatatcacattca

SEQ ID NO: 85719 - DNA, 1464 bp, Homo sapiens
cccactagatagcagacttccatgagaactgcttgtgcctaccacaaaacaattatgaaaggaatgagccatatcatgatacagctgtgagggctgtgtggaagacccattagcccagtattcaagaagactaaggcccacttgagttaagtatagtgggtttaacgctggactcagaggtagcaacctagcttgcctcctaaattctgcatttaatagttgcgtgactatgaacaccttcttttaactacctatgagtattgtttcctcatctgcaaagtgaaagtaaaagaccctacgttacatggttattgtaaagattaaatgagatagcctttggtgtaaaatggtttaacacatggtaggtagtcaaaaaatgttgcagcacatacttattgataaccttcactggtttattaagatgaaataggtttcttgagttaggaaatactgttttgttaagtgtctaactcaaagtctgaaagctagtgagtgatagaatcaggaacagaaagaacccagcctcctaagtgccaatccaaaaagaggtggtaataggagtaagtcttccaggcttctgaattgcctgggctgtgacttgtcaacggggctgtacattctgtcccactaccttttctttttttttttcgagatggagtcttgctctgtcacccaggctggagtgcggtggcgcaatctcggctcactgcaacctccacctcccaggttcaagtgattctcctgcctcagcctcccgagtagctgagatttcaggcacctgccaccatgcccggctaatttttgtatttttagtagagatggggtttcaccacgttggccaggctggtcttgaactcctaacctcatgatctgcccgctttggccttccaaagtgctgggattacaggcgtgagccaccgcacccagcccctgtccctaccttttctattttttgcagtattgttccatgctgcgcaaaagtttgtgaaaaaacacaaatcagtacatcaaggttcagtatatgactaatctaattttagccattagaatcagctgtacagtgtagtctaatgccaaggtttctattgtggcccttcctaaaaagtgttttggttggtcataaaaactgtatgtagaggactgtttatttgaaataatagtcacatggtttagaaataagcagatggaacagtctatctttatttcaagtgcccaagatttgtgattcatcaggttaggtaaaaattatcacgttttatgccttttgtctccccaccccagcccctggtgacactattctgttagcacatggagtgaataaagtttacatcaaccagcagaaaggaagtttccattatcatcccccaacccagagcattttttggagcattcttcacaaataagtaattaaatttaaacttaaacaagcgaagaaagtacatacagtcatgcactgcataatga

SEQ ID NO: 85720 - DNA, 1050 bp, Homo sapiens
agtgtgagccatttatgtaaattttaaaaacataaaacaaccatatttttatggctacagtcatatgtatcaaaagttaaagtgtgagtatcaaggattcataccagagccagaataatggtaaactgggacagattcagttaaagatgcagtctttggatgcatctgtagtagcattatgtcttaataaaatgtatctgaagcagatgtggtaaacacttttatctgggcaatgagtacacagcgtttaatttctacatttacacacatgtctaaaatatataattatatttatatatatatatatacacacacacatatataaaatcattgatatgaaaaaggtcaatacagttcttatagcttctgttgcttcactttattagatataaaataacccccttccacatagttaacatttcagtaatctaccaaataaaagttattcccagagatgtaagacctgtttctttagaatgtcatgaccagaatttccatagtaatctctaaaacgacactccagtgagacagtctgatctgtgggtcatttcctttcctgttaagagacctttgttaattccattttgcagtatcccagaagaaacattgcaggtgtgcaaccaatccaactgaaacagataatactgggtaatgttcccttcttactcttcctttttattaatgcacttattacccatcttccaaaataaaaagtctttgtcatactggcatctgatttttttttcttttgacaaccagcctgtcttctgtctcctgaattttattttaacatcttttaatatgttgccaggtaggcacccctagttgaacaagaaagacctggaaatcattagagctaacaatatacaggtttttcttaaatgtgctgccaaagggcataacctctttggattggtgacatgtagcacttgcacagcagcttttcttcccatttctaatggtaagaagtaaaatagccttctgtcaggaccaacttttctttggacacatgcttctaatcttaatgcattaagactggtgtgttgctca

SEQ ID NO: 85721 - DNA, 1065 bp, Homo sapiens
aaaaaattctgtgaaatgtgatggtcatcaaagggttccttggaaggtatggtgggaaagctttgtaattgctgcttcacagaacttgagttgagggagagcagtctggtatagtgaaaagaacatacactgtagagtccaaaagactttaatccaatcccagttctgccccttattcttaggacggaagcaatctgacatcaactctcaaactacttgggagttgtacgtaacacgtggcaagttcgttaacttctctgtgcattagtttccctgtttgaaaaatgaagataacaattcttcccatgaaaattgcacaccaaagactcaccatatatttcatttgttcacctcatttatttgtgttttactggactaatggtttctgctattgttaataattaatgaacattgtgtcaggacttattctgttgtcagactgccttaggatatgatctgcattataacattagaatttcaatccaacatctctagaaagagtatgacaaaagattgcaaaaaaatgactattatttaatagggtagcagaaagaagctgtaacatttttactagaatatgattaattcacagatgctgacaaaagccattatattctcatcagatgatacttaataacttgtggacaaataagatgacttgtttttattcatgagagattatattaagctctctagaaaagctgtaattcttcagaacgtcctagaatttactgtatagggaatggttagattcttcaggtttctgagcaaaaacaacccccaaaacaaaaccaaattacccacgtagtttgagagatgatgtcagattgcttttgtcttaagaacctacaagcaagaacacatttcaataaggctgcctttctcttttacacctttgaaattactgccatggatatatttactagtagtgcattattaacccagctatggccacttgccttttgctgaccgagttcaaagcttatgtaccagagaggaaggtagtattgggaggggagttcttgacaaaggagctactgatttgcatttatggtaatacgtaat

SEQ ID NO: 85722 - DNA, 1485 bp, Homo sapiens
ggaggtataagagttggaattcttggattacaaaagttcaacttatattagctaaaaagtgggtatgttgcctcacataaccaggcttcaagatggatagagtagaactagcctttgatagtgcaagacttgaatattgtcaagactcttgtctcctttctctgactttctctgcaaatttgtgtttattttttaaattgttttctccacagggcagaggtagttctcagtccacatatttgcagctcttctttaaccaaagaggaaagggacctgacctagctccagttttcatgatatctaagtcttttttggtggtggagaatgtagtctccttaccagaataaaattagaaggaaaaattgggaagatacaaataattgccacctcaagtggaagtcattactgtgagtgctagaaaaggattgtcctcatggggaaagagaccatgagttatacatggtgctagcaaatgttacatgatactattgttgctgcctttctgtgctagtcctcctgctttatccccatatttcccctctgtagtgcagtaccccctcaagctgggagggtagtcaacttggacagcggcctggaccctagggaagagtttgctgaaaagtctacatggccatgttatcagattcgttccattcctaattcagattaacagcttctacatgtgatggaattgtattactttctaaaaaaaatttcagactgtaactcaacatagttgtggaagaaattcagagcttgtgggaaaagatgcatctctctatccaagtctcacttctagaggcaaggattctactactcaggattgtagtatgattgtacactttaatcttcaaggactttattataaagcaaggtgccaatattattactgatgcagattatcctatgattccagatttctgcaattacaatatatatatttgaaatgattattccattaagcaacccacttgccccttgctgtgacccttgctatggtgtaacttttaatgtttctggttttacaaaagaaaatctgcatcaatccttaaagttacatttaaaatttacattaacagtacaaccagatggcattctgacactcactgtaagtattctaggatttttctaaaatagctggctcaaatagaaaagtcatctttttcccaagtgtgttcctgtccttttctcttgttgtgtgttctaactgttgcacttatattaaaatcataaaaccagaatggagaatttattccaaaagttcccatgcatttctccaatcttacttcctgttgcaaggacccaccatcacaaatgaagtgtaattgtacattcatgatgacgtcttgcttattaaatggtgacattcaagaaattgtcagcacaggcattcttttataggtcaaggatatacttattttgaaaacgttgaaaaataatagtaattatttaactgatttcagaagaatctatttcagtggcatc

SEQ ID NO: 85723 - DNA, 1104 bp, Homo sapiens
ttcttctcaaccaggacagcagcctttgaataacagagctataggctttctctgttcttttctagttgagtttaatgctttgaccccacattgctactgggtgtgggttttttgccctccccttcaaatcatgttagctccctgtgacaacgaagctgctgggttttgtagccagccttgcccaggaactattagatgtactggtgcttgggtagggtgtggcaggggtggggtaagaagctgacccaagctgtgactcccactattcttacacaaatttcagcagttttttgtaaaaacacttaaatttgtcatttgactttggccatttttctggagtcccaaaatggctgtttttgacacttttgtctagttttatagttgttttgaggggaaaggatttgctgacctcttcaatttgccacagctggaagtcctgcctcctgttttgttttgtttttgtaatatttttgggtttgtttatttttaacaggctaattgaaaacctgaagcacatctatatattgtagctgcttcagcattgtgcttcacaacggaagaagttaggagattgtgattagattaggggtggggctgtagtcctaaatttgctgacagcgctttcctgtggaatgcttcctaataatgtattcttgtgtaatgatgaaggaaatgtttgtttttttttaagcaagcagattcctttggaattctacaacataaaaaagacattatagtatactcctctctacagaatgaatttggcacagggagagaagtgacaaagttctttgggctggtatagatgtatatctatatgaaaaataatggaaagactcatccttttaaaaagttactcatccttttaaaaattatacaggtttaagctaaaattttttgtgtgctagaaaattaagctgggcagtttgcctttttaaaaaacctttctaattatttagtaacacacatacacaaaataaaatgtataactcaatggtgtatcacaaagtgcacacctctatgaccaccattcaagtgagatacaggacatcaccagtacccagaagtcccctgtgccctctggatccataccccaagagaagg

SEQ ID NO: 85724 - DNA, 1099 bp, Homo sapiens
ttgccaaatgaccaattggccgtgtatactcaatttattggtatttcttttttctttcttttctttttttttttttttttttttttttgagacagagtctcgttctgttgcccaggctggagtgcagtcaagaaatcttggctaactgcaacctccgcctccaggttcaagcaattcttgtgcctcagcctcccaagtagctgggattacagacatgcaccacgcccggctaaattttgtatttttggtagagacggggtttcaccatgttggccaggctggtctcaaactcctggcctcaggtgatccagtcacctcggcctcccaaagtgctgggattacaggcatgagccactgagcctggcctgacattcttttacctatttagttaatatgtatcaactgggttcagtcagaaaaacagaaaccacactcctatttcaaacatagggaaatataatacaggaaattggttatataggtgttggaaggcaaaaagagaaaaaaaagggagtggggggacacagttattaaaaagatagtaactgcaagaagcaactaccacactaagagctgggaaataaaagggatgaggttatcattactcgggagctacagggatccctaagctggcacccagacttctaaggaggggacagtgttcaactgctgcttatattgaagtccatattactaaaagatgttcatatacataagaaatctaaatatttaaattgtgtttgaacatgtcttccctctcaaatgtagttctgaaaataaagcataaagctaatttgacttttatcaaattaatgatctatgctgcttctgtatgttttttcccatctttaaaatggctttaccactaatacctctcctacctcagatgtataaagtgacctctctgaaagagtaagtgtttatagaaatttagacagggatttttttttttttaaagcatggcagatgagttgggtgaccaaacattctctttaattatagatatgtactcttttatctttctcactgacaccttaagcttcattaagtggacttaatgttgagtgttttaagataaagatattgtcatgatctgaaa

SEQ ID NO: 85725 - DNA, 2923 bp, Homo sapiens
actggatatttgatgatatttttaaacacttacattttagatttgatcattgcaatttttaacctttttttcattagagatactgattatggctgaaataagtttgatatatgcttgagaattatatagggagagtaaagggtagagatgaaataagaatgttcatgtgtgtgaataactgaggccaggtattgattacatgggcattctctatactattctgcccacttttatatgtttgaagttctctgtagtaaaaaaaaaaaaaaaaaaaaaaaaaaaatttaagctacagatcataaaatttgaactagtaccacacaatttatttcctgttaagtagtttcttccatgtcctttgagcttggtatttctcattagcttagcaagacagctgggaggggatttgtttgttatgttttgatggcggaagttacacgggtactatgctgcttttataaaggacttgcgtcgtaaagtcttttttcctcaccctagtgacttcttttcttacaagaatcttggaataaaatcaaaaatgcttagtatgatttaaagagactttgtgtagtgtatttcatgtcttcctcttctactttatgttagtctattttcttcctaccctctatattcaataagcactggcttttctgtctctagaatctgcctcagtgtctttacactgcctgcccatcgatcaaccaactgccactcagccttcaaattctagagtagtgttactttagggaagctttttctctctacccttctttacatttttcctccatagtaatagatgttgtaattacatatctgtaactgtttagtgcttacctcttctgtagtcatgagagcagggatgatgcctattttgttcaacaggataacctaaaagcttagtgcttgccaggtagaatgcacatagtaaagatttgttgaacagaggaataaaggaatgaatgatagatgtggcttctcacgctcttagagtaacattgattgtttaaaatagggtgtttatttcaaaaactctctcctgtgcagggattttggtagcgtgtggtgtaacccaattgcctctctcattttgtaagtcttttggatagtaagtgtacgaatccatcttaatgtttagtactgtgtttcttgacagacgaatttaattttcagtgggcaattgtaactaagctttaaagcattaaagagttgttagtatttacttgcatttatgtcgaattttgtttccttttttgttctctaaatttgactttttttttccttttctcaggtactctctgcccttgacatactccaacctccacacattgactattttgaagaaatgtatcctaaccagggaatgtgaaagaaggggacaatttttaaaattaatttgttcttctagcaccttttggggttcatgccttcaagtattttaaatctcatccttgcagaagtgattgagtacctggaaccaggtaattttgaaatcctgtgtgtctggcagagctcagtattatcaacatatcctgtgtggtgatgccacagaacagaacatctgaacagatatttaatccccacacagccttatgagatagattattaccatccccattttgcagatgaaaccagtgaggcagctgtgttgtagtagaacccaggaaagtgcttttaccactatacaacagctgcctgtcggttaagagagtaatactgccctttattataacacttggggtaagatagaaattgtagaattaatgtaagttaagttgtcttatgttccttagaatgatggtggtggtagtggtgatattgacataatagccattacttatatagtttttatcagatgccgggcacaattctaagctctttacacatgtttatttaatcctacaaacattctctggggaaggtattgtgattattcccatgttacagaagaggaaattgaggcacaaaaggtaagaaaattgaccaagatcacagagctagtaagtgtggggatggagatttggttccaggtattctgactatgtagtcttgctttcagcccttacctatgtgattctcaggctagagcccttaacgttctcctgttactactgttgatgtttaaaaatagtatgttagacattgtgaataataatgaactataaaataatgttaaaataatgcctggtgatagctccatggtaataataaaataatgcatggtagtagctcctgggactgtgcatgaaaaaaattgagacataagttaacctccctgacattcctgggcaaagtgtcaccagtttccattccacatttaacttggtaaagctttaaataaaagacaggaaatcctaagtcattgattttggtaagctcatgatagtgcagtttattcaaactctaggcttttttattaatactttaggcctatgactcagaatggaaaccaatgtaatagtgagatactttttctgattcaccagtgaggtaatgaaaatctcattcttacacagggggttggtaattccatatgagattgttatctttgataacttcctagaaaataggaacaattaagagcttcccaagagaactaagctgggtaaggatttgggaaaccttatatggtaatagaattgtcactgatcaacactgctgggatgttttgatcttttaaaccaaaagctcttgaatgctagtcagccctccatagatgtgaaactgcatccatggatgaaaaatatttgaaaaaaaaataaaaataaaaaaataaaaagtatagtgggcacagtggctcacacctgtaatcccagcactttgggaggctcaggcagggtgggcagatcacttgagcccaggagttgaagaccagcctgggcaacatagcaaggcctcgtctctaccaaaaatacaaaaaaaatta

SEQ ID NO: 85726 - DNA, 1064 bp, Homo sapiens
gcattttgatgtaatcagatgtaaagtaagagtatcggtgtatagtatcatgcagttaatcatgtatttcctaaaagagactgaaactgtaataaaattattatgccagtgctcaccaaaaatttagtgtgggttttgaaacaccatgcatttttagataactccttgaagcaacaaaaaaaaagtcaatatctagactgtaagtttttataaatctgcctacagggttcaacagatgtagggcaagtcagatgtgaaaggagcaataaattctatcatgacctctgtatcttttaactttttgtcttcatagtttttaatctatctaggaaatatattatttaataattttaaagattatatatttttctgagctgatgttagcttttaaaggattacatttttcattttgtactttgagtttctatttggaaatctgtatgcaaacagtttggtacttaattactttgagcctactgaaatttaaatcaagagaaaccagttctaattgtttattagaaaacggagtttattatgcttcagtcaggattctggatgctctacaatgcacattaacaggccccttcccagaaagcactagttacctacagggttggaaataaaaatttggtctgctttgggaaaagcttatttttaacttgaagcataacttagcattctatgaagacgaacatgggtggtgtgagtcttctatgctagaagcaattacattctaaactcagtggaaatgagaagtctagtggagtgtccgtacacgctggtttgttgggacagtcttggattttacttgatgttctggcgcaattattgtgaagttctcactctcagaagtgtcactgtttggatgataggttttgcttgtgcaggcagtgttttaaataggaatctcttgtcataaagacagtgaggaaacctgtgtgtccatttcagccagtaagagtctctagtgctttgaagcagctctgtaaccctcagggaatcttaggagtcattaaaaaactaagaacaatggaaacaaaatgcatatatgcttatgtaagtgt

SEQ ID NO: 85727 - DNA, 1086 bp, Homo sapiens
tctagtagaggatacaatcacataaataatgacaatagtataggttggaaagtatactgatagaaaagaactggccaggcacagtggcccatgcctgtaatcccagcacttggggaggccgaggtgggtggatcacctgaggtcaggagctcgagacctgtctggccaacatggcgaaaccccgtctctactaaaaatacaaaaattagccgggtttggtggcacgtgccagtaatcccagctactcaagaggctgaggcgggagaatctcttgaacccaggaggtgaagattgcagtgatcgtgccactgcacttcagcctgggtgacagagagagactccatctccccaccaaaaaaaacaaaagaaccaaggtatcctgagagcactgaggggttctgatttttactctttcccattttagtttcctactgaattactagaaaattcatttgatgatttaaaacaaaaacaaaaactttcacttacccactatcactgatcctttctccttatctctgaagcctagaacagaaatttaaagaaaggaaaaaccaaagaaaggttgatagaacaatccaggaacagataaattcctgacttaaccaccatttttgtcagtatctggttagccttgcttattcattcagccaaacctttagcactactatgtatatgacattgtactaacctctgggatgaatacaaagatgcattgttcatttatttaatttttttaaaaatgtaatatgtgagaccctatcctaaattactttattcatatctccaatttatagatgaagaaactatagctcagagaggtaaataacttgtccaacgtcacttagaaataacagagctgtgatttgaacccatattgtatagtccaatgggccaggagtgctctcaacccaccatgctctgctgcctcttaatgctttccctgaaggaagatactacaatcaatggggcagagatgagctgtaaagggataactaacatgtggtagaatgtgccaaaagaatatagtgaggtagtgtgggactttaaaaggagagattacttcaggcagaaaaaaacgataag

SEQ ID NO: 85728 - DNA, 1256 bp, Homo sapiens
ttttttctggtgattggattgatttttttttagtcagttttaaattacaactgaggtagttttaatttttgacattctatacaacaaatttgttactttacaaagaaaaagaatctgcctttgcctgggaaagagattgtcgtattcaaacgttttaacaacatgaccttttattccattgatttctatagagaagcacaggcatgcttcagaaaaggtcagtgattctaattgaagcacaccgatttttttctagttgcaaaggctcccatgctttttgttgcaaagaagatgatgagatttacggctgaccatttgttacaagagaacacaatgctctctgtgacacattgctgtttttctttcatgtggaaagcattgtttgaaatcaaccatatctgtaaaccagattgtcattatccacgctattcaatgccctcacttttatttcagatcagccagtttcatatctgagtactaggctgaaacttccttcccctgtgcacctgattttggaagaaaaaaaaaacgagcaggagattttattaagtctcacacatttatggctgtagattcttttttcagacaggaatggcaggatttcagaatttgtgcttaaggtgcctaagcatgttagtgtttaaagtgcttaactgtgttattgcttaagcatgttttaactgtcattcatatacttgtcataagagaatctgtggcttgagggggccaggcttgggcatctatgtactacagtttattaaaccaaatttactatgtcttttggaaaagtcacctgactcatatttgttccaatatatgtcacattgaagatgaaaacttttttttttttttttttgagacagattctcactctgtcacccagggagaagtacaatggcatgatcttggctcactgcaacctccacctcctgggttccagcaattctcctgcctcaacctcctgagtaactgggactacaggcacatgccagcacaccaggctaatttttgtatttttaatagatacaggatttcaccatgttggccaggatggtctcgctctcctgacctcatgatccgcccgcctcggcctcccaaagtgctggaattacagccatgagccaccatgcccagccaaagatgaaaacttttaaaaaaggattgtagaacctttgaccaatatgggacctacttgataaatatttaatattgtaagatttctttttttgtaatctggcttagcattagtttctgtc

SEQ ID NO: 85729 - DNA, 1026 bp, Homo sapiens
tgttttaaagcactgtttaaagttcaaactcaacagctggattttttttccctctgctttgaagagagtcactatagttggaacaacttattcacgctagctctttgaaacacctgtgttccaggtgaagccaaaaaaaaaaaaaaaaaaactaaagcttgaatctagtcttttcacctctccattaaaaaataaatatatctctaaaacttcccagctggtgggaatgaaatgctgtcagtgctcccaactgttagagggtaatattgaataataacaaagccacacttaatttgagcttctgaaaagcctcataacctcattatcattctcctgaactgcttaaccttctggttaaccttctgattattaacctcttgacatacttaattcaggtgtgagagtttagcgaagctcatgggactgtatttatttgatcttttttgtcatgtcccactgtgttgactttattttttaagattgctagacaccaggaggcatgtgttaggtggagacctagaggtttcagaagccactaaatatatcagacttgccataattggaggatatggtgaatcagtggggcttttaggcacttcatagaccagctgagtctcctgctatcaacccaatttatttgagagcagtacctcaggaaacttaatagacctgtagcacactagcacaaatctggattttagccagagtacagtttatttatgtgctgcttgtattattttgctctctgcatattctatgcctgtcattattaagtattaatcaaaaatattgaattgtatctttggcagtgggtttaaaaattacacgtttaattgatagtttacatcacttagaggtggcaagagaaccagatggtagaaaataggatcaggttgaagtggcattttttttaccaaagaaaatatgatttgcatgagtaagcaaagttttggggtttttaatgtgtgcttttgttttggggggatatggggactattaatcagttatagaatattaatccttttc

SEQ ID NO: 85730 - DNA, 1899 bp, Homo sapiens
atgttgatgatgatgatgatgatgatgacgatgatgatgatgatgatagcagctaccacctaaatcgttttctgtgtgccaggcatttatatgtgattctaaatcctagcagtaactctgtgtagtaggtgttcctgtacctgttttataaatgcaggaacagactcagagaagttatttaacttgcctaatgttatcaagctactaagtggcagagtcaagattctaaccttggtcattttgattccaaagcctacaacaaacacaccgcctcccactgctgaacctgttaactccttattttaaaaatcaatttccaggccttctccctcctgaagtagaattgttttgttcttacctctttttttagttttctatttttgaagtttactttatcttttgaaggacagagtacaagaacgagggctgtgatctagtgccacgtccgctgcacactaagacctttgactaatttctttacctctctaaacctctttgctctgtataatgggaacccataatgggacttacttcttacagtaattaggagtaggtgaggcaaaataaatttaaagctggatgcctaacacatagaaaattgcagtaaatttcagctgttttcagtcaggcttctttgttcatttacattaaaatctttttgcaccttcttgccctctctccttgatttttacatgtcaatgtcagtctttttccaacctcttggctgttgccttgcattcatccatcttttttctcagtcttgtcattgagttaacatgttctctacacccacttagtacccagtcagtgtttattgatgctaatgatgatggttaaacaaagatgctgttggcaccagtcctgaaggctctgagactccctgagtaatcatgacttcctaaaaacagaaaagtactcaatcatcttatttataattgaaggtcagaatttgatgtcagcatttgtttctgtggtgactgtgtagctttttctgaggaattacctttgacagttggggtagtcagtatttctggtgtgaggctgattattatgcattcttaaattacttcctaaaatagatgcagcatcgtataggtgggttaaacaaatattgatcatggtacagatctgctttaattggagcaagaggtcaggagaggcttatcattgaggtgtagatggctgccaggctctagattagttacctggtcttcttgcccataatcttttttgcgtcagagaaaattgtacaggcctatttttaattctaagcaaccctctctgttctctccctttttgatatctctaatatgttcccacctaatgtccttgatcttcagaagatgtctcatttcttgctttttcttgcctcaaattctgtcctccatgataacgttttcttcctcagcaaattttgtgggaatctagcaggatgtgctgcttgttatatttgggcactgtccactaacaattcagctgctgacactggttgcattattctaaagaatgtcatgttgttaaggttgaatttaaaacccattaatggtgagaagcttccataattttaatatccaggttttttaataaaagaaggaaagaaatggaaaaataaattttaaagataaacttttatgcaaatgaaaagcagattgtaaccaaatgcaaataaatacctcagtgtggcatatttcatttagtagaaagtagaaattgttaatttttactgtatctaatgattcccaaacttatatttttaactttgatctcccatcaaaggcctgtcctgtatttccagcaatctctcatttagactttaaaaagaaatctgtaaagggctactagtccaagccctgtaccctgcccccacccccccacaaaaagtagccaggagttcctttt

SEQ ID NO: 85731 - DNA, 1128 bp, Homo sapiens
atgtaaaaatctacggggatggacgtggtggctcacgcctgtaatcccagcactttgggaggccgaggcaggcagatcacttgaggtcaggggttcgagaccagcctggccaacatggcaaaaccccttctctactaaaaatacaaaattacccaagcgtgatggcacatgcctgtaatcccagctactcgggaggatgaccacagaagaatcacttgaacctggaaggcggaggttgcagtgaaccaagatggcgccactgcaccctagcctgggtgagagagcgagaatccatatcaaaaaataaaaataaaaataagtaaataaataaataaataaaaatgctacgggaagttagtaacaattgttgcttttgaagactggttactgaagggaaaactcattctccttgagtttagacacacattgccttttgaactgagtacttaccttatcataaattggctgtattccatagctgtttacacaaagactcacttaaatatttgaatttttaattttttcacagccatctcttcctgtactctataccctgtctagccaggctacacatgaagctgttcatctcctttgcaggatgttggtctttgatccagtaagtagtgtttttttttatatatttttaatgaattacaaatacatgtgttcgagagaaacattgtggttttgaatagattggcaatgtaaataattacttttcagaatataaacttcaatccccagtatcatgtgtatcatgcacgctcatcacacagaagtttgattattaacacataagagtctaagggaagagataaggagctggatcttatttaactcttatttcttatttatctcattatttgtaaaaggagtttgacaccaagttaagtcaagacaaaatgattttttgttttgagacaaggtcttgctctgtcacccaggctggagtgcagaggtgtgatctcagctcactgtaccctcaacctcccaggcccaagcaatcctcctacccgagccccctgagtatctgggactacaagcatgctcagctaatttctaaatattttgtagagaagaggtctcactatattgcccaggctggtttgaactcctggagtcaagtga

SEQ ID NO: 85732 - DNA, 1003 bp, Homo sapiens
cacacatgtatgtgtaaatgttgcttttccacctccactggaagagtttataccagtgactttgagcctgtcaccaatcccaaatttgatgacactttcgagaagaacctcagttctgtccgacaggttaaaggtgagtatctgttttggcctttggccaggcaatatgcctagtaacattttccattaggtggccatgaagagctgagatctggatggtaaccaaagctcccctctatgtttattttacaaccttgcgtatagctgtgtgtccggggcataacaaagcatatttaatattatatccaggggaaggtcggggagaggaatgaatattttgttcttattttcaaagtttatttagtgagtatgactcaaaatatgtttaatatgtattcactcagtgtcatttcattgattcaaacgtattgaactttatataacatacaaagttccataaaggataaacattcactgagggaattattccttggacgatgacaagagaagggaatttctgatagtgtactcataaaattttgtggcaggatctcctattggaatacagtgggagtaatgacatccaaaattctgagtgattttagtgtctactgtaggacattttacaagagagagagtagtccccaaagtaaccacctgaaactatacacctagataccaactgaggtctttaagtgatcttcaaaaaggcaataattgccagcaacttagaagagttcacccataatgccaaacctgtggagtctctctcaaatttataggccattttactcttcccactgatggggttgcagtctgtgtaatgccaccagtaggtttcttatatttagcaacagctgtcattttagttttaggaagttcagctgaattctgcttgatagatgatgtgtgtgtttgatttaactaaaccagtaggcagtgcttttcagatgctggctagagttcgctgagaattcactgctcccgggcttgcaaattgtca

SEQ ID NO: 85733 - DNA, 1448 bp, Homo sapiens
tgcatctttcatgtgtgtaaataattcatttctgggctaatttcaaaagaatcccaatattgctgtatagaaagagaactagcttgcacattttaggtctgtgaaattttgtgagacttttcctgcactggacagtaaaaaaataataaaagacaaaaacaaatttaaaaaaaaatttaagccacaaaaaaaggcacatagggaattatgtcaaatgtgtttgtgtccttaggcaaagctgtgggagtcttgaaatgtcacagtagtaaataacttattactttttgacaagttctttttttctgttggaacactgaattcttctgtgcatatgtacatatgaatacaaatcgaaggcctctacctcctggagttatacaacttggcttgtttacctccacatgctgatgatgactattttttttttttgagttcagtgtggagacttgaaacttgaatgtcccttccaacttttatattaaaaataaaaagacaagaaaattgaagatcatttttcacctgtacaaggaatactaatggatcgtcttaaaattggtctaggaaaaaaccttggtgtgtgttatggacaattaactgttaaagttattgtaagttatctgtatttagcagagtattttcaacttgagtgatctgagctgaatttgaagactattaataagttatgtttggaagttttaacttcaatgaagtaattatttgctgtgaaagaaacaaacattgaattactaaacaaagatggtgcaatatctttgttttttttttatgaggctcctgagaatcaacccaactgaagcatttcaattcacttgaatgagaaacgtgtttagtatcaaaagagcccaagaagacactggtgtgaaaggtacaatctcagaggttggtcaattaccgtggcacactttctggtcactttgtacaatgtagatttgaagtacagtggtgaaaacattaaatgtgacatttgaaaaagatgtgtcatctgttttatttcagtttctttcctttgttttctcttcagtacagctcgtatcctgactttgcaaagttttgagacacttcctatttatatttccactttgatctttgaggaaattggttgtttttaaaaatcttctcaaaaactttagattgacaaaaacatattgaaaatttagttaaatcaatatcaaagatgtgatttaaatatacacaatagagaagtctttttagaccttggagtctctaatccagtggttttcaaacttttttttctttgaagcaatatcttggagtccaatatattaaatacataaaagtagattgctctgtatgaagcagactggtaaagggacttgacacctccctcctcttcacttctgcctcctgcctctagcagcccaaaggtactttcagctaaggaagaagtcccagcccagtggtggtgtaat

SEQ ID NO: 85734 - DNA, 1005 bp, Homo sapiens
ctaggactataggtgcacaccaccacacctggctaattttttattttttgtagagatgatgtcttactgtgttacccaggctggtcttctgggctcaagccatcctcctgcctcgggctcccaaagtgctgagattacaggtgtgacccaccgtgcccagcgtcagctttatttttttaatgctgacttactgcagaaggcccaagggccagtgcaggcagcatctggccagaacctgtgtgtgtgtgtgtgtgtgtgtgtgtgtgtgtgtgtgtgtgtttgtgtgagatttaggcattagcacgggcatcctgggtgtgtgtgtatctgtgtgtgtgatgatgtttgaaggcattagctcggtggcatcctggcatggaaggtctgtgcctccattcttgttgctttggtgtaggaaatgctgattttgttgcttctctatggggcaaataataataaacgccttgagttattctcatattctctttgaaaaatgccaaaatttaacatctgtcattttcttcctgaaatagaaggaatgtttccctagagttaaaaaacctgtaggagatcacctagtggttgggctgaaacatgcacaataaattttttttcttggattgcaccaaatcactgcttggaaaaactcatttttttatttactttttgtttttctttcttttttttttttgattttgtttttgagacagtctcttgtcgcccaggctgtagtgcagtggtgcaatctcggctcactgcaacctctgcctctcgggttcaagcaattctcctgcctcagcatcccaaatagctgggattacaggtgcttgccacaacgcctggctaatttttatattttgttatagatggtgtttcaccatgttggccaggctggtctcaaactcctgacctcaagcgatctgcatgcctcagcctcccaaagtgctgggattacaggtgtgaaccaccacgcctggcctggaaaaactcttattttattatgaa

SEQ ID NO: 85735 - DNA, 1332 bp, Homo sapiens
aaaggtgtccatgaccttcccactgtctctgcctgcctgctttcttctactcccttctccaagtggaaactcggaactggaaacctggatgtgccacactgcccaacatgcagacttacgtgacagctcaccgacagctcgccaaagaaccaagaatgggggtcagaacataactcggaaaagctctagggcaataaaactgccattaccggttaaacctgtgtggtacaaaatccaaggggagggaaatccctgccccatggcatctgtttgttcagtaattatatataggtgagaggatcagaaggcagattcagtgaccccagggggtgccaatgggaaacgagcattttcagtggttttagcttatcaagtacacgtgtatggtcacctttttaaaaaagcattgattatatgagaacactaagaataattttaaaatgagaagcacattagggattagcctgatgctacagcttataagtcagtatgatactatccaacgcagagaaataaaagccaacaaaaagagaaattaattctgttggggaacaaaacaaaagggaacaagctcattgtttaagtggtctcaggcttcatgtgtatgcaagggatttccagacgactgaggcagccgtgcaggcctgctgaccacagacatgagcctgagccacactaatgtccctttacaagatctaccctggctatttaccccagatcctgtagcattctcccacaaactatggggaccatccccttccctttggagatactttcccaaaagatttctgggacctgatttctgagtaaaaatgggattttcccaccatttaccaacctttgaggaaggcatacgttgcaatgggaaagaaaggcagctgaaacacaagctcgcaaaacagaaaggacttaaaccaggctgggggctcctgtagcagtgggtctttgaactccttagcataccacttcagcaggtttctaaactgaaaaagaaaacgatcatgatgaattacagccacttgccctcaacaggctcggcgctagctcatttgaaaatacactggaggagcctgtcattaattagccaccccccactaccccggcagcagatggcatgtccagctggcttttgtgacacagcctaggtggtcatttaataaaaacttactatccctaactcaaatgttcccttctctgaaattttctcaactcttccagccccttctttgtgttacccagaatctgttcataattccaagataacacatccaggtgtgttggccactgtcaggagcaacaataagtatctggcacttggtaggcactcagggt

SEQ ID NO: 85736 - DNA, 1011 bp, Homo sapiens
tgaatctgccttctgatcctctcacctatatataattactgaacaaacagatgccatggggcagggatttccctccccttggattttgtaccacacaggtttaaccggtaatggcagttttattgccctagagcttttccgagttatgttctgacccccattcttggttctttggcgagctgtcggtgagctgtcacgtaagtctgcatgttgggcagtgtggcacatccaggtttccagttccgagtttccacttggagaagggagtagaagaaagcaggcaggcagagacagtgggaaggtcatggacacctttgagtcatgaacagacctaaccatttttcttttcccctgactacctcaggaagctgcaagtggattcgaactcctgcaatcatctactctgttcacaccatgacaaccttaattccgatactctccacatttctgtttgaggatttctccaaagccagtggtttcaagggacaaagacctgagactttgcatgaacggttaacccttgtgtctgtctatgccccctacttactcatcccattcatacttttaattttcatgttgcggagcccctactacaagtatgaagagaaaagaaaaaaaaaatgaaggaaacaaccactggcccagggtagagatgcctacagggtggttgcttgttggatacaatacaaggaacactgctcagaacccacgtcttcagcagcatttgaaacactggcagcaatgcacaagagcaagatggtgtcaggaaccatgtcaaaccctcaccttcttccattttttttttttttttaagacagtctcactctgttgcccaggctggagtaaagggcagtggcatgatctcggctcactgcaacctccgcctcctgggctcaagccatcttccttagcctcccaagtagctagaactacaggtgtgtaccaacacgtatggctaatttgttttgttttttttgtgtgtgtggagacagggttttgccatgttgccca

SEQ ID NO: 85737 - DNA, 1051 bp, Homo sapiens
acgcagtgtggtttttcagtttccgtgtctgtcttcttccagctgaactatgtgctcttcagggcgggcaccgtgttgcattcatctttgtacccccagcatctagcagtgttggcatgtagtaggcactcaagaaatgtgtgttgaatgaacgatgcctgtgacaagcaagcggactttattctttcctgacccttgctcctatgacacacctcctcctgactgccactgtcactccttcagagcagaactcctctagggaacctggatgggaaacaggtgaggctcagagaggtggtggcagagggaacggggatcctttggaacacctgggtttttggcattggtgtccaagggcaggagtggggctggcttggcagcaggcatttccttgggtggctgggaagtgatgaggaattgggcctgtttctttacagccatggccaaggacatcctgggtgaagcagggctacactttgatgaactgaacaagctgagggtgttggacccagaggttacccagcagaccatagagctgaaggaagagtgcaaagactttgtggacagtgagtattggggagatacagtgccactcagctttgagctgccatttcaactgtaccccaggctcatcttggccctgccacagtggagctgctggctccctggaggttgaatctggcgtctgtgagttcccacgtgccacccttttctgtctgccctcttgtgctctcatgtgtccccaacagggcaccagtcaaaccaaacaccgggatggggaggggagggtgtctttagatatgccatctttcatttcttgctcttagaaaccttaaactttctgggaacacaaccatggcttgggtgtgggaaatagaattatgtactcatgatttgatttcttcagagaaagtcttctcaggggcaggttctctgttatttggagttagaagtgataggtgaagtttctagaagcagctcaacagacttactgaagtcatcttttggctggaaatcttcaggaagcctcctgtcccagcagccaagcaag

SEQ ID NO: 85738 - DNA, 1565 bp, Homo sapiens
ggtcttgtaggccgggcctcccctcgggcctctgtttcccagcaggctctgtggaatgggggctgtaagtgcttccggagtcaggaaggtagtgacgtcataggtaaacaggctctgtatccgtggcagcggccgtggcaggctggctgggtaccggctgtcgctgacccaggagaagctgcctgtctacatcagcctgggctgcagcgcgctgccgccgcggggccggcaggtaggctgacctcgggtcgggggacgcgggcggaccaggggcgagaggagcctgacaggcccgcgtcctgaggaaaggcagtaccgggcggggagagacgtgggaattccgccccactctcaggggggcgctttcacacccagcttaggcctggagtttgatgcgttgatgcttgccacgatcttacgaggaaactgcggctcggataagttcggggagtttacatagtaaagagtcggctcgcagtgcctcgcatgcatctgggagagccggggcgcagaaagtatgccaccgcctcatgctcagggagcttagtcccagctcttgggccaggtgttgctcagatgctcagacacgcgtgtgatgggagttggtagataatctgtgaactctttccctgcacctcttcttccatcttacctatctctttaagccagcccttccaatcagataggtgggccaagccagattcatgggagtcatgcctgacttgtttttctcttatccccaaacccccacattcagtcagtccattgctaagccccatcacctcgacttacaaaacatctcaactcggaacacttgtgttcggctgccagccttggttactgcaatagtctcctgtttccacggtcattcattccacaaacatttactgagtgccagttatgtgtgggcaccatgctaggtgctagggttagagtgatgaacaagaaggtacttggggctttgccctctcttgttccctccaatcggttctctcaggctgagcaagagtgatctttctaagtctgattttgttggtctgctgagaacccgctggctgtcccattacccttctgataaaatccaagctcatgactgcgtctttcagagccttcggtgatccagctgttgtctccctgtctagcctcattctgttcccttctcttgctcagtctctgttctcggaatgcatcaaatttcctgttgcctcaggatcttcacatacgtgtttccttctgcctgcaatgccttgcttcccctttcacttgacatacttttggacagtctttaggtctgtttaagtgtcatttttttcagaaggcctctgttggccctcccctccaagtccgccccccatgaactgtgtcctcctgcagcacttcacacagcaccatgtacttttccttatagtaatatcacgatttgtgattatttctttaccatctgtccagaggcattgttttcactagtctgtccccagagcagggactgagtggatgtttctgaataaatgcatgctctcagggaagggggtggaagttgaagcagatatttgctccctcatgtt

SEQ ID NO: 85739 - DNA, 1023 bp, Homo sapiens
gagcccacaccggccacatttcccaggactttttgggtgacgcttaacctttacacctagggtttctgctagatccgccactctagccctcagctttcctcccgccgtcctccgtgtctgacggatttctgggtccttcttccttttagacccctcctctttccacctccgcggctgtttgccctttgttgtgcttgggttcccattagcttcgttgcgtgagccacggatccgcccttagccccgggcatccccaaatatccacacacaaagtgcggaaggaagagcactgtggctatcagtggaaacttcattctcactggaattactttctggggcgtcacctgccacagaattcctggaacccattggtctgggcggaatgtgattgacgtcatccaggggctcaaagcaattgctttgtaggaaaggaagagattagctctggatccgccgacctctcttggcaggcctatcctttgagctcctttgcattggcagaacatgtatgtgtgctttctctgatcctgggaaaactaggactagacacaaaatacacagggaacttgctaatacctgttagagaggtggatttattcctttgaggtgggcgggaaaagggaaggtgatctcataccattctagtgtttcttagtcattggcaacctcctggtgagggctcacctcccatacccaacccctgtggcaaatgaaagagtctcccagacaagccgccaaaggaattcactgcttcacacagcacccacgctggctgtccacttccttggacattcttcccagggacttacctaaatcttttcagggacaatttcagtctaacaaactgacgtatgttaaatacttaaaatgtgcatggcattgtgctgagcaccattaggggaacacagcggtaaacttgggaaaccagtgccctgcttctgggttgcacttacaaggcatgagcaactgtaaactcctgcatgtgatgagcattcggtgaaatcattccactttttttctgtc

SEQ ID NO: 85740 - DNA, 1068 bp, Homo sapiens
ccctttccaccacggcggagccttccaagcctacctcctgccgtgtggtgatctacctgcagcgggagatgtcgggggacacctgcctgtgcccagcctcaggggccaagcccaagctcagtggcttcaagggaggagggttgggcaacaagtatgtccagctcaacgtgggcggctctctgtactacaccactgtgcgggccctgacccgccacgacaccatgctcaaggccatgttcagtgggcgcatggaggtgctgaccgacaaagaaggtgaggcactggggctgccgctcggggtggggagggcaggaggagttcccaaggaaatgaccagatctagaattcagtcacttttcctcttcactttatgtagggtgtcttcacctggagtccctagtagagcttcagaattctgtgaaattgtatatggaatgctgtgtttatgcattttccaggaagaagagccatacttttaaaatatttaaataggacaagattctcataggagccgtcaccttaagactgggcagcgggcagaaggccggcagtggctggtggtttctgtgttgggctgggcctggtaccctgagcctaggcccctgtggcttctacagcctggagggctgtatcccccgtgggatgtgccagttctgggtttcagagaggaagggtgaagagcagccatgggcctgagtgctagaacctccatccccgcctctgtcaccctgcgtaagggctttgtgctcgtggacccccttccctgccacctgccgccagcttgtcaggtggcctttgcctgcctcggaggtacctggcggcaaactaaccctgtagggccttctgcacccctaggctggatcctcatagaccgttgtggaaagcactttggcaccattttgaattacctccgagatgacaccatcaccctccctcagaaccggcaagaaatcaaggaattgatggctgaagcaaagtattacctcatccaggggctggtgaatatgtgccagagtgccctgcaggtacatgggtggggcggagcagggcgggcagatgaggtcagga

SEQ ID NO: 85741 - DNA, 1057 bp, Homo sapiens
aggggttgagctgaaccaaccttttgtacatatgggagctgcagcccagaagggttcagcccaaggctccacagctagcaagtggtagagctgtgttgggacctagctctggcccaccctctatgcccactagtcccttggtctcaggctggggcaggggtgtggaggatgttggtcttccctgtcctcatgtctgtagagtacatcccctcaccccgccttcggagggaggctggctttccctggagacggaccgccacctgttttatgagaggtagcggaggccttatggagcctcagggccagccgctctgacgcatggcttcctcttgaagatgaaaccttgctccaccttcttcctccctaaccccaggtggaattcccagaggcccgaatctatgaggagacactcaacgtcctactctatgagactccccgcgtccccgacaactccttgttggaggccacaagccgtagccgcagccaggcttcccccagtgaagatgaggagacctttgaactgcgggaccgtgtccgccgcatccacgtcaagcgctacagcacttacgatgaccggcagctcggccaccagtctacccatcgcgactgaccagaccctcagggagtcagggcacgggaggccctatctcccatcctgtggaacccgccccattggccaccccatgctgctgctgcctgggtctctgctctagcacccagaggcatgacaggccctgctcagaggtcagagggtctgggcagaggagggaccacattcccctgccttgcccctgagcacttctggagactgcgtcctgtcctatctgctcaccatcacccttcctgcccgacggagctgcttctgctccctggggcatatggactgacccacctcctgctgagaaccttcccctaggccctgtgcagaaggctactgccccttaggcctcagctgggggaaaggcagttctggtgctgtagaggccctggtgcagaaagtgggacgtcttttttcctaaggtgtttaagcacaggcttgataagtttggtttttaaa

SEQ ID NO: 85742 - DNA, 1046 bp, Homo sapiens
aaaacccaatactggcctgtgttgttaacagcaggctgccaggtttctcagaaactgacaagaaaatctgaccttcatccatactttgtttacttacccctgggctgcttggagttgaaaaatgcacacagccaagagttgctttctgaatagggctggaaactttcaaagaaaacccccaaacttttaagtcacaaagtctgattaaagaagctaagatcatgtcagtgagttcaatgttagtattttccttaagaccaaggagagattttcagtcagagaagataaatgcccagtcccagactactgtgctttctcggcaaaaaagactgagacactgaggatgtgaatgtcaaagtagtaagcagggactaaaggggatggggaggtcaaaaggcaagcatcacaacacctcagtggggagctgggaatttgagtgttaaaggacctcaagagggcagctgagaaaataggccagtggtctcaggctgacgcattccagtctctgtgggaaagtcataaagccaaagcctgaatttggccaaagaagtggatttgtctttatcttgttacctcaatgagggctggaagaactagtagctgatcaccaaggtacctgacctgagagtcttagtgctgtttatacattcaagactgtgactaacataaaatgcctaattagaaagtcacatttcccctgtcccgccgtcatgtcacttcaggtccttgtgtctaaccctgggtctggcatttgcccataggctctgtggcatcagctatcataagagtagtcaagagagatgaacttgataacctgtgttctctccaaagagcagaaagtgggtactatacgtggctacgttgctttgttaggctggcagaacagtccctccctgacagcattcctttggaaaataattcagataagctgaattctggtttggccaagccaaacaaaaaggaatgaaaaccaaagccctaaagaggaactcacctcctggctagtgcttggcatctccatggctgagttacccaacaaggagtga

SEQ ID NO: 85743 - DNA, 1120 bp, Homo sapiens
agtgggtctcttaatttgattgtggggttctttttgtggggaggggtggtataacttttcttcagaagacccatgtgggacacctccaaggctggcctcctcataagccctgcctacaccatgttccagtaaacctctccaccaaggaactgtgttcagctgccacaggcctggaggagtttcctggcctgtcacgtgaggtttgatcagtaaaccagtgcacgcttggccacccttgccatttctgctcccagagtctcaggctccccttctgacccagtgtgcgcccttgactgctttctttgctgcccttccagggagctgcccccctggtagggcatgtgcctgtttccctctcagcctggaggctggctggacatctcctagggtcactgtgcctctcagctagttggcgggggtgctggactggactcttgttcactttaccttctgccaaatgcagagagggaggccagtgtcagggtcggagtggcctggctcttagcactgaccgaccattgccatttctggcctcgctaggcccaggagaggagggaggcaagccagtcgggtttcctggagcaatgggtgtgccagccctcagcatgactctgccaagcatccagaccacaaatgcaggaatttggctgaggagcagctttaggtatggattgatgactaagtcaagctacttcctgagcttctctcagatttccaagagccagagatgaattgtgctgcatcttgccccaattcttaggatttcttttcctccgccactgcagtgattgttagaggtagttttcttgaattaatattaaatcacagttccagcccttgttattcttgtccttagtcctccagggggagctggggttgcagggcaacagtacagtcgcgcttacgacctggctagaacacaaggtcagatgataaacagaagcacaggaactcagcccatggccgcaagctggtcaaggcctgctcactgtaaacatggctctgtaccattgagtttaacacaattttattagaaattagtgtttgcttccatcacttatgctgagcaaccaaatattacagttatgtgataaaggaaaaattctttcctgcccaggac

SEQ ID NO: 85744 - DNA, 1533 bp, Homo sapiens
ttccagcctgaacttttgcttcatgtatgagcaccttgtttgcctgggccaccactagggagggttttctaggaggggcaatcgcactggactattgtgtgattggactagatacaattgtatccacaacacacaattggactaaccaattgtatcttgccccagcacctccttttgtggctcgggagacgctaagggcctggcaagagaagaatcacccctggctggagctctccgatgttcatcgggaaacaactgagaacatacgtgtcactgtcatccccttctacatgggcatgagggtatgtggccagcctggaccccttctagcaggggtaggccccaaggtgtatggtgtccttaaggtgactgccgggggaagggagtctaaatataaaccatgtccctgtggttctgcttccaagtggtggcatgtgttgggtggggttgagtagcctctagacagtggctgacaccaagacctagagcgggcaggaaaactcataggtcccaggaaggaatcctttatcctgtctcttccctcttgctcaaagggagccatgtttatgaagaatatacacataattatttaaagcagtgtaggcataacactttttacacattatagacacttacacatcgcctggctgtaagcatgtgcagtggtaggggccgcccaactccacagacagaagctataggtcagaaaagtacgtatagtcagtgcatgcttggatacaaatataaatgaaacaccgtccctgtcttccaggaccttatagtagtggaggaggccaacttaaagtattatagcaagggacagtaatgggagacaggaggaggacaggggctcagggcagcaaggatagggggcagggctggtgaggagggcagtgaaaaaggtaagagccctgtaactgatttctgttggcatccagctctgttggtgatcttgaagggatgaggagtggggaggccaggagtggatacagggatgttgcctccctgtgggtgtgtaggccatggttcagctatcacccttatcccacagatactctcagcttggtctgtctgcaaccttcctggaatacatcaactgcactggagagatgttgattggaacacacttggtcttgccctgtgggacttaaattctttttgttttctccctaggaagcccagaattcccacgtgtactgggtgagtgtcactgtctgggagaaggggagcttgtggggtgtgcctgggggtcagggtggaggtgggggagcccaccttctgacgagagcggaacctgtgcagtgcatgtgtcagctttgttgacttttgctttgcacagaattctgaggagggttacccaaattttattttttttaaactctctctcccacacccacctcagtggcgctactgtatccgtttggagaaccttgacagtgatgtggtacagctccgggagcggcactggaggatattcagtctctctggcaccttggagacagtgcgaggccgaggggtagtgggcagggtgag

SEQ ID NO: 85745 - DNA, 1047 bp, Homo sapiens
tctgcctcccgggttcaagtgattctcctgcctcagccacccgagtagctgggattacaggcatctgccaccacaccagcctaatttttgtactttttagcagagacatggtttcaccactgattcacttcttgccttagtctcagagatctcagacagaagctgtgaccttcttggctaaccatgatgacagtcgggccctctatgccatcccaggtgagtagttagcatttgaatggtgcccgtcaagaaggagtctggtgtgtctcagggagaggattctgatgtcctgtcatccactgggagggattatgatgctgagaggtatgatatcagggttatcccatactggaacaaggccagttaatgtttcttctcaaccccatctctctcctctcctgtgagtttcaccactgtcttttgcatctctgtgccaggcttggactatgtcagccatgaagacatcctcccctacacctccactgatcaggttcccatccaacatgaactctttgaaagatttcttctgtatgaccagacaaaaggtaatctctctcaagaaggggaggtggaatgggagggccttttcatcaaagaatatcatagaaataattccagggccgggcacggtggctcacgcctgtaatcccagcactttgggaggcccaggcaggtggatcatctgaggtcaggagttcaagactggcctggccaacctggtgaaaccctgtctctactaaaaatacaaaaattagctgggcgtggtggtgggcgcctgtaatcccagctacctgggaggctgaggcaggagaatcacttgaacccaggagggtggaggttgcagtgagccgagattgcaccattgcattccagcctgggcaacagagcgagactccatctcaggaaaaaaaaaaaaaaaggcccgggtgcttgtggctcacgcctataactccagcactttgggaggctgacacgggcagatcactaggtcaagagatcaagaccatcgtggccaatgtggtgaaaccctgtttctactaaaaatat

SEQ ID NO: 85746 - DNA, 1044 bp, Homo sapiens
caagaccttgtgctggagttgcctccacctgtgttgctttgtggtctggggcccacctggatggatttgctggactgcagactcactgaggcccctctttccttccagcttttccttcatagcatttttggctaccgaggtgtcgtcctgtttccctggcaggccagactgtatgaccgggatgtggcttctgcagctccagaaaagtaagtttccctgtggttgtgcctcacagtatcctcaggaggagatggcagacatatgtaattggggtactaggggtgaagacagcgtcctcctaggccttggaaacatccccagagtacttctctgggactaagacccatggagacaaaagtgctgagtgccagggatagtctaagtcagagagtccctttaggcctcctcagaatgctttcctaagccattcctaattttcattatgagtatcccagagggcatttgggggacaagtcttcttgatttcttgatgttcagctggagtctttccctcaatctcacatcatccctagaatacattaaaacagaaaaggttcagccccattaagtgatcacagacagtccctgggatataagaagacaagagtactctgggccctggggactgaggtggcaatttgattttctcaacatggcccccttcttttaagaggtatccacacggtcagatgatggctccataccatggtcttccatgctctattatttgccccaactgaggagcagctgagctgaggtgctgcagagcaggtgtccagctggtgctaaagcccctttagatcagagaccagcctgtttaggtgaggaggagtagggagctgagtcagccacagcttccatttctcctggggtgatcttggcctccttctcccaccccatagagcagagaaccctgctggccatggctccaaggaggtgaaaggcaaaactcacacttactatcaggtgctgattgatgctcgtgactgcccacatatagtaagtaagcaagatggctgggcttgggggtcctctccatggaaa

SEQ ID NO: 85747 - DNA, 1030 bp, Homo sapiens
tttgtgaaaccttttcttctcagattccaaactatacctccatgagctcctagaaggcagtgaaatctatctcccagaggttgtgaagcctccacgggtatgtaagggatatgtttgtgagagtggttattgactgagttgggcttatccatgatacactgaacttataaatcaacttttaggcttgaaaaattgtttttgaaatctttgggatctgggggagccagatattgtcctccccatcagctgtttggaaaattgagatcaaaaaaaaaaaaaacagtttcaaagcactggagttacgactagtatgtgggtctcctgatacctttagcagtgctttacccctggaaccaatgattgtgatgtgctttctaacaagctgggaatatcattcttctcatttgatttttctgcttcagaacccagaactagttgcccggctggagaagattaagatacagctggccaatgaggaatataaacggatcacccgcaacgtcacttgtcaggtaaggacatgctcttcagtacgtggtctaggtagcccctcagagtagggccctgcagtggaagaagatacagagtttagaaaaaacatggaaacttggtttctatactgttcagggaccataggaagtctgcatacaaacaacacagttcccatctcattcactgagactctgggctgagatggtgaccaagttttaaacgtcatagaagtgggagttagccgggcacggcgctcatgcctgtaatcctagcactttgggaggctgaggtaggtggatcacttgaggtcgggagttcgtgaccagcctggccaacatggtgaaaccccgtctttacaaaaaatacaaaacttagcctggcgtggtggcgggcacctgtaatcccagctactcgagaggctgaggcaggagaatcacttgaacccaggaggcggaggcagaggctgctgtgagccaacactgcaccattgcactccagcctgagcaacaagagcaagactccatctcaaaataaataa

SEQ ID NO: 85748 - DNA, 2278 bp, Homo sapiens
gagaccacgttggccaggctggtcttgaactcccagcctcaaggtgatcctcctgcctcggcctcccaaagtgctgggattacaaggtgagccactgtgcccagccattcgagcatttcttctgacagggctccctactactctatggcatgctcctaccctggaacaggagagtagatgggtactggcagcctatgtcctctctccgaaatgcctgctctgtagtccagaaaagagtcaaaatggttccagacaaaagaatccatggggagggcagagttaatatgttggggaatagagagggctgagccagactgtcaatggatgctctctgagctgcttctattctgaatcatcttctttttctttttcccaggatacaagacatggtgggactctcagcgacctgggaaagcaaggtgaggtactaggagatcaggcttctaaaaccttttcctgagatgggtcatgacactcaggcttgttgtttgactgaaacccagttggtgggggagccatgagataagagcacctcctagagaatgttgaactaaaggtgccctctctggctcctccccaaagtgagatcattgaaggctctggtcatcaccatcttcaatttcattgtcacggtggttgctgccttcgtctgcacttaccttggaagccaatatatcttcacagaaatggcctcggtgagtaggcactgggcagggcagggtgccctggtgggggtgttagtgggtaagggaggacgtatgtgaaagtgccttgcacaggttaggtattgaacagatatttatgccattaataaggggagcattagagctttccagcagtcacgggaggttaggtaataaccccaggagaagccacattctcttttcttcccctcccccaacttagagggtggttggggggctctccatcctcattaaagttgctggggtacagagctggttgttggcctgcatcccttaagcctggttctccccatctccagcgggtgctagctgcattgatcgtcgcctctgtggtgggtctggccgagctgtatgtcatggtgcgggcaatggaaggcgagctgggagaactgtaactggtgcttcatcatcaagtctagagaagactttgggggcttcaggctccaattggcagtcaccgactcagtcaacccatcagactttttgtattcagctccagttagtcagaagaccagcccaggccagctgctgtttctgtggggagccctaatcttctgtgaatttccaaagggagcattggaggagattgagataacacatctttaaaacagaaagaactggtcttggtctatcagtacctcttcctgaatctggtacccatctgccttctccagttcattctaaacactgctgggactagggtttttccatcaggagcaaatggaatccaggccttcccagaagtagaccatactgccttgaacttgtccatatgtacaaactgatcaccagctttctccatacatttttaatgcagacctgtaattgagttcagaagcctccaagaaaacagaaaggatcccctttctccagtttgtgctggaagaggagctgatcagagacatcaaataagagaaagatgggttgctagaggatggtagaactggaagcaaggcagctacctttttgcaaaaggaaatggtgttaggccccttttccagaagataagacagactcatagagattaaatgatcactatggtccttcttctgttaaatggagccaaagacgcctatgttgttctgaagtcttgtaatgtttaacttctgagaacttagattagtggtgtgatgatagagtctgtataacgcattgaaaagggtatcaggcttagttatttatccaataaatatttattgtatgcagggtattcctattttaactcctgtgacaacacaaagcatagcgatttccatagttctaactgttcagggtctgctcctcctggtacactctttttggttcactgtatgtactcctgttgtctttttttttttttccaaagcacttttctgttttcataaattatatactcattcactcagtggacacttcctctacaatgtttgccagtttctgttagttgggagaagtgtcagctgtgaaaagaaaaagtaggtggcattttacagtgtttccagtaacctgagctatataaaatttgtgttaaaaagctacactgggccaggtgaggtggctcacacctgtaatcgtagcattttgggaggctgagg

SEQ ID NO: 85749 - DNA, 1059 bp, Homo sapiens
ttttaccatgtgccaggcattgtgccaagcactctataaggcttatctcattagtcctgataataatcctatgaggcaggtatttctattttctatttatgagataaggaaagcaaggtagagagataaaggaagctgcccaaaggtctcctttatcccagttagaaaacgggctgagaagaaaccaggacccaggggatctgctcctgagctgaggctcttagccaccacacatactgcctctcaaggggaggagggagggggagaacggctatggccagaatagagcacccttagaatccgagaagtggggtcctcccaggggaggagatgagggtggggagcagggaggggaatgctctcccctatatgaggccggtgaggcccagagagggttagtgaccaggccccaaacgggcaagccaagctccccaagctgcggcaattccactgtccccttccactttcactgggcagagaccgcgtggcgcgcattgggctgggcgtgatcctgaacctggcgaaggaacgcgaacccgtagagctggcgcggagtgggtcaggcatcttggagcacatgttcaagcattcggaggagacatgccagaggctggtggcggccggcggcctggacgcggtgctgtattggtgccgccgcacggaccccgcgctgctgcgccactgcgcgctggcgctgggcaactgcgcgctgcacgggggccaggcggtgcagcgacgcatggtagagaagcgcgcagccgagtggctcttcccgctcgccttctccaaggaggacgagctgctttcgctgcacgcctgcctcgcagtagcggtgttggcgactaacaaggaggtggagcgcgaggtggagcgctcgggcacgctggcgctcgtggagccgcttgtggcctcgctggaccctggccgcttcgcccgctgtctggtggacgccagcgacacaagccagggccgcgggcccgacgacctgcagcgcctcgtgccgttgctcgactctaaccgcttggaggcgcagtgcatcggggctttctacctctgcgc

SEQ ID NO: 85750 - DNA, 1046 bp, Homo sapiens
ccaggctggtcccgaactcctgagctcaagcctggagttcagtgcctgcctcggctccccaaagttctgggattagaggcatgagccaccgtgcccagccagaggacttgactctaattgttttcgttctcaaccagctaggtgatcctgaacaaaccattatccctttcttttatttatttaattatttttttttttttgaggcacagtcttgctctatcaccaggttggagtgcagtggtgagatcttggtcggctcactgcaacctccgcctcccgggttcaagtgattcccctgcctcagcctcctgagtagctgggactacaggcacacgccaccatatccagctaatttatatatatatatttttagtagagacggggtttcaccatcttggccaagatggtctcgatctcctgacctcgtgatccgcccgccttggcctcccaaagtgctgggattacagacatgagccaccacacacggccgccattatccctttcttggccagcctctgaatctgtgcgatgaataatttgtactgtctttggttttgtataattctggatgaaacaaatttctaaaaatttccaaataaattgctgcaggctcaggattcattccaatgctcagcagaaaggcagcagggcttggctgaaacagcctggacttggactcccgaggcttgagtcagaggaccggcccctcgtgggctgggcgtgtgtgtggcttaggaggaaatcccttcctctctgggcttttttctctccatctgtaaaatggagcggctccccaggaagccagtcaaggacgaagttacgcatgttctttccccaggaaggctccacttcccaagaatgcttggcaccccttgtcgtcccagcagatggcaaagaggtgagaggagcctttgtcttggaccggccccagaggctccgtcatccctctttggttgtttctggtgcttaattgcctctggttttaaaactcctttccctgaagccacattagtgggtaatcaatagggaaaaaccacaagtgaact

SEQ ID NO: 85751 - DNA, 1404 bp, Homo sapiens
tcacaacattgagctaggtgaaatcagcttaaaataaataccaaacgaaagtttaaatagaaaacaaagagagaaagagtcctcaaaagagctgggcatgtgtcatctaaggacacaatcgacagaataaaaaggcaacctacagaatggaagaaaatatttgtaaaccatacgtctgagaaggggttaatatccagaatatataaagaactcttacaatccaacaacaacaaaaaacaagtaacccaatttaaaaattagcagacggtttcaatagacattctccaaagaagatatacaagtggacaagtatatgaaaagttgctcaacaccactaatcactaaggaaatgcaagtctaaaccacaacgaaatatcttctctgcaacattccaattttaatatgtgggctgccgaagcaagcacaaaaccacaatgaaacaccacacacccactaggatggctgctgttttaaaaaagacaaaacactcttcctaagccggcgctcggcaagttctcccaggagaaagccatgttcagttcgagcgccaagattgtgaagcccaatggcgagaagccggacgagttcgagtccggcatctcccaggctcttctggagctggagatgaactcggacctcaaggctcagctcagggagctgaatattacggcagctaaggaaattgaagttggtggtggtcagaaagctatcataatctttgttcccgttcctcaactgaaatctttccagaaaatccaagtccggctagtacgcgaattggagaaaaagttcagtgggaagcatgtcgtctttatcgctcagaggagaattctgcctaagccaactcgaaaaagccgtacaaaaaataagcaaaagcgtcccaggagccgtactctgacagctgtgcacgatgccatcctcgaggacttggtcttcccaagcgaaattgtggtcaagagaatccgcgtcaaactagatggcagccggctcataaaggctcatttggacaaagcacagcagaacaatgtggaacacaaggttgaaactttttctggtgtctataagaagctcacgggcaaggatgttaattttgaattcccagagtttcaattgtaaacaaaaatgactaaataaaaagtatatattcacagtaaaaaaaaaaaataatgagtattgttgaggctgtgaggaaatcggaacccttgtgcgctgttggtggaaatgtaagatggtgcagctgctgtggcaaactgcatggcatttccttaaaaaaaaaaaaacgaaacatagagctaccagatgatccagcaatactgcttcttggtatatatccaaaagaattgaaaggaaggtctcaaagagatatttgtacacccacgttcataacagggttattcacaatag

SEQ ID NO: 85752 - DNA, 1050 bp, Homo sapiens
tacctccacaggtgaacacacttccacagggtacatacttccataggtgaacatacttccacaagtgtacaccccttcacagaggtacacccctccatgtggtacatgcttctacagggtacacacttccacagatgaacatacctccacaggctacacatctccacaggtgtacacccctccaaaagtatagacttccacaggtgtacacacctccacagggtatacagttccattggtgaatatacctccacaggtgtacactcctcaacaggtatacacccctccacaagtatacacactttcacaggagtacacccctccacagtgtacatacctccaaaggtgaacaccattccccaggtgtatacacctccacagatatacataccttcacaggcgtacacacctccacagggtacacacttccacaggtgaacatatctctacagtgtccataccttcacagggtacacatttccacaggtataccctcctcaacaggtgtacacccctccacaagtatacacatttccacaggggtacacacctccagaggatccatacttccacagggtatacaactccacaggatccataactccacaggatacacacctccacaggatccatacctccacagggtacacatctccacagggtacacacctccacaggatccttacatccacagggtacacatctccacaggatccatacctccacagggtacacacctccacagggtacacacctccacaggatccatagctccaaagggtacacatctccagaggatacacatctccacagaatccatacctccacagggtacacacctctacagggtacacactgccacaggatccacacctccacaaggtacacacctccacaggttacacacctccacaggatccatacctccatagggtacacacctccacaggatccataccatcacggggtacatgcctccacagagtacatacctccacaggatccacacctccacagggtacacacttccacagagtacacacctccaca

SEQ ID NO: 85753 - DNA, 1080 bp, Homo sapiens
tacccagtggaggtgtgtaccctgtggaggtgtgtatcctgtggaggtgtgtaccctgtggaggtgtggatcctgtggaggtgtgtaccctgtggagatgtgtacccttttgaggtatggatcctgtggaggtgtgtaccctgtggaagtgtgtaccctgtggaggtgtggatcctgtggaggtatgtactctgtggaggcgtgtaccctgtgatggtatggatcctgtggaggtgtgtaccctgtggaggtatggatcctgcggaggtgtgtaccctatggaggtatggatcctgtggaggtgtgtaccctgtggaggtgtgtccttgtggaggtatggatcctgtggaggtgtgtacccagtggagttgtgtaccctgtggaggtgtgtaccctgtggaggtgtgtatcctgtggaggtgtgtaccctgtggagatgtgtacccttttgaggtatggatcctgtggaggtgtgtaccctgtggaagtgtgtaccctgtggaggtgtggatcctgtggaggtatgtattctgtggaggcgtgtaccccgtgatggtatggatcctgtggaggtgtgtacccagtggaggtgtgtaccctgtggaggtatggatcctgcggaggtgtgtaccctatggaggtatggatcctgtggaggtgtgtaccctgtggaggtgtgtatcctgcggaggtgtgtaccctgtggaggtgtgtactctgtggcggtatggatcctgtggaggtgtgtactctgtggaagtgtgtaccctgtggaggtgtggatcctgtggaggtatgtactctgtggaggcatgtaccccgtgatggtatggatcctgtggaggtgtgtaccctatggaggtatggatcctgtggaggtgtgtaacctgtggaggtgtgtaccttgtggaggtgtggatcctgtggcagtgtgtaccctgtagaggtgtgtaccctgtggaggtatggattctgtggagatgtgtatcctctggagatgtgtaccctttggagctatggatcctgtggaggtgtgtaccctgtggaggtgtgtaccctgtggaggtatggatcctgtgg

SEQ ID NO: 85754 - DNA, 1038 bp, Homo sapiens
tatgtctgcccatagcaggagggtgtgtgccccataagtaggtcctgcagggggttcttgccaggaatggggcctggagctgggtggagtgagtgcagtggtggggagaggccagctgggggtgccaggggccggatggggcctgagccggacagcccagggggcggacagcccaggagtggggagcccagcttttctctcttgtctccaatgaggctgtccagctcttctgaaaggcccaagagagaaagaacaccatgagacctccctcctccacagtcttccccagactggaacccttactcggggccttgcctcattctctgattctctcttttttttttttttggctcatgagtaccctgggcccttccttgcgtggcccggccggcctcacctggcttggccatgcttttgcgcacagcaatgggatctttcctcttccatttttgcagctcctcttgcatcttgtcgatcttggccggattgagggcccacaggcagcccttgcgggaggaacttcctgatttgttctccaccttctcgaagcacttgttgagggataggttgtgccggacagaattcttccagccatcgggtgctgtctgccggaacagagcaagacaagcattcaggccaggctcaggaagccagagcgggcttcaggtctgggttctagaacactcctgtttctcctctgggcacagagctgccgcccactctggggcttgttgtcctcctcagcacccatcccttgcttggtaccctttggtggtaggggacgggtgaacaggaaccttgaccccaagttattttcatctcaaatctgccttcatcccacccgcatcccttcctgacccctcagaggactgccgaggtgattcggaaagccagggctggtgggcgctacagaggccttctgacccacaacactctcccatctgaagctgagccactccccactgggtctccatgcctgtgcttggacccctctgtggaagggggactcattactctgaggtcttgtggctggcttta

SEQ ID NO: 85755 - DNA, 1248 bp, Homo sapiens
gccttcctttctggccaaggtgggcggtgttagattgtgaggcacgtacatggggcctgccggaatgacttaaatatttgtctccagtctccactgttggctctccagcaaccaaagtacaacactccaagatgggttcatcttttcttcctttcccattcacctggctcaatcctcctccaccaccaggggcctcaaaaggcacatcatccgggtctccttatcttgtttgataaggctgctgcctgtctccctctgtggcaaggactgtttgttcttttgccccatttctcaacatagcacacttgtgcactgagaggagggagcattatgggaaagtccctgccttccacacctctctctagtccctgtgggacagccctagcccctgctgtcatgaaggggccaggcattggtcacctgtgggaccttctccctcactcccctccctcctagttggctttgtctgtcaggtgcagtctggcgggagtccaggaggcagcagctcaggacatggtgctgtgtgtgtgtgtgtgtgtgtgtgtgtgtgtgtgtgtcagaggttccagaaagttccagatttggaatcaaacagtcctgaattcaaatccttgtttttgcacttattgtctggagagctttggataaggtattgaatctctctgagcctcagtttttcatttgttcaaatggcactgatgatgtctcccttacaagatggttgtgaggagtaaatgtgatcagcatgtaaagtgtctggcgtgtagtaggctcttaataaacactggctgaatatgaattggaatgatacaaagtctgagctctactctttctgcattcacgcgtaagtaacagtttcctggtgtttgtcctcctgtgcccacaggtccactttgcttccacgtggccatgtgcccttcctagctggattgcccaaggctgttagcatctgctttttacctgagatactaattcatcaggtcaaaaaaaaaaaaaaaaaaaaaaaaaaagtcttgagcaccagctgcagggagccttctgctaggtacaggggtcctacagagaacaaagtaggcaggaccagtgctttcacagagctgagctttcagggggaagagtcagcggacaaataaaaataatttcacataatgcattagaaagacaaaaacaggctggtcagatggtgactgagggggaaggacttcagactgggtgtgagggaggccctttgagcagatgacatttgag

SEQ ID NO: 85756 - DNA, 1808 bp, Homo sapiens
ggagaattgcttgaacccgggaggtggagtttgcagtgagccaagattgtgccactgcactccagcctggcaacagagtgagactccatctcaaaaaaaaaagatgtgaagaatgtagctttctgtatcacgctgtctccttgtagggaaaacacgtgggagaaatttttatcaggtcttcctagtgggagtaattgcttctgaataactggcttgatttgatcttgtagacactgaattatgctgttctttgtttctctctttgtgtagactgttaggaaacctggtaaaatacgtgatttttaaagcacgtatttagtttattcagtttacccttggctttgctattttcttctgcaattattttctctcagccctgattttgtctcttatatgttgccttgtcctgattgtgtcttttttaaggcacctcaaatcttttttgggagaaagtagaatataaatctaaacaaagtaaccactccctgtttgctctacagattctttactatgcaatgttgggggtgaatccccgctttgactcagcttcctccagctactatttggacatgcacagcctcccccatgtcatcaacccagtggagtcccggctgggtgagcacctaaggatgagggtctttcttttctgccaggctagggagggaccctgacggctcagctgggtaggggacaggagttggaggtggattatatacagtgatggttcccaggttgggttggtccgaggagactgtggagattgaggctcctttttttctttttttgagacaaggccttgctctgttgcccagtctaaagtgcagtggcacagtcatagctcactgcagcctccaactcctggactcaagtggtcttcccacctcagcctctcgagtagctagaactataggtatgtgccactacacttggctaattttcaaaattttttttagagacaggatctcattatgttgcccatgctggtcttgaactcccctcaagtgatcttcccaccccagccccctaaaatgctgggattataggcgtgagccactatgcctgagccctaggttcctttttcatgatgctctgttgatatctccatcttcacacctatcatatccaaaagcatttattaaacgtgattcctagcactttttacaaatgaatgactaggctgggtctatctccctaaaagccatctaggagagaggctgtcacacacataggaaagacaacagcaaaagtacttgagggcagaatttgaattgacagttctgctgattgaggttgaataaccttgaagctagtattagagtttttcatttttcgggtggaaactaggaagaggaggtgtgactaagaactgtaacacaggcaaaccaaagtgagtatatctaattgtggaatctcagataccagaggcaggctagtgtggcccaaggattgtgagggggtggcatgtgaggccttagaaaattcctccgttcatttattcattcagcaaacattgactgagggactaccttatgacagtgctgagtagagaaaagaagggcatttcaggcaaagggaactgtgagcttagatgcagacaagtgagagagcttaggcattcaggaagctcagagtagtttagtgtggctgaaatgtgagtgagtgaccaaagatgaagccggttaggcaggcaggagccaggtcataaaggaccatgttaaggagtttgaactttaacctgatatgggtggctagtgattgagggatattaagcagggaactgacataaggtcagatttctggtttgcata

SEQ ID NO: 85757 - DNA, 1022 bp, Homo sapiens
cccaacctcaaatgatctgcctgcctcggcctcccaaagtgctgggattacagcgtgagccaccacacccggccgatatttgtattttcagtagagatggggtttctccatgatggccaggctggtcttgaagtgctggcctcaagtgatccgtctgcctcagtctcccaaagtgctgggattacagacatgagccacagcgcccggcagctttttcttactcagtgttcctcatcccagttttgtcctccttttggttccatgatggaaagcagccccattccagaggagaaacaagttcagctcagctgggagtacaggctgcccctcttctttgatccacaagagcctctgacttccctgactcctgtttctgtaggctatgagatcaccttcagtttactcaacccagaccccaagtcccatgatgtctactgggacattgagggggctgtccggcgctatgtgcaacctttcctgaatgccctcggtgccgctggcaacttctctgtggactctcaggtgagaccgggagcaagttgaggagtccttttcaatgtctatacatatttacaagtgcagtctgttcctccatctcttagagcttgctgatttgctaggaatttcctgtgtgtatatgtatgtgagtgtcataagggtgggtactgggggtgcgtgtgtgcccttgtctgtgtccatccatccattgagggcagattctggtgtctttacttccttggcatcctattgagagagtttgtcagtgcttgttaacaaaccaccttcctatagctccctctagacctgtactcaccaattgtgcttagatgttaatgccatgacccatctttttttttttttttttttttttgagacagagtcttgttctattaccaggctggagtgcagtggtgtgatcccagctcactgcaacctccgcctcccaggttcaagcgattctcctgactcagcctcctgagtagctgggattacaggtgcgtgccaccatgcccagctgattt

SEQ ID NO: 85758 - DNA, 1047 bp, Homo sapiens
ttataatcaaatatttaatttttataaaagcactaaagaaaatgttaatgaacgtccccatccccacccccagctcacaaactgcagtgcagtagcacggtgtgtacttccatggttatactccattcccttttggcccaaggcaaccagattttgtgtttgtaattttcttgcttttccttagagtttgatcacatatgctgtatctctgtaaacaatgtatttaattttacatttttgaatttatataaatggtggcttataacacatgttcctctgccacttttattttattcccttcatgtggcagagcctggtgagagaatcatccataattatgtagttgaatctatgtatcattgtataaacataaacataatttacccattctattgctaatggacatttggattatttctaggttttactgttagaaataatgctattatgaatacttgtttctttgccatgtgccatttttatatcagactctccagttgtctgtttattccgcttttcttgctcagcatgccatctctgagtttccatttcaccattttaccagcccctgaagagttagatgctgcctggacccatgtcaactgggaaaaagaagagaacggagacaaatgaaaatactcaatatatactcatagctcagaaatgctgagttaatagctcatgaatctcaagagaggtgcaaacctgttggtcattggcaaaggggcagattcggaacagtaggagccagggtgctttttggctttcttttctgagccatgggcattctgtctcttgctcacccccacaggacatgatgagctacattgggcccaagaggacagcagtggtgcgggggataatgcaccgggaggcctttaacatcattggccgccgcatagtccaggtggcccaggccatgtctttgactgaggatgtgcttgctgctgctctggctgaccaccttccagaggacaagtggagcgctgagaagaggcggcctctcaagtccagcttgggtagggcaccaggctctgccacatgaag

SEQ ID NO: 85759 - DNA, 1196 bp, Homo sapiens
cggtcctgccccctcgttgcagagattccgattgggtgaggctcacgaagctctgcccccacggtggccggagcagccggaagctagcatggcggccgccggggctgcggctacacacctaggtgcggtgggcttcgggtggggggcctgcagctagctgatggcaagggaggaatagcaggggtggggattgtggtgtgcgagaggtcccgcggacggggggctcgggggtctcttcagacgagattcccttcaggcttgggccgggtcccttcgcacggagatcccaatgaacgcgggcccctggaggccggtggttggggcttctccgcgtcggggatggggccggtaccctagcccgtttccagcgcctcagtcggttccccatgccctcagaggtggcccggggcaagcgcgccgccctcttcttcgctgcggtggccatcgtgctggggctaccgctctggtggaagaccacggagacctaccgggcctcgttgccttactcccagatcagtggcctgaatgcccttcaggtgagactgctgtgcgggagggtcgggggacagcccccccggcaaggtggagactcagtgacggccctgatgctccttcctgtagctccgcctcatggtgcctgtcactgtcgtgtttacgcgggagtcagtgcccctggacgaccaggagaagctgcccttcaccgttgtgcatgaaagagagattcctctgaaatgtgagttactggggatcagggctgcttttcgcctctgagctcagttcagagctgagttgggtgggaggagcgggggtgtaccataaacgcagttaaaaacttactgttgaaagacctctgaatgaacagtgtgtttggtcagaaaaaaactactttcaaattcacagtcactaaatagcaattttactcgtaagacaggctacctaatcggaagcagttgatgcccatcagggtataggggaagaggtgggatatagtggaaagaacacagagtttgaaattaaattggatttgcatataggccctatttagtttgtttgtttatttatttattatattttgagacggagcttcgctctgtcgcccaggctggagtgcagtggcgccatcttggctcactgcaacctctgcctcctgggttcaagcgattcttctgcaccagccacccgagtagctgggatta

SEQ ID NO: 85760 - DNA, 1227 bp, Homo sapiens
cttcccaggctgactcaggagagaagtcaggaactctagcagagctctcccaacactgaaatgtgccttgcctggcttggccctggggaaagaattggcgtgatatcaattggtcccatgtgggctaagcatgggtcaggcactctctcctacctcctggcaagggctgtgaagagaccagctcttcatgtgtcttctcacctccctttccctcacagaatgaaaaggagctccaggaagtgatacagcagcagaatgagaagatcctagaacagatagacaagagtggcgagctcatagtatgttcaccatcatgcccaggcctttgccttctgtgttactggtcagccaggatcccaagtatgagaaatggtttgcttttgttcaccacatgttgtctatccttatgtcctattggacacctctccattctcattcccagagccttagagaggaggtgacccaccttacccgctcacttcggcgtgcggagacagagaccaaagtgctccaggaggccctggcaggccagctggactccaactgccagcctatggccaccaattggatccaggagaaagtgtggctctctcaggaggtgactcagagttaacagaggagctggacagcaggtggggaccccaggctgtacccctgttgatctggacatatttctaggtggacaaactgagagtgatgttcctggagatgaaaaatgagaaggaaaaactcatgatcaagttccagagccatgtaagaatgtccatgccattccagggccatttcctaccatcgttaacaaatgccccgccatgtttcccctgtcctaccaagtttgctcttttatgcataggacttataaaatctgtttgctttctagagaaatatcctagaggagaaccttcggcgctctgacaaggagttagaaaaactagatgacattgttcagcatatttataaggtataggcaggagggaggtgatatcactaatgaacctggtacaaggcctggccccaggaggtactaatgagcacagatctggttcccagcctgtgctgagagctgggcctgaatcactattgcaggcttctctgtggtgtctgttttctcccctctaattcagcggctgcctcctggggctgggagccctgggccttaagtctgtggtcctgagctgcgttttctgcctctcttcccagaccctgctctctattccagaggtggtg

SEQ ID NO: 85761 - DNA, 1215 bp, Homo sapiens
ggaaaaagactgggaaaaagttgagagagggatggaagagtcattcatgtggaagggaagtttgaagtagatgtttttgtgatgctcccaaggcaaggccaccctgggaatgaattagagtaaatttagggccaaggacttaacccagaggatccagcagttaaggaaggacctgtgaatagagaagaaataaccagaaaggtgtggggcctgcctttaaaggagagagactcatgtcctggaagctaagaaaaggaagtttctaaaagaacaatgtggtcatcaatatcaaataggtcaggtaaaacaagagctgaaatatatgcattgcatttgaaagtaaggctgccattggtgaaccaaatgacaagaatttaggtggaatgacaggggagaagcctgagtgtagtgggctggggagtcaatagatggtgagagttataaacaagaagtataggctctttttttctttcttttttctttctttcctttctttctagaaaaggcagtagctaaaaggggatttaaggtaagaagaagggttttgttttgttttgtttaggtttgtttttaaaatactgctgtttttgttggagaggcttaagaatataaacatgttcagagaaaggcactaatggagaagttgaagatagagaattgagataataggtggaacagcattttggaggagatggctgggagttacctggaagcccaggagttcactagacctgaacagcagctattttttcttctttgcccttagactgaacaagagacccttctgctgagtacagcctgtcctcccacccaggaacaccctctgcctaatgacaggaccttcctgggaagcatcttgacagcagtggcagatgaaggttaaaggccctgggatttgggggtgggaaagttgtgacgctgctcctgatatcttctgctgttgaagatgtccaccagcgggcttgtctatcttaccctggcttccattatggtagacccctgcctggatcatcagaggggccctctcccattattggtttttctcttagagccagaatcaactcctgtgcccttgcttggaagtgacaagagtgctttcacccgagtagcatcaatggtttcccttcagcccgcaggttaggaggggctccagggatcctgcctcatttctagaaaatctggtggtgatgagtaaagacgaaagcagtgagaagt

SEQ ID NO: 85762 - DNA, 2356 bp, Homo sapiens
ggctctcagaggcaaggatgcggtaaggtgacaggcatttgttcttggatgtgggaggtttccacctcaaggttcctgcaggaacacaaatgcactttagacacagatgggtggcctaagaactgcctgccctgggcagtaaagaactgatctattgaggtgtcatggttacatctttttgtgctggctcccctgttgcccactgtggccttgcaaccacttccctcaataggcagagatagtgttggaggctttctgtgcacacgccagccagcgcatcagccagctggaacaggacctagcatccatgcgggaattcagaggccttctgaaggatgcccagacccaactggtaatttaagggcattttctttcctggggtctgtgctgacagactgggagggtagttgcatactcccactttgctgtatccaaagggaaggggttcccgcctaggcaatctttcttttgtaggtagggcttcatgccaagcaagaagagctggttcagcagacagtgagtcttacttctaccttgcaacaagactggaggtccatgcaactggatgtgagtatttgggaccatcataactaattccttactcacatcaagtcctgttgtgagctttgcctcaagtgtgctctactgacctgcttgcttcccctggtagtatacaacatggacagctttgctgagtcggtcccgacaactcacagagaaactcacagtcaagagccagcaagccctgcaggaacgtgatgtggcaattgaggaaaagcaggaggtacaaaccaagagtggggactgcttaggcttggtttccttcctaatgtgtgataccattagcctcttaccctggatctgttttcttttcaccctgtgggtttggaggccagccagtaaggtctcttagctgtaagatggccttaagcgcagttttttcctttgcccttcagcatctttacttcagcaacttttctcctgtctctactttttcctgaggatcaaccttattttctgcaatgttgatgcccaggagcaaggtagttttctgtcttgtccagaaagagaagctggaccaagtcctgggattattgattcaggaggaactataggaggaaaaccatctgttcttcctaggtttctagggtgctggaacaagtctctgcccagttagaggagtgcaaaggccaaacagaacaactggagttggaaaacagtcgtctagcaacaggtgtttgtgtgtgtgtgtgtgtatgcatgcatgtaagcatttgagccctgttaaggcttggagtgtggcactagagcaaggaagtactcaggagcacttgctttggagcagaagtttggggagtttctagcctgctgaccgcatggtgtcattaggatacttttgttctagatctccgggctcagttgcagattctggccaacatggacagccagctaaaagagctacagagtcagcatacccattgtgcccaggacctggctatgaaggatgagttactctgccagcttacccagagcaatgaggagcaggctgctcagtgagttcctaacggggtactgtggcagtaggcatccaggatttaggaccaaatgggatctaatatgttgtctctggcagatggcaaaaggaagagatggcactaaaacacatgcaggcagaactgcagcagcaacaagctgtcctggccaaagaggtgcgggacctgaaagagaccttggaggtaaggaatatggcttgggccaagggagctggtaagcctcaggagtgtgattcttgcctgatagtgttgaggtaaggtttgagactgtgaactagaaaaagcctctgtacccagggcactaaaattctccctccctgtcttgctccttctcttgtcttcccagtttgcagaccaggagaatcaggttgctcacctggagctgggtcaggttgagtgtcaattgaaaaccacactggaagtgctccgggagcgcagcttgcagtgtgagaacctcaaggacactgtagagaacctaacgtaagttctctaactttctgtacttccccctaagtgcttatttttttctcaggaacacttctagaagccaaaatctccaagaagagaactgtgagtgttgagcctcttgtttctctcctttaatgcagctctgtggggatttgggataggcgttcagagaaggtaatttggtctttggtcatcttccctgttccttatttcagggctaaactggccagcaccatagcagataaccaggagcaagatctggagaaaacacggcagtactctcaaaagctagggctgctgactgagcaactacagagcctgactctctttctaca

SEQ ID NO: 85763 - DNA, 1888 bp, Homo sapiens
aagaattcttttcttttttgagtgcactatcttgcacctgtaattgtatgtcgggaactgaattgactgccttagacaactacttttgtttcctttggcaggaaggcagcaacaactcatctccagtggattttgtaaataacaagaggacagacttatcttcagaacatttcagtcattcctcaaagtggctagaaacttgtcagcatgaatcagatgagcagcctctagatccaattccccaaattagctctactcctaaaacgtctgaggaagcagtagacccactgggcaattatatggttaaaaccatcgtccttgtaccatctccactggggcagcaacaagacatgatatttgaggcccgtttagataccatggcagagacaaacagcatatctttaaatggacctttgagaacagacgatctggtgagagaggaggtggcaccctgcatgggagacaggttttcagaagttgctgctgtatctgagaaacctatctttcaggaatctccgtcccatctcttagaggagtctccaccaaatccctgttctgaacaactacattgctccaaggaaagcctgagcagtagaactgaggctgtgcgtgaggacttagtaccttctgaaagtaacgccttcttgccttcctctgttctctggctttccccttcaactgccttggcagcagatttccgtgtcaatcatgtggacccagaggaggaaattgtagagcatggagctatggaggaaagagaaatgaggtttcccacacatcctaaggagtctgaaacagaagatcaagcacttgtctcaagtgtggaagatattctgtccacatgcctgacaccaaatctagtagaaatggaatcccaagaagctccaggcccagcagtagaagatgttggtaggattcttggctctgatacagagtcttggatgtccccactggcctggctggaaaaaggtgtaaatacctccgtcatgctggaaaatctccgccaaagcttatcccttccctcgatgcttcgggatgctgcaattggcactacccctttctctacttgctcggtggggacttggtttactccttcagcaccacaggaaaagagtacaaacacatcccagacaggcctggttggcaccaagcacagtacttctgagacagagcagctcctgtgtgggtaagcgcccctatgtccttgcacctcgtgagttccattaccctggaccttcccctcccatcccttcccctccttttcttttcgtcatgttcttctctttctgctgcagccggcctccagatctgactgccttgtctcgacatgacttggaagataacctgctgagctctcttgtcattctggaggttctctcccgccagcttcgggactggaagagccagctggctgtccctcacccagaaacccaggacagtagcacacagactgacacatctcacagtggggtaagaaggttcctctcaaagcttgagggatcccagtggggatccttggaatttaagctgagaagctgccagagggcaaaggggactcctatcacaggcttatacttagaacatttgcaaaagctgagaatctgggcagtcacaatggctgatgcctgtaatcccactgctttgggaggccaaggtgggaggactgcttgaggccaggcatttgaaaccagcttgggcaacacagcgagatcccatccctacaaaagatttttaaaaaatcagctggatatggttttgcatgcctcactactcaggaggctgaggcaggaggatcatttgagcccaggaggctaaggctgcagtgagctatgatcatgggcaagacagtgaaaccctgtctcttaaaacaaaaaagctgaggatctgg

SEQ ID NO: 85764 - DNA, 1573 bp, Homo sapiens
aggctcctttggaactgtcctcaaggtgctagattgcacccagaaagctgtatttgcagtgaaggtaggggcgtagataccacattagtctctgtttccaatcttgattccagagaggttgggaggaataaacaattcaatagcactatctatgagtcatcactactctccttttataggtggtgcccaaggtaaaggtcctacagagggataccgtgaggcagtgcaaagaggaggttagcatccaggtatgcacagagtcctggaaaggattgtgggaagagctaggccacaggtagggaaagtacctttcttgcccaccttcttttcctggttctgcctcatccatctgcttcagcctagtttaacactaaagtagatcctgggaaaagtatcagctctcaacacagttttcccatgtcctactagggaaatctctgaagcatgtcccagtgtattccttagtatttgctggttctaggattaccagatagtcagttccaaatattgagttcctctgaactgagaggtgaggcagcagttccccctctgcacatctgggtaaaacctgatttctcagctgcctttattctcaatgaccctgttcctccctaacttcctgttttctttgttcctagcgacagatcaaccatccctttgtacacagcttgggggacagctggcagggaaaacggcaccttttcattagtgagtgactggactctctcctcatcccccagggtctttgtaccatgttccccacctgagattacctctttggcttgttctgcctttgctctgtcccccttctcatggcacctctctgtcccaaagggaggggaacagcaggtggtatcagtttgggcaggaggcctacaatgccttgagcccaggcattgcagctcccaaacattgcctagacttctggcaatgtatgtagctccacactggctttgcagtgtgtagctactgcagcacagatctgtactccctttggtcggctgttggctgctttcctgaggcttccatccgtctctttgctgccgagttggtgctggtactgtgtaagtgaaacagtggtaaaggaaatggggagggaagatttaagttcggaagaaggagagtaaaaaattaatattaataatggaagttaaagaataggatagggatgggatgagggctactagggaaactggaaaggacagaaaagctgcagcataccccatacttgttatccacaggttatctccatgacttgggcatcatgcatcgagatgtgaaggtagagttaagtgcttttttccctttgtctgagaaagagtctcaataagaagtgccaacaagtccaagaagttagggagctgagaactgtagacattggggcccccatgggtgccaaggatttggggaagggctctctgagtatagatttgagtgctgagtagggcatcaccttcagctggggtgtatacatgatgaaagagagttgaaaggaagaggaagaattacttctcacctgtgatctttcagatggagaatattcttctagatgaacgaggtaagtctttttcct

SEQ ID NO: 85765 - DNA, 2913 bp, Homo sapiens
gctcctgccagtctgggcgacagctagctctccgcctcttcagcaaagttcggccccctgttgggggtatctctgttaaggagcattttgaggttagtaagcagtcccttagggacctgggaacaagggacattcaaaagccacctgtgtgttacacgatattaggagtaggtaaactgatgatggtatctgagcttaattgcttcttgaatctttttcctttttaggtaaatgtggtgcctctcaccatccagctgacacaccagttcttccacagaatgatgggctttttctttcctggccgaagtgtggaagatgatgaagttggtgatgaagaggataagtccaaactggtgactactggtgagaacttttatggtggagccccagaagaatagggtagcaaccccaaagacagctgagacttcagaacgaggatggatgacagctggtacacttgctttttcataggaataccagtggtgaagcctcggcagctgattgcaacagatgatgcagtaccactgggccctgggaagggtgtggcacagggtttgactcggagttctggggtcagaaggtcatttcgcaaatcgccagaggtaccaaacatgcccctgatgatagaaaaatgggagagtcttgaggtcctgtttggtgtggcttgggatttcttcggtttcctctaagtccattctagggataaaagaagagggagatgtttggggtcctgagtttcttctgatggattcagggctcacactccttgcctgcctttcttagcaccctgtggatgacattgacaagatgaaagagcgagctgccatgaacaactccttcatctacataaagattccacaggttccactgtgtgtcagctacaaggtctgcacctctcaagcactttgtagaacagggtgggaagggaaccagataagatcagagattctatacagggagacagctaggttgtttgtgatgctgagctgtgggtgataaatctgctgttccctctgctcccctcaagagtcagcatcattacgaggctgaggtaaggggaaatcagtatctgtaggttactattgtaggacttggcactcaagtggctggctgggactcaaaatggcagctgatgtattccccacccctctttttttctttcccctccccctcctcttacagggtgagaagaacagtgtggactggggtgaccttaacctggtgctgccctgtctggagtaccacaacaacacatggacatggctagactttgccatggctgtcaaaagggacagccgcaaagccctggttgcccaggtatcccgccagggctcatggctgtttggctaatggggctggcaggcagatcctcttttcaggagcctttcattttagaatccatgaataaatatccttgggaaggggcaggtgcatgaagtgagtggcttctatgcctaccctctccatgacctcactcagattattaaattcagtgtttactgagtgtttcgtatagcaccattgattttagggaactgagagctaacacaacctaaagtttagaaggggttataattagactgtaagcttcttgaaagcagagaccattgtatgtgaattgccccattgtgccttggatgtgtttaataaatctttattgtcttggttcattttgatttattctgcctgcccactaatatttacattttcttttactcctctccaatctgccaggtaatcaaagagaagctaaggctgaagtctgcaacaggctctgaggtccggggaaagctagaaactaaatcggacctgaacatgcaacagcaggaagaggaggagaaagcccggctcctcattggtttaagtgtgggcgacaagaaccctggcaagaagtccatctttggcaggcgcaaatgatttggcgattcgagtggctgcagtacaggatctgactctggctcaggctccagggacttgtggggtgggaggggcttcccgttatccacgaggatttgtgggtgtcagagcccataggcatcactcttcagcacctggtctgttcgctgcagggcatggtggacagtaatgctgagttctgtctcacactgatcaggctcagggccagagaggcaacaagagagcaagacccagggaatgggcccagggcaggaccctattcccttggggtcaagtgaaagggtagggggatagtcctgatcaagtgtgataaatttttatagacatatataaatatatatatattatatatatatttctaagtgtaactgtccttcctctgtgccaggaaacgggagggggctgatcctctgatcctcactccactgtcatgtttgaaagaggtattggtgttctggagtgggggtcaacccctccccagtctctgtgctaagttcacttgggaggatggcagtaggagccagggctggccatgggtcccctacccttccccgtaggatataccctggagaatggcaaaatgatttaaagagaaaaaaaaagatattttaaatttgatgctcatttttgtgtgtgtgtgttgagtgcatgcattcaatctgtgtattcctccctcatcaacccagaacatcctgcagctgccactctgagggtggccccttccttcctctgccctgaagctgtatcacagaaatttctagtcctagtgtgactctggccccatgctgatgggtttctgcagactggaagaggcggggctcgtgtcacgcagcatcagggagaggaattgcttatataactgggacagcagatttagcagagagaggaggcagaggctgggaatgggagcagtaagctgtcggcaggggcagcacacccagcagggggaacacacccgggtggctgtccctcacaaggtaggctgtggggctctgg

SEQ ID NO: 85766 - DNA, 3401 bp, Homo sapiens
gtccacattgtactgggcatggtacaccccctatatgagttacaggatttagctgtatctggtaaggaccacagtgataagtccatttgcagttctacttagtggggataaaactgatccctcttttcacctccctggctgatgcttcttttatcaaggaccttagggcttaatccaggcaacctcaagtgtaataagaggtaatgagcatttagatcagatgttaagccgtgtaagggaccggttgttggtaatatgagaagtcatgctgatatataagagctgtggttcattcagacaagcagtgctctttatcagtagtcttaggaggtaagcacaggtgttaactacccatgcagaagtagaatggatgagctatcaggatctttctggcattttttgcacctctgctgcttttaggcatgccttcttttgtgggtgaactctttccccccgcccccctcaggctgcgatactagcattagagtggaacatcttgggcttaggtacaagggactttgatctggcctttcctatatttttttgagacttgtcagatccaccatctgctgtggtcttcccatctcactcaatgttattcactctgacttcagcttggcagagtgaataaaaataattcaattcccttcgcccatggcaacattgtcagagtggttatctatctgaagatagaaaaagcaagaacacaaatggaacaaataccaaaatgtgtgagaaagtcattttttttaatgagatattttgcccatgacatgattagatttgaacctttctcattgtttttctggctcgagacctgtgggcctggcaaagtgtgcatgtaactcagttgggttggagaatttgggtagactggggcaagagaatgagacaagtatgtcctctatcctgggagatatggttcaagctattccatgcagtggaggtccagatagtaagtgtaactacttgaaacatggagatctgtcacccaattgtccaggacaagccactcttttcccaggagctaaagttgcctgcatctctttcttcaggtgaagaatatcgaggagcaccggcagcgtagtctggactctgtgcaggagctgatggagagtgggcaggcagtgggcggcatggttaccacaaccacaggtcagccctccccctcctctgcatcaaatgattaggagcagatgtgcatcccaaagggacctcatttccctacctattcttaacgtcagtgtatgctggagtaggaccattttgtgctaggctgggttgaaagcagtgtttctggagtttctgagacatagctgggaggctctcacattatctttattgagaatgtctttttcttatctctttcccacctcttcccagattggaaccagccagctgaggcacagcaagcccagcaagtccagcggatcatttcgcgttgcaactgccgaatgtactatattagttacagccatgacattgatcctgaactagcaactcagattaagccacctgaagttcttgagaaccaggaaaaggaagatctcctaaagaagcaggaaggtattcagggcttgaaaggcttttaggaagggactagagaaattgtgaaagtagttatttccttggtggttttgagacagtagagttattaaaaatccactgtgcactggcattaacatttcactttgctctactttttgtaagttctgctatgagaaaataacctctattcttggagggagctgggatgaatgggcattgtttatgattctgaagtaaacatgtttctgcccatgagcaactctcaccctttctgtggggttgactagtggggtggttccaaatgtgggttaagagatggagtagatatttaggtagaaacttgagccttttatttagctgctaacaattatctaggggctgtggataccttcacccttatccaccatgagctggaaatttccaccaacccagctcagtatgccatgatcctggacattgtcaacaacctgctgctccatgtagaacctaagcggaaggtgagcatgggcccttgtagaatgctggttagcctcacaggaacacccagactttgtgctttatttgggcttctgtaacaaaagccatgcttcacactgaaaaagggccttgtggttggtagattctcttagtcggcagtgacaattgaaattccacttacttaggaaaggcctgaatatctctcagaccgtagggcttgtttgcctgattgttttctcctagtcatttctctactcagtcacctagacacctctaaaaacatttactattccctgcttccacctccatcccatcctgttgggcctgacctattgtgaaatccacattgccacattttctgcattgacctactactgttgctattaccagtgacagataaaggttagctttctagaagagaccccccccatttctttctcctttctctatttcactttactacaagacttgtctacttaaaaatcatattcatttccctttccattcctttaggaacatagtgagaagaagcaacgggtcaggttccagcttgagatctctagcaatccagaggagcaacgcagcagcatactgcatttgcaggaggctgtgcggcagcatgtggcccaaatacgacagctggagaagcagatgtattctatcatgaaggtagtcactgcagatagatagtttgagaaccaggaagtctcctagaacgagggcggtctctcagtttctatcctggttccctagtctttgcaggatgacagcaagaatgagaatctgcttgacctgaaccagaagcttcagttgcagctaaaccaggagaaggccaacctgcagctggaaagtgaagaactgaatatcctcatcaggtgccccagcattctttccttgcccttttccagtgccccagctagaggcagttctctttcttgcccatgttttgactgtctttaggtctagtgtgcattatcaaaggctgatgtaggagtaggttcagacatctcttcctgaataagaaaatgggtagttgggaaggatcactttttttttttttagagacaaagtggtctcactatgttgaccaggctggtctggaactcccgggctcaagcagtcctcctgccttggcctcccaaagtgctgggattacaggcgtgagctgggattaccacacccagctgaaagatcactttggtggccttgatactatgcatctgaactgaaaatatctttttttttttaatgaacctgacataaacatatgaaaatgtcttgaagttgatcagtatacagttgcagataaaattgtaggaattattagtgggaagacactactttatcaagaagctatagagctgaaagatgggatt

SEQ ID NO: 85767 - DNA, 1837 bp, Homo sapiens
ggatctgaggagcttagacctgggagaaggaagagggcctggagacataatcaggggaagcagcagacctcagagaatataatgacattgatggcaagagagtggtttcaagtggaaaagagtggtcaaataacatgtaaaataatatgaaatgaaaaaagaaataaaatgggggtaagggagagatcatagagtaatacctaagagaaaaaaatgttacctagcatttctaagtttctgttgggaatctgttacttttattaaaattgaagggaaagtgaaataacccttgttttgccttcatgggtcaagggatgggctgggctagagttttaggtttgggaggatgtattctaagctcttacctagccagataaattgagggaagatcaatttggctctggaaagggaaaagtctttccctttgagactgtgacctttccctgcttcctatttctctgccaggtgcttacatgttgcagaagctaattgaagagacagataggtttgtagtgttcacagaagaggaatcaggcatgagtgaccagttgtgtggcattgctgcctgccagacggatgacatatacaaccgaaactgccttattgaattggtcaactgtcaggtaccttctctttacaagttacctcaacatcaggctagatcatgatcatattgttccccttcccccacctctaaatatgaatgggtgaatagagctccaaaaaatttggccttctcataggtatcataggtaatcacttctatgtctaaaagccagtaaaatttacttggtaagccagcattagacctagctgcagtggttgatacaatgtgctcactaacctcatcgtccttggtagcttaactctgcttctatctctggcatagatggttcttcgtggagcagagacagaaggctgtgtcattgtgtcagctgccaaagcccaactgctgcagtgccagcaccatccagcctggtatggtgatacattgaagcaaaagacatcctggacttgcctcttggatggcatgcagtactttgccaccactgaaagcagccccacagagcaggatggccgacagctctggttagaggttagtcagtgagtttgtgaaggcccattatattcctggttttccgtagactttctaatggctggaagattcttgacagtaacctgctgttactagcttagcagaataatgaggctaataacaccttgaatgtgggcaatctctggtctggaagcatgtagtgctttttttttttttcctcatggtgttctatttcattgcaaaagaaactctcatttctcagaactcgtataaaatggactggaactgtttttaagattgctgatccctattaatgttcacactaatcagcaggcagccaagaaaacaggcagtgactgagaattttcagtaagttcactatctgccctttctctgtcctctcatgaaaatgactgattggttatttcagcaaggcagtgaggttgaatgaaagactgcctaggagtcaggttatgtgatttctaatgatagctttcccattatagtagccatgagctcttggacaagtcacctttaatcgtgaaatggaattgatacttcaccctcacaagattgttgaaaggatcacataaggtgctttgaaaatataaagctttattcaggtggaaagtactcttatttttttttttaagtcagtatgtctggggaggtctaagtgtgtggcaaggtaatgtggttttgttttttttgtttgtttgttttttgagacagagtttgctctgtagcccaggctggagtgcaatggcgcgaactcagctc

SEQ ID NO: 85768 - DNA, 1137 bp, Homo sapiens
taaagaataaaatacagtaggtatagtttgaatgtaatataatataaaagccaagaccacttagtttttcttctccagggtctgtctccccaccacgcccagtgaatttttttttttttttgagactgcgtctctctctgtcgcctgggctagagtgcagtggtgtgatctcggctcactgcaacctccacctgccaggttcaagcgattctcctgcctcagcttcctgagtagctgggattaccagtgccagccaccatgcccagctaattttttgtatttttagtagagatggggtttcaccaggttggccaggctggtcccaaactcctgatctcgtgatttgcccacttcggcctcccaaagtgctgggattacgggcatgagccatggcatctggccaacaggtttcttattcaacaaacttttatcactgcctctgtggcactgggggcaatttccatgctaccctgaagtccttttcctgtttcttaggagctctctgctcgtgatggggatcctacctttcatacacatcagctgcacttagtagatttacggatttcctggacaactaccaatcgagacattgcctttgggttatatgatgggtacaaaaaggcagctgtactcaaacgtaatctttctactgaggccctgaaggggttaaagattgatccacagatgccagccaaaaagccaaagcggggtgtcccaactagtgcctcagccccacctcgtgttaacactcccagcttcagtggacaacctgataaggggtcatcaggaggtaagctcggggagatgagactttttgggtttgggtttagaacatggatatgggcttggacaggagttttaaaaggactgagtcatggtgcttctatctaggtaaagaagtgaaactattatttttccttcttaggccacctaagtcttacatattaagtaacagtgatgttggggcattaaatggtctggtcctatggccagaagagaatcagaaggggagtgttggagccaaaacaagatgagtaagggaaagaagcaaagtggtaaatgccataagagagaaataaaagaaaatgggagttggatgggcacagtggctcactcctgtaattccagcacttttgg

SEQ ID NO: 85769 - DNA, 1008 bp, Homo sapiens
tggtcagcactacaagcaactttcctatacagccctctttccccagctgcaggtaaggcactgatgtccctgctgacatcttcactttattctgcttctagttttcttgtttctcatattgagtcccttaatcatccctctcatgccatcctttgttaatgttatgctctcttgttgccaggtacattattgggcctcatttgcccagcaacggggcatccagattgagtgcagtcagggccatgtcttcactcgggggactcagcggcttatacctcaaggtaaaatgaaagactcctttcatttctcctatcctgttccttgtttttcccttctcagttccattcccctcctccatctctgtcttacactatcctctgaactggtcagcatggtctctgtgtgcctctttttctcagcaggcacagtgatgcggcgccttatctctgattggagtgttacccagatggtgagtgacctaagtcaggtgaccgttcacctgatggcctcacccactgaagagaatgctgatcactgtcttgatcccttggtaacaaagacccacctgctgagcttgtcctccctcacctaccaacggcatagcaatcgcacagctgaggaggtactccctgacacactttctttattaccttatttatattagtaggtatctcagcctacttgggctgccataacaaaataccagagactgggaggtttatacaacaaaaatttatttatgagttttggctactgggaagtccaagatcacggtgcccgcatggttgggttctggtgagggctgtcttcctggcttgcagatggctgccttgtgtctgtcctcacatggcagagagggagagagagcacaagtgtgcacgagtgctctggtttctcttattgtaaaagcactaattctgtcatgagtgccccaccctcgtgaccttatgtcattacctcccaaaggcccatctccacatactgttacattgggggttaggacttcaa

SEQ ID NO: 85770 - DNA, 3383 bp, Homo sapiens
ttgaagagaacttaaaaagtataagtgctcttaaatgtcagacactatcaactgtcagctcagcacattagtgctaacaggaacaaagcaaggcagtaattaatgtgattactcaggaacaacttctgggtggagatggttcttgagccaggtgtgcatgtgtcataatccttgccatctctactgttttgtgacatggtaattgacagatccttttcttctgctccctaaaggttcagtgtggtgcagggctgaccttactttggagccccccagatcacatgtacctgtaccagcatgtcctggccactctacagtgccgagacctactaagagccactgtgtttcctgagactgtaccatcccttgcactagagacttcaggaactacttctgagctagaaggccgtgcccctgagccattacccccaaagcggctgctaaacctaaccctggaggtgagcacagccaagctcacagcttttgtagctgaggacaagttcattaccctggctgcagagagtgtgtcactgagccggcatggaggttccctgcaggcatactgtccagagctggctgctggctttgatggcaatagtatcttcaacttcaaggaggtggaggtgcagctgctacctgagctggaagagatgatcctccaccggaaccccttccctgcgctgcagaccctccggaaccgtgtttggctcctctctttcggctcagtctcggtggagtttccttatcagtatgacttttctcgaactctagatgaggctgtgggagttcagaagtggctgaagggactacatcaagggactcgtgcttgggcctctccaagccctgtcccactcccacctgatctactcttaaaggttgagcacttctcatgggttttcttggatgatgtttttgaggtgaaacttcatgataactacgagctgatgaaggatgaaagtaaggagagtgccaaaagactacagctactggatgctaaagtggccgcccttcggaagcagcatggggagttgttgcctgcccgcaaaattgaggagctctatgcctctttggaacgcaaaaacattgaaatctacatccagcgttcccgtcgtctctatggcaacacacccatgcgccgggcactgcttacttggagcttagcagggctagaactggtagctctggcagatgcctccttccatggtcctgagcatgtggtagaacaggttcaagagcttgatccaggcagcccttttccccctgagggattagatcttgtcattcagtggtgtcgaatgctcaagtgcaatgtcaagagctttctgggtaagtagtgtttcctttatttgcagaccccgtgtttgcccgctgagctctggggagctctcagtgatttcagaggaactaggttatattgggaactgtgccgttttgggtgggtggagtgggatgggtgggcttcccttccctttctttgttcctgaatttcaccgtgaaattgcttggctaacataaagggaaagctaacacagtcatctttaaggttattgtgtctcttggatctcagtgctatgcccttaaccacctgctccagggtcactgtcatttttcagcttgctgtgtcaactgcctgcccttgttctctcaattgactttgtaaatatagatgggtaaaatagtggtgaggaaaaagataggcccgagagtgctcagactgcccctgagtagccagtgtgtacccttcctctggtaacagttcggatcagggactatccacggtacctgtttgagatccgtgactggcggctaatgggtcgacttgtgggcaccgagcagagtggtcagccttgctcccgtcggcgtcagatcttgcacttggggcttccgtggggtaacgtggcagtggagaggaacatgcccccactcaaattctaccatgactttcactgtgagtagagatgaggcagttggtttggctgagggacgtttgtgatgggtgaaatgggaggtgagctgagacccttctggagtgaaggaggaagagaggggtaatgttgtgaacaagttatagcctttgttcctctaccccagcggaaatattccagtacacagtggtgtggggcccatgctgggatccagcctggacactaattggccagtgtgtggacctcttgaccaagccctcagctgaccccagcccacctttgccctggtgggacaagagccgtcttctgttccatggagactggcacatggacattgaacaggcgaacctgcaccagctggccactgaggtgaggggtgtcatgatacttttatcctatcaggatggtatggttgaggtctgtatagcacatgtgggaagagagacaggtgctgatttgggagatgaggatggttttcttacctatatctcaccaaattctcgggggtggtcataggatccatacaacacaactgaaaatatgcactgggagtggagccacctgtcttttcattggaaacctggtcagtttgtgttcaagggtgacttggatatcaacgtgagaacagcctctaagtgagtggagtgaagggagggtcctccatgggatgaggggctcaggttggagggagggggaagagccaaggggaagtgagtgaccagggcactgagggctggggttccattgtgaggcaggtatgacgactgctgcttccttcacctgcctgacctctgcatgacactggacctgcagtggctgtgccatgggaacccccatgatcaccatagtgtcactctgcgggccccagagttcctgcctgaggtgcccttgggccagcttcatgactcctaccgggcctttcgctcggagaacctcaatctctccatcaagatggatctgactcggcacagtggaagtgaggcttgggcctggggcagtggggaggaagggcttgggaggacgggcatggatgctggggactttagcttgaccctctggggaggggaggggaggggagaagggcaagggagaatctaggttaggacctttttttttgttttttggcaggggaaagggttggtgtcttagtcctttttggctgctataacagtaataccacaagtttggtagcttataaacaacaagcgtttatctctcacagttctggaggcttgaaagtcgaagatcaaaaagagctgatagattcagtgtcagtgagggcccattcctcatagatggtgcctttttgctgtgtcctaatatggtggaaggagtcagtgagctcccttggaccacttttaaaagggcactaatcctattcatgaaggctccaccgtcatgatctagtgacctcccagaggcccacctcttaacatcattaccttaggggtatttcag

SEQ ID NO: 85771 - DNA, 4593 bp, Homo sapiens
tatggagggctgactttttgtatacatgagttcccacagggacaactgctggacttgagtatgtgcggactttggtatctgcagggggtcctggaaccaaagctccaaggataccaaaggatgactgtatattctctaactaaatcctcagcatttcacaaataaggaaactgaagcctaggaaggttagctaggtaacttgactgaagtcatacaggcagtcagtagtaaaaatgatgtttaaattatttggccctaaggtccacattcttttcatttaccaacctgctccttgtactctttaggtttttagagactggagaaagaagtactgcaggtgcctggatctctggggcattcgccttatggtccatccagcttaggcatttgcttagcctactttatgtgggaggatttgaccatagaggccagggcatttcgggagaactgggagtgttaagaattgatggttcttacgttattcattcatattttcagaggtgacagaaaacttagttgagccaactctgcctggcctattccttctccagcagctgccagaccaggtcaaggttaagatggagaacacaagcgtggtattgtccatgaatagtcaaaagaggtgaggtctctcctgacacagaagatgggagagtgatagtgggagctgtatgttggtatctctgtaaccagcctagtatttgctgagcttgtctacggggagaaaggaagtagaaatggttacatccatgtagtgtgggaaaaattaaaaaaattattattatttttgagacggagtcttgctctgttgcccaggctggagttcagtggtgcgatcttggctcaccacaacctctgcctcccaggttcaagcgattctcctgcctcagcctcccgaatagctgggattataggcacgtgccaccacgcccggctaattttttgtattttagtagaggcagggtttcactgtgttggccaggatggtctcgatctcctgacctcgtgatccccctgcctcggcctcccaaagggctgggattacaagagtgagccactgcgcctggccaaaaaataattacttttaaaaaataaaagtaaaagaagtaggaatggcattccacatcttcctgagctggaatctgtctcggtccaggcacctgacttggactctgaagctgctgcagttcctgtaccaccgtgatgaggatcagctgccccttcgaagcttcacagcaaactctgatatggcacagatgagcactgaactgctgctggaaggttcatgggtcggggtactggtactgagcgagaatgggaggactagatactctctttgctcatgccccatatggtctccttaatctaatctcagtgtaactggggagtggaaggagggaacatactgagagaaaatagccccagctcacaagttttgatgacagtctgttgatccctttgccggcttctgaccctctcccagttttacctcttgcccttccagtgctctcctctgatctgtcctctggcctcttacagatgggttgttgttgtcccagagtcgccaacgcattgtctgcctcaactccctcaaggctagtgtgcaggtgtgatgattgtggtaccaagaattgttcctttctctattctcccgctacattatttcgttttgagtttgtgaaataaaacccaaacccacagttctggtcttcttatttcaggtgaccaccattgacctctcagcctccctagttctgaacacttgcatcattcactaccggcaccaggaattctctcactggctgcacctgctagcactggaaacccaagggtctagttcacctgttctaaagcaaaggaaaaaaaggtcagtctgatctttttcagccaccttcttgtcagttggattctctgggattcttttggtccaaattggcatcctgtgttaaatatgtatttggttgtttgacctcctcaaatccgagtctcaacagcaatcctgttttatatatctttcccattagactagactccttgatagcagaatgctgtcctctttgtttttatgtcctcggtgctcagtgtagtgttttatacaaaataaatgtttgttgaactgaacttaaatgataaggaatgtctttgtcttgcctgcctttgattgtaaggtggcagtcatgtctttgtgtagtgcttctattgtgctgcacagagaacttaaggttatggtttagaagtgatgcttcttggttattttaggttcaagcgtatagtattgctggtgttcattgtatttggcctatgaaaatgataattttatatgagtcaacctaatatccttttggggttcctgcagattaccattaagagtagcaataaactgatgagttcagccttttatcttctaggtgtgtctcgtcctaagaatcacaataaaactctgaattctcactctgattgtgagagcttcagaaactgttccatgataggaagctgcagttcttttcttaccaaacaatgatgtcttgttcctatgcagaaccttcccccaaatcctggctcccatcatctttagcacctccatctccaatgtcaacatttccattcaacttggagatacaccaccttttgccttgggattcaattctatctctctgggtaaggctctcagatggaataggaacaagaatctgtccgttagtggagctaggcccaattgatggccacagtggctccatgcaatccctctttctcacctttgttcagattaccagcacctcaggccacaaagcatccatcagcggggcgtcctaactgtggaccacctctgctggcgtgtgggcagtgactcccacattcagcgggcgccacacccacccaatatgcatgtttggggtgaggcacttgttctggactccttcacactacaggtaggtgagggctttggtgaataggggcctgcacagctttcctcatcctgtcatgcgtcagagcgctgagcatcctaatgcagcaggaagtgcattagggcattataaaactgtgcgcctgcatacttctaatgggatccgtctgcttcttctctagggtagctataaccagcctctgggcctgtccagcacccagtcagataccctttttcttgattgtaccattcgaggacttcaggtggaagcatcagatacctgtgcccaatgtctgtctcgtatcttatccctgatgggtccacaatctgggaagtcagctgtctctaggcactcttcatttggggaatctgtgtcattactgtggaaggtggacttgaaggtcgaagacatgaacttgtttaccctttctgccttggttggtaagtgggacaaggagtctatactgaagtgtgctacttgggagactgaggcaggagaatcacttcaacccaggaggcagagtttgcagtgagctgagatggtgccactgcactcgagcctgggcaaacgagcgagactctgtctccaaaaaataaaataaaataagtaaataaatatactgaagtgtgtagtgtgtaaccttagcagattatgttggtttagtctgctcctcatttaatgaagctgattatctggaatttttctaaattagaggcacgagatgcttgaaagtcttgcataaatattagacttcttggtatttcttaagggcttatgaaaggcaagtactaagcaagacatataagaaaaagccttgatctagtcaagagagatccatataactttttatttccttgtgtgtttagttctagagagtaaatggtatgtctctgtgcaatttgtaggagttaaggaacaactttgattctgccgaatctagttaggttaagatgggaaagggaaagtttacttaaaacctaagaaatgaacttagggaggcatgaggaataaagatagttaagggaataagtgagaaaggcgagtgaggactattgttgccctttgagagccgggaaccaaggctgacatggtttctggttgttaggtgcttcagaggtacgactggacaccctaactatcctgggcagtgcagagacgtccactgtggggattcaaggacttgtgttagcgctggtgaaatcagtcacggagaagatgcaaccctgttgcaaggcccctgacatccctaccccagtgctcagcctttccatgctctccatcacctatcacagcagcatccgctctctggaggtaatgttcctgtggagaggtggggccaggctggttttttcctcagcttagagcctttctctgtctttttttttttttttcttgtcttttcccaaaacagagtgtcacatgttgcccagactggtcttaaactactgggctcaagcagtcctcctatcttggcctcccaaagtgctgggattacaggtgtgagccaccacgcccagcctctctttttaactcatgttgtgaaactggtttcatgagaaatatgacacctgatcttctttattttttctagctcgtatgtttttaactttttgtggaatttaaaatacatacaaaactagagagaatttataagcttttgtataccaagattcaataattaccaatt

SEQ ID NO: 85772 - DNA, 1143 bp, Homo sapiens
cctgggttcagaccattctcctgcctcagcctcccgagtagctgggactacaggcggccgccaccgcgcctggctaattttttgtatttttagtagagatgaggtttcaccgtgttagtcaggatggtcttgatctcctgacctcatgatcctcccaccttggcctcccaaagtgctggggttacaggcgtgagccaccgcgcccggcaaggccaagtgctcttaatttttttcctttcccaggctaatctgtgaggtgagcttatgtaagatcaacagcaaagttctaaagagtggtcagctggtaagtatgccatgatcattcagatgcctcatttcctcctgggcgtaaagtgtgaaggagcttagggcttacatcctaggttctttgaccttagggggttccctcaagtcagtacccagtgttccagatcaccacattttgacctaaaacttccaaactttcttacatacaccttagaggcttatcatccccacaggaggacacctgcctagtggagctttcactggccctggacctgtgtctaaaggtgggcattagcagtcggcatctcactgctatcactgtggatgtgtggacactccatgctgaactgcatgagggcctcttccagagccaactgctgtgccagggcccaagcctagcatctaagcctgttccctgttcaggtaaagccccagtgattgagcttcttggctgccttgttctcagggtttgttttggaagtagaaaaaatagtggtctcactgcttatttagatgtgattcactagtcaccatggactttgaccctaaggatagttagaggaaatagggcatttgcttgtgctgagtggcagaaccagcattgagtgggcacctatcatgagttagacctgtactatgggttttttttttttcctttttttttaaaaaaaaagatggagtcttgctctgtcacccaggctggagtgcaatggcgtgatctcggctcactgcaacctttaaccttctgggttcaagtgattctcctgcctcagcctcctgagtagctgggattacagtcatccgccaccatgcctggctaatttttgtatttttagtagagacgggatttcgccgtgttagccaggatggtctcga

SEQ ID NO: 85773 - DNA, 1044 bp, Homo sapiens
tgaccaggggtgtaacttccgcagaaccctgagtccaggcctaagtggctaggcggactccaactcccctcaaagtgagctccccggaccgaaatgagtcagccaggtccaccgccagcccaggtagtgggcccggactccgacccccgcgggtccccgagccccgcggttccgggcaccgtggtgtgcgcccggggcgtgtttcagctcttggtccgctccccctcgccctcctcccggaaccacgcccgctcctcgcgcacgcagcccgtcggccctgcagcgtcgtaggacagggcgggactggggtgggaggccgttggttggctggcgggctgcggaaggcggggctcgtgtgcgcaccagcgcgtcctcgctcagcgttgctcctgcgcgcgcagctggtcggcccgcggcggtgctgcgcggatccggcgtcggggcccggcatggcgggggccggggccaagccgggccggacccggacctaaatgcctctgttcttctccgcgctgttggtcttgctgctagttgcgcttagcgccctctttctaggccggtgagggttcccggccgcgccggcggcggcggcggcggcgggagggagggggcggagaggaggaagaaagactgaggagggggcgcgcgccttactgaggcgcgtgaggcagagtgggtagggtggagggagggggcgcgcggcgaggggagggatcgtgaggaggcgcgtggcccgagctcccagggatgggctgcgagttggggagactgaggaagcgggcggggtctgaggaaatgctgaggccaggaactgaataggagtgtgaggaaggggcctggttcagtggcttccctttccccctccacccacccctgcatgtccctttcgccaagcgcgatgggcacctgcagcatcggtctggggagaacagcattcgagctgccgggtctgacctcaaagtgccttctcgtggatacctgtctggagggtgggagcaggagacagacagaccctctggggagtgtgatggcacatgtgacaga

SEQ ID NO: 85774 - DNA, 1146 bp, Homo sapiens
gttccccacctgactcctgcgagaaacacgctctccagtcggaactttacctgtctgaagcccgccgctcctccagtgcgctaagcccccaccgaggaaaatggagtcgtcgaaccgagactgggaaaagatagtacggacccaccgcacggcccctccgccgccaccgccgccgctgctgcgtcaacgtgctacgtcatttccggctccctgtcaccgggagtgggcgggccatttcttgttctctctcccgctctcggaagctttcgtctcgtgggtgcgaaaggtaaccgaagcggctcaggaaggcagctgtcactgagcccctggaacagagcgagagtatcgtaagtaaccaggctcagccggtttctcaggccgctctagtcaaataaaccataaagatcagactcgggcttcttcacttccttctctccgtggtttcgccattagcttccggttccggggaggggccgagttttcttcgaagatttggggctccgcgatacagttaggatggctgtagtacctctgctgttgttggggggtttgtggagcgctgtgggagcgtccagcctgggtgtcgttacttgcggctccgtggtgaagctactcaatacgcgccacaacgtccgactgcactcacacgacgtgcgctatgggtcaggtaatgctggggaccgggctcgggtgggctagggaggactcggaggctctggaggggcggggcctatagaatatctgacagtgtggtctgggaaagttaggggttccctgggaaggttcctcaggtctagagagtcggagaactgaattgttctaaggcatcttaatcgcaacaccacctaatatttggtgagctacaggccaggcacgttacctatgtcctttttccgattattaacattgttgtaaggtggacagtattgttatcctcatttcacagatgaggaaacagacgcagagaaattaaatcgtttattcaaagccttgcagttagcaaatgacaaagtcggggttctatccaaatctatccaggttcaaagcctgctttagagacaagaaaattacagtaagtgctgtgtctgaaattttaaagttacagtaagtactgtctgtgaaactttaaactccaagagctcactc

SEQ ID NO: 85775 - DNA, 1036 bp, Homo sapiens
tgctcttccatcagctgtgaatttagagcccttttttacgagtaatgtccctttcaccagtacaagtacatttttattcacttggcttgtgtggctgctagattggattagcatagccttgcaactctaggaggttttaacttcatcaggagattaattacatcagaaagtggtaccgtctggagaggcttagtcaaattttacagttcttcctctgaaagcctacctagtgtggtggaaacatgatctttgtaggcaaatacgtttgccctgattctatattcttgaccttaataaatggcactaccatcagtcctgcctgtaatccttgtcttccttcctgtccactatttcccaataaaatcagtcaccaaatcctgtctctccctgaaactgttcccatcagcatacaaattatgttctggtatccttcacatccctctccaattaccatgccaattttttaaatttccattcatagatttctacctgtaccaactcagctttctcaactttcattcactcttcattttataccaatctggcttctcttctgcccactccatttttttttttttttttgtggagacagggtcttgctctgttgcccaggttggagtgcagtggccccatcatagctcactgccacctggaactcctgagctcaagcagtcctcctgaggcagcttctagtaatcaagtgccaccacatctactttgcccactccattgaagttgctcttatcaaggtcaccagtgacttctatgttgccaaatccaatggatactttgttctcatattcctctgtctctgcaatattcaacatagttactcctgcctccaaactttcatcttggctttattgacatttcactcttggattttctccatttctccggctgttccttctgagtctcatttgctagcaacttttgctctctatctaatgtctaaatgctggggctggtcgcagtggctcatgcctataatcccagcactttgggaggtcgaggtgggcagatcacttgaggtcag

SEQ ID NO: 85776 - DNA, 1040 bp, Homo sapiens
gaggaggatgagggcagtgactctggtgattcagaagatgatgttggccacaagaagagaaaacgcagtgagtagtctgtcgttggctcaagtgaggcttgggtggaggttgcagtggaaaagggcaaccccatcaccatgggcaacactttgtttcttcagcctcttttgatgaccgcctggaggatgatgattttgacctcattgaggagaatttgggtgtcaaagtcaaaagaggagtaagtgtcattctttgtcttttgtccctgggggtaaaggaaaaagccctggaaatttcaatgtctgtgggtgaggaggcacacgcaggacagtttggagaacattagagcacggtgttcggtatcattgtactacggagcctagatttgcatcccagatctgggtgcctgttagagaaagtcttgtccaagtttcaaggatgggctttgaggctacaagagcatcactcggcatgttctttcccatctctcttggtcagagtaattgtggtgggaagaagggagtgagactggagatttggtatccgtatgccagactcctcagatcctgataaggcaggttttcccacccctagcaaaagtaccggcgtgtcaaaaaaatgtcagatgacgaggacgatgacgaggaggaatatggcaaggaggaacatgaaaaagaagctattgcggaagaaatcttccaggatggggaaggggaagaagggcaggaggccatggaggcccccatggctcctccagaggaggaggaagaagatgatgaggagtcaggtatgttatattgggcagggaagccagtgtttggatgggtattgggatttcctggcccatgggaacaggatggaaaccattctttagctacatcccccagcatttgacacaaagaagttccttttcaggagcttcccttctctgttgctcactggccactcacatagtaggaaccaaagcaatttagtcctggctcagcccctgactctgagccccaacccatccttttcctacccagatattgacgacttc

SEQ ID NO: 85777 - DNA, 1618 bp, Homo sapiens
cctagaggcagttgttgcagtgagttgagatcatgccactgcacaccagcctgggcaacaaaccgaggctgtgtctcaaaaaaaaaaaaaaaaaatcaagaaagaaaacccaggagacttgacagcccatggcatcttgaaggaggcccttggctgggtaccctttgaggcttctctcctaatgtgtcagatccttgggagtgattggaaactagaaccctaaatctccccatgttttcttcccaggtgaaggtgacgaggcagaagatgaggagcagagggggcctgagctcaagcaagcctctcgccgagacatgtacaccatctgccagagtgctgggctaggtaaaagctagctgctttgggatttaggcattctagcctgagcaaggggagttacccagaaaaaagactggtaggtaggaaaaagaaaggctatctgggtcaatcaccaatccaatcctgaactagcctattagctggtctttaaaaatactccctctccaaacccattcccgcccgacatgatggttcagcctctccctaatttcctgagataatgggaaactcatgattggagggagagagtccagtctgtctgtttcttctgccttataacagcccatcaagtgtttaaaatcagttttttcattgttctttgactacctggtcctgctcatttatggcctctttaaattccagtgctctagctgggcacagtggctcacgcatgtaatcccagcacttcggaggtcaaggtgggaggatcacttgagcccaggatttggaggccagcctggtcaacgtagcaaaactacaaaaaatacagaaaaaattagccaggagtggtgggacacacctgtagtcccagctactcgggaaagctgaagtgggaggatcacctgagcccaggtggttaaggcttcaatgagccatgatcacaccactgcactttagcctgggcaacagagcgagaccgtctcaggaaaataaaaaaggctagttcccagaattccaactccagattctgaaagccaagaggtttatcagcctatctgctgccttacccttcactcttctgtttgctttagatggcctggccaaaaagtttgggcttactcccgagcagtttggggagaacctgcgggatagctaccagcggcacgagacagagcagtttcccgcggagcccttggagctggccaaggattacgtttgcaggtaggcatgcagcaggtggctgacaggaggaggggcctgaggaccacaacaccctggtcctgtagctgcaccattttccccacagccagttccctactccagaagctgtgctagaaggcgcccgctacatggtagccctgcagattgcccgtgagccccttgtccggcaggtgctgaggcaaaccttccaagagagagccaagttaaatataacccccaccaagaaaggtagaaaggtgagctgggtgaagggctttgatccaagatgtgcaccagctctttctttgattgcctgagtttcttgccttccacttcactgagctgtgtgtctgaaagcagaaaggctgtcttttctcctggggcctggcccagcccatccgcaggctcatgattcccc

SEQ ID NO: 85778 - DNA, 1027 bp, Homo sapiens
ctatagttgggcatgaaggaaccccttaggaatagtcccatagctaatggagaaacacggggggcaggtgaagcataatctgagagggaatgctaacaaggccacagggaccacctctaagacctctctgctccaggagcttctcccctcccccagccccactcatccaaacattctttgtttatatcactgttctctgtatacactcctgtttccacaagcaagatatgccttcaggtggtaagcctgccaatggctaggaacatctgcacataagagtacacaccctcgcacatgtgtgtatgagtgtgtttccatagcactcttggtgagcctgatgaccataatgtcatcatgtatgtaatacctgttgtgtctcttccctcaggcctgtagtcgaaagctctacaattggttgagagtggcaccctaccgaccagatcagcaggtggaagaagatgacgactttatggacgagaaccaagggaagggcattcgagtcctcggcattgctttctcctctgccaggtaacagcctatttttgcctccccagcaccatctcttgtcttcctaatttcatttttctctcattcataacttcatattgctgattattgcattcttgtttttctgtctgtctggcagagatcaccctgtgttctgcgccctggtcaatggtgaaggagaagtgacagacttccttcgactgccccattttaccaaacggcgaactgcatggagagaggaagagcgggaaaagaaggcaagtggctaggacgaggatactaagtgtacatctggagtatgtcttatgattcagtggagataagtgtttacggtctaagcaacatcctatgcaagactgattgtgtctgatctggtcactgacttgtcccctgggatgcctcacttccatgagcagtagatggcactcaagttatctagtacgggatttgcttctggcttgaggccagttcctaggccttgtgtgcttctggagttgctttaactgcctcttttcttacc

SEQ ID NO: 85779 - DNA, 1118 bp, Homo sapiens
ggccaactttcaggaagaggtgggaatagttccttggtagcaccttggaccagatatcttctgaagacttccagttcttacaagatctccaacatagggagacagaatttcctgaaatctttacatcctcagagccattcagcttcaattttctttcaatccaggctcaagacattgaaacgctaaagaaatttctcctgaataagaagcctcatgtagtgacagttgcaggagagaacaggtaggtagggattagaccacacctggtttaaggccgtgacccaactcatcccttattattgagtctggcatatgcccataacagatggggcttgtgcttgtgcagggagtgtccctggggatgtttgacctcattttcttcaaagccctttcctcccctacctcttcacccccaaggcagtcatgagactgtccatccctaagaaaacatattcattgaccaacactcatcccaccagggacgcccagatgttgattgaagatgtgaagcgcattgtacatgagctggaccagggccagcagctgtcatctattggggtagagctggttgacaacgagttggccattctctatatgaacagcaagaagtcagaggtaatgctggagcctcacccttagggcctgcccaggcaagtgctattaatcccaaagagattaaattgggaaacaaaagttatcaggggcacaggactgtacctgtgtacttatccatgcagaagttctccgttttgcagttacggttcagattgggagtcccagaaattaaatcggtctcaggaaaaaagatcccagagaagcagagaaaatgatttaaaccagaatggtttggatttcctcttgatgttgtagctaaggggattttaaggccctgctgaccctcgtttgactctaggcagagttccgggattatcctccagtgctgagacaggccgtctccctggcccggcgcatccaggaccctctgattgaatttgcccaggtgtgcagttccgatgaagacatcctgtgtctcaagtttcaccccttgcaggtgagtaggatttgacaggcaggctcgggtgaagggaaaggcagagtaaccttactcctgcctgctg

SEQ ID NO: 85780 - DNA, 1235 bp, Homo sapiens
gaccagcctggccaacatggtgaaaccccgtctctacagaaaatacaaaaattagccgggcatggtggcacacgcctgtaatcccagctgctcgggaggctaagacaggagaatcgcttgaaccctgtgggtggaggttgcagtgagccaagatcacaccactgcactctagtctgggcgacgagtgagactgtctcaaaaaaaaaggagggggggtgttgggggagtcaacctttgatggcaccttgggagcagtaactaggcaacttcatgggagaagagaagagtgccagggacagggtagatccagcaggcttcagctggttttcctgcccagagtggaggcattagtgcagggcttggcctgtagtctacagacaagattccaccccaaactcccagtctgccattcagcagctggctggctttgggcaagtcactttacaccttacacctttctgcctggactttggttttctcatgggtgaaatagggcatcgggctagatcatctttgtcccttccagctcaaatgttctgtggatctaggtgggaatgactgttcactgccgcatcatgaagattgacattgagaagttcagtgcagacctgacctgccgcacctcagacctcatggacaggaacaatgagtggaagctgcccaaagacacctactatgactttgatgctgaagctgcagaccacaagcaggaggaggacatgaagcggaagcagcagcggaccagtgagtgtgcctcccaccatctctgtgcaccctgcatcttggcagttctcccagtgcaggattcaggccacaggatgcacatgtgtcagtctcccagtggaagtggggactcagctttgaggtgctaaggcctggagatgtcatgaaaaagtcataggtagggctggaacccagagtctcttgggtcacattttctttgctaatgccttgtgactcttaaagcctcattctttcagtgtcctaggagcccaggtgaacatgtccttcatatcagctaatccaagcccagagaaggtgaaagagtctcagaatcccatagtgggtcagaaattaagcccaaacagggtggctcacggctgtagccctgcactttgggaggccaaggcaggaggagcacttgagcccaggagttcaagaccagcctgggcaacttagtaagacaccatctctacaaaaaaaattttttaaatagccaggagccaggtgcggtg

SEQ ID NO: 85781 - DNA, 1901 bp, Homo sapiens
tttgggaggctgaggcaggcgggtcgcttgaggtgaggagttcaagacgagcctggccaaaatggtgaaaccccatctctactaaaaatacaaaaactagccaggcgtggtggtgggcgcctgtaatcccagctactgaggcaggagaattgcttgaacctaggagggagaagttgcagtgagccagaattgcgccactgcactacaacgtgggtgacaaaatgagactgtctcaaaaaaaaaaaaaaaaaaagccaggcatggtgatgtgcaccggtgtattcccagctattttagaggctgagacaggaggatcgcttgagcccaggagttcgaggctacagtgagtcatgatttgccactggcactccagcccagatgacagagcaccccaactcaataaataaataagaaatgaaggcctggtttgtcctgttgctgccagctcctagccccatcacccagtctgtactgcttttctgcccttttcagcatacatcaagagagtgatcgcacacccatccttccataatatcaatttcaagcaagcagaaaagatgatggagaccatggaccagggtgatgtgattatccgaccaagcagcaagggcgagaaccacctgacagtgacctggaaagtcagtgatggcatctaccagcatgtggatgtgcgggaggagggcaaggaaaatgccttcagcctgggagccactctgtggatcaacagtgaggtgagagccagtgcctgcccacctcccatcccactcctgcttccagaaaggtgcccttcagggtgctttcacctgacattagtaactcgggtcataggtattttagctgtgcacagcaacaaaacgggaggtggtttgcggaatgagtcatttgatatcaattttattttgtcccctccttccgtgtcctccaaatgttaaaatagtctacctagagagagccaatggaggaagaggagaaaatacacatatatacgcacacacatatatcaagtttctcttttctgttttcagtgaagagaaatctggtgaattttcctgttgttcccaagcactaggggagaatcaaagccaggatttaaaggactttatgccctgtgagctaatatatctggacatgacacagatggataaactgaggggactttgctatggactgagaagcccatcccctcccatggtttttcttctggatggatttgatcaagaatctcagctctggatatgacacatggggcctttaccttcttcccacaggaattcgaagatttggatgagattgttgctcgctatgtccagcccatggcatcctttgcccgggaccttctgaatcacaagtattatcaggactgcagcggtggggaccgcaaggtaagcccagggccctctgaggaatgacacttgccaatcacttaaggatgtacgctttcccttcagtataggggacactcaggcggtgaaggaagtgtacatcatgtgtgcaccagacgttgtgtaccaagcatgctgctatcccaacctctccccctcattctacccccagaaattagaggagctgctcatcaaaactaagaaggagaagcccaccttcatcccttatttcatctgtgcctgcaaggaactgcccggcaagttcctactgggataccagccccggggtaaacccaggtgagcactagtgctgagaaggtgctgccactggggttcataggcaggctagaaggcagggagaggcccggagcagtgccctctctggctctgctggactgcctttctcctctcatctgtttagaacagaggtggaggttggaggtgggaaaagagggtgatgatttcaaggcaaaaaggcaaggattcacataagaagggcgctttccttaacaccgtgag

SEQ ID NO: 85782 - DNA, 2453 bp, Homo sapiens
cacacagagggccactgactccttggtcttcaatatgttctgccatgtgctgctcacctcccttcacaggcctggggactggctgtgtcatctctcctttcccctagcacccagaatggctacttcacatggtgggcatctgttctggtcgctcttgtggtgggtcccaagtggtttctgatgcatgtttccttctaaaatcctaggatagaatatgtaacggtgactccagagggattccggtaccggggccagatcttcccaaccgtgaatggactgtttagatggtttaaggatcactaccaggatcctgtaccaggtgagttctgctcttcctgacttcagggacgtggctggaggaacacctaggacctgactcagagtagtcccagcctaggggaccaggtgaggagtaggctgtcactgcagctgtcttactcctcctgcagcctcccagcaccaggaaggttctccatccactgtgcctatgcagcttcccttcctccctctacctacttcagtgccccttccaccccctgaattgggaaaccaaaaataggtttctggagggatgtaactaaataatcacttcctgcaggcatcacccctagcagcagcagcaggacccggacacctgcctctatcaatgctaccccagccaacatcaaccttgcaggtgaggagcttgagcctgggactggaggtgggaaggatggagctaaagggactttcacctctaacatgcccctccccacctctgtgtgcttacagatctgacacgggctgtgaatgccctgcctcagaacatgacttcacagatgttcagtgccattgctgcggtgacaggccaaggacagaaccctaatgccaccccagcccagtgggcctccagccagtacggctatggcggcagtggaggcggcagcagtgcttaccacgtatgtggcttggggaggaagctccctgtgcagggtggggcccatagactgccctctcgcattgcccacaaggggcttcacatgcacagatggggctgccacggccttggtaactgtctccaacagatatttcttgtccttaggcccatttgaaggggaagagggtaagagagggcataacctttccacgggcctttgggatctttggaacccgcaagccaccagaaagttgacatggtcaggaccagtgggcaccactgtgtgctcggtgctgacctgcaggcttcccactgctggtcagaagcacatactcagtggaagatcatctggaaagctttgctgagcccacccttgcgcttacccagaattcacagcaaggccaaacaagccccacacccatccctatttaactgttcatgcctctccaggtattcccaacgccagcccagcagccagtggccacaccactaatgacccctagctactcctacacgaccccaagccagcccatcaccacccctcagtaccaccagctccaggccagcaccaccccacagtcggcccaggcccagccccagccctcttccagctcccggcaacggcagcagcagccaaagtaagtatctggatggtggcacagtgcaggtcagtggtaggggcaggtgttgtcaagaggccgaaaggcttagcagaggcaggtgctctggatcctctgagggccctgaccacatgatatgccaggaacactagtttctgggtgaagacggaagagggcagtatggcagccagctgctgctgtatctgccttatcccagtagaggggctgctgcccataggtatgaggttcctttctgcaagggtacagtgattggtgggaagacttccttctagcaaagtcccaatctcaacttttcttcccctcccaggtccaacagccatgcagccatcgactggggaaaaatggcggagcagtggctgcaggaaaaggaggcagaacggcggaaacagaagcagcggctgacacctcggccctcccccagccccatgatcgaaagcacccccatgtccattgctggcgatgccaccccactcctggacgagatggatcggtagggggcctgctcctcggactctggttacctctgaggctgggaaaggcctggctgcccactgcctccctccctgcccctccttttatgtccataaagtggcgtgaagtgagacgttctctttggtggtcaacccggatgggtgacaggctggatggccttgtgaacttgagctcagtgtatgctaggcaacaattctcccgctccagaccctcaccgaccacctgtcctgggaccaggctgggaggggagtgtggcagggaggaggaagaggaaggtgagaatgagtagaacagttttgtattctactccctacaagccattttgaacttctgccctcaccggactctgggctgtgactggggcaccaaactcagcacatgagtctcccctagctctcgtgggg

SEQ ID NO: 85783 - DNA, 1035 bp, Homo sapiens
catgaaggcgcagccgggtatagaggtgcaggggagagcagcctggggagtccctatctggataggctccagcctgggtcggggcggtcctggtgcccggtgaagcgtcaaaagagggagcctgagcggggcaacgcagaagggtggagaggagggggtggcgagggcgggcagcgaggcctggagccgccaggagaggggcggggggcggcccttctccaggaatttccggggatcgtgttacagcgttggcggagcccgagcggagtgggactcgaggccctgtagccggactgggcccctcgccccctcctccagcggcctgcgggccttggcagcgccgcccctgcccacactgaccccgtgtggcggggccgctccgcgcccccgggccgctctgtaatggtagggcagcctcagccccgagatgacgtcgggtctccgcggccccgggttattgtaggaaccatccggccccgcgtaatcgtaggaactatccggccccgcgtaatcgtagggtctgcgcgggcccggcccccaccagacgggactccccgcccccaattggcggccgaagagtctcctcgccccagagtcatcttcgggacgcccagggcccgggtgattttgggctcgccgcggccccgggtgattgtttcatctccgtggcccgcggtggtcgtagcgtctccgagaccgcggactcccgtagggtccccgtggccccgagttgtagtcgggacaccccggccgcgggtgatcgtcgggtctccacgcgcccgggtcgctgacgcggatccggcctcggcgccttctcagggcgccctgcaaggccgcaggcaggatgaacattctggcacccgtgcggagggatcgcgtcctggcggagctgccccaggtaggcgccggggccacgtcgggcttcagtctacagcccggggtgtgggcgaggaggaggcggcaccagaccagttagaggactgggcccagccctgccacccagctaggcctggtgcttctgggtggtccctgcac

SEQ ID NO: 85784 - DNA, 1358 bp, Homo sapiens
cgcagctggtttaccggggattgccgcgccgcagagcgaacgaattgggaacacggctgctgggctaagccctgagggctctgctccggggctgctccctgcgtttcggacacgctgcagtatacgtgggccgcgtgggcccagcctcgtgggctgagttccggtagagggagttgggggggggcaacgcggcaggcatcatccgccagggagggccagacattcggttctgggaagctacatgcatccactggttggagctccatgtccccgggcctgtaaggaattagtgccctcagctttaaccattttccttctggttcatgttcaaccgggctacattacccgcccctctctccgcagcgtggttttgcgatggggtatgtgtaaaattcgtaggacattttctggaaagtatcaagcgttcattcagtgctactttgtttcatagtcgtatccctggagttacttagagttggtcgctttcgcctctggtatcgtgcatatgatggaaaagttttaatctcctgacacttgtgatgtcttcaaaggaaccactgatgcacctgtggccagggtggcccactgcagttcttggggccggaagtgaccgatttctaaatcccgcacccacgttttctttccttttctcccagctcctgcccctcctaaagctgaagccaaagcgaaggctttaaaggccaagaaggcagtgttgaaaggtgtccacagccacaaaaagaagaagatccgcacgtcacccaccttccggcggccgaagacactgcgactccggagacagcccaaatatcctcggaagagcgctcccaggagaaacaagtcagtactgccccctgtacccatgaaaagatttgggtattctccattggtaatttggaaattcactcactctgcgtgatggtttctcaaacgcaaattgtgtccagtgtgcttctctaattggaagtatgaggagattgtttctgctgcatttacaaaactggcaggatcagcccagaggccgggcgcggtggctcacgtctgtaatcccagcactttgggaggccgagggggggcggatcacttgaggtcaggggttcgagaccagcctgagtgacatggagaaaccccgcgtctattaaaaatagaaaattcgccgggcatggtggcgcatgtctgtaatcccagctactcgcgggaggctgaggcaggagaatcgcttgaacccgggaggtggaggttgcggtgagcggagatcgtaccattgcattccagcctgggcaataagagtgaaactctgtctcaaaaaaaaaaaaaccctgagtctctcaaaatttgttaggttaattattgcttca

SEQ ID NO: 85785 - DNA, 2277 bp, Homo sapiens
gagaccatcgtggctaacacggtgaaaccccgtctctactaaaaatacaaaaaaaattagccgggcgtggtggcaggcgccgctagtcccactactgagtcccaggctgaagcaggagaatggtgtgaacccaggaggcggagcttgcagcgagccgagatcctgtcactgcactccagcctgggcgaagcgagactctgtctcaaaaaaaaaaaaaaaaaaggaatttgcccctggcccgattctcctgcctcagcctcttgagtagctcggactacaggcgtgcaccaccatgaccagctaatttttgtatttttagttgagagggagtttcaccatgttggccaggatggtcacgatctcttgacctcgtgatcagcctgcctcagcctcccaaagtgctgggaatacagccatgagccagcacacctggcccagagatgattctttaatcacttgaggttgtaagagcccttcaagagaaagaaaatgcacaacgttctgcccctgggattggggcttcaggcccttagatttcagggtgcagatgatgacactgtaaagcgaccaaagtctgaacaaagtgattggtacctcgttgtctgatgcacctaggctctcctggctctgggctccaaaagaatgggcccaggccaggtgaccccattttgcctctcccaggcttgaccactatgctatcatcaagtttccgctgaccactgagtctgccatgaagaagatagaagacaacaacacacttgtgttcattgtggatgttaaagccaacaagcaccagattaaacaggctgtgaagaagctgtatgacattgatgtggccaaggtcaacaccctgattcggtgagttgggcctcaagggatggggagcaggctggaccagcagtctggagccaaaaaaacctgcattccatgaagctttttgatgtttaggtagtcctggtaatgcaggactacacgtgtagtccgagctatgcaggaggatctcttgaggccaggaatcacccatgattgccccattgtactccagcctgagcaaccaagcaaggccctttttaaaaaaaaaaaaaaaaaaaatcccctggacctttcagcaggggaaaaaggttccttgacttaaacttggtgtaggtttagcagtgtgtgtgagccttgaggcaggaattacaggctgctttagttacagacctttgtgtggacctgaggctttctaggacttgattgggggttggtcctcattttctgggtccctacttctattgggaaaggcaactagagtgcgacacgtggcagattaccttggtttaagtcttaatgtggcctgtggtgtttcccataagagaattggctttgtggcttcatggtgtcctctgggctaatgatggaaaaatcattattggaaaagaatgacatgaacaaaggaaccactgaagtgccggaggactggaggaggaagggggagggtgtgggggcagtgagggtggcagggactaaggcttccttctctaccctaggcctgatggagagaagaaggcatatgttcgactggctcctgattacgatgctttggatgttgccaacaaagtaagtttccttcctacaaaccccttaatgctcaccccttgggtgcaaatgatgcatatgttagcgaccaaagcctgatctttgctgattagtcataattaactgactgcacccctatccttgacaaaccttatcctcacattcctcattttgctttctaaaaataacattccagcttaatcttcatatttcaactccagtaacgaggctcccttttgtttttcagattgggatcatctaaactgagtccagctgcctaattctgaatatatatatatatatatcttttcaccatatacatgcctgtctgtcaatttctggttgggctgggaggccacacacacacactgacatgacagggcttgggcaagactcctgttctacttatccttttgaaatacctcaccctgccactccaccatgtatgatcattccagagatctttgtgactagagttagtgtcctaggaaaaccagaactcagaacttgcctccatggttgagtaacaagctgtacaagaaccccttttatccctggaagaggctgtgtatgaaaccaatgcccagggtttgaagggtgttagcatccatttcaggggagtgtggattggctggctctctggtagcattttgtcctcacacacccatctactatgtccaaccggtctgtctgcttccc

SEQ ID NO: 85786 - DNA, 1029 bp, Homo sapiens
tctgaagtccttgtcctttattgggcaaggggtgagggaagcagacagaccggttggacatagtagatgggtgtgtgaggacaaaatgctaccagagagccagccaatccacactcccctgaaatggatgctaacacccttcaaaccctgggcattggtttcatacacagcctcttccagggataaaaggggttcttgtacagcttgttactcaaccatggaggcaagttctgagttctggttttcctaggacactaactctagtcacaaagatctctggaatgatcatacatggtggagtggcagggtgaggtatttcaaaaggataagtagaacaggagtcttgcccaagccctgtcatgtcagtgtgtgtgtgtggcctcccagcccaaccagaaattgacagacaggcatgtatatggtgaaaagatatatatatatatatattcagaattaggcagctggactcagtttagatgatcccaatctgaaaaacaaaagggagcctcgttactggagttgaaatatgaagattaagctggaatgttatttttagaaagcaaaatgaggaatgtgaggataaggtttgtcaaggataggggtgcagtcagttaattatgactaatcagcaaagatcaggctttggtcgctaacatatgcatcatttgcacccaaggggtgagcattaaggggtttgtaggaaggaaacttactttgttggcaacatccaaagcatcgtaatcaggagccagtcgaacatatgccttcttctctccatcaggcctagggtagagaaggaagccttagtccctgccaccctcactgcccccacaccctcccccttcctcctccagtcctccggcacttcagtggttcctttgttcatgtcattcttttccaataatgatttttccatcattagcccagaggacaccatgaagccacaaagccaattctcttatgggaaacaccacaggccacattaagacttaaaccaaggtaatctgccacgtgtcgcactctagttgc

SEQ ID NO: 85787 - DNA, 1031 bp, Homo sapiens
gcagctgctttcggggagagtttaggtataaactctgggcgaaaggaggagcagctgagagccagcgagggaagttaagcggagatgagagcggggagggagaagagggtagtaatagaggaggggcgggaagaagcgggggaggggaaaggtgctgcgggcgggaggaagaagccgagaaaacctgaggcgcaaggacccagggaccaagccgtttgagtgttttcctcccctatggctccaaggttacacattaacccctgtgggactcttaagtcaaccaaagcccagtcggtttctaggtgagaacacgggtgtcctgggtgagcggctttcccgcccctccccttggctcacagagctgctctgtccgccggccgacaccggcctgagccagcgcccttccagcagtcattccacgtgggtgggtttggatacccttgcgagagccaggacaggggcagaagataaaacgcccctttcctcacaccccttgcccactctgatacagggacgctaaccttcagctagtgaccatcctcctcctgaatactgatgttttctttctttctttttttttttttgagatggaggctcactctatcgcccaggctggagtgcaatggcacgatctcggctcactgcaacctccgcctcccagattcaagcgattctcctgcctcagcctcccgagtagctgggattacaagcgcgcgccaccgtgcccaactaatttttgtatttttagtagagacgaggttttaccatgttggccaggttggtctcaaactcctgacctcaggtgatccgcccgcctcggcctccccaaagtgctggaattacaggcgtgagccaccgcgcctggccgaatactgagtttttctagagctcccgcagagcaggagcccgggagaacctggaattaacctcacttccggtaaagagcctagctggtcacactaaccagccccctgcctctaggcttttgccttgagctcatttcggcgaaaccgcggtctttccttctcccc

SEQ ID NO: 85788 - DNA, 1018 bp, Homo sapiens
ccttggcttgctttgagaagaagctgtccccaaatgggcttatgcacagagcccctggtcttccctccctgcagggctgtgatcccagcttctatcctgcaggtggtgggtaccccatgctatatctcccctgagctgtgtgagggcaagccctacaaccagaagagtgacatctgggccctgggctgtgtcctctacgagctggccagcctcaagagggctttcgaggctgcggtgagtgtatgcaccctccaggggacaactgagaaatctactgcctcgcccagcagcccttggctcaagccacctcaggtttctcctctagctgagtcatgtctctcccttatcagattaccccaggggagggctatgggtgtccctcagactatggatttctgagagtaggtcttgcctcccattagacggagggctcctgagggcagggctgtggctttcccagaagaccctcccaagagcaagacttgagttttcccagcatgctggggtttctgaggatatagctgcagctcccctatcagactagggatcactgaaagccaggttggactcccctgtcagtctgggagtctcctcatcagactgaagtctcctgagggcaaagctgttattgtttatttatttattttttttattatactttaagttttagggcacatgtacacaacgtgcaggtttgatacgtatgtatacatgtgcgatgttggtgtgctgcacccattaactcatcatttaacattaggtatatctcctaatgctatcccttccccctccccccaccccacaacaggccccggtgtgtgatgttccccttcctgtgtccatgtgttctcattgttcaattcccacctatgagtgagaacatgcggtgtttggttttttgtccttgcgatagtttgctgagaatgatggtttccagctccatccatgtcctacaaaggacatgaactcatcattttttacggctgcatagttttccatggtgtgtatgtgccacgtt

SEQ ID NO: 85789 - DNA, 1048 bp, Homo sapiens
cagggtaccaaggagaccgtgagtccccctctgacctccagagcccaagtcctcctcaccagtcacagcagctgagtgagcagtgcccaggtctatactcagcagaggctcctggtccaggggtgcagagcctagtagtgtgaagctcagggcctcctccacttgctggtgggggacaggctcctcccccagggagaggtggtccaggcccagcttgttgaacctgagggcagagccagaagccaaatccaactgacagacagtttgggcaggagctggtgcaccaggagacagatcccaccctgggttgaaccaatagcaccctcaaccccctcaattctggtctttggtgaaaggtaggcaatgatggacggagcacttgcagccaaggagagccaggggcaggttagtcatcctgatgatctattcacctgttgctcccacaggctagggcttggccaggcacagtgaggatcatggaggaatcgataccacatacaactcgctgagcttcctgtcctgggggcatgggcacctgctgggggcagctgtgggactccctggtgcctagccccagtctgcctacaagaagaaacccagaaggagttaatttgagctttagtgggggtgatgcccgaatgaggagggcccactgaggggagggaacagcatgagttctctgttctctcagtcccaaatgcctttcctaggcccctctgctggttaaaatcctccttctttattttttatttttatttttcgagactgagtctcactctgtcgccaaggctggagtacaagggtatgatcttcactcactgcaacctctgcctcctgggttcaagcgattctcctgcctcagcctcctgagtagccgggattacaggcatgcaccaccatgcccagctaatttttttatttttagtagagacggggttttaccatgttggccaggctggtcttgaactcctgaccttgtgatccacctgcctcggcctcccaaagtgctgggattacaggcgtgagccaccacgccggctcaaaatcc

SEQ ID NO: 85790 - DNA, 1020 bp, Homo sapiens
ccaaaagcagagcaggggttttgccagccctgataccccatgatgacacaatccaggagacagctgcaagtcatgccttgggcacctgcacttttcagagcattcagaggagaagcaatatcagggtggtccagaggtgaatccgggtgcctcagggggggaccggctcatctgtgaccgctggagggtaccgaagagaaacccttgcagcttctgagggcagtgcctccagaaatcatcacccacctcccactcccactgggccctggattctggaccctgttaggccagaaagagagtttcagcatcaacgggactcagcagtaggagaaagaatgcatgtgagccctggggagcagtggaggcagcccttccatgaggcccaagaagcaccagccttggccaccccaggcaggaagcttgaagcttttcaaccgcagcttctgctttttttatctgggggctaaagatgcttttggtgatgtggccatctgtgaacactggggatgggagtgtggacaggggccagctgggctgtgtggtgaagtgggaaaagttacaactcacatcgaacagccaggagggtgtttccatggcaacaggacacggaagtcaccgtgtaagggtgtgtctcatccaactgcactggccgagggagtccggcatcctcatccctccttcccaatcgacctcgcgcccctttgccccaagagtacacttcgctctctgccaggaagaatccccaggagggaagtgggaagtgggcacagcccgagcaggatctcccctcccacattgccaggatggcccctgggaggctccagagtccagtggccctgaatagcaacccccaccccccactgctcatggcactgtctgcccccaccatgctcagtcctcacctgccccaatagctacagtgaaggcatccccacaggctaccattgccatcttgatgccctcaaggccttggaccttacagggtgcccgactgcctcggcgagtattggtgcccaactg

SEQ ID NO: 85791 - DNA, 1041 bp, Homo sapiens
gaggcccttccccgtcacctgagagccggcgcggcctcagccttgaactttgaatcctgggggaagaggacaaaacccgctcccgcgtggcagtttgagcctccggagctttcccccatctaacctcttctgattcttcgaacgttcagagaacggtagctattgttctcccatttcacagatcatgaaacgagattcaaagaaaggctgcgacttgcccagggtcacatagttacttaaaggcttaactaggatttaaacccggactgcttatgatcacacaatggaggaaggactgaatcctcccccgaagaaggacccctctaggcggctcccctctctcccgggggctggagtaaggcgggtggtccataagtcatgaagaagggggtcgcactcgtgttgttactgaactcccgctgccctctcaggacgcaggttagcccttggctcttgggcatccatcaagtttctgggcgccctgtatgtcttgaatctcctgctcacgcagggaacccctcaggcccgggtgtgggaagcagggtgaaggagccccgactcttcggaggtcatgcccccagagcgcaggggaaggccgagtcggccactgcctggctgtttgctgggacgaggggatcgagggcctggcagggatagtacctctgagacgcctgcctccggtgctccctcccgccgtgcctccctccctcgctcggtcctccgtagctcctactggcggaaatctcagcaggccctttgttttctgttccccacagcctgggccggctcctgccctcacatatgctccggcacaagctgcaggactgccccctccccctcggcagtgtacacatttactctcctacagacacagccccattgtctccgccactgctcttccccggccctctgggttccagatgaggccagctgagccccccgacccccccacagctgacccaccctgactgcctcgggaaaggagcgggggagggggccgtcaggccggattccttccaccaccttcttggcccccctctc

SEQ ID NO: 85792 - DNA, 1439 bp, Homo sapiens
cctcctaggtttagtcttttaagtaactggatagtttcaaagtttcactgctccagtgtgatcattcttagatgtctaagaaagggaatttggtgggatctaagtggggacagaaggggtcctctcgtcctcccctccagcaacttttggttttatgttagaacctaaccctaagcccaggcttttctctccactgactgcctgtcagctagtctctccaccttggccatttccagccagctcccacccatcttttcttgaatctcttcctgtttcccttaggacgactgaggtgtgggctgacggaatgccctagttgaggtagtataggtgctcaggcccctaatccagacctctacctgttgctaccccccttcccctccctccaggactaagaagcaagatttcccaggtgctctgaaagctaattacttactcatcgaaggatctcaaatcaaagctgacccagtcttcatatccttcaagttcctttccattcctcaaggctttgttttgtgtctatattgatcccacagccactgcacttgcccttgccacacttgatctcaagggcatcttggaagtatttgaccatttcttgagatatggggggaaaaagtctttgtattggcatcttggttccagactcccctttccaaacctagaaaaatacagtgacctttgagcatacccaagatccctttctcactgttgcctgtcccctaactcacctccccacagcccctatcctttccccctcaacaaaaacaaaatctaccttacttgaggaattaggtaggtaaggaatgatcacattggagtttgggattaaaaacaccaaaaaaaaaaaaatgcatttggttctctctacactggctaagaatattgctctacactgtaagttttaaacgttacgtttctgtatgaatgtagtgtgggtttgagtagcattgtgtgtgagtggccccacaggtacattcaccctctagtgcagcccctcagtttaatgaaggaaaaaaaaacaaacacaaagccttaagctctttgagtacttcctttaccaaatgagcatggttctaacacctggagctgggcctacattggaaacaagcccctcctgccctctgtccattcttagagcataccttcatccactccatgctcagcacgtctcatcccaagcgacaattagttggctagaaacacttttctgtaattttaaacttagactgttttgttacaaatttttgcaccattctgttaaagatgcagaattgggcttttttattttttacagatgaaataagcccttacctttcctcttgtctctggggaatgtcagctgatggttcttatttaaggttttgcattttgttcactatccactactgttcgttagccagaaattctctagtgatctgaagcaatgtgactgaaga

SEQ ID NO: 85793 - DNA, 1052 bp, Homo sapiens
tgggaacaaagagactgttaacattaatgaggcacaccgagtgggcatttccgcagtctccaaaggcaggcaggtttttcctctttctttttggaaaatgacagctgacatggaccaaatacagactatttttggctctcaggactgaaaggactgaaagatgctctgaatcctttcttctcaattccctccctgctgccctgtcattattatcttccttctcaagcaaataaataaagcctttgatcctcatccagtcgggcatagagtaaactgtaaacaaaagtgaacttgtgacatggggaaggggagagatgttggcagcttattcctctgctcctgaaaggaagcattctgtctactgttcagggtgcccacccagtgggcaaagccccccagctgccaagatgcaagggaaagctgatccctcattggtccctgcagactgaagagtcgtagctctgggtaccctctagactgaagggccaccatggccctgacaaggagctttgcttagaacctacccccaagccacatgggctggtagagttccagaccctgcatttctctcttttttttttttctttttctgagacagagtcttgctctgtcgcccaggttggagtgcagtggtgcgatgtcggctcactgcaacctccgcctcctgggttcaagcaattaatcctcctgcctcagcctcccaagtagctgggattacaggtgcttgccatcacgcctggctaactttttgtatttttagtagagacggggtttcgccatgttgcccaggctggtcttgaactcctgacctcagatgatccacccaccttggcctcccaaaatgctgggatttacaagtgtgagccaccgtgcccagcgaccctgaatttctgtgtagggggagaactctcggttacctctctgagaattggccaaattctggttctgcaagatatgagactttgaaagatgctttgctgttctgatctctacttacctcatttataaaatgtaaatgatgatagtgcctgcttctacagcaatagtgagga

SEQ ID NO: 85794 - DNA, 1050 bp, Homo sapiens
tcccaagtagctgagattacaggcatgtgccaccatgcccggctattttttttttttttttgagacaaagtttcactcttgtagcctaggctggagtgcaatgacgcaatctcgcaatctcagcttactgcaactccatctcccaggttcaaacgattctcctgcctcagcctcccgagtagctgggactacaggtgcctgccaccatgccctgctaatttttttgtatttttagtagagacggggtttcaccatgttagccaggatggtctcgatctcctctccgcctgccttggcctcccaaagtgctgggattacaggtgtgaggcaccacacccagctaatttttgtatttttagtagagacggggtttcaccttgttggccaggatggtctcgatctcctcacctcgtgatctatccacctcggcctcccaaagtgctgggattacaggtgtgagccaccacacccggccataggttttgtttttttttttaagtgtgcatgtaattactgacttcctaatgaattggaggaatcacctctcctaggccaacactttgcaatgtaactcattcttatgctttggctagcctaacactttgaaatcaattcatagtgaaaatcctttcaaagtgaaggataagacagcaactataagcaaggtaaatccgctgggaaaatgactatacataggcaaaggaaagcttgaagtggtcagacttttattcccccaggggagagctgtattattcacacagagtaaactgtatcaaaacacaatacaactaatgatggaatagttacctctcattctcaagcaatcctagcacagaaaacccttccccttgtatcctcattctctccctgaatgtaagaagtaaaccctgactttaagcctactctcaactcatacctttcctaagtcagttttcatttggacacttgtgctgtgacatcttttggaagctgggcatcatacagcccgcccaggtctctagcaggaagcatctccctgctccctatattattttgaattttctgggaaaa

SEQ ID NO: 85795 - DNA, 1044 bp, Homo sapiens
catgagagcaatttcatgtttgtccacaaattatcattagcagtttcatttgcagattgaagaagcaggaggaatgggctctttgccagttacagcttccctccgcttagggtgttagttcaattatgtccaattaacttttattgcagatagtgatgataattacttgcaagtcagtttttggctgcagttaaaccaagactgaagtatgaacttgatggattttaataaccggtatgacacatttcacaccctcactccactgcagttatttctttttccaggcctcttttagacaagaagtcaaagcattgaaaagtccatctcacaattaaaacatactgtccttccttggaagagacttataggatcatattttaaaataatctattaggagcagtcttaatggctttttacattctgagatcatacccttgagttcactgttgcttatcataggagaatagactgagattaactaaatgtcattcatagcaatatatgctaattttaagattatagtaattggcaaggtacaatctggttttctgattgcgttttaaattctcttctaagtgcaaaagaaaacttggtttggacactttaaaagtctgtaggacattggctgtaatccagtgcctgtaatcccagcattttggggggatgaggtggattgcttaaacccaggagtttgagaccagcctgggaaacatggtgaaactccttctctacaaaaaatattttaaaaaattagctgggtgtggtggcacatgtctgtagtcccagatgcccaggaggctgtggtgggagaatcacctgagcccgggaagtcgaggctgcagtgattgcatcactgtgctccagcccgggcaacagagtgagatgctgtcttaaaaacaaaagaagtctgggtgcggtggcttacacctgtaagcagtttgggaggccgaagcaggaggatcacttgaggtcaggagttcgagaccagtctgcccaacacggcgaaaccctgtctatactaaaaatacaaaagttaactgggca

SEQ ID NO: 85796 - DNA, 1047 bp, Homo sapiens
tccattatattgaatagtttccttcctagattaggtatttcataaaacttctaaatatttttaggaatgtattacttatgcttgacatctttatcattatttttttcattcaaaatagcccaagtttctctggaagcttgcagttggcagtactatcaagacaaaatgcctttaggactgtatggagaaggcactttccaccactacctaacaaaatggaatatatatataatttttgactttatgtatttcttctgtgatttactatctcatattctttgaatattttcccctttggttatttgtcttcctcttatttagttataagagttctttgtatattgtggcattcaactcttttttatgtgatgttagtattccttaaggctatgaataagaagtgagaagggaggctattgcattgaatgctaatcccagatggtgtttggttaaattgttttattgtttgccttgattatttgagcaatggtaagcttcttttgtctcttcctttccaaagatgcatagaaaagctccttctgtctgaagtaaagtgttggctctgtgttggttataatttgctttttctggcttgcacagccttctttttgttttctgtcttctgacagattataggattgtggggaaacagcgtccagggctttttcaggaaccgtgccattttatctacaggagaagccattggctttggcactagaagggaattggctgtgcatttaaagatgccaaatcatgctcgattcacaagtttgctgtctcattttgtctatgtgtgtgaaactttttcaggattttggctttttactttttctaccatgtgctaccccatcagtatgaaaaattaacaacttgccccttctttccagctctctactcccagaacatacaacccaaacatcctaaaccataaatgatggagcagtcattttgaagattagggaaaaatataccatacaagtgtttccctttggcacccttgtcgtgactttgagctttaattctggtttatcagtcattcctatagag

SEQ ID NO: 85797 - DNA, 1016 bp, Homo sapiens
gagacggactcttgctctgtcgcccaggctggagtgcaatggtgcaatctcggctcactgcaacctctgcccagccccaggttgaagcgattctcctgcctcagcctcctgagtagctgggattacaggcatgcgccaccacgcccagctaatttttgtatttttagtagagatggggtttcaccatgttggccaggctgatctccaactcctgacctcatgtgatccacctgcctcagcctcccaaagtgctggtattacaggcatgagccacctctcacccggccctgtacgattattttatatggactcctatttccaaaaacctgctttaactacttttatgagcaatacaggtaactggtgagcgaatgagactttttataagggttaggcccttggtctataagaaaagcagactgacttgaccttgttcttaaagtacatcagttttctcagctgtcaaatgaggataacaggaccattttggcttgttgggtggttgtgatgcatgactactaatgaaaataattgtaaaacacttttgcaagttaaagtgtgatataaatgctaaataatagttctttattgggatgttgtgaaaataagcaacatgctttttattgagaggccttaaattccttttgaggaggcaatatatttttataagtactattagatcactttagaatgttcatattattagagttttggccaggcgcagtggcttacacctgtaatcccgcactttgggaggccgaggtgggtggatcacgaggtcaagagatcgagaccatcctggccaatatggtgaaaccccgtttgtactaaaaatataaaaattagctgggtgtggtggcgcgtgcctgtagtcccagctacttgggagactgaggcaggagaatcgcttgaacccaggtgggggaggttgcagtgagccgagattgcactgttgcactccagcctggcaacagagcgagagtccatctcaaaaaaaaaaaaataaaataaaaaga

SEQ ID NO: 85798 - DNA, 1066 bp, Homo sapiens
atttgaagtcatggtatttaatcaggaggtcatctacagatggtttgtggctagagaagagcaatttgaaagagaaggaatagctagtgagataggtggaaaacccagaaagtgatgttttagaaggcaagtaaagaagtgtttcaagaagggagtggtcagcctgggtaacatagtaagatcctgtgtctacaaaaaatagaaaattagctgtttgtggtggcacatgcctatggcagtcccaggtattcaggaggctgaggtgggagaattgcttgagtctggaaggttgaggctgcagtaagtggtgattgtgccactgcactccggcctaattgcaccactgcactccatgtgacagagctagacactttctcaaaaaaaaaaaaaaaatagaacggagtggtgagctctgttgaatgctatatagaggtcacgtaacagagaagtactcacaggatttgacaacctagggattattggtgacttccagtagaaccgttcattggagtggtggaaatagaagtctaattgtagttgattgagggggaaaaataagatgaagaaacatttgatcattttttttgtttttgtttggtaacaggttttggcacccagtttccttgaaaacttcctgtgtcattgtaactaagtacttacctgtttgtattccagttgaatatgttttttttttccccccaagatggagtctcagtctcttgcccaggctggagtgcagtggcgtgatcttggctcactgcaacctctgccccgagttcaagtgattctcctgcctcagcctcctgagtagctgggactacctgcgcatggaagcacgcctggctaattctatattcatatatgtgtgtgtgtatatatatatatgtgtgtatatatatatatatatatatatatatatatatttttttttttttttttttttttttttttttgagatggagtcttgctctatcgcccaggctggagtgcagtggcgtgatctcagctcagtgcaatctccacctcctgggttttaagcagttctctctgcctcagtctcccaggt

SEQ ID NO: 85799 - DNA, 1010 bp, Homo sapiens
tttttaatgtagacaaagcagaggacaaactatgtgtttatggaaagagaaaatgggttctttttattttattttgttttgacacagagtcttgttctgtcgcccaggctggagtgcagtagcgcaatctcggctcattgcaacctccacctcccgggttcaagcagttctcctgcctcagcctccaagtagttgcgattacaggcacccaccaccatgcccggctagtttttgtatttttagtagagatggggtttcgccattttggtcaggctggtttcgaaccaggtgatccgcctgcctcggcctcccaaagtgctgggatcacaggcgtaagccaccaagcgcagtgagaaaatggtttctaaagtagagatgcagactccttttaaaaggacatagacacttcagctttgctgactctgaggattgagaccttaaactgtcaaggcgttttggcaattgatgagtgattggtcttttacctgagtaaaggtagggaggggctatactagattcttgaagattcacaaataaggggagtgaatttacaggaatgggaaaaatgaacctggttgtttttaacttctctgtctggtaaaatgtgtttcacttttctttcctggaaatgcacagtgatgtataattttaacctttttactttagttccttgaccgtcccaatagattatttgtctataatactttgtttaagataatagttttaaaaataaagcatttgttactattgtgataggtcattacagaaatttattccatgtttgactactacatggagtagagtataaaatgttaaagctgggcatagctatcttattttattttttaatagttggacatttatttttaatgttggtaatgcatttttccccctactggaaatttccatcagttcaaataagcgcataaatgccacccatgttatgttaaaataatagaggtttgttcagctgtgatgagaatttcctgtcctcctctccttctgttatc

SEQ ID NO: 85800 - DNA, 1334 bp, Homo sapiens
aaaaaaaaaaagacccaaatttatcatcagtggtcacctcagagcacctgaattcaggcctttaagtgcaagtaggatgcagaattctggaagagccagtaagtctgtggctccttggggaagcgcgatccaagggtttagtaacctaggcacggtactccagaggcgtaccctgaggcagccgccaaattctctaagcctcagaattcttcaaggccagctcccatgtccactagagacccaggggtccagaccatcaggcactgaggaagacgcccccggcaggggctgcgcaggcgcgtgcggcccgaaagggcccaggcgctacacgctgcgcaggcgcaggagcggctccgggtagtccccacagctgcgccggtgactgaggggccgggcagtggagaagtggtggcggcgggcggcgggcggcaaaggagcagccatgagggccgggcccagtcaccgaccgtgagtagtggtggagggggagtggacaacgcgtgggaagagggtaacttagcggaaggatacatgactttgtggggtgggctctgactgtgggagacggaagggcgtgggggaggtacagtttgaggtgatgatgggagaatttggggcacgggtggcccggtcgccggccgcagagctggacagcttggtggagggggacggggttgcgtgctgtggagtgaagcagcccatttgtatcatcccttcctccaggagcttttggtcgcctctcctttccgcttctttcagagaatgattgcggggggagggtggtggaggatgaaagctctgctggagcttaagaagccacctctgaaccaggcaggggaagggtcggtctcccggagtaataggctgctctgggtagaggatgggagtcgggaaccctcttttgaaagccgggaggggtctagggaaaagagctaggggcttagagtcaggcaggttcgaaaggaagtccaccattgataaagctgttaggtaaccttgggcaggtcccacttaacctttctgaacaccaggaagatgtcatgcttcaaacgggctattgcaagcatcacctatgtaattgagattgtttatgcaaattgtgaattgtaagtactatgttgatgttaatgtatcaccaacaatgttagtggaatttagaccttaccgttgttaatggaatgactgatttctctgttaagataagaagcgtattgtttgtaaaacctcagtagacacatatgtgctttctttatgggcacagcagaccatgtgcagaactaccagttctgtaatgtgataaattagccatcagacttctgtaggaaaaataccgt

SEQ ID NO: 85801 - DNA, 1050 bp, Homo sapiens
gctatttggcctcatgggaaatgtagtcttttaggagacatggccagaagggccgtttacaaaactttggcagaagaaaaaaatacgttgtgtatgggagtccaaaactaccgtcatgcttgcacagactctaaatacacattttcccctttccttagcctccaccagtctccagagcaattcctcctcccgcccacatcccatgtgtctcggctttcaatttgggcagacctacctctctcctactcgctggttcgtcagccgctctgttcaatcgtaggagcgctcctggtcggttcccgcagtgccttgcggctgtaatggctgcccccagctggcgcggggctaggcttgttcaatcggtgttaagagtctggcaggtgggccctcatgtcgcgagggagcgggtgatccctttttcctcactcttaggcttccaacggaggtgcgtgtcctgcgtcgcggggtccgctttctctggtccccgcttggcctcggcttctcgcagtaatggccagggctctgccctggaccacttcctcggattctctcagcccgacagttcggtgactccttgcgtccccgcggtgtccatgaacagaggtaaagcgccctgataggtttgctcggaactgtcatgtttttagtattgaaaggtttctggggatactgtctttgattctattttatagaaaacaattttgaggccctgacagggaggagcagtgaaaaatctctcaggagagaaataacagtttgagtgggagaaggaaacgatctggtcacaaccagagacgctcactaaagagcatgagattgaagggccacaaagtggaactatggctctgcaccccgacatgggaagcaaatttgatccagtaaatgcatgttgggcctcatcttcttgttaagacacagttacacctggaaaacagcacactttattcttcaaacagtgtccggtattggagactggacacaaactggtcattgcaaaatggtgtcataagaagataatataaaaagactgggccctctcccttcttgacc

SEQ ID NO: 85802 - DNA, 1067 bp, Homo sapiens
catctcccatccttgcagatacccctgatcaagaaggccactggtgtgcaggtgtgaggctcctgcaggcccactctcttcagcagccacccggccctccctccagcacccgttttaatcccacagaacaacgggaacgttactgactctggtgccttatctcgaagggaccagaagtgctgcgtgttcaggccatctctggctgtcttcctgtctctcctgtctgtccacctcctcctcttcctctcctttaccccactttcactgccactttcatcaggtttgtgtctcatctccctgcgtgtcttttcctttgtctgtctttttctttcccccatgcacatcatgtagattaagctgaagatgtttattacaatcactctctgtggggggtggccctgctgctcctcagaatcctggtgccttgaagttctctgtgcatctgtccatcctccctatggccctggccagagctcagcatgggcaggggttctgggtaggacggtcactgtcctctctcctggactggtcttcccagccctaaaccctgccccaggaagcccacagcctcacctgctgctgcccctctaggtctgggcagccatgacctgcagggcccagagacactgtccttcccctcatccacccaaggccccagccagcgctcataccctgtcctttctccctgaccccaagggcacagaggcaaggcctcctgtctacagcagcttcctcagtttcctactgccttaggaggcccctgcttgtgctcagggaaggcctcttcatgggcatgttcctgctggggcggtgcggtttggtcccaactctgctaagttttctgagatgagggtctagccctgttggggacagaaaagtgtgtagaccttcttcctgctagggctgcactgtcctgggtgttgggcccttctggtggacaaggctgtgccaaccctgtacagaatcgagtgctgtagcctggccagaccccagagcccttgtgccatctttcttcctggccagagtgatggggttccagccatggggaagcaacccaatcctctgtc

SEQ ID NO: 85803 - DNA, 2184 bp, Homo sapiens
ggaacagagtgaggggggagagtggcaagaggtgaggtcatagagaggcactgtgtcctgtagggtttggagggaggttcactataggcattctggcttttactctgagtgagataattggggatccagagcaacactttgtcttatggaagaggttataccaggataacaagatctgtcatattcatattaccatactgcattttagatagtcactgcctaaggctcattagtaattataatagcgatgatcacaattagcctttattaagtctttattacactccatatcactaatgtccaaaatagtggctggtatactgcaagtacttaataaatgctggttaaacaaggaacaggacttgagctagaagaaaagatggagagagactgagaattgtttcagacatgggacacagcatgaacaaaatctgggatgtggggtgaacaagcagtctggatggaagcgaagaggcttcatgcaggaaatgagtgaagtcacctcgcagaagccccgaatgcctggtaaatactatcctggttcccttgaaaccagattctgtccctgttcttctagctctgttctattttttttgttgttgtttttttttttaaagagacagagcttgactatgttgcccagtctggtctcaaactcctgggctcaagtgatcctcctgctccgcctcccgagtagctgtgactgtaaatacacaccactgtgcctagcccgactcctttctttcttcctgcctacagggcctgtgaactcggagctgttcctgcgccatgttcctggatggctgcgcccacttttgcgcccattggcttggctggtgctccgggcaccaagagggggtgcccagacacccctgtattgtgctctacaagagggcatcgagcccctcagtgggagatattttgccaactgccatgtggaagaggtgcctccagctgcccgagacgaccgggcagcccatcggctatgggaggccagcaagaggctggcagggcttgggcctggggaggatgctgaacccgatgaagacccccagtctgaggactcagaggccccatcttctctaagcaccccccaccctgaggagcccacagtttctcaaccttaccccagccctcagagctcaccagatttgtctaagatgacgcaccgaattcaggctaaagttgagcctgagatccagctctcctaaccctcaggccaggatgcttgccatggcacttcatggtccttgaaaacctcggatgtgtgcgaggccatgccctggacactgacgggtttgtgatcttgacctccgtggttactttctggggccccaagctgtgccctggacatctcttttcctggttgaaggaataatgggtgattatttcttcctgagagtgacagtaaccccagatggagagataggggtatgctagacactgtgcttctcggaaatttggatgtagtattttcaggccccacccttattgattctgatcagctctggagcagaggcagggagtttgcaatgtgatgcactgccaacattgagaattagtgaactgatccctttgcaaccgtctagctaggtagttaaattacccccatgttaatgaagcggaattaggctcccgagctaagggactcgcctagggtctcacagtgagtaggaggagggcctgggatctgaacccaagggtctgaggccagggccgactgccgtaagatgggtgctgagaagtgagtcagggcagggcagctggtatcgaggtgccccatgggagtaaggggacgccttccgggcggatgcagggctggggtcatctgtatctgaagcccctcggaataaagcgcgttgaccgccgaagctgcgctcactcctgcctcaacgcgccggccccgccctccgccgccacacttccggcggggctgcgaccgcagaggggcgcgggcgagcgagcgggcggccggccgctgggggtggcgggataggctgggcgcggccggcgctgcagacccgctgctgttgtccgggtctgtgcggtcccgagggccctccgtgccgccggcgccatgggcaattgccacacggtggggcccaacgaggcgctggtggtttcaggtgagggggcggcgaggaaggtgggagctgtggagggtgctcggggtgggtgcagggc

SEQ ID NO: 85804 - DNA, 1068 bp, Homo sapiens
ggcagacctgagctgaggaacagcgtgggcagggagggaaagacccagggtctggacacttcctccaacacaaaacccttccccacccacctcctgctccctccccctcgcccaccattgtaaaataatcagaaacttgttctattttgtggcagtgacaatagttttatattaaaagaaaaaatacagttttcatacagcaaaatctatacaatatcattgttttatttaatataaagatcgctacccaccttccttccatggttcccaccctccacgttattttccctttctgcagcggttgcactacaggtagctactgtgtattatggacaaatgagaaatgaattctttttctggctgtccatctattttatttcaaataaggaaaagtgtatttggattttgtgtaaatacatctagtgatgacattttttcaatgtttttaaaaaccgtgtacagtactacatgtggtagagcgttttctcaaattgtctattgtagcaaaaatgtttttgtcgtaaacctgttttgtctcctttttttgttctcttgccacttctctcctcttcctcctgcccctggttccctcctctcctcccacccccacaaccagtaccaatgtacatagtaattgtaatgttttagactttacagaaactttcctgtattctgtatataaaaaacaaaaatacttcaaattgttttctgactgtctgtcctacctgtcatcacccttagaggagaccctcccctagatctgggtctagcaggtggggggccttttgaacaggtctcattcccatagggaagtttggtaggggaggtgttggagaaaagtgagccagggtgggtggatgacaatggaatgacatgggtgcgtctgctggcccggggggagctgtttctccagagaaccctgactgatagtggaatctagtcttgacctgtcacttctagtcatgtgatctgcagtcacacttctctacaactgctattcctcatcaaaaaacgagtctgctgcattaccttaattctcaagtcccggggaccttcattaaaccaaat

SEQ ID NO: 85805 - DNA, 1037 bp, Homo sapiens
aagactgacacccttacccacagaagttagaaaggggtgagggaagccctttccagagttgactgctttaaatcagtggatagctagacaagagaaactaagaatagagacaatcagccagtcacggtggctcacgcctataatcccaacactttgggaggacaaggcaggaggaacacttgagcccaggacttcgagaccagcctgggcaacatggtgaaaccctatctctaccaaaaacaaatataaaaaattagctgggctaacatgcctatagtcccagctacttgggaggctgaggtgggaagatcacctgaggctgggaggtccaggcagtgatcctttttgtgcctctgcactccagcccaggcaacagagtgagaccctgtctcaaaaataaaagagacaatcagttccttgtcttcccttgttcaggcccttttgctttgtctttgcccagtgttgcaacagcagagatgaaagtcagctctgactactgcccagggaggcactttaaacactgcagggaagaacctaaggagaaggcagatgctttgtccctggtggtctttgaaagagtgatagactcacacatacccaatcttcagttagccctgtatctgttttttgttttgttttgttttccctaaaagtcctagagaccgatagctctgtatctggtacagaaggacagacagattagcccttaccctagaaacttccctttctttaaggtgataagattttctaggctctgcaccccgatgttgtattttcatagaaatatcccatcctcttcagtagctcactcttcccttctgggtagcagccacatgttctaaagcagatcagctggcagggacagctgttctttatcaggagcttggaaaagacaacagtttttgttcaaaaataaaaggggagggccctgagctactcacccttgaagtctctgctagtgccaacccagaagctaactctctccctgtcttacctccccgacacatgcaccttacaatctgttctctgccttcctt

SEQ ID NO: 85806 - DNA, 1088 bp, Homo sapiens
tgaggaatcacagatgcaccttttgaactctgagcacttagccacccaagcagagcagcaagaggtgagtgaaggtggggcggggattccaaatccaaccttccttctgtgtcaccacagctgttatcagaagtagcctcagtgtcattctcattccagtccccacccaccctcatcctaacccctcaagagttgagtattccagggggaacttctggctcaaatcccaaaggcaagtaagagatctacaaaggcaactggtctgcttctctccatcgttaccccagtgcactgtgagatgggcaaatctatactgtagaaagagatgagtagacccatagagaggttaggtgatagtgctggacataccacaggtgctcggggtaattgctgaatattggtcacaagtaagccttaaaggcagagtcaaaatgcagatcccaagctctgttggccagagggagtgttggcctgctgagggtacctataagtcttgcttgggaatggaaatggaattctatcaggagtcaagcacaccctttgtgagcattcatgatgggacctcggaaactgcttgtcagctctgctgcagccctggccactgtggcaggaaggaccggcgcctctcaggcttctcacccccctctcctctccttccattgcagtggctctgtagtgttgttgcgctccagtgcagcatattgaaacatttatctgctaagcagatgccttcgcattgggactctgaacagacagagaaggctgatattaagcctgttattgtgactgacagctcagtcaccacctccctgcaaacagctgacaagacacctacaccttcccactaccccttgtcctgcccctcagggattagcacccagaattccctgagctgctctccaccccaccagtccccagccctagaggacatcggctgcagttcttgtgcggaaaaatccaagaaaaccccttgtgggactgccaatgggccagtgaacacagaggtgaaagctaatggcccacacctctacagcagccctactgattccacggacccccggcgacttccaggcgctaacaccccacta

SEQ ID NO: 85807 - DNA, 1825 bp, Homo sapiens
cggcctggacaacaagagtgaaactctgtctcaaaaaaaaaggtcagtcacaccactgccatcaccttcagtgggtatcagcactagcaagatgctaactgttgaaaattgtataacaaacttaactgggcaaatatttatacatcagtggagacacaggttttccaaaactagattcaaatatttcggaaatggatgatattaaaggtagtatgcctcatctcagtgaaacagatctaaaagtaatccagactgtgtaattcactgtgtagatttgtcagagagcatagctgctgaagtgaacgggccaggagaccttgataaaaatccccttgttgtatggtgcccctcccaccttttaagtgtttctctagtgaggaaactcaaagggcatgagttacctgcaaagcattttgtacttggacagtttgagagtgaaatgaggaccgtagcaccatagaacattggtgaagaaccccagctctctcctggaacattagcctttacacttgattctagcaattcaggaaaaatctgctgagaactttgtatcttcgttgcgaatttctcttccacttagcccttcactcttccccaggggtatcctgttcttaccccaggggtagtggaataaactagtccactgtttattcctcctcctctcattcctgggtgatctcagaaagcccatggcaccagctaaggccatcaccagcccatggtgatgactctcaactccatattccatgcctttctccttatatccagactcatatctgcctgcccatcccacagatatctcaggatgaacctcctccataagaccagaagtcttctgcctctccacatctgctcttcctcctgtatctcctattgcagtaaataacaatgatcactactcagtccctcaaactaaaattctgggaaccattttcagttctcccttgtctaccataaggattttgtcaccaaatctgttggttctctggatgttttccaaatccacaaagtgctatcacatctctatgccttacatgcttctccccctcccttatttttcctttatctgcctggaagatccttctcaacttccaagtgtcaacccaaatactgacttcctataaaatcatccccaatcccaaattcctgtcccccaaactaaaataagcactatgtttttaatagcaccttagacatgcttctcttctagaacccattaccttgtgttgtaatatttctgtgtttatctccccactagactgtgagctccttgagggcaagtcttaacttttattcatctctggatctctagaacttggaacagtgcccagacacaggaggtgctcaataaatgttggttgaatgtatgaatgactctttgcttgtgtggctctttcattcttacatggtgtgattcagagtgtggcttctgtttttgttgcacaaagacgtctttagttgtttcatgagtcatgaatgaatggatgaaggaaactgacattgatggagtgcttatcatgagccaggcctcatgtcaagcatttttttttttttttttttttttttttttttgagacggagtctcgctctttcacccaggccggactgcagtggccctatctcggttcactgcaagctccgcctcccgggttcatgccattctcctgcctcagcctcccaagtagctgggactataggcgcccaccaccacgcccggctaatttttcatatttgtagtagagatggggtttcaccatgttagccaggatggtctcgatctcctgacctcatgatcctcccgcctcggcctcccaaagtgctggga

SEQ ID NO: 85808 - DNA, 1048 bp, Homo sapiens
ctttgtccctagctgaaccagaagaatatgacactgagcaatcggtgccaggtgtttgatcgtttccaggacaccgtttcgcagcatgtcgtcaaagtggacttcctgaaccgaatccacaagaagcacccccctaaccggcgtgtgctccagtcggtcaaaagaagaagcttgaaggtgagtcacaatcaggtgcaggcaagatggtagtctgcctgccatcatgggttagacagaggatcactgtcccaattttacaggcagggaaactgaagccccagaaataggtttgtggtgtctcgtgagtaatgagtgtgaccttcattttaatacttggggatgatggtcaggattatgagggccgaacctcaagttagccttcgaagtctaccagtctctagttttccaaaggataagcactcttcagcccatcccaccaaacccaaatgtgctctgttgttactgccaccctcacctaacgctcattctatctgttcctgttagatggcctctgtccaagaggcaaagtaaaggtggggatgattaagcagaaagagccatgtggaaggtgaagagctaatcccagctcaggaacttaagtggaaaatatctaaaggaaacttgaatctatttttccaggctgctgttaatatatcaccaatgctccaaattgtggcatagctgtaataatgcctaatatttatatgctcttgacattggccaaagtgtgtttacagagattgacagaaaaatttccctccttgaaaagcatttggtggtagtgaggatgtttttaaaccattcaatcccctcattcagttaacctagagggtccaacactatatacccatatataaacttgtttttctcttttgaaatgatcccacagtcttatgtgctaacagaaaccagcacttctcaagtatggccacttggtggcagccacattttaaaatcaatcacactggccaggcgcggtggctcacgcctgtaatcctagcactttgggagaccaaggcaggtggattacctgaggtcaggagtttga

SEQ ID NO: 85809 - DNA, 1035 bp, Homo sapiens
cactgcaacctccggcctcctaggttcaagcaattctcctgcctcagcctcccgagtagctgggattacaggtgcccaccaccacgcccagctaattttttgtatttttagtagagacagggtttcaccatgttggtcaggctagtctcagtctcagtctcctgacctcaggcaatccgcccacctcggcctcccaaagtgcagggattataggcgtgagccatcgcaccagccccatccatctttctaatcataaatgtaactgaatcactggaggaagataggggagaatgttaggatcaaggaggggagaatgttaggatcaaggaggggaggctgttccacaggtcaaagttagtttgaattttccttttcttgccacagaaatggccaacatctcttttttgcaggagttgccgtgtggctcctctcatccagtgtgactattgccctctcctgtttcacatggattgcctcgagccgccgctcactgccatgcccctgggcagatggatgtgtccgaatcacatcgaacatgtggtggtaagcacagcagtgtccattcagtcctcaatgggcatagctggagcgtggactgattagcagaaagcatattaaggtcagcttggtgccaagttcaccacattgtcataggtactggtttctgcaggccaccctactcaattctgatcattttgacatatttcagctatgctttttctcacaatgttttgtttcagctgcccatacagacttaactcactagtgcttggttgtttgtaagtgacttatagggaattaagcagttgatgttatagccctaaaaggggagtatattagatccaaccttaaggaaataaatcgttggctgtctggggtacatgtgtcccaggcaccaaatgaagtttagtaaataagctgttgaatgaataatagtgtgaaggtcctattgctttctcttccaagagtcttgggtttattttccagactgaggctagaaaagagctgtcacttgctatctccaaaagaagttta

SEQ ID NO: 85810 - DNA, 1089 bp, Homo sapiens
gtcttagtttttattcccaaagaaagtgaaattggtaggcttaagaaggatgcatatagaatcaaagcttctctgatttttatgaaaatgtgggccaggtgtggtggctcacacctgtaatcctagtactttgagagatcaaggcaggaggattgcttaaggccaggaattggagaccagtcttggcaacataatgagaccccatctctcaaaaaataaaaataaaaaagttagctgagtttgatggcccacacctgtagtcctggctcatatggaggctgaggcaggaaagttgcttgagcccagtagttcaagactgcaggccaactccacagaatagtccttgttgactatgtggcttggacatttacatttcttaggttgcctgtatctaacctagcatttctgaccattttatgtttgcaaaacagttagatgtgtttctgccatagaacaggtgacttctggttctgacttacgtattagtctctttttttttcctccctaatctttcttttttctaacttaaaatcaaccccaggggcctcagagagcaattcatgcttaggccatgacacatgcttaagatctgtttttgtcacttaatgttgtttccatattgcaggctaggaactctgaagccagggatagctcagcaccatcattttcttttctaggttctagcaagaggagaagaaaggaggaaaccacagggaaaaatgttaagaagacacagcatgaattagatcacaatggtctcgttcccttacccgtcaaagtctgcttcacgtgtaacaggtattttctttcatactaaggggctctttctcattatttagcagatgatactttttctctcatcacctcttccagaccatgtatgttaaatgtgaacagcccatattctgatagtatgagtacatggagactaactaatggactgacgagagccttgaatgtgtatgtgttaacaaattttctgaagaatcacagtacaggagtactgtgaactgtgttgaggccgagcacggtggcttatgcctgtaatcgcagcaatctgggaggccgaggcggtcagattgtttgaac

SEQ ID NO: 85811 - DNA, 1031 bp, Homo sapiens
ggtgattctctgatgcaacagttttgtcagctttagttcagttagagttgtgtcaactttaacagaccagtgttccaagtgaccaggtagatgagtctgtgatatgtgaaggccttttacagttttgattagtggtctaccaggactttgtagcacccatctctttgtttcatggtacttttcatgatgggcccacctgttcatttgcacagaaacgagagcagaaaaaggagctgggtcatgtcaatggactggtggacaaatctggcaaacggactacatcccccagcagtgacactgacttgttggacagatcggccagcaaaactgaactaaaggccattgcccatgcccggatcctggaaaggagagccagcaggcctggcacacccacatccagcgccagcacagagactcccacctctgagcagaatgatgtcgacgaagacatcattgacgtggatgaggaaccagtagcagcggagccagactatgtgcagccccagctgaggcggccctttgagctgctgattgctgccgccatggagcggaaccccacccaatttcagttgcccaatgaactgacttgtaccactgcactaccaggtcagccaaaccatcatcatatcccttcccaaccccagtttccccaaaggaccagcacaagagcagtgctgcctgtggagtcactgttcatgtagctactgtcttgggttcctgttcctagttctgcttggagagatctttgaaggtcttagccattacagagcttactcagttttccattttctcagtttctgaacttctttccttcccctcccccagaattatctttttccttttttttttttttttttttttgtgagtctcactttgtcactcaggctagagtgcagtggcacgatctcggctcattgcaacctccgcctcccaggttcaggcgattctcgtgcttcagccttccaagtagctgggactacaggcgcatgctaccatgcctggctaatttttgtattttcagtagagacagg

SEQ ID NO: 85812 - DNA, 1107 bp, Homo sapiens
gactgacctcttttggaagagaacctgcttagtaggctgttggtgtattgtatatggatatgctatttacatagtgttcctgttaagtatttgtattaaatagaattattttgttaatccagaaagagaaaatggagtgtactttttcttaaatatttttcatctacttgctttctctccctctacctctcgcctcttccctttgttctcttattcccccatcccccgctctcccctccaattccagactgagaaactgcttgttctggatggataattaacatggtgctgtggagcaacaggtcccactggtagcgactaaatctgaagtaaatgttaatgtcgtgcaggttcacatgtattaataggcgagggagatgagtgaggttagactcagatcaaccacactggtatatgacttgaaatagatcctcttaattagagcgccaagaaccatgacaactaccaacatcttctacttgcagtgttgagctgcagccttattagtgaatgcaaggcattctaaattaaaactgaactttaacctcgggctgagagttgggatcatctggctctgggcttcgatttgaatctttgaaacagaaatctgtcagtataggcattacagttagctgagggatgtatgtttgtggttttctccttgatgactccagaaatagactgatctagataaccttctcagcagtagagatgggccatttggatttgtttatgggagtctaggtatgttggagtcatgctgaagaggttggctttaggaattggtttgtatgttaatattactcttaacactttgtaggccctctaggcctcacagagagccacaccaaactgagaaacataccctccaattgaatgtacagtctctgaagatttagggctttactgttatgaacagctttataactaacagcatgtctttaagatcaggtagtggttaaaatagtgagctggggccaggagtggtggctcacacctgtaatcccaacactttgggaggctgaggagggcggatcacttgaggtcaggagttcaagaccagcctggccaacgtggtgaaaccccatctctactaaaaagacaaaa

SEQ ID NO: 85813 - DNA, 1123 bp, Homo sapiens
tgcaagaagtgtgtcacctggctatttcctttttcttgatagtctgttaaaatttggcaatagaatagtacccagctttccatacctctgagactcttccagaatacagagttggcagttgttggttcttccttccaatggaatgttcccaagagtgtgagaaaattaccgttgaggccagaattttgtcccttttccaaaacaggtgggctctagcatcaatcatgaggtgaattaatgaaggccctttttaaaatgtttgcaccccagcccatctttctttgtagagaagccagaattgcaagaatagccaaaccaggctagtgatagatcaggcccttgagactgaggctcagcttgtagaaaagttagcagaggcaaacacctggtataactgtcagtgctctaccctccctgcttccttttttccctgtactaactagtaacactcgtatccaggtgtcctttaccgggaagatgccaccagccagctctacatagaaggcgataaaacttgggggcacagtcagccagtttaaaaggattgtttgcctgtggaagtgacgcaactagctaagtttctcaatggggcatttgtaatgttctggcacttcatttgtttccttgttaacactctcactgaggctttgcatgagaaacccaacagtccttgtacctttttatgtactttgtggcattagtggtgtttgagtcagtagccaggatgaaggaggataagggattaaggttgagggaccctatgaattttctccttccatctctttaatatccttcaatatagctatcttcctgcaaaagacaggccatacttgaagagaaaagctgatgcccacacaagtgtccagaggaagctagctatttctgctgacatttacatttcattaaatgttgttccctcaaggcatgcactttaaaatttgggtgtattaatgcaacttttaatttaaattaaaatttaaattaaactttacccagcaccacttagcttttccaggacataagtttgttttcgtttataaaaggctggttctctgtgctcatggctccctttatagagcaaaatggctgctaggaggctgagacatgattgtggtcctttcag

SEQ ID NO: 85814 - DNA, 1035 bp, Homo sapiens
tgcccgcctcggcctcgcaaagtgctgggattacaggtgtgagccaccgcacctggcctatttatttatttttagaggcagagtcttgctatgtctcccaggctggagggcagtggcacagtcataactcacagtaaccttgaactcctagtctcaagcaatcctccacctcagcctcctgagtagctgggactacaggcatttgccactacacccggctaattttttcctttttttgtagagatagggtctcactgtgttacccaggctgttctcgaactcctgtcctggcctcaaccgatcctcctgcctcagcctctattttttattttttagtcttaacctagcaaaagatggttgatttaagcacactttaatatctatgcctatattagctctgtaatgtcagtaaattaagagtttcttccgtgagctccagttaggatggtacatcccagtgaagagaaccttacgatgtgatttggtatgttgttgtttcaacttttctgcatgtcctttcctagcaaagaagtctaaagctgtattgttgccttagaggaagtacaaaaaatccaccatctgcctttagataggatgctcacctgtcacccactagccacaacagaaaatgtctgtgtttgagcacttctcatacttggaggaccctagtttaagaaagaagatgttggctgagggcagtggctcacacctgtaatcccagcactttggggagccgaggcaggtggatcacttgaggtcaggagttcgagaccagcctgaccaacatggtgaaaccccatctctactaaaaatacaaaattagctgggcgtggtgatgcacgctacttgggagtcccaagtacttgggaggctgaggcaggagaatcgcttgaacccgggaggtggaggttgcagtgatcacgccattgcactctagcctgggcaccaagagtgaaactccatctcaaaaaaaaaagattttaattgtctcagttttattggttgtggtggaaataacttcaggtcaattaaaat

SEQ ID NO: 85815 - DNA, 1053 bp, Homo sapiens
atacttacattgctttttaatggctaaacaatattccattgtatggatgacattttatttattagttcattagttgatagacacttgggtagtttctactttttggtgttgtaaataatgttgtgaacatttgggtgccagttttctttgttgttggttttggttttgtttgtttgtttgtttgtttattttttgagacagagtctagcttcgttgcctaggctgaaatgcagtggagtgatctcagctcactgcagcgtccacctcccaggttcaagcgattctcctgcctcagcctcccgggtagctgggattacagatgtccgccaccacgcccgactaatttttgtaattttagtagaaacggggtttcaccatgttggtcagactggtctcatactcctgacctcaagtgatccacccacctcagcctcctaaaatgctgggattacaggtgtgagccaccgtgccagccagggtgcaagtttttatgtgcaagttttcatttctcttggatatacacctagaggcagaattgctgggtcgtatggtaactcttaacctttggaggaactgcctgttttccaaagaagctgcattattttactttcctaccagtagtgtaggagggttctaatttctccacttccttgacaacacttgttattttctgccttcttgattaaagccatcctagtgagcgtgaagtagtatcacattatggttttgaatcagatttccctgaaggctagtgatgttaaactttttttcatgtggttattggtcatttgtgtatttacttagagatctctattaagatttttgtctatttttaattgagttgtttggttttttaattgagttatgagagttctttatatgttgtaaatataagttccttgtcgcatatatgatttacaagtattcttccattttgtgggttgtctttacacttcccccatcttttatttatttatttatttattttattttacttattatttttttgggacagagtctccctctgtcgccgaggctggagtacagtggtgt

SEQ ID NO: 85816 - DNA, 1290 bp, Homo sapiens
ggtctctggactgatcccaaaaaatctgttaaaaattagaataaccagtacagctttacttttcactgacccatctttctgtttgagattggtaggattgttgtcattgacagagtgaataccatggggcatcagtaatcaggatgataaaactgactggtttcctgtgattaccttcttatggcattttgctccaaacagactgagggaccaaaatggtctgatagagaagtgcatctacctcggcagacctcagcatggtcccttcccgtcagacagatttctgtagcatttgcctccgcgtgttatatttggaattgttggccagctttcctctctctggtgttggcagcgagatccaaaatgaggttttcgaagaatgagagtaaaaaggtctctgtgcacaggcaaaactaagctcagcttggagttttgcatattttcagtgagtcgtaacaaaggtttcacacatagaatagaaaactgccttgcagaaaatgtttgatgtttgaagtggggttgtttgtttgtttttggatacagggtctccaaggcttgatcctagctccctgcagcctcaaactctgggctcaagtgatcctcccacctaagcctcccaagtagtgggaccacaggaacattccaccatgctgggctaattttttaaatgtttttgtagaaatagggtctcactatgctgcccaggcacgtcaagcagtcctctcaccttggcctcacaaagtgttgagattataggagtgagctgtcatgcccaacctgtttgaacttttaaggaggtggtttttctgattttgttgtgtttagctcctcattagaatagtatcaggcaagtgatagattaaaatatattaactttaacattatcttgtcagcatgttgtttttgacattgtaagtgcttagaagcctagcactgacgaactggaggtgacaacgtctagattccttcccctcgcccggccccatcaatagtaaaatgattctacagtaaacaaacctaatttggttttatgtttattttatttatttatttatttgttttgcattttctgtgttgaattagaatctaggtatgtcgtattgtctttgttttttttcttttttgagacagagtctcactctgttgcccaggctagagtgcattggtgtgatctcagttcactgcaatctccgccttccaggttcaagtgattctcctgccttacgtgtcatgttgtcttactggtccacctaaatatggaagatacggtaatgttcaattttaactcag

SEQ ID NO: 85817 - DNA, 1079 bp, Homo sapiens
gaggattgtgtgcggtggcactagaaaggcatttttaaggagctgagagctggaaagccgtacgctttttcccccttactggacatgagaggaggggagagaccgaaccgagagggagggacctgagttgatcgcccgctgcgtgatcctcctcagcggctcagcccaggacaatccggcaaagaagagtttaaactccatcttctgccggccgaaatcacctctgccctccacaaaaatcccacatctgcggcagcaaacccagatttcgtcttgttctactgggtctcgttctgttgttctgcaacagttgactgaggcaggggtttgagagaggagccagactggagagaggaaaagggggctgttctgtgttcccaccagttgtttgatgttgccttttttagccctctttttattttgttttaagtgaaatttcaccgaaggtctctcaacagttccattcacgttccatctctcggtttgtggagtagtgtctactgtatatttgtactaattgcaggtttgggaacacttattagacagatgactgatactgagcaaattaagtttatggtcagaagttatgtaggaaactcccattaccattcccaagatacttttgcccaggagggcaccccatcccagcttgtaaaattgctgggacaaaaatgattatcgtagaggaagttttgctgctggctttaaaatttttattatgaagtgactaagggtctgtggtttttagcctttacttcctataaggtgtaatccacctggagaagatatttctggtcacatttcttttgctattcttaggagaaatttgtgcctgaatatacgttgtgttgcttaccagttattcccagttgcttacatttttttagtgtgtttgtttggtatgtataccaggactgagttgtagacttcttgatttaaaatgtgggcttacgtcctactcctaggatgaaattggtgttaaccatgattgctgacatgcatgttgagtgagaatttgataagctctcttatttgataaagctgaaattgtttattagaaacctcaggcatgggaaaag

SEQ ID NO: 85818 - DNA, 1140 bp, Homo sapiens
ctggggggtactccctcaccgcggctgcgcgggagccaggccgccggctgtcactgcggttgcgcgcggcgagcgccgatcccggggcgcctgcgcgggtggctttgcgggcgctcgcggtaagtttgcgccaagtgcgcggcagccgggacgcagacggcggcggcggcgagaggcggagcccggggaccaccccccatcaccctccccccagtcacctcacgtaccacaacctcacgtaacctctcaccccccctccgatacccccagccccgggatggcagcgcccgccagccttcccggccggaccggctgtcgccagtgccggctttagcctgtgggactaggccccgccgaggcctgacccccggagccgggacccactgtgcagccagcagccgggccgggactgaggggccgctcccccctcgcggcccgtcgggaggacgctgtcgtcccggggactgggggccggggggtgggggggagccagggcgaggaagtcgggacccgtattgggaaaaaagcggggccggggtcaggagcgccccctcccctcacctcccccctccccccggggttgggggggccggagcagagagcacccagcccgggaggtggatgaatgtgggagaaaatggagaccaagacgatcgtgtacgacttggacacatcaggggggctgatggaggtaagagtggccctcctcatctccttcctccagcgccgggagggaacctccgccctccgccccacaaagccagtcctaaactcgaagcgcctagatggccgagggagggggattcttcctcacctagcctctccctcccctctttgcaatttagggggctgagctcagcctccgaggacgtttgcagcagtttcacctacccgccgccctcgattcgctctcccgaggcgccagcccactccatctcgttgcaccggcaggcctccccacccccttcttgttggcccctttgtgcttcccccagcacgtccgggtaccgggctttgggcctctcccgagcgggtctttggagtcccccactgtccatacaaggaagtggcaagaagggaaccgcgcaccctcttcccatccccctacccttgatcctccccatttggaagaagctgttc

SEQ ID NO: 85819 - DNA, 1036 bp, Homo sapiens
tcaagttaaaggagagcaaggaaacccctataaagcagcaagacattttattgcctgggttataaattggcctgaaggtatttcacacatcagctccaggatgacttgggccacacattgagtaccactggattaactactcaacttcatacgggggagactttgaagagaaccatagtcatttggaaatatgtggtctggtatgttttaaaataaaggtacaataatcaagttaaaaacaacttttcaatgacttgttgctttgaaaccacttaggccacccctggttaaccgctgcatcccttgggtgctcagccagggctgcatgagttggtctcaatcagcacttctcaaagatccgagagcatcgcagatgtaggggaggtgcaagggaagccattattggaaaagtgtgcacgtggctacctggagtgctgcaagctgctcccagcagggtctccccagtctcaaccactggttcattggttcggtttatgatgatattactttgtatctgcatggtccattgggatccttttacgtttcatttctttccagtctcctctaggacccgttttcttttttttttttagacatagttttgctcttgtcgcctaggctggagtgcaatggtgccatctcagctcactgcaacctctgcatcccaggttcaagcaattctcctgcctcaaccacggcctcccgggttcaagtgattctcctgtgttagcctcccgactaggtgggattacaggtgcctgccaccatgcctggctaatttttgtatttttagtagagacggggtttcaccatgttggccaggctggtcttgaactcctgacctcaggtgatccgcccatctcggcctccccctaaagtgttgggattacaggtgtgagccaccgcacttggcctgtttttttctctttctttctttcttttttttttttttgagacagagtctcactctgttgcccaggctggaaggcaatgtcacgatcttggctcgctgaaacctccaccctctgggttcaag

SEQ ID NO: 85820 - DNA, 1003 bp, Homo sapiens
gagaatttggaaagattgtgtgaatttttttttgtggggggacaggatctcactctattgcacgggctggagtgcagtggtactatcatagttcactacagcctcaaactcctgggctcaaacagtcctcctacctcagccttccaagtagctgggactacaagtgccaccacacctgatagtttttaaatttttgagaagactgggtcttgctatattgcctaagctggtcttgaattcctgggctcaaattatcttcctgtgcataatccttccccagattgtgtggaaatatttgaaggataaatggctcctggttgacagcacatgctgatatggctcttaacaggggatgcagtgtgaggggtaatggcttccatcatctctcttgttttccacttccagttctttctaccacactcccgaggaagctcccatggacaaagccggataatccgaaaggcgtacctggaagacttttacacccggatgatgcatgagtgctatcagatatgggcccagctggagcacgaggctggaacccaattgcacaggtgggctgtgggaggaattccttgaatcgtggggctctgcacctgcaggtacttttagtgtgtgaagtggcagcgccatggaacatttggaatgcaatgggagggacacaaggcctcaagaagtaccagatgcatggaagagttctgctgtcatggtggtcaccccacaggtccagctgactctggccaggctctgcgttgcaggactgggttcagaccatgtgtccaaggctagcagaagcagtactggaaagcctgctggcaaggcaccgtgtggcagatgcccagagtggacaggagtctgctggagtgtgtattttcaactctgtggaggcctctgcaactcttttagggcaggggttgagatagaggaggaggctgctttcaggaggattcttttttttttttttttttttttttttttgacagagtctcgcttttttgtcagg

SEQ ID NO: 85821 - DNA, 1040 bp, Homo sapiens
cttactactattgttattattctattattataagtcctttcttatggctaacctaatgtactcaggcacaccaatttatttggttcttttacttagcagggacacagagcagatacttcccattctcagaatggtatctgaatacagctctactacctttgggctaaaagccattctaattcctttagcttttactgattcttattttctaaatgattcatcatctgtgtggttcttacttttccccaggtttttctagaagaaccagcacaataccataatactactgatagatatgagcatacttaatgctatttgatgatgattaaaaaaaaacctttaggagttggcagttcaggtggttgtccagtgcttttcattctgtttagctgcttcctgtgacagcggcatactaaacatgggtgggtttgggacatttgcatatattctgggaacagacaatgacacatgtgtcagatcacaaggtctgaatcttttgtgatgtgtacagccaggatgctgattccaacagcaaaacccagctccctggcccatctctttcctgccccgccttctccctttgagtcctactgtctagctcctgacctgggctgcccctgcttagctgacagtatcagacaagatcacagccgtaggcagtacagctgctggcagaacctggtggccccctctgcagctgctgtttcttgtgtctgcgaagtgtctggcttgtcagccacatcccctccctggagcagtctttgttaaccaattccacctcggcccactgaacggaagatgaaatgcctagagctcctccaaaaccaacaaaggcagcagccattaccaagtccccattcgaatcccttccccaaggtgactcagagctggcttgctgggcatttttaacccacagaggggagagctgaagcttgggatgggagatggcaggtgcagggagagccgtctcctctcccaattcctccccactccatcctacaccctgtcctgctacagtaactggtggaaatccctgatca

SEQ ID NO: 85822 - DNA, 2392 bp, Homo sapiens
aggagcctgcttcactcatggcgatttgcaaggaaagaccctcagctgccctgaggcccagcaaaaggagcccttcctttgcaaacatagggtggttgcagggaccaacagctaagcagcctcaggtgacagcccacagcacctgccaggagtggggaaggctggaatgatggatggggctgtcctgtgtacacgcctgcccttcggctgtgggtgtgtgtggaaggccagccctcaccactcatgccactctgattgggagccaggtcagctatcaccacggcaaccacgcagaccctgaggagcgggactgccccacagcacgcacagacatcggagacgtccagatcctgagcagctttgtcagagatcacttacctgatctgaagcccgagcctgctgtcattgagagctgcatgtacacggtaaggggtctgggcagccttgctgggccccctcaccactctacagaagggaagaaggagacagaccttgcactggccaggcccgattgtttgacccctgacatagtgtgtgactttaaacaaacgggctcatttctgtgggtaggttcacctctaccagggagggtcctgttcgaaattattcctattcttcttcattaggaaactaggttatgcctggcagtcggtccttcactctgattcccagaagagctctaaaagattttctggcaagctcctccagttgagcaggccttagggacaaagagaagagacagatgtcaccacggcctaaggcatcttggctaaagttagtttacaaagattaactgaacacctactgtgttcgtagctctgtgcgagaagaaaggcagccggacaaatgaaaaagactggcacacccagaggggcacgggcatgcggaaagcatccttgtgcctcattccatcctttctggaaagaaatccagcccatccccttccagttagagcctgcagttctttctcttccctcgagcctcaaagaacacaaggtgtgactgtttctttctagaatacccctgatgagcagttcattctcgatcgccacccaaagtatgacaacattgtcattggtgctggattctctggtgagtctgagctggggggaatggggtgccttaaagctgacctacctcagtgccaggtgaaatggtattttccacactcttagctgcccagataggtgtgaagcctggacattgtaggtataaggaggctgggcagtcagaaaaggggtattcatggtgggaggccacttctggctttgggatgtgaccaggaggacagtcagccctgtctgggtaagtaggggatgtccagagagctcaacctctgtctgtgaagctgcctgagagtctgctcttcccttcctagggcacgggttcaagctggcccctgtggtggggaagatcctgtatgaattaagcatgaaattaacaccatcttatgacttggcaccttttcgaatcagccgtttcccaagcctgggcaaagcccacctttgacctctggccagaagcctcccttctgtgcacaggagccagtttcacagatggagaagatgtctcagatgaagggagtgtccctgagatatcatccttttcttctgcctcgcctgaatcccccataaacaccagatgattgagtctaccttctttccttggcccgctccctttttcttctgcctcacttgaatcccccgtaaacaccagacgattgagtctaccttcttttcttggccacctccccattcacaactactttctcgctcccagaaggttgatcagatattctacaatcacagagtagcaaggacgtttgagatgggtatatcagtaagaagagggcacaagaactggctctggagaccaaagcagttgttaaaaattctctttgctgggggccgggtgtggtggctcacacctgtaatctcggcactttggggggctgagacaggcggatcacctgaggccaggaattcaagaccagcctggccaacatggtgaaaccctatctccactaaaaatacaaaattagctgggtgtggtggcgcatgcctgtaatcccagctacttgggagactgaggcaagagaatcacttgaacccgggaggtggaggtggcagtgagccgagattgcgccattgcactccagcctgggcaaaaagagtgagactctgtctcaaaaaaaaaacaaaacaaaaaaaacctctttgctggtatatttgaagagcttgggatggatttgactaaatctgccccgaggagggtgaacaaggtgatctcagagatcactactgctcttggagttccttctcctaaagctaaggccagcctccatcacaaatgcccataaaatctggctcgtctttgatgaacaataaatatt

SEQ ID NO: 85823 - DNA, 1356 bp, Homo sapiens
gagacactggtccatcctttagctgtcaccaacaagctgaataaggctggatattttggaaggggagctgcagctggctgggggaaggggtggcactgagagaagccagagggaactgcaggcagctgtggggtgagagggggcattctgagcatcttagcttcccaactttctcggcttgggagctggtgggatcttattctggcccttctctgtgtctcatttgtctgtccccaccagtgataacacaataccttgctttacaactcatcacattctttcacctgcatccgaaggcctgcatggctcactccttctccttcaagtctgctcaaaggccctcctctgtgagtcctcctctgaccacccacctgaaaggtcagaccctcccccagcactccctgtcacctcctcatcacctgcctctgttttgtccccaaagcacttatcaccttctaatttataattacttacgtgaattgcctatgtgtctccttctcactggactgtaagctttgtaagaatgagatttttttttaggccaggcgcggtggctcacgcctataatcccagcactttgggaggccaaggcaggtggatcacttgaggccaggagttcaagaccagcctggccaacatagggaaaccccgtctctactaaaaaaaaaaaaaaaaaaaaaaaaaattagccaggcgtggtggcacatgcctgtaatcccagctactcaggaggctgagacaggagaatcacttgaatccaggaggtggaggttgcagcgagctgagatcgcaccactgcactccagcctgggcaacagagtgagactgtgtctcaaaaaaaaaagaatgagatttttttaaaaattgtcgtcaaaaacacgtaacgaaattgactatcttaaccacttgtaagtctacagctaagtggcattaagtacattcgcactgttgtgcagccaatctacagaactcctttcatcctgcagaactgaaaacctgtacccattaaacaaatccccatttcttcctcctcccagatcctggcaaccactatttactttctgtctctatgactcagactaccctagatacctcatatgtatgaagtgaaataataccacttgtgtttttgtgactggcttatttcacttagcataatgtcctcaagtttcatccatgtggtggcatgtatcagaattccctttatttatttatttatttatttatttttatttatttattttagacagggtcgtgctctgctgctcagctcactgcaacctccacctcccaggttcaattgattcttatgcctcagtctcccgagtagctggaattacaggcttgtgccaccac

SEQ ID NO: 85824 - DNA, 3122 bp, Homo sapiens
ttcatctctttggactggcttcctcgtaatatttcatagggttattgtgaagagtaagatagcctatctcacatgcctaggccgtgtcttacacataggagtactcagtgaccaaatcttgccctctgcatctctcactgccaccttgggaaaagctaagaaggtggttcttgccgcagaacgctgactcctcctattttggtttggggatagaactttaaaagggctagtaaacaaaggtcccttttcagcttaagtcagaattataggcagcagggaacatggaactcctgcttgcccaagttggaactctaggatctggaggcagggctgcagctccagggaccacgccgagtgtggggcatcagtaggagaggagccacactgggctgtgttttctccaatggtgttgaaacgagagtgcacttgaactgacggaggcagtggaggcaggaggagtacgggaaaggtggccccaaggctttgggagaaagaaaagagaaggtgaatggagctgtgagatgaggtcccctcttccctgttcagtgctgtgatcctgctccatcagggggaagaggcctcttcacatctgggatagctggaggcctccagagccagaggcctgatgaagactctgagttatgttattgtaccaagaaaggggcttttccccttgggccatcctaaaacaggtcttcccagcctctccttcctgagcctccatttcttgttagtagatgatggcatggtcaaagctgaaaattctcacaggcctcagggagccatcattaggggaaagggttcagatctgggagtatttgacagggaaagcgcctcctcctcagaaggaatctttttaggaatcactcgcctaagagagcccctaccctagacaagttgtactcaccagacctccagtctccaagccaatgtggttcacggactgcctgcttcagagccttctggggaaggactgaaaatgcagaattactgggttgtacccaaaagccagcgattcaaggtttctaagaggaagggcccaggaacctgcatcagattcttatgcacgcttgagtccgagactcactgctctcagcatccctttcctcggagctttaaaagcttccagagtctccttcctcttagcattttgagtatcttctaagtaagccaaggaaggtttttacttaacaatgtttggcttttggggagtgctctgacgcagctttgtgggcctccagaaccaaaggcgtgcgtgcttaatggtaggagtgtcatttgtccctaaccttattcctcggtccctgcagccccaccagctactggaagtcccttgcccctgatcggtcagatgatgagcacgaccctctcgacaacacctccagaccgcgatactcccacagttatctgagtgacagcgacacagaggccaagctgacggagactaacgcatagcccaggggagtggttggcagccctctcaccccagggcctgtggctgcctgggcacctctcccaggaagtggtggggcaccggtctcccccacccgactgctgatctgcatgggaaacaccctgaccttcttctgtcaggggcactttccaggctatgggtgtctgatgtctccacgtggaagaggtgggggaaagaggagtttctgaagagaactttttgctcctctgtctcaaaatgccagactcttggcttctaccctgtgtcaccgtgggcagtggcaggtggcctggcactgcatggagccagcacgttgacctccctctcagctccctgctcagggacggtggacaggttgcctactgggacactctaggttgctgggtccatggggaggattgggggaggagaagcagtgccttccctctcgtgtggggtgggggctctctcttcttggtgcctgctgtctttctactttttaatttaaatacccaacctctccatcacagctgcatccctgagagtgggagggggctgtagtggtagctggggctcccaagaacgactcgggaatgtcatctccatcttcacccttcagagagcagtcctttctctgtgcagctggagacgctggtgaggagagccgggtccaggttcttaagaatgaggtgcggaggggctctccggtgctgctgggctgggttgagcaagcctacgcagacaagtgtgtgtgtggaccatccgcacctccagcccccaccccaccctctttgtctcagcgtgttatgtgcaatgacctatttaaggtaaacccattccaactacagcagttcagggctgatccaagcactgcctccctcctgctctgtccaggtggtctggaccataaactcaacttgagagggaaggcttggggttgaggacttgtgatcagaaaaactgaagatggaagttttggccggtgctcattagacatgagtcctcactctgtgtcctgagcccgtgtcattcttccaacctccctgcccccacacacttatcccagacacaacaccatgtggtctggaggtcccagcccccaccctaaaaaggttatccctgagaactccaccagacttgggagcccaagtgcagtgcctggtgctgctcccatctgccgccccccttctctcctgcaattggtttgtactcactgggctgtgctctcccctgtttacccgatgtatggaaataaaggcccttttcctcctggctgcgccagttttcctgcctgttccttcaggctcaggcaaagtctggattggtcctgggggtggtgggcagaggcaggattctgatggggaccgtgagggcatcaccctggtctctggcctgctccccaaagtgtcagaccagtgccacttaaagagcctaggcagctcattttggggcaggcagaggtagtggaatgaggggattggccaaggaagacacaagccccaccttttatgtgaagagcctagggactgtgattcaggttagcaagggtggcagagactccaagcctcatcctccctagcctccacaagggaatgttgaggtccctctgattgttaaatctcaccaattacagagattctcttctcttctcttctcttcctccttccgtccctccctctctccctctctc

SEQ ID NO: 85825 - DNA, 1134 bp, Homo sapiens
ctcagcatcaactggctttggggtgggggcatgggatggagcagtcacttagcttcccatctggtgatgaggaccagcaagaatttgcaacaggaacgcagcttccatagcaaagtcaaggggaggggagctgccgccctgggcttgcctggcaggaattagcttatgtaccaaattgtttgtgacagtgctgagcaggagacgctggcttgtgaggaggaaggcttttttaaacaatttggttaaaatgttcaaattgccagctctgactcttgccctggagaggagggcagcggcctgctgttgactccctgatggctggagcagtggaagccactaagaatggctaaagatcacccaagctacgggcaagggcaatctcgtgggtccgcagcccaaggcagagagagacatggagtttaccacctccccggcagctcctgccactgcccagcgtcttgatgaaacagtatggaaacacggctgtcatttatccaggtgtctgcctagcaggtacaggaatgtgggcttggggactggagcccccaccttaaaaagaggtgaggcaatggaaaggaccagaggggccctgattcagcaatttacagtgccttggagctcgccagcagcacctcatttgcatctggattccagccctggcatctgcctcgccccgctctgctcacaaagtaaccccactgtctttccacaaagccaggcactccttagcctaacggcagatcctagccctgagtgcccagaaattctatgtaaagaatgagaaccaaaccaggctcccactaatttagaattcaaacaaccccaaagctaaaataaccccaatttttttctatattgcatagtcatcagtgagctttataattttgtcctagaaacccccccagagtccctaagtgcctttggcctatcaaagtaagactcatttatgttcagtctagtttgtgttaaatgtgttttgtgctatcctgattcctttaaaaatggtaattcattcatgagaaatacgataactattaaccagactgccccattcctgaaccattttgcataattgaacatgtattctatcagcctcttcctttcccccagggatagagaccgacctttctttac

SEQ ID NO: 85826 - DNA, 1039 bp, Homo sapiens
ggctctgaagctagagagggaggttttttgcacaggtgtataaatcaggtggtattggtgttccatggggcccatgcaccacagtaaatctgccaggctcggacgggcacagggcttgcattagcagtttcgaggttgtctgctaaactcctgtttacccggggcatcagccagcctcgtctttgttataattctgtatttgatggaagcccataaaacatgcctctttattcccctctctatgagttgggctctcgcatggtccccagaacaatctgctggtttcgtgtgtgtgtgtgtgtgtgtgtgtgtgcgcgcgcgcgcacacatgcctgtgtggctgtttatttaagaacataattcaggaatggagccattcctcttgacacagaggaaaggaaatttatatcgaggagaaaccctagcctatccatagcagggcaacttggtgagcagacattctgcagaattttagaagcaatcttactcagaagctatctccaagcccagctgcttcatgagggggtggccatgactccagcctcagaattggactcctttgggctttctttcaagtgctaaggtcagctctgcccgatgaagcactgtgagcaagggctgggggctacctgaggacggaagaggagaccttgagcgacagggctctggtgtgggactttctgagcccagctgggtctccagggacaatttagatactgaaactgttgctagtccctctggaaatgctgatgccccccgccccccgccccttttcctttctctgtttcttaagagccagagaagccacagggtggatctgggatgtggcctgggcctccttaacctagagcccaggttggtgctgccatccactaaggagaccttcaggttcaagctaactccaaatcctacgaagcccttctcttctgctctgtggctggcagcccagctcttgtaacaaaggcatggaaattgacagcagctatagccacaatctgaggaatggcagacaagaaacagcagagtaggcctcaaggag

SEQ ID NO: 85827 - DNA, 1049 bp, Homo sapiens
tcccactgcctggcaggagattcattaggcttagagagatgctctctgcttggaatctgatgattgtttagtctctcctaattcagaactccagcaaagccatttacctctgagcacaggatctagcttttggggcttctgggttcagagtccctgcgggaagccctgctgacctgagaggactctacatgcagtgtcaataccgacaggcccaccaggctgtacccagaacactccctcagtcttggtgtagtaataatgataatagcacctttcatctttcagagtgcattcacattcattaccttattcatcctcagaagacccctgggggttaggtgttattctccccacattttacagaaaagcaagggaagcttcggggttgcttgcccaggtagccaatgaacggtggagccagagctcgaccccaggcctcctcacccagagctctgccacaccctccctctgcctggctgatgggcctgcctgctgtgtctttcttccccacctacctatccagagcctggctagccgtctcaaggaaaacatggagaagctgactgaggagcgggatcagcgcattgcagccgagaaccgggagaaggaacagaacaagcggctacagaggcagctccgggacaccaaggaggagatgggcgagcttgccaggaaggaggccgaggcgagccgcaagaagcacgaactggtaatgccccctgtcccccacggggcccacatggcagccccttgagtagctgctgagtgtatgcctcactctggcctggttgaggatagggtgcaaagaaactgcacatgagtcagagaatgggagggaggaggagcatatcaagagggcaggccaggaagctagcggcactggagactccctcagatgaggcttggaccccacagcccagcagcaacagagcggaaaaggctctggcagcctgtgtcagccctcaggtagcacccccatgaccggaaagtacttgaagcaggcttcttctggccatctaggggagaagctagccctcctgcaaactggg

SEQ ID NO: 85828 - DNA, 1031 bp, Homo sapiens
gggactggctgtcggggctggatgcccagggagtgggcagtcccagggaaaatgagagtctaagccaggagaccttcgcagacttgaggggtccttccctggggcctgaagggggcagagtgcacgcaggccagggcctggactgatagtgccaggatgatgggtcatttgttctgggcagaccttttctgccttctcattagcctcaaaggagctgccaggaagcagctgtcattcagctcagaggcccagggtctgcctgtactgcacacagccctttccctcatctccctggtccagagcgggacaggcagctccttgagcatcactagtcctgggacccaccccagcaggcaggctcagcccattatcatcttctctacaatgcccctgccattggaggcagctggagcccacaggcacactgggcctgaggccctctgatctgtctttgcctctctccagctggaggagcagctgagccgccttcagcgtgagaagaatgagatccagaaccggctggaggaagatcaggaagacatgaacgaattgatgaagaagcacaaggctgccgtggctcaggtacccctgccaggagtgcccgtcacactctgcaccgtcaccatccttgtggtcctcctcatgggtcccccgcacaaccgcttgttttgggaggtgatggagtgggaacctcggtcccctggtgttccagctgggctgggctggttgaatgcttatgggggatcctgcttctgatgctctcattcctttcccaggcttcccgggacctggctcagataaatgatctccaagctcagctagaagaagccaacaaagagaagcaggagctgcaggagaaggtgaggaccaggggctccctcaggagagagagagtgccagggtcactaggtgtgggaggaacccccaagttcacagtttagaaggcgcttttctctgccatcagtaatccacagagcagcgtaaatgaggagcaagagctaggcttggagccatgtcaccataacagacat

SEQ ID NO: 85829 - DNA, 1005 bp, Homo sapiens
gaggacaagcagaaggttctgcgagagaagcgggagctggagggcaagctcgccaccctcagcgaccaggtcaggggatgctccacccaccaagcctggccggctccctgcccatgcggcctgaggagtggggatcctagggatggggagccacgaacagagctgtcgggggtgggggtgctgcaaagagcccatcgtcatcccttgtgggatgggggcatcaccatacattggcacacccagccctttatcgctggttggcatgaccctggctcttccagcatccttatggggacactgataatgaggacgtggtgaggagggagcttggggaagataggaggaagccctgtgcagagcccagaaccccaactgctggtgcccacccaggtgaaccggcgggactttgagtcagagaagcggctgcggaaggacctgaagcgcaccaaggccctgctggcagatgcccagctcatgctggaccacctgaagaacagtgctcccagcaagcgagagattgcccagctcaagaaccaggtatccacagagagcacacggctgatccaggcacaacagagcttacctttccattctctttctctctctcgctcctctcagtggttcttgagtccttgggaaggaaagtgacaggaaagaggggagagccacgtgtagcagctagactccccaggctctgcgtgtgccttactgtctcaccgcccagcctgggatggtgtggatggggcctggtgcccaccagccatgtcacgggaggagatccccacgcgtgcaccaccacacagccatggccctggggtctgaagtgaatggaggaggagaaggagggcatccgagctccctctttcctgtacagccctcctgcccccaaggaatggctgacatctctccctggggcgggggtggtctgtgtccagctggaggagtcagagttcacctgtgcggcagccgtgaaagcacggaaagcaatggaggtggagatcgaag

SEQ ID NO: 85830 - DNA, 1592 bp, Homo sapiens
gctgcatgggtccccccacccctgcttgagtcctgtccatggcaccacctcctgacagtgtctgtgtgggggaccctggctcttccccatctgatggagccgccacactccctcgcaggtttgacagtgagctctcgcaggcgcatgaggaggcccagcgggagaagctgcagcgggagaagctgcagcgggagaaggacatgctcctcgctgaggctttcagcctgaagcagcaactagaggtgggtagggccacccaccatctgtgccctgtccccctcacaacctggggtcagccctgcaccagcctcatctcttttgctccaggaaaaagacatggacattgcagggttcacccagaaggttgtgtctctagaggcagagctccaggacatttcttcccaagagtccaaggatgaggcttctctggccaaggtcaagaaacagctccgggacctggaggccaaagtcaaggatcaggaagaagagctggatgagcaggcagggaccatccagatgctggaacaggtacaggagggcttggccaagggagaggtgaggtgcagcgaggccgccaccatccccacagccagcctcaggcatgggccagaggatcctgcctccattcattcgcgtattcactcactcacctactcacaaaatgtggagtgagcacctgatctgtgccagccacagtgtgaagacgcgctcgtggaactttccacaaaaacaaatctgatggagctctagtagggaggggctcaggatgcatggcagctgagggccacaggcccacccagcctgctacccagccaccaagtcagttcagggagctagagcctgcaggcagacggagaagctgcaggactgtccccaccccagctgcctctctgtgggcctatgccagacctctagtaagggagttcagctgctctggagaagctgctgccacgggagcaaggtgccagcaaagggaactggctggtggacgttctcggcccctgagcctagggagagccatgcacaggtgggaagggggtggccacagctggggagggaacccagaccctactccaaccacctccaggccaagctgcgtctggagatggagatggagcggatgagacagacccattctaaggagatggagagtcgggatgaggaggtggaggaggcccggcagtcgtgtcagaagaaggtaaggtatctgagtacttacctgtccagcgtaaacacctgttcccatcaccgctttaaagtaaggggctttccacctccctacctcagccacatcgtcttccattgtcattctgggccaggaagcgcctctcgggatcctagcattggcaggatgtattggctcagagtctgtagagaagcttgggcccctgaggaactatcgctccctgctttctgtgccaggggcagccccctgtgcccctgctgtgctgcgctgcactggtgctgcctgcagtcagccagcctggccgggcaggtctccaccatgcggcaaggtctctcctactctgtcttggctagccaccgcatgtggcctgccatccctcctcaccctcccaggctgctttgaaacc

SEQ ID NO: 85831 - DNA, 2577 bp, Homo sapiens
acactgaggaagcccacgcaagtgcatgaataacagactgtctaggaggagggaggggaagggccaagggcctggagaaagccctgcatggtgaggggaggcccaggcgggctgcctgacagaggcctctctccacaggcagtggaggagctgctggagtgcttggatctggagaagagcagctgctgcatgggcctgagccgggtgagttgtcccacaggagggcagtcgggcctcactccaggggcccctgtcaggtggctggcccactcctcctgttctctttgctcagccagacatcaccagtctcctggtgccctctgagtcttgcccccagctccaccccgcccagccactcaggggctgcccccttcagggccaggggccagggagctagaggtttcagatgcagcaacctggctttccttcattctggataactggcttgttcagtggaacacctctgtgatgtcaggagagagtgggtggaaggtggccctgaacttgacccgagtcctggtgtggggagtaggggagacaggagggctggacccagaggatgtgggctggaagaggcaggaggccttgggtagagcccctgtggagagttatctggggctgctgggttccagagagcaagtaggacatggtgaggctgtgccaccaccacctgcccacaggccaaattcctcatctgaatggaacgccatgcgtaaaatgcaggcacgctggcccctgggtgccagtctgccacgtcactcctcaccaaagggtcagctgagcattcctcccacaggcaggaagccctgcatgcccctctcttccgagcctgggaagcttggacaggtggcacccgcatgtgtgccccagggccagggtggaagggaggccagtggagagccagagagggttctggaccagttgtctgccagcagagagggaaggaactctcggttgcagggccccgtggggcgtgtgcggtggaaggaggtgcttgcagaggcttgagtctcacttgtcctgtgtgcttggtcctctcggccctgcatgttgagtcactttcctggctcctcctgcccttcgtctctgtcaatcgctcccatctctgtgtctttgcgtcttcccatctttgcttctgctgtctctggctttccctttggccccagcagtccctgctggtctctattccttggtttctagttctgtttttctgtttctctccttgttctctgtgtctttgtgtcccatccactttctgtgtcattttctggtttgtgtcactgctttgtctacctctgtgtctggttcagctcttttctctctctctgttcccctcctcctgcttttttaagctggggctgccagctgggcccctgcctagggctatctgctgtcaggatttgcttcagctgcagggtctctccctgggtccactcaccctggtctttcccgccaggattcctgcctctcaagcaggctgagctgctgctggctgccactggggatggcacctcctccagcccatgcctgggttcccaggcctatcttgggaagggcaggaaagggcctctacaagctgatcctcttcccagctgccatctcagaccttctgtcatcctgagccatgccaggtgcccggctgaggcaggcaagccccagggcccactgtcactcaagggcagagctgggtcaacattgggtgcctgctcacatctagtttgggaaagaaagttcaggtcgtctaggctctggttaacactgactcatgggcgaggattccctgtgtgtcacattgcttcagaggaggggggtcttcatctgagccatgggaccctgagagtttcaataaggactctgggggggctcagagcctcctgacattgtaaaatttgtatgaatgtgttttctggggaggagatggccctgagctttcacccaatacccaaaaggacccttaaccccccaaatgttcaagagagatttgaggctcactgctttggcctctagaccattctttctcttctcattgtgtctctgagccattatccaccccccactccagcacctcacttctgccctggtcaggtggctatgtgtcctaaccaagcgtgtttgctgtcctccggcgggacttggatattccttacccccagcaggatttcaggcttgcacattatatgaaattaagcagctgggggccaggcgtggtggctcacgcctgcaatcctaccactttgggaggctgaggtgggcagattgcctgagcccaggagtttgagaccaccctgggcaacatggtgaaaccccatctctactgaaatacaaaaaaagtatctgggcatggtgacgggcacctgtagtcccagctactcgggaggctgaggcatgagaatcgcttgagctcaggaggtggaggttgcagtaagcagagattgcaccattgcattccagcctgggtgacagagcaagactctgtctccaaaaaaagaaagaaagaaattgagcagccaggcacagcagctcatgtctgtaatctcagtactttgggaggctgaggcaggaggattgcttgatgcc

SEQ ID NO: 85832 - DNA, 1079 bp, Homo sapiens
atggcggctgtcaaaaagaagtcactgtgcatccagatgaagctacaggtggtgagtgccagccgggtcccagcaggcaggcctggggacccttccttacccctggtaggcaggcctggggactccgagcacactgaggccatctggtgcccactcagcgtcccactgtgactcaatggctgcaggtgggggtcttcttttcagtgctgccacctgtgagtggccaccgaggcccggcgagggcagagttgtccaggtttagcatgtcctggctggtgctggggccgctgctaccctgtgagcagtggagacgctggcaccagtccctgctcttctgagcacaggccatcagagcccactgagggcagtctcttcccctcggcaggacgccctcatcgacaccatcaagaagtcaaagctgcattttgtgcactgcttcctgcctgtagctgagggctgggctggggagccccgttccgcctcctcccgccgagtcagcagcagcagtgagctggacctgccctcgggagaccactgcgaggctgggctcctgcagctcgacgtgcccctgctccgcacccagctccgcggctcccgcctgctcgatgccatgcgcatgtaccgccaaggtggggcctcctttcctctccactctgggctctcttttccagagctggccctgcccggccccacctcccacctgcgacccgtgggctgcagtggggctgctcctgtctttcctcacgatcctttctgctctggtctctcctcatctctcccagcccacagcccctttgtccatttccttccatcctgcagagtccccgcctcctcctctcccttccatattcagttctctttgtccccctcccttcctagctccaccctgcaccttgtcatttgtccacagctccctttcttcccacgtccctagtttggacagttcagctttgcccacagcagcaaacccagtgccctttcggagccatctgcccagtgagaaatgaggtgctaaatctttctgaagtacttaaaattcccaagaaaggtcagacagacccttttttatggacccatct

SEQ ID NO: 85833 - DNA, 1064 bp, Homo sapiens
tgcccaccgtggggtggggtagggtgggcttgctacctggggcctccccagaccagttttccccagtcctcttcccttctccactggttgggtagctccgtatcttcctcttgcatgtcagggtggcggccactagggggcagcaggcaccgtggtaacgaatgggctgcagctttggcacttgcgctcggggacttggcctggcttggaggagctctgctccatccttcaagatgacttacgttggaggatggcgattcgagcacctcttcaccccctttttctccagtttagggaaaggggatgctggcgctgaacagcaccttgggctttggctttggccccttctgggatgtgaagggccccaggctgctcagctggagtgagaaagtcctggcaggtggtgggtgtatggaggaatgggtgcccaggcgtgaggctccatgcgagcgaccccaagaagtggcatccctgcccaggaggagccaggctctaggttagagaagttttctcgagaatgtggaggacagacaggcgggcaggcgtgtggctgtgtgttgagggaagttacttcactctgaggcggtgacaagcctagctttcctctaacctacccagccccaactgcaagcggaaagctccgggtgtcagcacagcgatcttctcaaacaatgtctgttagcgcctcagagcttccagtgttttccggcggggggggggggggggggggagggtgtgtttgcgcacacacacatgtgcacaaatgtctttgcgggtctctttctgtgtgtgtcagtgtgattacacccacaaacatactccctggagactgtgtgtgtgtgcgtttgtcccaagtctgactgtggttgtgttttcttgcctactcatcctcacaacacccccgccccacggtccctccgaggcggcgagctctattgatgactgtttgctaacacactgtttttctttgcatgctgcatgctggtcctttgccttacagaagctgctgaaggtaaaaccttgtttcttgttagctttccctaattgccgtgattagacacatg

SEQ ID NO: 85834 - DNA, 1010 bp, Homo sapiens
cattccttgcccagtggcttgtctcaaagcccatgccctcacttgtctcccctctacggctgtccttgtccctgtcttccatagcagggcctgtttattcttctctctctctgacaggcgaaaacagaagaacagattgcagcagaagaggcctggaatgagacggagaaggtgtggctggtccatagggacggcttctcactgggtgagtctcagagggtctgggggcacatgtcaggactcactggtctcagggctgggcagcgaatgtgccttctgcatctggtgagggctgagcagtgagcaaggagaggctggtgatgcagtgggggggaggataggaccgagaagttcccaagtggagtagcagaggcttcccaggcccatcccagctgtctgtccctcccctgcagccagtcaactcaaatctgaggagctcaacttgcctgaggggaaggtgcgtgtgaagctggaccacgatggggccatcctggatgtggatgaggatgacgttgagaaggtaggtgggcagggggctgggtgtgggggaggaggctcaggagtgcactgggcagggcaggcccatcctctggcagcggagatgggctctgctgctctaatacccacccgcctgtcctcccacacaggctaatgctccctcctgcgaccgtctggaggatctggcctcactggtgtacctcaatgagtccagcgtcctgcacaccttgcgccagcgctatggcgctagcctgctgcacacgtatgctggccccagcctgctggttcttggcccccgtggggcccctgctgtgtactctgagaaggtgcagcaccctcaaggctaccctgcagactcctggtcccaccccctgccctggctctctgcccttcccctgtggcaccccactgggctcctgtccactctcacagttgaccttgggaagaggagtcatttcaagagatgggggacaggacctccccacaacctttgatggagtccaggacttagt

SEQ ID NO: 85835 - DNA, 1029 bp, Homo sapiens
gcaacaacgtgtaacaaacattaatatttccaaagcaaaatctatgaatattcacactacaggggcatagaggataaactgccaggttttgccgccaaaatagttaagaaaaatattttgtttgggggggcttttgggattttggaattgcaaataagggttaataagggttttaagtaaccagaagattagaaatgatacagataatgctccaagccggtccctggcatggtgggtgctccataaatggtagcgttgatagtggtgctaataacagttgttattgatgccctcactgccatcactgccttctttaggcctggccagcatgaccatctggcagcaggactcttgaggagccctgtgcttggatggcagatgggtacagtgggccccttgggatataggggcaaccctatcttcccagaaagtgttctctgggtggggcaggaggctgagaagcaggagggagggtcagtccagcctctttcccttggaaagtgttgccttcttggctggcctctgagttggggacagttctcttcaagcttcccttttttggaccctgctgaggcctcccagggtgtgggagaggagcatcaagttttgccactacttccctgtgctcatgcaggctccttctggctggaaggagaggggtctggagggtatgggggaatagcctgagaggccttgaggccctccctgactgttacctcctgggacctggggagccttgttgctccccattcttcctgggcattgcagcacttagagaaaagccagccgccgcttcccccacccacctggcccactctgtgaatcagggaagtgcctgttcctgctcacagggaggagctggcatgggcattttgggcagggtatgggcagaactgttggtcgctctggagaacccataagcaggtggggagtgtcgtggtcctgttcccgggcggctgccctcccctccctcctccccgtccctcctccccgtccctcctcctctcacaagggaggagatgggagctg

SEQ ID NO: 85836 - DNA, 1014 bp, Homo sapiens
ttaggcctgggattggtggtaggaatggaggtgggactcggctgtttgacctctccatgctccatctctgctgtgtccatgctccatctctgctgtgtctgggctgcgaggcagtgggctcacctagaatgggacttggttgctgccctgacacaaagccagtaaccccagagcacctcataggcctctcggcgctctgtgccggcatctcacaggtccatgctaagtctggggatagacagcaggtgacagtagtacctgattgtgctgattgtgctttgtgggaaagaagccagactcttagctgcagttgtcctatttgtaagatggaaagtgggcttcctggggtagcctcgtggagccatgtgttgcttggtagatgaatgggagatctgttccagggcgtgaggtcacaccttcttattccctctgcatgggatgggcagggctgcaggggtgatgctaatgtctacctgtatttgtatgactgtagctagagggcagctcaaaggaaggcagtggcccatctaggagtcctcagcctcccaccagcccgatacccccagagacttcccagagagccaggagccctgcacccacactcgccatgaacggcccgggagctgccacagcagaaggcctaagcgaagaggcccagggcctgtcccggaagcgggtggcaaatgcagtgaggaaggtggtgagtaaggtgctgcccagcgaggagcttgggaatgccaaggagaccccaggcagaggagtcaagtcccccgagcacccgactcgaagcaagaggggagaaaaggcagcttctagtcccaagccgccaccccctcccccacctccccctgctccgcctaagcctgaagtgaagaaggaggcagccaaggatgagctctccctgggcctgcggagcctgatgtctcggggcaggggcaaggagcacaaggcccgcggcaagcagtcttctgggaagggggagaagccctccagccaggagccaggctccccaga

SEQ ID NO: 85837 - DNA, 1076 bp, Homo sapiens
attacaccaacagacaaacttaaagtctctagcacattaactgaataataaaacagaagtcaacaaagcaaaatagaaataattaattgaaaacaaaacatttcctaatttttaactattattcatgataagcagttttaagaatgaaccagttcttggccgggcgcggtggctcacctctgtaatcccagcactttgggaggccaaggcgggtggatcacgaggtcaggagatgaagaccatcctggctcacacggtgaaaccctgcctctactaaaaaaatacaaaaaattagctgggcatggtggtggacacctgtagtcccagctactcgggaggctgaggcaggagaatggcgtgaacccgggaggcggaggttgcagtgaggcaagattgcaccactgtactccagcctgggtgatagagtgagatgagactctgtctcaattaaaaaaaaaaaaagaaccagttattaaactccactgaagtgccctgattctttggatgcagcctctccctggactgaggcagattctgacttgatttttcaagcggcccagctctggtttctaatccatagatggacagttttgcagttctccgggcctcttgccccacgtaattgtgtgttacagctggaaggcaaagtcgctggggtcctgaggcagattcctcaattcctctcctaggtcacaggcctgcaactttggtttactgtattaagggtttgagtgttggctgggcgtggtggctcacacctgtaatcccagcgctttgggaagctgaggcaggtgggtcacctgaggtcaggagttcgagaccagcctgactaacatggagaaaccccgtctctactaaaaatacagaaattagccgggcgtggtagcgggcgcctgtaatcccagctacctgggaggctgaggcaggagaatcgcttgagtccgggaggtggaggttgcagtgagccgagatcacgccattgtactccagcctgggcaacaagagtgaaactccgactcaataaataaataaataaatagagtttgagtgcctctccccacgtagactcctaaggt

SEQ ID NO: 85838 - DNA, 1049 bp, Homo sapiens
agagtgcaggttaagggcgggtaggctctgctggcatggtggagggtaaaccccagctgctcccagagtgtcagaagcctcctggggctgaggcttgacagtccctcagtacatttcttggatttctcctctttgagaacaaatgcttctagctattatctcctttgctttttttttgactatttagccatcttcacaataaaaataagcagtaagtaacaaatacataccaaaataaataccaggtgttcatgttgtgtctaattcacacagtttacaagattattatgatcactgtttgtatactatttgggttccagtttttttgattgatgtcattttatatggagctttccatatggttacattgtccacacatttgtcagtttaaatggcaatacaacaacgggttgtacctaaccatttcttaattctaggcatttgggctctttccaatttggagctgttatatagagtgcatctataaaaatctttgcgttttttttctttttctttctttaagtcagctcactggacatacattcctgaagatggaatgggtaggccagaggatgatgcattttgtggctattgttcacgaagagctactaagcaatttcagtgtccttgccctccctgcaaacccaggcattgagttcactatgtatttattgtgagcaggtttagagattatacctcccttgtttgtaccatgtccctgggaatcagaatgggcaagtgttgttctctgtagtttatatttggggaagagattagatgggaataagaggtttgtgcaaagaacccctgtcccagcactctcgtgcagctaacatttattaagcgcctacagtatgatgagtaagatgggtaagttctgctcagaggtgaatcacagtccagggatgacaaagacgcacaaacagctccccaagatacattctggttgtggctcccagctctgccacttaatagttgcagcgctctcggcaattcaccttctttatttccttatctagaaagtgtgttgttatgaggattcaatgagg

SEQ ID NO: 85839 - DNA, 1071 bp, Homo sapiens
agcatccccagggaaggggggcctccagcaggttcagtcgttggaggaggaaaccaagacccttctgcaactgcagttgcggcaggaagccattccagtgcacctgcttcctctgggctggcctgcagtgaggcgggtgcccggctgctttctgttccgccctggggctggggagggctctggctggaggctggactgcaagggccaggttgtccctgccaagctcatctccccctcccccgctgtctggcagcatggccttcagttcattccttagagagcttcccttcctctcaagcagttccacgtaaagcatattcaggttggtgggtggaggggcgggtcatcattgggaacccctgctttcctcccaagctgctcttctggcagctgatgtagaaggacaacagtgcaggtgaaccaggggaaatggagggcagggcgtgcctccatcccttaaagtgagcagtggagggctctcgcaggagacctgagtgtgagtcccagatctgccacttgctgctgtgaggctttgggcgagtcacctgaccttctgagcctccttttgctcatttgtaaagtagcagtcacacagtcacactagtatctatttcagagggatgttgtgaggatcaaatgagatgattcatgtgagggattcagcacagcacctgacacataccaaatgctcaataatgattaaccgttttttactattatgctagtatttcttcccttctcctttgttcctgccacccttcctcgccctcaatccctagataagttggtgctaggttgggactgggaggaagaagtctcctgggagctgccctctgtgcctctgaatgggaaagagggaggagaggagaatgccctgcctcttggtcctcagaaggagaagcctccggtgtgtgagtgctgtcagaagcggcgaggcgggaaagtgacctcggccaccagctacgtctcagcttcctttgggcactctcttgagagttacctgctgctctcgggggcttgcagtgtgcagatgtctggtgtggatgcttgggcctcaaagcatttgtccag

SEQ ID NO: 85840 - DNA, 1082 bp, Homo sapiens
tagtggctgtcttggcctctgccgcagtaattagatggctagggtaggcctatgatttgggtgttctcaagaacactgtgttgattgaatgttcgtgcatgctggtgtgtgtgtgtgtgtgtgtatacgtgtacatgcacatgagtgcgcatgtgcttgtctcaagcttggcctgtggggccgggggctgcaggtctcaaattcctctgctatttttaggagccatatcagcccagctgtcccggagctggggtgtgtgtccataggcaagtctcaccctccctgtccttgccctaaccccctaacactgcctgccccccaccccaatggctttaccctaagagccttctccttcccttccacacacactgctgtatcaccctctccctcctggcatacctgatacccgaagtcctccgggctgctggctccaactagggctgggcagctcgggacgggaggggccggggagagggcgggaactgggcggggccacagcctgtgctattttgagctgctaacggagccagagcagcatcagagcggagtctccttgctctgggctgctccaggccaggccatgcgggtgagtgtccctctgaccccccaccccggaaatgtcccaggctcctcatgctatttcctcatttaggaaaggagggacctttttgtgatttccccagatgtggctgaagtaggtggggagaggggtggggcagccttggggctcctctccgagcttcttggtaagaagggagttactcagccccggaagcctcaaaacccctccgtggctaggagcagggcatcctgggcctgactcatgacttcaggagttttggaggggcactgtcttctgaacctcagtttcctggggttgcatccacccccaaggctgtgacacgccttccccaccaaccattagtgcttttttggccttcattccttagaacactgttttcttccaaagccccagccccacagcacccaaggtcctcggtagtcttgtctctgctttgttgctggtatagctctttcctctcttcctccttgagaggggatggtccttggagttgtcaggg

SEQ ID NO: 85841 - DNA, 1036 bp, Homo sapiens
tttgagatggagtctctctctgtcgcccgggctggagtgcagtggcgtgatctcagctcactgcaacctctgcctcccgggttcaagtgattctcctgcctcagcctcctgagtagctgggattacaggcacatgccaccacgcctggctaatttttgtatttttagtagagacggggtttcaccatgttggccaggctggtctcgagctcctgacctcaggtggtccgcccacctcggcctcccaaagtgctgagattactggcgtgagccactacgcctgcctggcccctctttgccttctcttacactacttcttcaccctggaattcccttcctacctcattgccacattataacatttctctctttcattggcctagctccaagctgtctgtaagctgtctacttaataccgtaactggaacagatctttgcctctgaacttccctagactgttattgacgtccctgacttgaattttaattattggggtacatttgttatctcctctgctgatctgtacatttttttaaatcaggaagtatttagttgaaaacaagaactaaattatcttctttcactcagtcactcaaacgtgcctcatattgtctctgagcagggcccagtgctaggtgagtgctggggatagagcaatgaacaacacacaacctctgcctcaggaagctcagtctgtggtggggaagctgaaaaagaagcaggcacggtgcttccccacagtgttcgccttgaggtattacagttcacagctagttgaataagtgaacgacttcctccagccctcagagcctcctgtctggccttcccccagctctgcttagccactctgcctggtcaagtgcctgaaacagagccaaggaccttccactcatccacgccaccaatgtgggagagcagagcagttgaagttgtcaccacacatggagatccccttgttccccactctattccagcccgtttattgtgcgtgcaccgttcagatcagttggttaaatccatatggattttcgtggaac

SEQ ID NO: 85842 - DNA, 1070 bp, Homo sapiens
caatttctacacctcaaccaccaccagctctggaatcctaatgccccagggccagcaggtccctggctgtgtgccaccacaactggggcagcgcttcctttcctcgccaaggatgtcttctgcccagctttgtaacacacaggtactcacatgccccagtggatttggcccaggctgttagcacagaggtggtgggttggtaggcaaggtagaggcttttgcttcttcctgtttctatggacatagggtttgtgctttattttttacttcagagggttttagaaacaggcccaataggggctccagaggtgaacacacagattctcaaatatttattggatgtccagtgttacgaggaacctgaggcttgtctagaagaacttctctgactttgagaataagcaccacaggcctccatctctcacacccaggaagaccttactgatattttatttaaattgctgtggctgacccttaagctggcttccttttttttcttctgtggaaatggagaagagttgtcatttatatgaaaaagagaacaatgcttcattatgtttattccctcctgtctaccagagggggtggataggagaacatagtgcatgtggtacatttaggagacccagaagtgacccaagtcctgatgagatgtggggcagggctgtggaggattttgggaaaggatcctcaaggctggctcatggctttgggccttgggggagcttggcaaagcagaggcaatttggaagtccccgggggccatgaggaaatccccagcagctgagagacctcagagagcagcaggcctgctgtcgggccagtcaggtggtccctgcagtcggccgcatatgcctgcctagtctttggggattgactcagggtcttggcagagaggacaagcccaggcgtccctacttgggctctgtgcccgaaaaggtgtggtggcacatggctctgagcaaactgatgggtgtgccaatgcagggactgggtgggtgtaggggctggggggagtgtcagagccccaagcctcggcgaccacctctggggcagtgatctgtggctcg

SEQ ID NO: 85843 - DNA, 1564 bp, Homo sapiens
agcaaacacaaaataatagtactttccttgtaaggttgtcttgaggattaaatgaatcaatacatataaaccacttagagcagtgcctcaaaatagtgcctagagtcagtgagcattggccaggcatggtggttcacacctgtaatcccagtgctttgggaggctgaaatgggaagatctcttgaggctaggagttcaagaccagcctgcgaaagatagtgctactttgtacaaaaagtaaaaatattagcccagtgtggtggtgcatgcctgtcctagctacttaggaggctgaagcaggaggatcgcttgagcccaggagtttgaggctgcagtgagccatgatcacaccactgcactccaacctgagtgacagaatgagatcctgtttaaaaaaaaaagaagaagtgaacattatcatcatcctcattaatctgtctctggtacgtcaggaagcactggtgcctggtagcttggtacccgcaggaatgtcacaggtgctgttcctgttaatggctcagctctgctcacggggagtgttggagaactgctttattcttgtccccacgctgatgcttatgcccaaagtgcctttcaggtagagatggggaacaggcctaagcttactcagggctgcacagtaatcttagcgagggattgctttggcctgagtttccaatctggtctgaagtttgattccagtttttaaaattgggctgctttctctgtgactccctccagtcagattcttagctgatggcaagacctctggagtaccaggtgtctttctacctatttgttttccatttgaacaaactcaccctactttttggtctttctacaatttattttgtttcttcacacctgtcttgctcctgacagcccatttagattaggactaagcaggaattgaggcataaaacagaaagacagtcctgacctgccagttccagagtctgtcctctgctccttccaccacccatatgagcatgcctagactctcccacttgtgatttttactgcagcaaaacctctccagtgaagtctctgtgacggaacacaacagtggtcagacccgccaatctgttcctttgctcttctgtggatgcggggctggggggcttctctgagcctcctctccagcatgtcagatatgtccagagtccattctccaccgtgtcctccccttcctactcctcctttgcttcatctagttggtgacacagggaggtgtccagttatgggcctcactgctccatggcagaaatcctggcatgccctggatgaggcttcattggccttatttgctgttgaaagttcaggattctgttgggacttctgattctataggagtactaacatcagataagtcctgcagcgggtggcttggggaagccctcaggccactgcattccagatgtcttactcgtgcttggcccagagaatgcagaaacaaggaaccattgtgtgattgtgcaggcactgaggggctttctcccaggcctgggacgccttggggtgggagtaggtttccattcagtcttggcttctgctcccagctggg

SEQ ID NO: 85844 - DNA, 1133 bp, Homo sapiens
accaaggacctggccctggggctggtgccaggagatcgactggtggagattaatgggcacaatgtggagagcaagtccagggatgagattgtggagatgatccggcagtcaggggacagcgtgcggctcaaggtgcagcccattccagagctcagcgagctcagcaggagctggctgcggagcggcgagggacctcgcagggagccatccgatgtgagtgcttccctgggcacctgggctaagcagggatggggaatgtgggcacctcctgcttgactgggtaatcggggtacccaagagctgttatcagagcctagcagtgtgtaagtggggaagccctgctgctctctgagcctgtggggaagcatgaactcaggagaaggtgccccatgctcataatcctctgggggtgccacccctacaaacagcacccccaccaggtttaacctaatgaagaaagacaaggacattaaaggagtcacaccttcgtctctcaaccttgtctgggagctgaggacaagtccccaaaggttcactgcagtagaattctgagcagtttggccaggcctcatggttttatggttccctcctgtgttctgtgtctgttggattgacctaactgaattcagcggaatgcctttctcaacggtgctgggatagaccaagctctgcctgaaccttagtttcagccctggagcccttgagagagctctgctgttggttagtaattaccgtgaaagtattcagcttcttcattacaaggacaggtgaggggtttgggcaccatatttcctgagccctaaattggggtgtataggctaacatgtgtcacttccagatataagagacaatctggacagtaaaatacaatatttccatggtatttagatcttggggataaaaaaggacaaatgatttcaaattagggccgtcatggaacatctgagatgtatagctggtatgattatatctttgggaaagatgacctcaggccagagcctcctcttgcccctgagtgagcaaggaaatatcaggtgaggctgcagagaaagcaggggcagatcataaaggaccttgtaagtcacagttggaattcagatttcatcccagtgaaatgggactattgaagggtt

SEQ ID NO: 85845 - DNA, 1037 bp, Homo sapiens
agctgcgccgcgctgcgctctgctccatccctgaccgggccgaggctgctggatgccgcgtctccgcttctgctgcctgccgggcgggctccggtggccggtgagtgccggtcggcggcggcggccgctcggtggcgggcccggcttggtggggcggcggggcgggctccggccgggagggagggcgggcgggcggcggggcccgccggctcctcctcctcctcccccgtcccctggaagcagcggcccggactcccggctcccgtccctggcggcgccgtggagctcgacgcccgggggtgggggccgatcgggagcggcggggaagggggaaccaccggcccttccagccaacctggggggcgcagggaggcaggacagggtggccttcagtgtggggggatttggggcttggaggcgcccaggtggcccggagctgcggggtgggggctgcagcctcgagggtggggggacttctcctgcccccgtccaggccccacgatggagcgagcgagagagcggggcgctgaggaaggcagcggggaaggggagcacctctaccgacccttttatccctcccagcggccttcactctttcactgccgggcagactgcgggctcctctcaaaggagcagctgctagacagctggcaaaacaatggagaccccgcttccctgggccccctcctcttgggacagaagatgagagggtgaatggtggcaggctttggggattagggagtgcaggctgtgccctgagactgaatgctcacctcacctttccctgcagaggggtggggtgcgtgtgggaaggtcggacaagctgccccaggcctctggagagaccgccccgacgccccgccctgctaacctgtcatgccagttgtttcgccaatgggaaggggaggtggtaggggtggctgccccctcaccctgccccttgttagtgggggtgcgctccttggtcccaaacccggccaggagtgtgggtcatgttcctgggtgcgataaggcccgcagggacaggccaggcattg

SEQ ID NO: 85846 - DNA, 1043 bp, Homo sapiens
ttaagggtaccagatattttctatactgcaggatttctaatgacattgaaagacttttaaacagccttagtaaattatctttctaatgctctgtgaggccaaacatttatgttcagattgaaatttaaattaatatcattcaaaaggaaacaaaaaatgttgagttttaaaaatcaggattgacttttttctccaaaaccatacatttataggcaaattgtgttctttatcacttctgagcaaatactcagatttaaaattactttaaagtcctggtacttaacaggctaacgtagataaacaccttaataatctcagttaatactgtatttcaaaacacatttaactgttttctaatgctttgcattatcagttacaacctagagagattttgagcctcatatttctttgatacttgaaatagagggagctagaacacttaatgtttaatctgttaaacctgctgcaagagccataactttgaggcattttctaaatgaactgtggggatccaggatttgtaatttcttgatctaaactttatgctgcataaatcacttatcggaaatgcacatttcatagtgtgaagcactcatttctaaaccttattatctaaggtaatatatgcacctttcagaaatttgtgttcgagtaagtaaagcatattagaataattatgggttgacagatttttaaaatagaatttagagtatttgtgtggggttttgtttgtttacaaataatcagactataatatttaaacatgcaaaataactgagaataatgttgcacttgtttactaaagatataagttgttccatgggtgtacacgtagacagacacacatacacccaaattattgcattaagaatcctggagcagaccatagctgaagctgttattttcagtcaggaagactacctgtcatgaaggtatacaataatttagaagtgaatgtttttctgtaccatctatgtgcaattatactctaaattccactacactacattaaagtaaatggacattccagaatatagatgtga

SEQ ID NO: 85847 - DNA, 1031 bp, Homo sapiens
gtgggggaggaagggaagaaggaagacaggcaggtgtgtattaggtttcttaggacagatattcatggccctcctcctggctggtattgggcccaggaatgatgcatgtcaactctgtaatatatttttccattctgaatctctgaataagcaacatttcccaggtcctgctcccataccttctccctgctcgtttcttgggggcccatgcccatcccccagccttagttgctagggcagtggttattgctatataagtgactcctcttggggtgacaagagaaggctgtcttccgccagagttccccactcttctccagccaccctagaaggctctacacactaggcaggagaactgggccctctcctgggcatgtctctgcagggcaaggagaggaagggcaagggcaccctgagggccttactcacccagctcctgctgctcagcctgggtctccatctggtaccacttgctctgtggccctcctctttatagccctgcggcctctggcctctggccctgtcagcactctgctctccctctgcctttgttcctcatgatccccagagctttggtggctcagcttgctggggcctttgtttaaaccagggatacagaaatccagagaggcccctctgttgtgggcatggctggctgctgcaggccttggctttcttaatctctcagagcagctagggggtgaggacagaagtctctgccatgagtacttgtctcttgtccttctccaggttcctcacaccaccttgggatcttcctaagaccttaagaccctgggagaccccatgtcatatcaaacacatcaaaatgcacctcacttccatacagatgtgcatttcttgttgtttaaaaatgtgaaagaattattgtaattctgaactcaatatgagaaaaaatggttcattgtattcttgggaatctttattatgctgtatttatatataactatgtaagggttgacttcaattatagttgactagcagacatgtgtctctctgtagctattttatta

SEQ ID NO: 85848 - DNA, 1017 bp, Homo sapiens
aaagaccagaaacatcccagcctgatgcattattgagtaatacttaagtgttcagaacaagaagattattatcaatcagtgtagatcgatactggaagacttgcctatttcgtcagtcattcccacttactgaaaggttacttcagcattttcctgtttctgcagtaaaaatgttacacagattgaaatttaactggccaaggatttactttttgctgcagggtaagcactttcactcatttactagtgtttcacaagtttactgggctcttgagtatccacttattgccacttgtaagacccttagttttagcttaagggaagtaccacctggtggagaaaaatcaaatagcaggcttagagaagaaagtgatgttttctctttttttacttttgtcttttttcctgccacattcagcataactgatgataaatagcatgaacgtcagtctgtccacaccctcttgtcccatccctcatatgcacggaagtggaaatttcagagactcacagctgaacagatggggcggaaggacatgagacgctcaatgtggtaggcattactcccactccaggcatcccagcgagggtattctcctctctccaggataaactgttgcccacagaagctggtatgctcataaccaatccagctgccaaagacatgtagtgtttgttcatggtgttcaaagcctatatggccttggggagaaggcatctttcgttttagataagtcaatagtggggtaaaatatcaagccaatcccagtagagctgtacaaagtaatttgtcacaagagttgaggaatgagttgacaggtatactaagcaggttagtgaatgtaatatttgtttgggggttatcactgaaaaggtctatctacttcactggtctgagtgaagtgtattagcaaagccaatctaaaattatatttcctggctgggtgtggtgtctcacgcctgtagttccaacgcttcaggaggccaaggcaagcagatcgcttgagcccatgagtt

SEQ ID NO: 85849 - DNA, 9298 bp, Homo sapiens
ggttttacttagatagttcccacactggttaaaataaattttgacttcatttgctgggaacagcaaaagaaaaatccaagtgtttcttttaatattggattattggtgacaagcttttttctttggctgctgtattcaaatacactgcttttgtaatcagtagaagtacataaaacccttaagtgaactcaaccatctctgatctgcaggagttgaggccctcactggctagaggaccctgtacttggaattcattggaattccaaatagctacttccaggttgagaaactggatcatacatgtgttggtacaaggaggaaatgggcttgaagttttgttttcataaaaaaattggtcagtttaaatgatggttatttgggattgttattggaatacgggcattttgagattctagaccttatttttatttatttttttaacctttctagatcccaaaaggataatcacttacaatgaagccatggatagtccagatcaatgaaggaccagactgcctattcgtaacctttctgcagcattagagccatcgttcatgggggacacaaggcttttatgctcctagatcttcaacgcagcagaggaaccataagtagaatcacaggataatatatacaaatatatatatatacatatatatatatatagttatttaaaaaaggcaactgaaagtaattagacttcttaaggaatcaaatttatttcaagagactacacatggttatttaatctccggtactgaataggttttttttcttctgttagtttttgtttttaagtgtgaatgcaagtgattaatgaatacagacttaacaagtgtggttctaaagttcctgctgtcatcaacttgggcaacaaatgacccactggaaaggcaaatccacttaaaagatctctgtatcttgttctgtgactgaagtgatacactaatcacggggaacccagaatgattcaacattttccccccactcctcccttgatctttttggttttactttaattaagccctgcgagaatgctggataaatgccttgaagttagcagggtgtatttttttagcgaatatgatttgcatgtcttgccaggagttaagcggcctctggggtgttggggaaatactttatttctttccatttattttttgtggggcggggataggggagggcattgaagttctacaattctggaatagttagttgatggtacatagttaacttggcttcggttacatattggactttaacaactgaagaatctatgcgtgtcatttaaagaaaagttgcagaacaagcaattggcttagatatacaatctggaaaaatattcctgtgcccatattttaatgtaattgtataactgggagcaaaaatatattctgcttttcaactgtaggtgctccagacttgctctccgtcactaacactaaatgtgctgttttccttgtttttcatcaaacatttaagacaaacttagacctttctgtaaattatcttttaatttctcagcaaaatctaaaaggggaagaaaaaagtccatgaaaactaaaacttttcatgtttttagccagtgagaagataataaaccctgactgtagaaggtgtgttttcatgcaaactatacttctgagcttgttagcttctaattatatcttaataaatatattttattactagagcaagatgggtttttaaggaaaataatgtgaaattctggaaattttctttggggcagagaagagcattagccctgtcttatcattacattgccatcctgttgcactgcagcttgtgtatagcatgctaaaataaatttttgtgtgtgtgtgcagaaattaagggtccaattgagattgggtgatgttagtaacataataacaagttgtctggcctgacacagcatcacatcacacacacagaaattagtatatccatgtatgtcaaatacaggttaaaatatcagggcatttatataaagagttgtagtcttctgataaaagtagactggatcccctggggtatttggggagaaagtaactactttggctctacccctagaaatgtccagttttgagtgactgtagtatggatgggttttcttgttttgttgattatttgaggcttttaaaacaagtagttcatgaaagaagctgttggactcaacatagagtagagtaactatctttttagtctggatttctgccctgcttagattttaaaagtataagcatggattgccaattccacttgatgtaaacaaaacttttttttatacataatatatatatatatatataaaataacttattgtatcagtccaggttcagaaacttgtggtaggccagttccagatagtttcatttcacctgtaaactgtatcactttgactgatattgtaattttcaaatgtataatatgtttacagatgtgccctgcatttagtctgccttgttcctattttgatttttgttgagtctcctgcctgcttgccaaaagctaggatgcttcaggcccatgtacaattgaaagcagaggcatccttgagctttaaagcattgaacaaactggaaaatgcaacataccacataactgaagtgaaaaaagtctgtgtttttgtgtttttttaaataaaaattttcaaaaagttaaaaaaaaagacatataaggttgattaaagggaaaaaaggctccagtttgttttacaggttttaaagttctgctgtgtgttcaattgccttgtgtaaccacttgtcgccttagggccagattcccctctctagtccccttttttaaatgtccattttgcttgcctggaattttaaagttcttccgtctcacaactcacaagaaactttctgggtttgtgacatacagaggttgaattgagtatatatttgaaaaggaaaaaacaaaaaacaaacccagaccccacctgaattgggctttttaacttagaagcaacacttgattaaacatctttagaaagctattgcttttctaatttccttccatatccctcaggcctcagtgttcagagaagccaaaaagaatgtatcacttctctgtctgtccaaaggtttttgagagtctcacttctaaatgaaacaatgcaacatttcactttgatttctccactgaaatttccttgattatatggttagaggtatgtagttaggaatgtctgttaactttctgagaaccctagtgccccatcatattaactgtcagtattttgggggcattaggttaatagacttaattgcctaggtacaagcaggactttgggacaaatctctttgtgctgtttggtaacacttaactctatttgttgcaatctttctccttaggtcctcacacaattccttacagagcacttattaaaaaaaaatcttaagagttgatctgttttctgattattttgtgtaagcttctaaacaaacttcagctgtgattaatttagcacatttaaataacgtgttattgtttggtataaagaattttccttcaactcagagtattagtactgtagcataaaccaaatacagtctagaggggatttttaacatccctccattataaagactgaaaaaggggtgtgtgtgtgtgtgtgtgtttatgtatgtatgtatgtgtgtgtgaggaaaagatggagatattaaaaattagtaaatgaatgtgtataagacattagtattcagagaatgaacttgtatttattttgtgccatttgttttcattacacagaaaaaagtcaggtggtttaaatccttaaaagggtagtattgaaaaatggcactaagaatgaaattatgacctatttttttaatagctatgaagatactaattatgggtgaagatttctttttaaatctgttttgattattgtaggcttctgtgtcacataccactcttgtaggtgtcctcaataatccccttttcccacaaaatacacagggtgtattatctttctctttattcacccccactttgctgaactgaagttaattacatagcctttcttctaacctccttagtaatgaaccttcacataaagtgtatttacagcgtctgtggtagccagcccttcctcctctactttctaggaggggatagccaataactaggaatttaatgacagatttttttttctttgaaataaatggccagagtttctccattttagaattttgttgtcctccttaatcatctgcttacctagtcattactcaatctgcagaaacttcataaaggaaaagtgctgcattgtttttacaaataacagtttgtagggaaaatatgacaaacctcaactatgggagttgtccacaatacaaaattttgaaaaaacattacatagtgataatatcatacttggttgttaggcttgttgcttccccacatcagaggcatctaatgatttatcttttgtaattgctgtgaacttttttaaataagccatttagtgtgaaattgtcatgtatcaaatggctattggaaatggactttactcaattttaattccactgtaaataaggacggagtcattcctacaaggctctcttcagagaaatagattaaaagtccaatttccaggtattattagtatagttatgccgctgggccacatcctcaacaacagctgatccctcttgtataaatatgttaactgtgcagaacagttatgttatgggacaaatataatggtcattatggtcagattggttgatgccacaccagtcaaggtagagtctgatagggcagtatcttaataaccctacccatgacttaactgttggatttgaaaggaaaacgtaggatttgctcttgtccccttacccgccacaaaattttgataatttgtttaaaagggagaggcagaggaaaagactagaagcataaatagctgctttaggtttgccagaggcacatagcttaacattagttcttaatatcgatgttatttttactaatgtaattaatcaacagagcaccaagattctttcatggtgaaaagggtgggcttctgttttggtatcttaaaatgtttcttttaaaatatacatcacctgtgtgagaaccaggaccacctgggagagtgatgaatcattggctccactcaaaagcattgctttactgagttttaaatttcacactgttttgccgctcaagaaaggtcttaaagtagttaaaggatgccagcaatagtgcgaatagaattttcggttgtctgcataataaaaacacccattgcagcatgattggtatgttgctcttgcattattgggaatggtaaatcagttatgggctagaaactatggaatggccgtcctcatatgtgatgggattgctgattcagacttccctattttccatacaattttgttatgtgcagagttctaaagccattttataatactgcagtatcccccccccccccacctttttttttttgagacggactgtctgttgcccaggctggagtacagtggcgcaatcttggctcactgcaacctccacctccctggttcaagcaattcccctgcctcagcctcccatgtagctgggattacgggcgcacaccaccacacctggctaatttgtattcttagtagagacggggtttcaccatgttgaccagactggtctcgaactcctgacctcaggcaatctgcccgcctcagcctcccaaagtgctggaattacaggtgtgagccaccgtgcccggccaagtatctcttttctacagccttattaaactaactacaaacatttattttccaatttagttttactttcagtgcatatcaaagttgttgtactcttcagaccaacaaattaacttgagggcaaattacatagctttccatgtacccttttttcctcaggtgctaatcaaaggctctgaaaatggatactgctttagtgatgtctgctttattcttaaaatgcttatttcttttgctagatgtaaagatttggtgttaacaaaagtggttttaatatgtaaatatgaatgaatgcctttagtttaccctgtttgtctattattaatctgttttcatttatccttcatagaggaggatcctttcatgatcttgaatacatttcattagatattgttgcattttaagaatgaaaatacaactgttttctgtcttagattaatcctgctgctatgagaaactgaaaatcaagaatgtgatgcactttttacattactatataccatacatataccataggttgctttgatacctttcctgtagcacagccactaacaagagtgaatgaattataaaattctttttgggagggaatcaatacaagtaactaattcttagctgatattgtcctatgaaggacaataacttaggaatataagaattctgttaatagtacactttttggccttaaatgtcttctactactgaaaatagtttaaatcttagctttgtttctattattccctctctctgcctcagaaagaggaattgggaagaatggcttaaaggacgtggtgtcattgatttgttgctgatcttttagaaaacatttgtctatgtaagctggggacttattttttgtttgtatatagaggggaaatagtgctgccctgaaccaatcagatttagtttaaatcaaatcaatcaaaactccagctgtttctcttgtctttttacttagcaaaggaaaactttagtgaatgctacttgacaagaagaaaagtcatttctcaagcacatacccaaacttgaaggtgattgaacccaaaataatgggtgggaaacaccaaatgaggtggaggaatgagaaagatgtgtgggccaaagctatctggttatattttgatgttgccaatatcgcaaagccaaaattttaatttgcttatttaatatatttgttggccagagatctatttttatatcaatgtgccttgcatgtatattaaaaaaaaaaaattggaaacgccatgtagtaatgcctgagatagtcgatggttcttaccacctcactaatttttatgcagtatgaaatgctcattctattgcccaactggtgctctctgtttaaagttacagatcttgcgaaactggaactattttataagctggggaagtgatttactttttttgttgtatcttttttgttcttagtctgttagtggctgtcctgtagtgggaaatagtaaaaggattcttcactcccttctcccctcagcaccttcttcaagtaaacatttcttgtgtgctttgaaaaaagtttcagcttgctgtctcttttagtgttttaaagaagtgttatacaaagcattgtttgcaaaatatagggagataatggagtccactttaatttggaattctgtgtgagctatgatccaagttatcagctctttccaactttaaaaattttgttaaaagcaccttgcttagaaaattttaaatatttatgtctgcaacaattgtctcaaaataataaactgtgcaattcttgtcattaaaaaaaaaaaagatctgaattttccctaatgtgacttgttagtttctctctgtatttcctgccagtgtaaatgtgaaagctttgcttgcattacgttttagaaatgcattttgcacactcgaattttgccgaagctccgtgaaaaggttagatctaagtagatgaataaagctatgcacatgttttgaaagtttaatttgtgtgtcattaccaaaagtgaccgatttgtccttactactttgctgttgttagctttaccatctttggaaacttggctcaaagttacatagttctgggctagctcatcagtggaactaggagagaggaaaactggcacctattttaataaagttcaatttaaacgagagcttgacttgtatctattaaagagcttttcttgaaacagggcagttttatcagctttacaaatcattggatgctcttccttagtaatattttggtttatttgatcaaatagaaatggaaagtaattcaaactgaaagacccttttttgtcatatggaacttggtgacgattttttgtcttaaagctggtttaaaggtaggataggcttttacctttattgctttagcataaatttggtttactgaattgactggcttgagattagaattattcagttgtttgtaagatcaaagcactggttgttttaaagataacgtgtatcttttaaaaaattgcccaagctgattagaacaagtttaggagttgggtacatttggttcaagtgctgcaatctgtatgtactaaatagctttactttgtgtatgtgtacttataatgtgtagatgtactactacccaggttttgtcaaatcatcttttttaaagtttttttttttttaattggttcaggacctttgtaggagaggctaatatgtttaagtagaagatattactgatagcattttccccatgctcctacataaaaaataaatatttccattttatagctttttcaatatacagaagagggttacttcttcatcaagtatattgttgcctttgaggacacagcaaaacccttctatatgtatcttcattgatagtggcagttaaaaactaagttatccagttaagacttaaaaggtgacccatattaattgcatggccttaaaaggcagaaatgcaggagtgtagcaagcatcattttagatggctatggttcctcttccgcatctgtcagtagttcacttatgttcagtcttagaacctactggaggagtgaagtaatttctctgtctcgtgcagaggcactaaggagctgagttacctcttaatctgggggaatggataataagtggagtacagttatgttaaaggatgttccccccgctcaaaaaaaagtttcaatgtttgttttgcccagtcaaaaatataggtcttttctacatataagaacagtcaccagaaattttcccttttgctaaatgcttaggtatttgctatagctgtttctgatgtcatggattctgaggaagtgtcatttacgtgatgatcttcctttattgatgtcttcatcatgttcagtgttttaaaaatataaattacaaacactctacaaccatacccagatttacttattttatcagaaaaaaaacttgagaaatttgtagatcaaattgagagacaataagtgtacattgttgaataaaaaattttaaagtttctgaggtgtttgttatcttttgtgtgctttaattttttaaaaagtctttactgactaatcttaaattcagctgataaaaagtaaaaagaaaaacaa

SEQ ID NO: 85850 - DNA, 1240 bp, Homo sapiens
tgagggatatggaaggaaattagaaaagcaatagctttctaaagatgtttaatcaagtgttgcttctaagttaaaaagcccaattcaggtggggtctgggtttgttttttgttttttccttttcaaatatatactcaattcaacctctgtatgtcacaaacccagaaagtttcttgtgagttgtgagacggaagaactttaaaattccaggcaagcaaaatggacatttaaaaaaggggactagagaggggaatctggccctaaggcgacaagtggttacacaaggcaattgaacacacagcagaactttaaaacctgtaaaacaaactggagccttttttccctttaatcaaccttatatgtctttttttttaactttttgaaaatttttatttaaaaaaacacaaaaacacagacttttttcacttcagttatgtggtatgttgcattttccagtttgttcaatgctttaaagctcaaggatgcctctgctttcaattgtacatgggcctgaagcatcctagcttttggcaagcaggcaggagactcaacaaaaatcaaaataggaacaaggcagactaaatgcagggcacatctgtaaacatattatacatttgaaaattacaatatcagtcaaagtgatacagtttacaggtgaaatgaaactatctggaactggcctaccacaagtttctgaacctggactgatacaataagttattttatatatatatatatatattatgtataaaaaaaagttttgtttacatcaagtggaattggcaatccatgcttatacttttaaaatctaagcagggcagaaatccagactaaaaagatagttactctactctatgttgagtccaacagcttctttcatgaactacttgttttaaaagcctcaaataatcaacaaaacaagaaaacccatccatactacagtcactcaaaactggacatttctaggggtagagccaaagtagttactttctccccaaataccccaggggatccagtctacttttatcagaagactacaactctttatataaatgccctgatattttaacctgtatttgacatacatggatatactaatttctgtgtgtgtgatgtgatgctgtgtcaggccagacaacttgttattatgttactaacatcacccaatctcaattggacccttaatttctgcacacacacacaaaaatttattttagcatgctatacacaagctgcagtg

SEQ ID NO: 85851 - DNA, 1032 bp, Homo sapiens
ttttacatattaggaaagtgaggcccagtgaggttcctgtaaactagaaagtggcaggactagaatgtagcttcccctgatttcccaatgttgctctttcttccggagttactttctgtgtatcttaccaaacaaatgaaaaaaacatagactagaaaatacaccctgcaggctgggcacggtggctcacgcctggaatcccagcactttgggaggcggaggcaggtggatcacctgaggttcaggagttcaagaccagcctggccaacatggtgaaaccccatttctattaaaacagttagccaggcgtggtggcacatgcctgtaaatcccagctactagggaggctgagccaggagaatcgcttgaacacaagagatggaggttgcagtgagctgagatcacgccattgctctccagcctgggcaacaagaacgaaacttcgtctgaaaaaaaggaaaagaaaatataccctgcaaagtagacctacctgtttttactgtaaaatggccgttaactcttaggaatgagcatgttcttcatggcagatttccaatgggtggccctaggagtcccagaaaggatattattatattatctctggactaaactagattgattcttagctgaagtggacttgagtttttctgatactattttcaggcctttaaaattttccattgggtgaccagttgtattgacttgccttttttttttttttttttaagcatgtatacttgaaaaagttcttagggaaggtagaaattatatatgtgtgtgtatatatataatataatatatataataaaataatatataataaaaacagttccctggccgggcgcggtggctcacgcctgtaatcccagcactttgggaggccgaggcgggcggatcacgaggtcaggagatcgagaccatcctggctaacacggtgaaaccccgtgtctactaaaaatacaaaaaattagccgggcgtggtagcgggcgcctgtagtcccagctactcgggaggctgaggcaggagaatgg

SEQ ID NO: 85852 - DNA, 1225 bp, Homo sapiens
taactgtaatctaaatccttagagcaaataatgaggtttaacgatgatgtttatatccttttgcttttgagaacagtgggtttcagtcttcccatctttcctacctcttcctcctttctctaacagaaatgtatgctccatgcatgcatgtacacacttaatacatagtgcacattcccattttaacagtggctcatttaggcagtgacttacaattgcagggaaaggggaccataccagattgtgggaattgggtaattaccatattctctctggaagaaatactgcctcagggatgaataacaaagtgatttgtgacttctaagcaaatttcctagtctgcatacgtttccttatctgcaagctggaagacattgagtataataaatagatgtccttttaatatcattttacttccttaaaaatggaagtagtagaattgcttaatggaagtttaggaatcctcacagataacatttacctgatttcacttattctccagctctgctctttgaaggtaaatacaggagttggttgtttttagcaatgttagggcaaaaagataaatgcttcgttttttaagacatgtgttatacattagttaacctctgccaggagagttgggttttttggtattgttttctgtgccgtctgccctctagagactattactggaaaatgtttaccgaagtattttgcactggcgatcattgtgtgagcctgagagggtatctggttgtgttgtgttctcttaccacctccaaaatattctgggaggcccagtgtggtgggtcatgactgtaatcccagcactttgggaggccgaagtgggaggatcacttgagctcaggaatttgagaccagcctgggcaacaatgtgtagtcccagctacttgggaggcttaggagggaggatcacttgtccctgggagatccaggtctgcagtgagctatgtttgcaccactgcactcaggcctgggcaacagagtgagaccgtgtctcaaaacaaaacaacaaaatgtgtaggatatgttccattaggtaactggttaatagttcttatgtacaatttctattaggtggaattgcaggccatttttaaattggaatgttaacctgaatttactctttatgcattttccctatccatgggctagctgaatatgaaatcagtggtatttatataagctgaatacccctatatgggtgcagttatatttagtt

SEQ ID NO: 85853 - DNA, 4060 bp, Homo sapiens
ggcattagccactgcacccggcctgtatatctgtttctaatgacttgacctcaagatgcttttatgaacatttcataaaaaggtagataactaatagcaccattttgttacagtggaaaactatttgaatcacctataatagaattgactttttatggtagttgaaggtttttttttcttttcttcttgaaagagggtctcactttgtcactcaagctagaaggcagttgtgccatctcagtgcatgttcactgcagcctcgacctcctgggttcaagctatcctcctccctcagctcccccagctgggagtataggcacatgccccacgcccagctaatttttgtatttgtagtagagacagggtttctccatgttgcccaggctggtcttgaactccagcagtctgcctgccttggccctcccaaagtgctatgtttacagacatgatccactggcagttgaagacttttaattaaacctgaataccataacactaaaaaattggattctttttattgttgttttgttagtaaatattttctcattgcatcttttgagtcaaggcagtattacatagtgataggaaaccatggattgcagatagactggcggtcagatttccagttctgtcactttgacttgggcaatttacttcatctctcttaaagtctttttatctaaatgtaaaatgaagaaagtatgttttataaaggttggaaacattggtacgtagatattttggtttcacgtattaacaatatccaatatctgggaaatgtcaaaatgaaatttaagaatactttagaaaaagttgacaagtgttagatatttgtctgatagatgccttggaaactgctgatagtgactaccagctatttatggttttgtagaaatgaagtctttaatttccttgtaataattactgtttcaataaaacttgatttttgcccagagggcatctctgctctgaattgtaaagaaaattttaggccgggcgtgtggctcacgcctgtaatcctagcacttcgggaggccgagacgggcggatcacaaggtcaggagatcgagaccatcctggctaacatggtgaaatcctgtctctactaaaaatacaaaaagaattagccgagcgtggtggtgggcgcctgtagtcccagctactctggaggctgaggcaggagaatggcgtgagcccgggaggtggagcttacagtgagcggagatagcgccactgcactccagcctgggcgacagagtgagactccgtcttgaaaaaagaaaattttataacagccttgtgagagtgatgggtagattgattctgttagatgagaggtatttggcatactgcttaagaggtcttgtcttctctggcctcagactttggtttgaatcttcgctgagttctacctcttgctttgcttagcagtaggttgcatttcctagtctgtaaaatggggctgacaggtgtcttctcatagagatgtgaaataatataaagctacagctcatagcatagtgtctagcatacagtaaatagttcttaaatgttaggtattagtgtaatttacatgttgtgatttttttttttaatcctttttttcccctcccctaggctatggtgaactaaacggtaatgctggagaaagagaaatatctttaaagaacctgagttctgatgaagccaccaaccctatttccagggtcctcaatggcaaccagcaagttgtagacactagcctgaagcagactgtaaaggccaacacctttgggaaagcaggaattaaaaccaagaatttcattcagaaaaacagtatggacaaaaagaatgggaagtcttatgaaaataaatctggagagaatcagtctgtagataagtctgatactataccaattccaaatggtgtggtaacaaataattctggttatattactaatggttatatgggtaaaggagcagataatgatggtagtggatctgagagcggatatacaactcctaaaaaaaggaaagctaggcgcaatagtgccaagggttgtgaaaaccttaatatagtgcaggacaaaataatgcaacaagagaccagtgtcccaaccttaaaacagggacttgaaactttcaagcctgactatagtgaacaaaagggaaatcgagtagatggttcgaagcccatttggaagtatgaaactgggcctggaggaacaagtcgaggaaaacctgctgtgggtgatatgcttcggaaaagctcagatagtaaacctggtgtgagcagcaaaaagtttgatgatcggcccaaaggaaagcatgcttcagctgttgcctccaaagaggactcgtggaccctatttaaaccacccccagtttttccagtggacaatagcagtgctaaaatagttcctaaaataagttatgcaagcaaagttaaggaaaacctcaacaaaactatacagaactcttctgtgtcaccaacttcatcttcatcatcttcatcatctaccggggaaactcagacccaatcatcaagtcgcttatcccaggtccctatgtcagcgctgaaatctgttacttctgccaacttttctaatgggcctgttttagcagggactgatggaaatgtttatcctccagggggtcagccactgctaactactgctgctaatactctaacacccatctcttctgggacagattcagttctccaggacatgagtctaacttcagcagctgttgaacaaattaagactagcctttttatctatccttcaaatatgcaaactatgctgttgagcacagcacaagtggatctgccctctcagacagatcagcaaaacctgggggatatcttccagaatcagtggggtttatcatttataaatgagcccagtgctggccctgagactgttactgggaagtcatcagagcataaagtgatggaggtgacatttcaaggagaatatcctgctactttggtttcacagggtgctgaaataattccctcaggaactgagcatcctgtgtttcccaaggcttacgagctggagaaacggactagtcctcaagttctgggtagcattctaaaatctgggactactagtgagagtggagccttatccttggaacccagtcatataggtgacctgcagaaagcagacaccagtagtcaaggtgctttagtgtttctctcaaaggactacgagatagaaagtcaaaatcctctggcctctcctacgaacactttgttaggctctgccaaagaacagagataccagagaggcctagaaaggaatgatagctggggttcttttgacctgagggctgctattgtatatcacactaaaggtaactcatttgtttcctatacaaagatttttattggccaatttagtatattgtttatattaagagaattttaagagaattagttgttcatattaagagtattttaagagaatgacaatgtggataagcagctggtgtcaaactaattcagggtccttggaactagtatgattaaaatttagaagaaatgttcacttttccaacttaaaaggatttttaaaaatacaaacataattgacctacctggttcaaagaacagaagtgaggagaacttgcttaaaggtattgatgttatattttctcttgactgagtgcttgaaaaaaaattttattgaacatatgttctccttccgtggcttttttgtctttgcttttttgttttgttttgtgttttttttctttgagatggagtctcactctcttgccaggctggagtgcagtggcgtaatcccggcccactgcaacctccacctcccaggttcaagtgattctcctgcctcagcctcctgagtagctgagattacaggcacgcaccaccatgcccggctaatttttgtatttttagtagagacggggtttcaccatgttggccaggatggtcttgacctcttgaccttgtgatccacccacggcctcccaaagtgctgggattacaggtgtgagccaccacacccatttgcttatttgtttttgagacagagtctcactctctcaccca

SEQ ID NO: 85854 - DNA, 1034 bp, Homo sapiens
ccggccggggttgtgtaacccggtggcggcgcgcggccccgggcgggtccctggggtgaggggcgggggcggttggggtgggggagggaagcggccacgaggggagcggcctgcgcagggccccgcgcgccagcggccgcgtttcccgctcccgggtgcggcgggaggcgcgggcagtcggggcggggagccggcctcgaagcggagctgagagggaaggaggccgcgggcggcggccgcggcgctcctagaggcaggaggcctgggggggcggcggggggattcatttcgggtagaggcggtgcctgaggccgggtggggtacccagcgggaacccagctccccggtcacgagtttctctgccacaggaacctcgtctcctgccaggttcgctcacgactccgcctctgaggctttcacttgggccttttccttctagcagctcattttctacaaaaaaaaaaaaaaaatccaaaaaccttgttccattcccctcccgacccagcacttaccttctgagcttgggtagtgtctttgaggtgagggattttaaaaaatgttaggatggggaagagtgcgagctttttgacccctctttcttgtccttaagggtgaacccaagtggctcatccatgaggttagactactaccatcttgcctcggatgaggcttctctccgtgttaaaaagaaaggtgtttttcgtattttaaaatcgatattgatccccaaactaatcttaataaacgagaaattgagggtaaaagtcatgtaagaaagtatttcacgagaagtgagtttaatagtttataacccacgcagattttaaaaaataagggctctttataaatcgaagagaaatgaagcgtaagaaagcgtatgttaaacccagcgtatcaaatttgatagaaggaattgttgagagctggagaaatactaagtgcttttttattgcagattgtaacttgaagactgaaattagaatgtcagattttccattttgggacttcgtagggacccgatagtatgcaataga

SEQ ID NO: 85855 - DNA, 2002 bp, Homo sapiens
ttgggctgggcggcttgctggggctcgggggtggggggcggcgatctgtcgccgggccccctcctcctcctcactcctcaccctccagggtagcggctaccggagcgctgcagggggctgcgcctgcctgctccgccccagacctgtcggcgaaagggtaagggcacctctgctttgggaaagggggatatagaggggggcggggaaattcggcccactcgggcctgtgtgtggaagaagggatgtgggagtggggtgggggagggagaaaaggagggtctgtgattctgtgggtggggtgaagaagctggtgagctgggcgccctccggttttaaggggcgagagcaattccattcctttttcctgagggtcaccggaaggggtggtggaagggggatgtttcgaggaaggtgtggccctcacagggagactgggttgatgtgcaccccggtttaaaggcgcgaggtccccttcccctctggtgcctttgctcctcttctcctttgtagtgtctgtgtattcttgggaagggagactgctctgggtggcttgctgggtggattccaccccctagcacaggaaatctatacccctcttctgtaggggcgatggaagcgtttctctccccgtacccttcccccttccccatcctctagtctactgcaatgctgcagaagtccaaggcagtttcttcatacacagacccatgtatacacagaagggagggggagcaggagagggaagtaatggcgcttcccttgaaaaggttactctttttcctttggttttaaatcgacgacagtatcgttttaatactcttcccctgagatctgtccatgggaagtgtatctgttctggtgttattgttgggggatatggcctctcgagagggacacctctcctgttagaacagttttgatgtctctctttttgagagatgtctggattgacattttttgtgagcaggttggattttagttagaattcaaataaaataattttgtacctcctcatcctcatttcccttttctttttctatgacttttgtagttcatgaagaattattggcctggcgcggtggctcacgcctgtaatcccagcactttgggaggccaaggcgggcggatcacgaagtcaggagatcgagaccatcctggctaacacggtgaaaccccgtctctgctaaaaatacaaaaaattagctgggcatggtggcacgcgcctgtagtcccagctactcgggaggctgagggaggagaatcgcttgaacccgggaggcggaggttgcagtgaggcgagatggtgccactgcactccaacctgggcgacagagcgagactccgtttcaaaaaaaaaaattattaacaattattacatacagacagcctgtctgattcagggcatttctccctaagctgtgaatttttagggttgatactgttgtgtataatattgaaattggattttttttaaaatggtaaggttacaaacctttctgcagctgtttctttgttcttattaatctgcctaattattctatgatctattttctgtagtcagtcatttttcacttcttttgctacctgtcatgtttgtctgaaagcagatcatcttatctggtttacagtagtacttgttggttttgttcttagttgagtagaaataaaaatttaaacattctggaaatgtgctgccaagtgctttttgtgaccaaagagtagttttcaagtctccatgtactgatgatacatttttttcaagtgtttagtaaatactggtgatgtgatttcaaaatattccacatatgactattaatagaattaattttttcccaaagtgaagaagaagactaaaatgtgtacagataatgagttgtctttggtgtatttagtgttttcagctctacttagtgacttatttttaaatacttcaaatgccatctacattttatgttgtcattaaatgttgtccaatagagcttttttggtgtgtttgttgcat

SEQ ID NO: 85856 - DNA, 2125 bp, Homo sapiens
tgatatgtagagttttctccattatggcaaattatgccaggaagtctgattctccgtattatggcttgttgttgataattatttcatatatactagcatgtgttgatcgaagcatactgctcagtaaggagtgactgcttttaccttgggaagttgtaggcagagaggatttatcaatagaggctacaaaacttaaaggatttacatagggtgtaggttaactatttacttgctatatttcagcatgctataactaaggacaactgaaaaaaaaacaactctcttttttcatagctggtaggaatgttgcctaaaagtggaaaagtatgttcatgatcaattagataaatacattattaaggaaaaattgcctgagggttatttcagatgacctctgatgccactgtcagaaagaaaatgctgagagctgttagtctgagttgattctagattagtatggcacttcttatgtttctaaatagttcatctacaaaatggcagtgtacatcacttcctgttctttcacaactggctctttcactggattctcttttaatgacttaatttttggcattctgatatctgatttgttaatttggttataattctcatgttttataggtggaagaatttctgagaatcagctggatttaaaggcttttaatagtttaagattatcttgacagtaacaaaacattgcttccaaactaaaggatagtattgcaaacaaatttaaactctgagaggttttaaagaagtacagcaatgtacagaatcagaagtatgagggcactgaatagaaaataattatcgtattttttataatgtcgattttgggagaagtgaggatatggcaagtaattgaatgggtgttgatataaaataaactttctgtataacaaggtgtatacatgatatttgggcccatgttacgatgccattttaacagtaagaaagcaactctttagttacaggatactagaaagactggatgctcataactaaccatgagtatgatttattttaataatttgccagtttttttttttttttttttttttttttttttttgagacggagtcttgctctgtcgcccaggctggagtgcagtggcacgatctcggctcactgcaagttccacctcctgggtttacgccagtctcctgcctcagcctcctgagtagctgggactacaggcgcctgccaccaagcccagctaattttttgtatttttagtagagacggggtttcactgtgttagccaggatggtctcgatctcctgaccttgtgatctgcccgcctcagcctcccagagtgctgggattacaggcttgagccaccgtgcccggcaaatttgccagttcttaatagacatgaatatttagtaaatccagaagatatctaggggtcagttgttggcattgaaattagagttgagatcaatctgtctttcgtgtctttcacctggaaataaagtctgtgttttgcatttggcttatttgtatattaaaatcacttaatttttcatttgtatctctgttttgttttcactagtctctgttacttataacaattaattgcactcatactaatttaatcttttagaaatgaggagcatttttggtacatattagttgagggttgctgtttggatgaggatcatatgtgaacgaatcccttcaaaaaagtgttatttctgggctgggcaaagtggctcaggcctgtaatgccagcgctttgggaggctgaggtgggaggattgcttgaggccaggagttcaagagcagcctgggcaacatagcatgaccctgtctctacaaaaacaaattttttttttaattagcatgggctaggcatggtggtttatgcctataatcccagcatgctgggggctgaggctggaggatcacttgagcctaggagtttgaggccagcctgggcaacatagtgagaccctgtctccaaaagataaaaaatgaaaatattagtggggcgtgatggtgcgtgcttgttctaactacctggcaggctgaggtgggaggattgcttgagcccagaagatggaggctgcagtgagttgtgatcatgccaccgcactctagcctgggtgacagagtgagactg

SEQ ID NO: 85857 - DNA, 1040 bp, Homo sapiens
tcactctgttgcccaggctggagtgcagtggtgaaatctcggctcactgcaagctccgcctcccaggttcatgccattctcctgcctcagcctctcgagtagctgggactacaggcgtccgcaccatatctggctaattttttgtatttttagtagagatggggtttcaccatgttagtcaggatggtctcgatttcctgaccttgtgatccccccgcctcagcctcccaaagtgctgggattacaggcgtgagccaccgcacccagcctatggacgtgtatttttatttctactaaccctaagtcttctaaattagaaactttgggattatttttgatttgtttaatctcttttctcacctatattcacacaataggttatgaagtcgtgggatttcttcttttgaaatgtgtttcattctttgttctcttttccaagtatctgtaacattcttgtgagagggtgtatgtgtgtgtgtagccttattttaggagtaggggatgtaaggatgattgtgcagatgatatatttgctcagtgaggtttaaagtcaggtggggatgctgacattgaatttataggatggggaaaagggctattgctgttggaagcactctatctgtaaaagtatcattttagtccctgttttgttctagtcttattattgttgctatttttagtttgtttttgttctgttatgtattcacggatatgtatgtggtgtaaagtggtgaaaaagtttatcgtcatggatgttctcattgctgtgtgagcgggcaaagcacttaatctctgggcctcagttcattgtctgtaaaatgggaataataatactttccacatagtgttaaaaggattagatgcattgttacatgtatagctcttagttttgtttttgttttttgagacggagtttcgctcttgttgcctaagctggagcacaatggcatgatcttggctcaccacaacctctgcctcccaggttcaagcgattctccttcctcacactcccgagtagctgggattacaggcatgcacca

SEQ ID NO: 85858 - DNA, 1051 bp, Homo sapiens
ttgtttttattgttttttaagattatctttgattgacccctccatatctatgcagcttgcttttccttccttccttccttctttccttccttccttcctctctctctctctttctctctctctttctttttttgaaacaggatctcactctgtcacccaggctggagtgctgttgtgcaatctcagctcactgcaacctccatctcccaggttcaagcgattctcctgcctcggcctcccgagtagctgggactacaggcatgcgccaccatgcctggctaatttttgtatttttagtaaagacggggtttcaccatgttgaccaggttggtctcgaactcctgacctcaagtgatccgcctgccttggcctgccaaagtggtgggattacaggtgtgagcccccatgcccagccgatacagcctatttctgattactgcccagcacactttgcctatgtttatgatgtctcttttagtgcccttttggtctcatctcttctttttctctgtccattcaagtcctcttccatgaagttgtccccaactgcttcagcttatactgtccttgttcttctctaagttctttttggctcatttatcagtgtcccagtttagtacttaatgagatattttcctttttttgtaagtacttaattgtcttagcttttactaggactatggttattttgtgtccctcccatttaatgcctagcataggacatacagtactaattgttgaatagaatctaattgaatttttaaagtttaagttctttaagtgttggatagcagctagcagttataatagagaatttggcagtgaactagggcaactatttatacaacgaaagtaaaaagcacagcatagcttcatgaacccatataaatgttgatgctattccactgtattagaccgtagtagaatcagaaatgctgaacccatgggaattgcttgtgtgagtcttgcacgggaattgcacagtaggtctttgaactttctgaggttgtgtacaaatttggtatgaatatgcacatgtgcatttttctag

SEQ ID NO: 85859 - DNA, 1025 bp, Homo sapiens
tagtacactagcatacggtatctgaaaagaaaagaagtttcctgttgtcagaaatactgtgggcacatcttgcgttattgtgtatttttaaaatagtctcttttatattatcttctctattgatgagatgactgcatcagaagtggatacatttttaagtattgacttagaaaacctcccaagatacaaagattatctcatttttttaaagtgctgtatagtaggaatctgtttttgaagtaccatggtgttcatgatgatgaaacaggtttaggagctactgcagtagtacccacactgccttttcagtgaaattctagacatgagataaatttgtagatcagtatatgaccttatactaattattcttagcagtttttgccttttctgactttttttttctatttttctacagtagtttatgccaacgtgacttcattcatacagatgaaccaaggatcgggatagcagtataaaattagaatcaagacagctgactgctcagcaggatgccatcaactaacagagcaggcagcctgaaggaccctgaaattgcagagctcttcttcaaagaagatccagagaagctcttcacagatctcagagaaattggccatggaagctttggagcagtgtattttgtaagtgttagtggcttgatgtcagtgactaaaatttacttaatgtccactcctgacagagcaaaatatagtaatgaaaagagatataggccatagtcattttatagtcacttgcatagggggaagagagagagcgcgagagcgagagcgtgggtgagtgtgtgtgtctgtgtgtaaaattcaaatatgaaaatagttttatttattgaacttcttggattattgaaaaaatgagaaagaatattattttgtgggccaggcttggtggctcacgcctgtaatcctagcactttgggaggcaaggttgggtggattgcttgagtccagcagtttgagaccaccctgggcaacatggtgaaaccctgcctctacaaaaaatacaaa

SEQ ID NO: 85860 - DNA, 1024 bp, Homo sapiens
gaatataatttatttaaactttttaattttgacattttatctaaaaatgaccatattttgggaggccaagacaagtgaatcacttgaggtcaggagtttgagaccagtctgagcaatgcagtgaaaccccatctgtacaaaaaatagaaaaattagatgagcatggtggtgtgcgcctgtagacccaaatacttgggaggctgaggtgggaggatcacttgagcccacaagatggaggttgcagttagctgagattgtgccactgcactccagcctgggtgaaagagcaagaccctcccaataaataagtaaaaccaagcaaagttgcatgttcttgttaactcttctaaatttagtaattacttttattcttatataactttctgaggaaaagtcctgttcataattctttaccttttttctccccacagaaatggcaggatattattaaggaagtcaagtttctacaaagaataaaacatcccaacagtatagaatacaaaggctgttatttacgtgaacacacagcatgggttggtatttgttctccccttgttgcagttttagctgattttggtttataatgaattaattcagaatatctcatactggttgtgtaaatgcatgcaaaaacacctgaaatgttagttcgtactgaaagaaaacaagcaatatttcctagaacttgtaggcagtaagagataatagaacttttgcaagtctcactgcagagatttttcagaattctgttgacctttgtatgtatgataaaatgtcctatgacagttttagtagtaccattcaaacattgtgaaaacaatcatgttacttgaggttgaaagttagcatatgttttcttgacataaatgtactgtaatgcatttaaccagaaagatcatgatgaaatttgggtgaatcctggtgaaatttgagctgatcacgattccttggtcgaataacactaaagatagagaattgttgcactttattataagaagtagaaatttattttgcccttttgtta

SEQ ID NO: 85861 - DNA, 1044 bp, Homo sapiens
atcaccaaataattatttaatatcgttagctaagagaagaattggctatgaactgtactttaacaactgacacaactgcatacaagttataaagtttaataatctttatcatcttggaaaataaatctcttcttgctaagtatcagtttttaaaaattgccccatgtattagatatgtatttttttaacaaaaatgttctgtgtattaattattttgaaataaattttaagttcacaaaaagccattacaagaagtggaaatagcagcaattacacatggtgctcttcagggattagcctacttacattctcatactatgattcataggtaagtgctttggaaattatatattgataagtaaatggcttgttgcatataccaactttagaatttattaactctaaagtttttattggttaaagccaaataaaataatataagctcatatttttttagatttttcatgtcctaaaatgaacatagttgtatactttatctcactaggataatttttatctttgcctatatgtgctgctggaccttgtaaaaatatgtatactttctagatttgtggtagaaatttagctatagaatcatttaatttgcaaactggaatgggcattagagaatcatacagtttttctttctcattttaccggtaaaatcactgatgtctcaatttgtgactaatttcctaaaggttgcaaagctgagtagatagagctagaactaaatctagatcttttgtcttcttggtaactgataatgacatatttattccattgattctatgacatggacgaataaaagctgcttaaggccaggcgaggtggctcacacctgtaatcccagcactttgagaggcctaggcaggtggatcacttgaggtcaggagttcgagaccagcctggccaaccaatatggtaaaacctcgtctccactgaaaatatgaaaattagctgggctttgttgtaggcatctataatcccagctactcgtgaggctgagagaagagaatcacttgagcccgggaggcggagttt

SEQ ID NO: 85862 - DNA, 1073 bp, Homo sapiens
ttgggaggccaaggcgggcggatcaccaggtcaggagatcgagaccatcctggctaacacggtgaaactccatctctactaaaaaatacaaaaaattagccaggcatggtggcgggcgcctgtagtcccagctactcgggaggctgaggcaggagaatggcgtgaacccgggaggcagagcttgcagtgagccgagattgcgccactgcactccagcctgggtgacagagcgagactctgtctcaaaaaaataaataaatacaataaataaataaatacataaatctcacactatatatgcattgctaaatatttacctcacaacctgtaatgcacttagttcccgttataaaaattcttatgtccagatatattggctagaattcaaaccagtgatctccatgtagatgactgttacattctcaaaggatagaatactttttaaaaaaaatctttaatttaaattaacgttttgttctaggatggccccagaagtaattttagccatggatgaaggacaatatgatggcaaagtagatgtgtggtctcttggaataacatgtattgaactaggtaagcattgttcttcattactatggattaagttttgatcaatgttttacctcaatttctgtaccaatctataaaaattatagatttttatcttaaatgtcactttataaggggggcaatacatttattaaggttttcactttggttatttggtaagttttatttatattagggttacctatattatatttgctctgttccattatatctaaaataattttccactgtggttttaattaagtttgaggaatctatgtctaacattaatgagtatttgttaaacacctagaatatgtttatgattaccagatttaccagctatagaagatctgtaagccattcataactagctggggtagttactactttttttttaattagggatgaaattagatgtcagactgtcatacctacataccattttgtaacagtttgatatatatatatatacatattttttttttttaagacggtaaggccgacttcattcaacaggggcc

SEQ ID NO: 85863 - DNA, 1046 bp, Homo sapiens
acagtctaatgaatggtgagtattgttaatatatatattgctcagtgttgaataaatgaaatgctttttcataatctgttatcaaagtgatttaatttcagttaggtaaaatgtatcaccttataagatattaaaatagatgtattttacccttttaaatatatttattctttatcatgtttccatttcatggcatacgtataactgagttcagaaaaggatggatgatgtcacatgaatgcaaaaagtattcattttacaagaatttgtattttactttctctttaaatttaggaatacctaatcctaattaaataataaatagcatttaagcattaatattttataactaaaatatatgtattattacaacctatagtgatatttgattggagggatggtttataatttatatgatataaaaatataagtaaaatgatttgactttatcaaaattaccaggtaattaaaaatattgggatcactctaattatcatatttgttattcagttttatctgatattccttctaggacttccttgatttgttaaaatttagttcattcatgtaaagaggtttatggacaacagattgacaattttagaaaactaggatttttatcaacagtataaaactgtagtagaaaattaattcctcaggtgtacctagcattcgataaattctagggggatatttagcatatttaataaatattttgaaattcacagacatataaattaggggtacttaattatttaaagagtacataattatggcacattcatataagtctttgccacttaagaatgtgccatataactctagtaaactaataatgctaaaactctgtgccaaaagattctttctatataactctactttgtgtttagaattatatagaacgaatcttttgacactgagtttagtgttatggtatggtttagtacattttgtgctgctgtaacagagtatcagaggcttggtaatttataaagaacagaaatttatttctcactttctggaggctgggaagtccaggaccaagg

SEQ ID NO: 85864 - DNA, 1048 bp, Homo sapiens
tactcaggtataaaaacactctctccagagcagatagagtgatattctgaaacatgctatatagaagaagatccaaggggcaaataagaaagagcttattataagaaaggcttagcaaaaaggaaaatagaaaggaatgttatcttgggtttgaaagaaaaaaaaaagtagataggcttccctcattttgcctcgatatagtaatatgagttgtgatatttaaatatgtaggagcaggattttaaagtaatctgtgtgaatttatctttggaaaatggtgaacattcattggttgctttagatagatcttcatagacttatatgaaactgtatagtctctgcttttttttaatcattccctttccatttcccctcccaccaataggcacgtgtcttgatttgtgaatgtatttttaaaggaaatagcaatgtgttcacttgatactttcctttacaataggtctgattattttcgcaactttgtagattcttgcctccagaaaatccctcaagatcgacctacatcagaggaacttttaaaggtcagttctattatagtttatttatttattttattttaagacaaggcctcactttgtcacccaggctggagtggcagtggcacaatcacgtctcctgcagccttgacctcccaggctcaagcgatcctcccacctcagcctcccaagtagccgggactacagacacatgccactgaacccggctaatttttgtatttttgttagaagtggggctttgccacattgcccaggctgatatcgaactcctgggctcaagtgatccacacctgcctcagcctctcaagggcttggattacaggcatgagccaccagttccattatactttaaatttgttcttacccctaagaaatgattgtaaagaatgtgttttattatttgattctgaattaggattaagtatactctactagtttttaataaaatactagttttttatgccgttgtttctgataacttttcttagatactaaatttttgtattttgtttttcaaattgattagctgc

SEQ ID NO: 85865 - DNA, 1049 bp, Homo sapiens
aaagaatattgttcacgcagcatataaaggaacccaatatctagtgtctaaattcatctttcataattcaccatcattaaatacattcctgttgaaacaaatatgactcagagctgaacatgtcttttgtgtgaaatcatcagttcttagaatatgtaaaccttgagagctctgattggacttaattcttagtgtttagacccttcagttattttaactctgcatttttagttggccaacaaaaatattatgttcaaaataaagaaaaagaatagttatgtatgcacagagtatatgtatgtaaatgataattttataaatagaagaaatttaacagaattatatagctatagattacatgcattatctatcataggatattatctctagggtctgagaaggagtaccttgtcactaattgaaaaaaaaatcaaccttttaccttctaccctatctagcacatatttgttcttcgggagcgccctgaaaccgtgttaatagatctcattcagaggacaaaggatgcagtaagagagctggacaatctgcagtatcgaaagatgaagaaactccttttccaggaggcacataatggaccagcagtagaagcacaggaagaagaagaggtaagagataaaaaaatgactccaatattgaattttcacttttggtttctttccttatgcagcttgccctgccataatttaccttatataccaagggtttccaggttgtattttctcaacactggtcctataaaatcccagttaggaataaaaaaaggtccttttttcttggagaaataagaaaagttaaaaaaaaagttttttttaagtctttaatcatgttagattgcatgctctaaatccaacccctttatggtacacaatgtcataatgaaggttctgagaagtccttcgttaaagaaacttgttcatctttgtttagtctaggccttctctaatttcttgaccactgaacctgtttttttattttttaatttttttgtttattttgagacggagttttgctcttgttgcccaggttgg

SEQ ID NO: 85866 - DNA, 1167 bp, Homo sapiens
ctacaatgaagtttctagtactttatttttttttaaatgctccttatggagcagggctacgccgtaggcactgtgcccagaatagccagtgctttttttttttaaaaggagagatttgtattaaccaagaattattgagaaatgagcaggatctctatatataccccatgagatgtactgtagaaatggttattttaaaatatcaagcaatttagataaaatattgtactttgaaaatcacccaaatctgatcagctgactttgttttagacagttggttgaatttttttgtgatttacttgttggtcatttttgtttttcaataaactaacagttgataaacttcctggtcttggaaaataaaagcaatttctcatgatagaccaactttctgagactgtctgccaagtggtatgctaggtgcttatagtcaagaattcagaagagagagatatatattaatatttgaactgaactgaatgtccttttctcttaggaacaagatcatggtgttggccggacaggaacagttaatagtgttggaagtaatcaatccattcccagcatgtccatcagtgccagcagccaaagcagtagtgttaacagtcttccagatgtctcagatgacaagagtgagctagacatgatggagggagaccacacagtgatgtctaacagttctgttatccatttaaaaccagtgagtatttggatttcaatgaaagaaattcaatgttggtaaactgttttcttcatctgttagtttaagagaaggaagaaggaagataaggaagtttcccgaagtttggaacatggctgggctcagtggctcatgcctgtaatcccagcactttgggaggccgaggcgggtggatcacttgaggccaggagttcaagaccagcctggccgacatggtgaaaccctgtctctactaaaaatacaaaaattagctaggcatggtggcacgtgcctgtactcccatactcccacctacttgggaggttgaggtgggagaatcgcttgaacctgggaggtggaggttgcagtgagccaagatcccaccactgcagtccagcctgggcgacagagtgagaccctatctcaaaaaaaaaaaaagtttggaacattttttaatggaaaaagccttgttaactcctaacctgtta

SEQ ID NO: 85867 - DNA, 1033 bp, Homo sapiens
aaattattcatcaacggatgtattaacaaattgtggtttataggccaggtgtagtggtttacgcctgtaatcccagcactttgggaggccgaggcaggcggatcatgaggtcaagagattgagaccatcctggccaacatggtgaaacaccgtctctactaaaaatacaaaaattagccaggtgtggtggcacacacctgtaatcccagctactcaggagtctgagacagaagaatcgcttgaacccaggaggcagaggttgcagtgagccgagatcatgccactgcactccagcctggtgacagaatgagactctgtctcaaaaaaaaaaaaaaactgtggtttttacatccagtagaatattactcagctataaaaaggaatgaagttccaatacatgctgccatatggttgaatcttgaaaacatgttaagtgataaaagcctagacacaaaaggacaaatattgtataattaaacttctataaaatatctaaaataggcaaattcatagtgacagaaagtaggttaggagttaccagagactgggtggaggtcaaaatagagagttattgctaatggatgcagagtttctgtttgggttgatgaaaaagttttggaagtaataggtgatagctgtacaacattgagagtataattaataccacttaaaatggttaaaatgggctgggcactgtggctcattcctataatcccagcacttggggaggctgattcaggagtatcacttgaggccaggagttcaagaccagcctgggcaacatagggagaccccatctgtttaaaaaaaaaaaaaaaaaaaaagaaaagaaaagaaaaacagccaggtgtggcatatgcctgtggccccatctactcaagaggctgagtagtggaggcacactgagtagtggaggatcagttgagcctgggagatcaaggctgcagttagccttgatcataccactgcactgcattctgggcaacaaaatggagaccctgtctcaaaaaaaaaaaaaaaaagattattccca

SEQ ID NO: 85868 - DNA, 1077 bp, Homo sapiens
aaataatttcttctaattatattgaaaataaagttggacatattggcttccacctgtcatcctagcactttggaaggccaaggagggaggattgcttgagcccaggaattctagaccagcctagtcaacatagggagaccttgtttctaaaaaaataaaattagcctggcctgatggcccgtgcctgtagttccagcttctcaggagtctgaggtaggcagatcgtttgagcttgggaggttgaagctacagtgagctatggtcataccactgtactccaatctgggtgacacagtgagaccctgtttctaaagaaaaaagaagaccagcatttctactttttggctttgctttttaaaattatgtctttgagattgattgatcaagttgtctttaaactttaatttccataaagattcaaacaaactgttcaccttacataatattgtctttttttttttttcctaggaggaagaaaattacagagaagagggagatcctagaacaagagcatcagatccacaatctccaccccaagtatctcgtcacaaatcacactatcgtaatcgagaacactttgctactatacggacagcatcactggtatgtacttacccgaattagagataaatatatttttcatgtgggaccttggcaatataaactcaagtatagctatatattgttttgtatttgggttttattttacgaaatactcatttaatatttaagtgcctattaagagaaagatgttattcaaagaactctgagaaatgttaaactaacaatgtcttcatgacacgtacacaaaaaacgagtatgttagaatatcttaaataagataactacaaggcactaaagaggaattcagataacttttgattaggagcataaatgaagtatttatgaaatagtttgagtatttaaaattagttggatttaggcacagcagggagaggagaaatgaatggtatttccatataagaagaatgtgggccgggcacagtggctcatgcctgtaatcccagcactttgggaggccgaagcgggcggatcacgaggtcaggagatcgagac

SEQ ID NO: 85869 - DNA, 1024 bp, Homo sapiens
cttgactttcttggtagaaaaatcaattgaacatatgtggatctctttctagtttttattctatttccttgatctacttagcctatcttaaagccagtatcacattgtcttgattactatagtgctgcatatcctccaaatattttttttcctcaagattgttttggatattctaggttcttttatatccccatataaattttagaaccagtcaatttctttaaaagacttgttggaaatttccttggaatctgctaacattgggatattttacactaattccctacttagttaatatagaattgtctaaaatgcttttcgaagaagaatgttttattttcttcttttccttacattatttgtatgtctaggttacgaggcaaatgcaagaacatgagcaggactctgagcttagagaacaaatgtctggctataagcgaatgaggcgacaacatcaaaagcaactgatgactctggaaaacaagctaaaggctgagatggatgaacatcgcctcagattagacaaagatcttgaaactcagcgtaacaattttgctgcagaaatggagaaacttatcaagaaacaccaggctgccatggagaaagaggtggcttattcagtattattactttgcttattttaggttttgaatgtctcagaattaaccaacatggcagtttgatgttagcgtatctgttcccgtgaaccaagcaaattggggaaaaggagaagcatttatgtgacttatataaaggtttctgtaaattgatattacaagaaagggtggcacctgtgtgttttatctctcactaattttgtgtgtgggtcatttaaaacaaatcagtcttaaaactgttcattggagtagtccactttatagtttttgtaatagccaacaaaattttgagtctgaaaaattgatgtgttttaatatcaagtactaggtctgggaactaataagacatgggaccatttcctgattattgatagttttgtagtgtcacaataggtaagttactcagt

SEQ ID NO: 85870 - DNA, 1203 bp, Homo sapiens
cctgttagccaggatggtctcgatctcctgacctcgtgatccacccgcctcggcctcccaaagtgctgggattacaggcatgagccaccgcgcccagctgtgtccgtgttcttaatcactacactaaccagagtagactgcgtgtaaaataattgaatagaatactctgaagaaattgaaaggataacttaggagccctcttcaaatataaaattaggaagtatacaaaagaagaatgttaaacctcttgatatagatttagtcttaagctaatggtaataaaataatatgaataaatagtaaatgaatataaggaaatttgtgctactaattgcccatttaaagaggtaaaagtcacaaccctcttatttactatgcaactataattgaataacagggttaattacatctgtttactggttattctgttaattaggacttttttctggcattatacagcagtaagttatacctttgtcttttgtgttatggattaggagttaaacaaaagacagactcagaaggacttagagcatgccatgctactccgacagcatgaatctatgcaagaactggagttccgccacctcaacacaattcagaagatgcgctgtgagttgatcagattacagcatcaaactgagctcactaaccagctggaatataataagcgaagagaacgagaactaagacgaaagcatgtcatggaagttcgacaacagcctaagagtttgaaggtatggttagcctaagctttttgataacagggaggagaatgaaaaggtatccatgtaagcaggaaaagtcttaagatgatgtctagtcataaagaaattgactaagcttcttttcatttttagcatctttggttgactttaatgttaaatgcctgttgctacagtcttttgcttatgtatttctcatcagagtacaaaaaagtggccaaaacttttaaccatgggaagtgccagtagataagaatcaagattcttgttttaaacttatccaagggcagggtgcagtggctcacgcctgtaatcccagcagtttaggaggccaaggcgggtggatcacctgaggtcaggagttcaagaccagcttggacaacatggtgaaaccctgtctctactaaaaatacaaaaattagttgggtgtggcggcacatgcctatagtcccagctactcggggggctgaagcaggag

SEQ ID NO: 85871 - DNA, 1169 bp, Homo sapiens
taggaggttgaggctacagtaagcaatggttgcaccactgcactccagcctgggtaacagagtgagactccatctcaaaaaaaaaaagaaaaagaaaaagaaaaaatgtaattctctgtcatgaatatgcatagtaatcaaagctaattttaatatctactcaggtcactaactttattagtgaaacaacagatattgttacaagtcctatcataaatggggctgtttatgccctaatgttttaaatgaggttttttgttgtaaaactgcataaaattcaatcagcagtttggccaaatagccaagtgcaaaaagtacctgcaacctgatgatctgacctgcttggctttcctctcatttttttcctagtagcctttattttcatgtatgtaagcataccatataccaaatgcctttcgttacaacttacataaatgtatttttttttcttcccagtctaaagaactccaaataaaaaagcagtttcaggatacctgcaaaatccaaaccagacagtacaaagcattaagaaatcacctgctggagactacaccaaagagtgagcacaaagctgttctgaaacggctcaaggaggaacagacccggaaattagctatcttggctgagcagtatgatcacagcattaatgaaatgctctccacacaagccgtgagtttgctttttttggggcaaaacaaatttagtgccccttttcttccaccacctgaacgaaatcacagcaattaaagtactagttggaaatgatagctctcctgaagcttgggaaatgtggtggtggttcattttcttcctgttctcaacattgcttgaaaatgtcatgatgcatgtagaattctcattgatacatttagacatgaggttctaaataggctccctgccagcacagatcctaacaccttattgagattagaatagcagctttgggaagcagtgagcaaaaggtatgattataatgggaataaaaatggttgtgtttgagtacaagtacaaatttttttttttttttttgagacggagtctcactctgtcacccaggctggagtccagtggcgcgatctcggctcactgcaagctccgcctcccgggttcacgccattctcctgcctcagcctcccaagtagctgggactacaggcgcctgccactatg

SEQ ID NO: 85872 - DNA, 1027 bp, Homo sapiens
cacttgcggttaggagctggagaccagcccggccaacacagcgaaaccccgtctccaccaaaaaaatacgaaaaccagtcaggcgtggcggcgcgcgcctgcaatcgcaggcactcggcaggctgaggcaggagaatcaggcaaggaggttgcagtgagccgagatggcagcagtacagtccagcttcggctcggcatcagagggagaccgtggggagagggagggggagggggagaggggattctaggtttttcttaagaaaaatatggttattcaggcatcttccaaatagcttatgatagctttatcttcataccgatattggttattctgcatttctttttcagagatgtttactccaagatacaagagagaaaaattgtctaaactaaaaaagagtagtctgtcttctaacactcctcctcctttccataggtcatgaattgatagctaacattaggatatatcttttttttttctctctctctctctgtctcagctgcgtttggatgaagcacaggaagcagagtgccaggttttgaagatgcagctgcagcaggaactggagctgttgaatgcgtatcagagcaaaatcaagatgcaagctgaggcacaacatgatcgagagcttcgcgagcttgaacagagggtctccctccggagggcactcttagaacaaaaggtataagtaatagaaggaaaaatcattgttttcgaattagcttttgtcagaagcgttttataaatatattttcatgttggcagaggtcacattagatttctttcacaataccacatttcctgaattctagttatggcagcagatttttctttaaaattactgattcactgatgaaccttatcattaatgagctccagaaatcaagggaatataattaagtagtaattgctagagaaaagatatgggtgtgtgaagacagtcagctgaatttgagagtagcagatatggctctattttcctcacttctgtgttcctagcttgctctacctaaggaggttggagaa

SEQ ID NO: 85873 - DNA, 9467 bp, Homo sapiens
agggtttcaccatgttagccaggatggtctcgatctcctgacctcatgatccgcccgcatcagcctcccaaagtgctgggactacaggcgtgagccaccgcgcccggccttgatttttaaatgtatatccatagcatcaaataatagacactagagactacagaaggtgggagggtgggagatgagtgagggttgaaaaattacctattgggtacagtgttccctattcaagttatgggtgcactaaaagcccagacttcaccactacgcaatatgtgcatgtaaaaaaaatctgcagttgtacccccgaatatataaaaactttaaaaattttttaataaattaaagggaaaaagtttaaataaaatttgaaactcatggacaaatatacatccataaaataaccacttcaaagctgaataattattgcttcctttctttatagacttaaaaataataaattggctttcatttttcttccaatctccaacagattgaagaagagatgttggctttgcagaatgagcgcacagaacgaatacgaagcctgttggaacgtcaagccagagagattgaagcttttgactctgaaagcatgagactaggttttagtaatatggtcctttctaatctctcccctgaggcattcagccacagctacccgggagcttctggttggtcacacaaccctactgggggtccaggacctcactggggtcatcccatgggtggcccaccacaagcttggggccatccaatgcaaggtggaccccagccatggggtcacccttcagggccaatgcaaggggtacctcgaggtagcagtatgggagtccgcaatagcccccaggctctgaggcggacagcttctgggggacggacggagcagggcatgagcagaagcacgagtgtcacttcacaaatatccaatgggtcacacatgtcttatacataacttaataattgagagtggcaattccgctggagctgtctgccaaaagaaactgcctacagacatcatcacagcagcctcctcacttgggtactacagtgtggaagctgagtgcatatggtatattttattcatttttgtaaagcgttctgttttgtgtttactaattgggatgtcatagtacttggctgccgggtttgtttgtttttggggaaattttgaaaagtggagttgatattaaaaataaatgtgtatgtgtgtacatatatatacacacacatacacatatattatgcatgtggtgaaaagaattggctagataggggatttttctgaacactgcaaaaatagaacgtagcaaaatggcttcagttatcacttttgggtgtctgtatcctaagaagtttctgaaaagatctaaagcctttttatcccatatcccaaattcttatgagccactcacagcaggcagcatatgttgaaataagttattactggtacacacctgcattgcctcaccagtgtatttatttgttattaaattgatctgacttctcagcctcatttggactaaaaaaagaaagcagaaatccatgaacacattgcttctcggccttttggctaagatcaagtgtagaaatccatgaacactaaaggacttcattgattttttcagagagtagaaaacaacttagtttttcttttttcctgaatgcgtcataggcttgtgagtgatttttgtccattcaattgtgccttctttgtattatgataagatgggggtacttaaggagatcacaagttgtgtgaggattgcattaacaaacctatgagccttcaatggggaagaccagaagggtgagaggggccctgaaagttcatatggtgggtatgtcccgcagcagagtgaggagatgaagcttacgtgtcctgacgttttgttgcttatactgtgatatctcatcctagctaagctctataatgcccaagaccccaaacagtacttttactttgtttgtacaaaaacaaagacatatagccaatacaaatcaaatgccggaggtgtttgatgccatatttgcaaattgccatctattgaaattctcgtcacactacatagacataattgttatctccttttggcttatgtgattttctgtttacaagtagaatagccaattatttaaatgtttagttgccacagtgaaccaggagtcactgagccaatgactttaccagctgctgactaatcttcatcaccactgtagattttgctgcatgtgcaggtcctctatttttaattgctgttttcgttgctgcagtactttacaaacttctagttcgttgagacttagtgaccatttggcatcaagttaacatcacacaataggaaacaccacttccacaagtctcaagcctcagtgctaaagtactactgaaaaggaactaggaagtttggccaattaaaaaaaaaaagtaaaataagttatagtggtcagggaatctcttgacgaaagctaactcttatttttcagggggcacatgttttgttttgttatgttttgttgtacaatgaaggatgaacccaatgctaaaaagtcagttattttcttggttttccatttcttgtatataaattgtgttggaggtgggtaggaagctgtgagtatgacttgaagaaaaatatccttttcagtgacaaatcagagtttcttacaagttattgtcctgctcccttccaagttgtcttgaagaatccttgctgctaactctggatcctgcttttcctatagtcagagggctccaaggtagaactctctaagtccctctcaatggcactctttgcctagaccaaactaatgaccaaacagtaatcaatctatcactgttgaagtcctggttttctcaaccaaattttaagtctttcccaggtatgtcagtcgagttgccatgaatcctcacctgtaggagtttctgggattcattttaaggaaactggaagaaaattaatgttttaatgtaaatgtttttaaaaccaagatcaccatagagttcacacaaaattttaggcagtgtttcaagaagcactcttatgtgttgttctttcagcccatgctccaggtcaccggtttttaggtaaacatgacatgacatgtacttgtaatatcagtgaaaggggcttttagtcgtctcagtatcttttttgcattcaggtattatagcgtttccaacaaattgagaaattacttatttggtgtaaaatgacgagagagctttagaatttaataaaatgtcaaaaatacaatttgatacccttaaaaattattcatagatctggctgctctgtactactggatgggtggaatagggaagcagatcacttttgcatacaaaaactctttcaaacccaaaatattattggtggtacattttaaagtccaattgtggacttaaattagtcaaattgagagttactgagtccattcagatctccagtagggttttgtatctaatgtatttggccaccagttttacatgtaggtcatgactatacctggattttatcattaagttaactttaaagtatatacagtttgcaaaaaatgattcaaattaattggtttgtatatgtttgtgagatctagcttctgaggaatctcatacatagtaggaaccatcatagagtaaagcttgtagcagaaaaattggaagggttttgagatatcctagagaaagagcaagcactttctgaatcagtggggaaatatcaatatttgatcaaattaacactacctccttcccagtgttggtgttcactcactatatgtctttaagaaaattaaaactatggaaaatttgtctagcatatcagaagttgtaaatgctatatctggtatccagaggctggctgtaaaaagttccttggggtcactctatctcacattttttttggttagcattttaaaaatgcaaagccacatactttgaaatatattattccaaattgagctcccttccctttgcacatattttttcctccccttattgaagtcagctctaaccccaaattctagtatccaaaagtatttttatttgtataatgctatctgaaaaatgtgtttatattatattttcagagctgcaattcttattcgccatttcaatacctagagatagagagtcttgtatttgaagccacacacactggtgtaatatgcttagtactctaggtcaaggatttgttggtaaatggaacattttagcatagtcatgatttttggttgcctagacatcaggtaaacattcagtacactaaagaaactatcctggacactccctcctgcttccaccaatttttttctcacccccttttcaaaaattgaaaactctatgagtgtctttttgagaccataaagcagactttagtaactttctatttctgtaagtactaaatgtctggcattttaaacttttgtagaatacattatgttggacactggaataatactatttattttcacctgtgaaaaatgacttcattgtacttgaaacacctcctttgcatttctccatttgtgccattcactagtggaaataaattgtattataccatgatctactggctttttaaaactgtattaaatatgcacatttttggtatagctattatcatttgtatgtatatattgtatatacatatgagtgtctgtatgtgtgtatagatggatggatgtaactcatactgtacatttccatcagggcacttaaaagttctgttatttttgtttggttttgttatttcagtcctcagttaaggcaagaatgcatgtgtttcttaagaatgagtactctgcgttgatgtttatgagaaggtggtcattagatgcagtcttttcctttttaatcccctcttagcacttctgtgagtggagaggacattaagtaaaatttggaatcataagttgcaatgcagtaaaatggtgctggggaaggagccagttagtgtttctgtgagtttgtgttgtgatgcaataagagataagtaatgcagagagaaatgaaccatggaaagtaagaacactgatggtgattcctctgcaaagatgataagaaaaagaaccaataaatcacacaatctttatgtgctttctatatgtatttcttagtagtgataccattgatcctcttactttttttactccattaatactaataattatatactttgctgaggatcaaaacagccaagaaaggaattactgctaaagcatctaagattctcctgaactgtaaaatcaacaggaaatggccactgggagagaaggatttggtattgggtgaggggctttctccctttacctgcctcttcttgcttgctaatagtaagttctttgtgcaccttccaccacttctgagccactactattcaagtagagatttgccccaacacattaactttttccttggagatttatatggtcctgcattttgtcctgtgctcacaatgtgaagtgtcttctgtattcaaatcaaaaaataatatatttaaggtatataagtgtgaatctcctataatgatggaagaagaggttctcttgtcttagatagaaaagagccttctccaagagcaatgtcaaaacttgggctgtcatctttgagctgtttaccaaaatacagaccattattgaagaaaaacaaattatctattttgttttcccccatctaacatgatagtgcccccaaccaggttgtagcattgccttttaaaagagactcactcactcttagtttttaagaactggaaatttcccatcctcagatcccttaaaggatgaagagttggctgtacacttagcggacttgcctcttgtatgcaaggactactgattgaagtctgttttgctgtgtctggttatgttgtctgcacttttatgaaatcactacaataggtctgcattggaaatgactattaatttgtaaagaagtaagttttattaaacactgtctagaaaaagaaagtgaagctgagaactcttcctttattgtgcatttatattttctgctgaattccggtagttccctttaaagtcatgttgactaatgttttcctccttgtttgtattcagatttccaaaatttcactcatacaagggaagagactccatttagcttaacggtagtctttagatcataagaaatatataaattagtatgcaccttatctgcctgttgtgggtttcttaaacttgcacttcctacccacccaaagatagatatcctttaaagaaaataaaggcagagaattaaaactggggagccatttactatgtcaccatcactgttaactgtttcccagcaatctaaactttttgaagtttcagaggtgtattttttttttgtatatatgtctgtgtgattgtattgttttgtttctaaatatacaaggaattctttaaatagagaaaaaggttaatcctcactgaaacaccaggatgcccactggatatactaatctgaacatctgtaggtagtttgtcatgaaaaagtggagagaagatgagacttttgaatgaatgaaaaagggtatcttgatacccagaattccccccaaagtacgggtaattcaacctgcacagttttctttcactcaaagtgttcagcacttgtgagtgaaaaatcatgtaattatctgtaaatatgtagctaacaaattgacctagtttctgtatttttttgtttttgtactaaagtttataggtctgtgccagctagagagaagttgctgtcattaccagttgtggtcctagcatctaaccctgaaaccatcctaggtgacatttttagaattaatacttaaatgttaaacagggggaaatgaagcttaatcatggtcaggtttgagatcttttgcagtgaaataattttatttaatataaatgatcacatgtcctcaatcatgaatgaggtagggagcctctctcccccagtggccatgtttacaaaagtgtgttttgtctataaagtgcaagtgttttaatgtttatgtaaattatgcaggtgataacatggtttggaactgtttattgggctctttaactgaattttcaaatgaaatgaactatgcttattgctggcacattgatcccatttctggaacatttttcctatttccagagttacatatgttcttttgtcattacccaatttaacctccctttctctgatatgccttgtagccaaagtattaaaggctgatgaacatagacaagggaaatgcatttcttagaaatccgtgaaccctcagttgtatgctttcagtactcgtgttaatatgtttctatggcaactctgaggtcagtggtttagaaatgagataccagtgttaatgaaaagtgtgtgctctttgcttttgcatggcttggcttagtatccaaggtatattagggccacttgaaagcatgaagaccagttatatagggaacaggtttctctcagtggcacattttgctttttctgagccccaaatacattgcctgggcatgaacattgttaccgtaaattgcacatggtcatggactgaattatgtgactttaaaggatgtaactgcccaacatttgcagattctgggtggtctatgtgaccatttgtctcgtatccaaaaaccccggggctattggaacccttccaacactttttcctttgtcatagacaagtttatatataacttaccaagatgttggctgtcctggtgtattgccagacagctctcttttggttcccattccaaatgtgctgctgtccttctttgcatttcacaatatcaaagaaaccaccacccttcttcctaacagcattttatgccttttattccacattaaatgggaattgtgcctacttaggagtgcccctccaattaattacatgtgtccaagaataatccaagctagagacacaaggtgggaaaacatttcaaaaaaaaaaagtcctcttaaggccagtaatttatctgaaaaggtattttatcacaccttgacaccttatatatgagcctattaggagctgcaggtggtttcatagggtaaaatccaagaaaagagaaggatgtgtggggtttctattagaagataattttgttctcattttaccttttcttttatgatccttctctgctagaacaggttaattctccaaatttgttttgttttgttttgttattttttagggaactcttttgcaaaagcaatggtcggatgtaaataacatttaaagtatagtgcacataacttccccggactgttccaatctgataatttgtaaatgctttagagtttttttaattaacacttgtgttgctaaattctatttatgtaagtctgctaaagttttttagcccacttaaaacttaagacaaccatttaaaataatggatgggttactatgagcaatttcgctttcagaacccccttgttttagtatatgaaaaagcctaatgcgcattaatgaggttgaagagactatgagaaatatgtatagtgtatattttaaaacagctttgcttgtattgtgaagatttaaaaacaaacttgagatttttaacgtaactattaacacagttttaacataagttatcccactgggtttaagagcatcttgaatgtataatcctttttgtaacccaggttggtttctacttttaccagtcacccaaacatatttatgtttttagttttatgtactcatttccctttgttttcctcaaacagcatgatttttttgcacatgtagaaattttttaaaagaaagaaattagtacatcattttctctggattttcttcacttccctcttcctttctactaactccttccttaaaggccatatcactccatttgcattatttgtgcaaatgccagggttggtttttatttttatttttgctatttacctaaaaaaagaaaatgcttcagtcaattgcttttttatttaaaaaaaaaaagaaaaaaagctgtaaccttatcatttctgagtagaccattgagcgatgaatgcacacctgtagtagcccaggaccagctgtggtggctaaagggaatatgttaattaagcaagaggttcttttctaaaagtggtatctgttatccacaatgtattttagttattcccacaagtcaggggtccagataaaatgagggttatcagctaactgatatgctatcattgaggttcatcaatgaatttgtacatttctagttccctttggtgaagggaaaaatgatgattttgcaagacctagattttggcttggtttcttgcctccttttttggcagccttcatcttctcatctcccaaaccccctgagcccgtagggttttcatagtggacaaagaacttgtggtcttttaaaactgggactgatacttttttgagagagtatcgtgtcgaaagtgtgatgttctaccactttaccaataactaattttaaatacacattgtcctctcgatttttggaccaaa

SEQ ID NO: 85874 - DNA, 1050 bp, Homo sapiens
catggactgcttggccttcaagctccctggggaagcagagggaaacctcagggctgagcgagtgggctggggaccaagggcagcccgcagcctccgcctcttggcaccactagaagagggctgcctgggcccttgagatgtcacctctgtgccagggggccgccagctccgcagagcaaaggccagagccagggcctaaggagaggagagagagcaatcaccctgctgcccctctcagagaacccgagggccaacaagcctgggcccagcgtctctcacctgcacacaccctcttcggcacagcctccctctaccgggagttggctcggagggagcaggccctgaaaggctttcacagtagatccatgccttcttcttcctctgcttcctcctccgcctcctcatcagccagtgggcagcccaggctggctctacccaggccatctccagcgccagcccccatgcagtcagcaccaggggctacgagaggaggtaactgttagagctacgaggaaggtggggacaaacaagaggaaacccttgaattttccattccctgcacacggggccatagccttctgccagggccaggcaagcgcctttcatcagctacatacccgatcctgcgtgaggctgaagtcaggggtgagggaagggttagccatacaagcataggccaggagggcaagctggagcttcagccagggatgggcacaggggtggtagaggaaggtgacatcctcagcctggaggaaaggcacagagacatcaaagcaggcccagagccctcccagagaatctcaagttctcccatccaggggaccagtttaaaggtactcccaggatagctggatggctcttctaccttcagggcccaggaaaggacaaagggccctgggtattggcatgtacccactcttgcctctgagtgttcctttcacccttcctctccatcaagtgccacccttcaaagctcacagcatgcctggataatcctgccagactcagaccacactctagccatatttccctgcaggtgtaacgatggct

SEQ ID NO: 85875 - DNA, 1054 bp, Homo sapiens
gcgcctggaggcaatgccagctccaggacagaggctcaggtgcccaacgggcaaggcagcccagggggctgtgtctgttcaagtcaggcttccccggcccctcgcgcagcagcgcctccacgggcagcccggggccccaccccacgcactgaagaggccgcctgggctgccatggccctgaccttcctgctggtgctgctcaccctggccacgctctgcacacggctgcacagaaacttccgacgcggggagagcatctactgggggcccacagcggacagccaggacacagtggctggtgaggagttccctccctaccctacccgaggcccccgccccacctcgcgtcgcccgccgccccccgtagcttccctgccctcccgcccttgactgctcggcgcccggcccacagctgtgctgaagcggaggctgctgcagccctcgcgccgggtcaagcgctcgcgccggagacccctcctcccgcccacgccggacagcggcccggaaggcgagagctcggagtgacggcctgggacctgccactgtggcgtgcggctcctccccgcgccgcgaggccgcgacctctgccacgtggaccgcgcgcggggcgctccctggtggcgatggcgcggcactggccgagcactgcgggggctttcctccttgttggttgctgagtgggcggccaaggggagaaaaggagccgcttctgcctcccttgccaaaactccgtttctaattaaattatttttagtagactctggagttgagcttgtgcatctgccgcacagagactcccacccggaccctcgtcctaggccatggaggtggtgtttgaggcagcccgcccccgctggccaacctgtccctggacatggggctttaggaatgtgctcgtgggagggtggcgttatcgtcatacatgttagctttgttattcgcaaactaactcttccactagacagacgttcccagcacaggggcttccctagggcgggggtcctggggcacttgcagtcacccttcatgtctgccacctccctccagcccccat

SEQ ID NO: 85876 - DNA, 1010 bp, Homo sapiens
ggcagccaggtgccctggtgcccacccctgtcgagcccctaaggatggggaggtgggggggcaggagcttctgtcccccacattccatgcacctcccctctgtatatagcatctcccccctcctagtgagcaggggcctgcaaggcatcactcccagcccctcgccttctagggcaccctcagcaaaggggcaggtggggacactccaagtggggcagctctccgtacatgcgccccacccccatgagccagttcagccctactgggggctgagcgggggcatcccctcctttgtacatagtctccatggatgtccctgccctgtagccaccagccccttgctgctctccctttaatgccatatggcccctgcctagggcacaggccccaacctgtgtgctggggtccccagcagcaaacactggaaagtctgttttttttttttctttcttcttccccaccccttaattttaactttgtggtaactgagtgcccccgcgtgcctgcgtgttgagtgtgtgggcggcagtgccgttccggaggcctggtccatctggagttttgaggggtgaggggaccagagcagtgggaccagcatggggatcagcttcccttccccacctggagccagggactgtccgggtagccagttttggtcctgccagctgcctccctgatccctccccactctcgccccttctctatgaacttaaatcaaaaaccacttccctccatctcctcctgctcctgcgtggagggggaatgtgtgctggctagggtggaggactgagcacctgagcctggggctggctccccggggtccccgactcagctggtggctgtggagctgagtcccctccccgtaacctctgcaaggccagcacccaccatcactacctgcacctgctgtggtcccaccctctggaggcctgggaacctggctgcagcctgggaaggctggagaggcagacggtgggacccaccagctctctccccatcccgcttcttcc

SEQ ID NO: 85877 - DNA, 1020 bp, Homo sapiens
tgccgcagggtccaccatgacgctcgctgtgctaacatccccaggagctagaggacgacgccatctattcagtgcacgtccctgctggcctttaccgggtaagcctggggaaggcgtgtccatcttagccagtaggttctgagccccagggggttctgggctctgtgctgaattcggggcttaagatgattagactgacctggtccctgctgcactgctggtgagcaggggggcagtggggcacactgactccatccagcgctgccctgggtttcagatccggaaaggggtgtctgcctcagctgtgcccttcactccctcctccccgctgctgtcctgctcccaggagggaagccgccacacggtaatgtttccatgcccagtgcccacagggtggctgggggccgtgtgggctaggggcagtgtgggtccaggaacacggcgctcacagccccttccctccgccctccagagcaagctttcccgccacggcagtggagccgacagtgactatgagaacacgcaaagtggggacccactgctggggtgaggctccctgggtctccagtccagcctgctcacatgccgaggcggggaggttgagagggcccccagtgtgtgaggaccaaggcgggcggctccgaggctggaacgtgtctttctctatatgtatctttgtctctgttttctggacctgggcctcaggctggaagggaagaggtttctagagctgggcaaagaggaagacttccacccagagctggaaagcctggatggagacctagatcctgggcttcccagcacagaggatgtcatcttgaagacagagcaggtcaccaagaacattcaggaactgttgcgggcagcccaggagttcaagcatgacaggtactgagtggagggggaggtgagggggatgcagttcctgttggcttctagggtgttgcagagagcatgaggggccctgggttctgctgtccctgggaacctcccttgagagccccctgctttatagcctcc

SEQ ID NO: 85878 - DNA, 1028 bp, Homo sapiens
caaagctgctaagaagaagctgcaggcggtaagtctgctccaacagtgccctgacacttgaagctggcccctctctgatcccccaccctctgctcttgcttcctctgcctctgactcgatgaccttttccaagtctttgacctgtcccctcactggcctcagcagtcccctctccctgacctccctacaaggggatggactggtcccttctctcccaccttggagtttggaacatgatccctttccactttcccattctgagactgtaggggctgggcagcacaaggaaggccaccggttccccaaggctcacaacatgctggggagctggccttggcactgggagccgatgcatctgacaacatctgggcccctctcttcctccagctcagcaaccggctttttgaggaactcgccatggacgtgtatgacgaggtggatcgaagagaaaatgatgcaggtgagtcagggagcaggagtgtctggcgtggaggacccgagcggcccaggcatgggtctctggtcctttactgggctaagaaggggtgcctggggttggggctgctcagaggcctgcagatgagcccctgctggctgtgagcctgcctgggcagcatcccaggctgggtagagtgctgagggggaggcggctagcgtgctcctcccccagcctcagactggggctcctcttgctctggcagcctcccactttggctgtctccctggtaccgctccacccccctgcatcactccttcctggccacagccggattccagcccaaactctgggtttggatgagtggcactggccttgttccatttgtctgtccccagccggccacgcccagccttgccctggcccggcctagctctgcgtgcccaaagaccacccctgttctgaacaccagtgctcagtaggcgtgggggcagctaggaaggctgggctcagtgcttccccacccccaccttgggggcctggccaccgtggctgatctgctcctgtccgtcccctacagtgtggctggcta

SEQ ID NO: 85879 - DNA, 1021 bp, Homo sapiens
gagcaggctatagaggcagagggacagcagcaagtgtggacatggcatggtctcaggcatgaaagtgccacatcctggcaattctactcattagcctcgcatccttgaataagccctttaacctctctgagccactgtttcttcatcacagaggtagcatgtcctaccttgcctgacagttgcaagcagcatcacacataatgtacccagctggtacctagtgggtgcccagtcaagcccagctcctttgctctgtccatcttccttaagagggctccagcttacaccctcagtgatgatggcaggaggctccagcatgaaaggacctcacctgctggcaggaggccagaggcaggacctgtggacgggtgtgatctgtcaggcatgtttcaacagcatctggcatgcagcagcatctgggttgcatccccttggggatcccttcctcccttcgggacgggctggggcagagacctcgtttcctgggaaaaggctgagagactggtagcagtggctgcagggcaggaaactgtgcctgctgaatgggccctggggactgcatatcccagaggggtaaggatgtaggaaagggcatggctctgtcagcccccagctgtgagctcttggggagatccctcactggtaacctggccgtagtgatggtcccagctcctaggctgttggagactgagtgagtgaatgtgtggagagtactaggcttggcacgggccagagcaggtgctcaggaggtctggcccatcatctggctccggctgacccttgccctcaccctggcagaccctggctgggcatccatcagcaggggtgtgctggtgtgtgacgagtgctgcagcgtgcaccggagcctgggacgccacatctccattgtcaagcaccttcgccacagcgcctggcctcccacgctgctgcaggtacagggctcagtcgggtggttcttccttcccctcaggcagagtgtgctgagcatgagggcgtttccccctcacccacatacaccccc

SEQ ID NO: 85880 - DNA, 1023 bp, Homo sapiens
cagcaccggcttcagcaggatgagtgagcggcaactcgcgctctgggacccggtaggccaggccgcgccgggcgcgctagctcgctccttctctgggtctgccgggagcgccttcccgggctgtggctggcgcccaagaggccagagcggagcggggagctcccattcgggaaaagcctcgctgcgactccggggagccagcagacacccctgctctagggatcggcctttgagcgcgcttaagggttcgggatcggctgagagccgcgtgcctcctgctctctccaggcccggatgctctccaggtcaggggccagacgtggccccgcaggaagctgagtgcttaggccccatttgtctcttccccgcatccgctcctccaccccggacacccaagtcagcaagctggttgctcatccctccatgctcctcagggcaggcagctgggtgatgtccctccctgtctccccctccccccaggagaggtttgcggcccacgaggggatgaggcccatgcgggccgtcttcacgcgccagggccatatcttcaccacgggcttcacccgcatgagccagcgagagctgggcctgtgggacccggtaacgcagctggaggcttggggtgtgtgcctcggggactggcatcacgggagagtggccaggcgccccccacccgcagggcatgcccacctggacaggactgaaggctgctgccacctctgcagcgcctgccattctcacacccacccctctgcccagttttgctgcgtcgcgtgaaggatcctgcgctggcgcccccacctggtgatgccgagtccctgggggtggtttgctgtgactgcatgcggcgcgcagcgggtatatgtgcaggggaggaggagctatgtgcgcaggggaggaggagagatgtgcccaggggaggggcctgcaactctggtcactagaggtttggggcatagggtttgggaaggccaggaagcgtaaaggggcttctgggggtcccgaagtagcacgggagggtgg

SEQ ID NO: 85881 - DNA, 1025 bp, Homo sapiens
catgtattagacacaagcatatttgctgcctcaactcctctgacacccatattaggaaaaggcctgccaccaaagcaggaagctgcacactcctaacccttctcccagggtgtggggtcccttgacgtcatgaagagctattgcaaggtgcttctgtacttttccagcctggaaatggagggtgactggccctggctcctgctatgagaagataaccagcctcattttctcagtgccccagaggtctaggataggatttctaaactggaatcatccttaatcaccttgaagatcccttaagaggcatttgactggtgctgccgtctgtgtcctcaaagcaatgctggtggcagcgtcctgtgtacacatgcagagctaatacccaaactaaaaactgggtaactggccctgaagtgcttcccaatcagtaagcccacagggaaatgtttgatttttatgttctgttggattttggtttgcttggcatatctaaaggtgcctttacttttctttttttttttttttctttctgctttgttttgtaggacttgttctaacatggaaaacaagtccagaagactctcctctgactgttacctttgccccaagccaccccaaacttttatgctcatgttttattaaagcaggtgctccctggaatctctgggacatttttgaggcatttgaagcagaatatagagtggtctcatctccttccttaatcttcctggtggttgggatgttccacttgtatcatagatttttttattacagatatgctccactgtttttaaatgtgaacttgtgcgcaaatgtgcagattcaatgttcttgttacagattgaataaatttttattttgaagatgaaacgtgtacttcatcagatgcaacaaaggagggaggtgctggagaaggtgggagagtcagaagaggaaacacagtgaacaccagtagttttcaatgattgatcccagtcatgtcaccctgaagagagagctgagtccccagaaataaatgaaacacc

SEQ ID NO: 85882 - DNA, 1377 bp, Homo sapiens
ctcttctcccctccactgtgtttaatgttcactcactgcattaaataacaacaaagatgggacaaaacccactaatactgtggggaaaaaaaattttcaagagcagaggaaagtctttctgcctttttataattactttttttatcatttaatttacctgcctaaataaacatcttctacagaatatctgtcattcaaccatgccaaggagtttgtgccagccttttcagactcccagaattgggtgttcctgggttatttacatagctgagcagtgtccaggggaggtgcgcagtgaactgtcaaggactttccagactgtcttctcttcagacttttataatctccagtggcatctttcccttttcttttgttcatgacctgacctgaagcagcagatttgatagactggcaaagatgaataggaaaaactttgactcttgcccagtgcctgcctgcctctctctctctcctctctctctctctctttttaaaccaccatagactctcacttattttggaggagtgtatgtgcatgtgtacacatatgtacatatataaaaacagttgatgttttggtgtatggggtaaaagccccaggagcatacagaacttgagctgaacctggtcagtagaaagggaaaccccaaccctttcttgatttttggagacacccaggactaatggatactgtagtagacatgtagtactatagtaccgtaatattcatctctcctcattttagttgcctttcagattctaaatgtttgggatcattcctatcatcttagtctcttcaggatctttagtattttcctggttctgaggaggcttgagacagggttatggatttccttgttctgtgtctttatccctactgatagttcctctttctcattttgcaaactacccagagctccaaggacagcctgaagatctcagtgcctcaggctctgaggtactctgctcacaggccccagacagatgctgttgggtaaactcaaagcttcctatgagaagcttctgagatgtagcaggtcacagaagtgttcacctgtttcatctgaggatttcagttctgaagtgatctaggcatgtttggtaaaaatgtttttgtgagagttctttttttaagaaagcattatgcaaaaagtcacttttaagggcatttaaaaatttttaagtaaagccattctttggcttttttggactatttgtggatactttgtttacattttgaatattaaaatgtgcatcatcttgtcggccatgcagtcctgcaggcatcagtgccctggctgtcctgtgagtcctcatgcagagcagggccatcatggtcagcccttgtgagtaagtgggtatacgctgaagctgact

SEQ ID NO: 85883 - DNA, 2531 bp, Homo sapiens
ctcaccaaaccatcccaaatgaggcgctcagcttctctcgccaaattaggttacttggacctctgtaaagactgcttaccagagagggagcctgcctcctgtgaatcccctcatctcaaactgcttcagcctttcctcagaacagactcaggcatgcacgcgatggaggaccaagagtccctagaaaacccaggtgccccccacaacccagagcccaccaagtcttttgtagaacaactcacaacaacagagtgtattgtgcagagcaagccagtggagaggccccttgtgcagtatgccaaagaatttggttctagtcagcagtatttgctccccagggcaggacttgaattgactagttctgaaggaggccttcccgtgctacagacccagggactgcagtgtgcatgcccagctccagggctggccgtggcaccccgtcagcaacacggcagaactcacccccttaggagactgaaaaaggcaaatgacaaaaaacggacaaccaaccccttctataataccatgtgattctgagcctacacatgtgactttctagaagaaatgtttgtaaaaggggcaggtgtaatatgtaaggaacatgcactttattggttaattttataatattttggtcattttactgtttctggtgcatgcagggtttgggtgtttttcagtgtgtatgtgtgtgtatatgtaaggggaaagagagattgatctggatggcaagaccgtttatcattttttatttaaaaaaatcaaacctcaaaaaagtcattttcagagaacacctttatcaaaggcaaattgctgtttttcagtcagctgccacctgcttctcattttgccctctgagaaaaggcatggtttcttaattgagggaaggaagcagattcggaggggtggagataaagctggggattggagatgttcccctgcctttgtgatgatggtttggtttccagacctgaggcatcgaatgggctaaaggtcagccagaagtcagagggctctcagccttcatccagccgcagccctttagagttcctgaaggaggcaggttccgctttgctttaaaagagggtcttccggtgttccagagtgtatcgttacagtaagacatgataatggccggctctgcaaatttatcatatagtttttttcccaagaaaattatttttgaaattaaaacaggaccccaaatgaaatccaagtggtcttctgtagaggaaagcatgataagaggaggaagacataaagttgggggtggagaggctgctgcccagaaactgctgggttggtgggatccacacagatgggcatcttggctctccctgccagaaaaatgtgctctgcagtgtcctcccaactgaaaacaacagtgacatgtttgaaaagcagcaatcgaaagtcagtgtgttcttgtaaaatgaatatgtatgtagggttttaacccttccattacttgaataattctttgggccttctgagtttaatggccatattttcttccagtttattttccttccccatgctgttgtccccatgctgcctatttttttaaatttcatagattatatttgaattgttacatatgtttaacatccattgaatgcaacgttttatttttggtattatcactgttaacacttttttttccttttcctggaaggtttgtcatttctctaaagtttgtacacagtatttatgtacataatattgtcactgtcttagtgtcttgttcatgttgtagggtaattttgatttattctttttaagaaggagtagagttgcaactggaaaacacagacaccagaaatgaaagtgttgggtgttgataggaatctgtacaatatgttgatggtggctgtagttgtttaaatggagacttccaatcaccagctcctgccaaattatgcattagtaactttttcctcagagacacccctaaaggctcccattaggtcacagcgtgactgaaagctgatttctctgtgagactgaaatcccagaacattgtttgccagtatctcaaccacagccaggaagtatatgtgagttgcccagagtggaagctcctagtagaggctgaaggccacaggggaggcctcagccaggggcaagtgcccacagtgactccatttaggatgctgtcgttttgctactgttgtggagatccttaacgcagcagcgcctgtcataaacaagcctcttgtagcttcttacagaaaacagatttagtctagcatgaaacacctctgcatctcattgaaactgaagaggcttgcagatttgctttcgttgatgtccacgttactgaggattgactgagtatagactggagacaggtttttggcttatcacagcactgaggaaaatacaaatgcacagactgtcagcatgatgtcagaggccagagtttggtgggggcagatggcagggcgacccaaaagatgcagaaaaggtagactggggccactgggtcttaagaggagctgtgaagttgtgtggaagccaaggctgggtct

SEQ ID NO: 85884 - DNA, 1032 bp, Homo sapiens
actgaaattgagtccatcagtcaaggagttgggcagattcaactgaaaggagacatcttacccaacccatgccatacaccaaagaagaacagcatccatgagctgctccttgagagggcccagactccagagaacaaacctggacatatggagcaagatgaggactcctgcacagcccagcctgaactagccaaagactcagggatgtgcaacccagaaggctgcctaaccacacactcatctatagcagacttggaagaaggggaaccagctgagggggaacaagagctccagggctcagggatgcacccaggtgccaagtggtaccctgggtctgtgaggcgagccaccttggagttcgaagagcgcttacggcaggagcaagagcatcatggtgctgccccaacatgtacctcattgtccactcgtaagaattcaaagaatgattcttctgtggcagacctagcaccaaaagggaaaagtgatgaagcccccccagaacattcatttgtcctcaaggaaccagaaatgagcaaaggcaaagggaaatacagtgggtctgaggctggctcactgtcccattctgagcagaatgccactgttccagctcccagggtgctggagtttgaccacttgccagatcctcaggagggcccagggtcagatactggaacacagcaggaaggagtcctgaaggatctgaggactgtgattccataccaggagtctgaaacacaagcagtccctcttccccttcccaagagggtagaaatcattgaatatacccacatagttacatcacccaatcacactgggccagggagtgaaatagccaccagtgagaagagcggagagcaagggctgaggaaagtgaacatggaaaaatctgtcactgtgctctgcacactggatgaaaatctaaacaggactctggaccccaaccaggtttctctgcacccccaagtgctacctctgcctcattcttcctcccctgagcacaacagacccactgaccatccaacctccatcctg

SEQ ID NO: 85885 - DNA, 1031 bp, Homo sapiens
cggtgaaaccccgtctctactaaaaatacaaaaatagccaggcgtggtggcgggtgcctgtagtcccagctactcaggaggctgaggcaggagaatggcgtgaacccgggaagtggagcttgcagtgagccgagatcgcgccactgcactccagcctgggtgacagagcgagactccgtctcaaaaaaaaaaaacaaaaaaaaaacatactttggaggattcttgggatcattaaacttctcattttgcctgttctgttattagaagagtgaaaacagccaccccctgagaggtcttcccagtgatttgcatcccaggcattgtcctactatggtgggtgagagaagctggtgcaggtttgaacatcctcatgataggtgagggatagaaattggggaatacactcatatttatttcaggaaacaaggatgtctgcatataagagaagaaactttaaaaggaaaccactggcctcagttggtcataatgtacaacttaggccccacctatccaaacagtcagcttgcccctccccacagccactcacttgagatgcgtgatatgttgtctcctcctaggggtggctggagctcatgcagcttggaaagggtgaaaaccccatcttatacccagctgattgattacagcttgtcttcataaaaagattgacctgctccttcccaggaaagcacccctttgctgtgcaggcatgagtcagagagagccccacccaagcagcagacaggcagggggagctgagagcaggtgcagagttgagaacaaacagggggtcacattagtgcaggcgcctgagcatgactcggcagagcccaggcgtggcccggagcccagggcaagttgttttgggctgagtttcccattccaccctgcggtttggtaactcctcatcagcttgtaagtcatggagaccacacccccaaggaccatacttagtgacctgtttcctgggcagatgaacctgaccaacaaaagggccaccgttctctttttggctggggttttgggaactg

SEQ ID NO: 85886 - DNA, 1124 bp, Homo sapiens
tagtagagacggggtttcaccatgttggccaggctggtctcgaacccccaacctcaagtgatccacctgcctcagcctcccaaagtcctgggattacaggtgggaaccaccacacccagccccatactgcattttaattgtatgtttctcccactgaatcctatcctttaggataaaagctgtatgttacttacctttgcatcccagcactttgcacattgccttacacatattgtaaatgcctggtaaatgtttgctgaatggattaaagaagcataatattaacattgaataattagtagtgagctgcctcactctaccctacccacacatttgattataaatgtatatgagtgtaccaaagtggagagattgcatagcaagaaaatggaagagcaggacaggacacttggaaaaatctagaaaccaacttttaaaatatccccactattgtattttcctctattctttacctcaatcccccaaacaaggaaacatggatctaaatgccttgtgcactgcaaaatgggggtgagtcgctcagcctccaccgtgattgcctatgcaatgaaggaatatggctggaatctggaccgagcctatgactatgtgaaagaaagacgaacggtaaccaagcccaacccaagcttcatgagacaactggaagagtatcaggggatcttgctggcaaggtgagtcagtgactttctccaattctccctccttttaagttccctaaagcaagatgaagtgtccttctctgtagctacttctcaagctgatttggatgtgatattttttcaaaaaagacttatttctctatcaatccagttttcaaaacataagtgtaagcatttaagatttgcatgggctggccgggcacagtggctcacgcctgtaatcccagcactttgggaggctgaggcaagcggatcatttgaggtcaggagttcgagaccagcctggccaacatggtgaaaccccgtctctacttaaaatacaaatattagctgggcatgatgatgggcccctgtaatcccagctacttgggaggctgaggcaggacaatcgcttgaacctgggaggcagaggttgcagtgagctgagattgtaccatgcactcc

SEQ ID NO: 85887 - DNA, 1063 bp, Homo sapiens
acgcctggctaatttttttgtatttttagtcgagatggggtttcgccatgttggccaggctgatctcgaactcctgacctcaggtgatctgcccgccttggcctcccaaagtgttgggattacaggtgtgagccaccacgcctagcaagaacagactttttaattagacaattgacaactccttgtcaattgaatttttaagcagctgtttcaggaagacatatttacataataaatcttttactattctggcaagatataccaaccttttatcttacacaaaagtatatgtgattaaatttacatataattttcttcatatgcaaataaagcatttaattttcaagtggaattttatctacctaaactctggtggtggttataaattttgttttatcacttccatgctatgaatttttttctgttatgataagagatttttgtaatcagccacacgcttatttctggtccccttgtgaccaacagaatgtcacttttttgataactgaggggtcataacctggggccatggaataaagaggattgattgtaccatccagattatctgccacgagtctctgggagcctgtatcgcgcctattataatagtatttaatagtagtctcgggttgggcatggtggcttacacctgtaatcccagcactttgggaggccaaggcgggcggatcacttaagatcaggagttccagaccagcctgggcaacatggtgaaaccccgtctccactaaaaatacaaaaattagccaggtatggtgacgtatgcccatagtcccagctgttcgcgaggctgaggcacgagaatcgtttgagcccaggaggcagaggttgcagtgagccaagatctcaccattgcactccagcctgggcaagagagcaagactccatctcaaaaaaaaaaaaaaatagtagtctgttggcctaccttgtacaatttgttccatcagaaaagtttattgacatttgtgtttcaaataggaaagcctcttttctcttatatgtgaatttgtgatatttatactatatgtgagtttgactcctggcc

SEQ ID NO: 85888 - DNA, 1008 bp, Homo sapiens
gaatgcaccactgcactccagcctgggcaatgagcgagactctgtctctttgaaaaaaaaaaaaaaaaaaaaaaagatttggtaatctgggtccttagaatagggttttgttttttttttttttttttgagacagagttttgctcttgttgcccaggctggagtgcaatggcacaatcttggctcactgtaacctccgcctcccgggttcaagtgattcccctgcctcagcctcccaggtagctgggattacaggcatgtgccaccacgcccggctaattttgtatttttagtagagatggggtttcaccatgttggtcaggctggtcttgaactcccgacctcaggccatccacccacctcggcctcccgaagtgctgggattacaggtgtgagccaccctgcccggctagaataggttctgacatccacattttaaaacctcagttagattatatgagtacagaaagaataggcaccttcctctgttttgcatgtattacacctttgagttaaaatctgtatctagttgattaaattataatttggtctgttgtagcttttgctgtcaccaacaggaaaatgtgggtcctgtgaactatgtggaattaactgactgagaattcaggaagaggagcttatataggacctaagagaggctactgtgcctgaacaagagatttcccacatcttttgtagtcagtttgcccagaaggtagatgtatgggagtatcccatacaatacacccaacttctcagaaaagggaagttcaagacagaacaccagatagaactttgcaagtaaatttttcaagtggaagaagttccccctagcatgaggcctgattaaaggctgcaaacaagaacaaataaggcctttcctgtggtttgtatgacaaatgtgggctttctcacctgccagaagagctgccctaccccccaccccagaatcactttggtcctttataaaaattgaaaacacagaataatatcattaaagaaaattttc

SEQ ID NO: 85889 - DNA, 1047 bp, Homo sapiens
ggatcaaatcttattctctggacttactccaccagttatttcctagggatagcctgtggttcatctttaacgtaaattatcttttcattctccagcagccatgttttacacaactactgattttagaactagggaaattcaagttcctgaaaactgccttctcatagatattttttaataatggattacttaatttagctgagagtcaaagaaatttaatattacctgcttgccagtttttcactaacatcctattgtaatgtaatacagatgaatttgtaaaattcacttgtcttcttttgatcgaagctggcttcagatttcccattcatcttttccttgttactgtgttcaggaaactgaactttctttgtctattattggtttaaaatggtagtttcagaacttatctgcattattgttcatttgactagagcccattagtatattgtcatatccgttgaatgggggataaggaaggaagtcctttgtgtaaaagcattctctgcagctgttcctccctaatgctgtaagtttgatgcctggcaggaaatgatatagacatgtgtgataacaaaatgacataaggaagaattgcctgtaagcttccctggcttgtccaggatgattggctggcagccggtagatagattaagggagatttgatatccaaatctgaggattcacaagtgtaacttaagacaaaattgagatggtggaaaaaacctattttgagaaaagtttgggcaaaggcagatggtatgaaaggcaatagccatgtaaatagaccttttttgaccctgctgggtgactcaaagccttgcaattttttagagacaaggacctgtcagaagaatcaagaacttcaaagaaaaaacattctttatgaatgcaagggattttcacatatcaaaacatttctcattgttcttataatttgaatatcttcatggagtaaatttaccattgtactaaaaaataaactagacaaatagcccccatggtatctatattctctttattctcattagctcagatcagaccacc

SEQ ID NO: 85890 - DNA, 1205 bp, Homo sapiens
atgggagtcctcttaatctaccatatgttaaactgccttggggctaaagaacagtgatgtagatgttatcacacaatttctgaatctttcacatactttacaatttctaaggtggaaagaaaaaatcagtatcctatttttagttagggttagagttagctttgcatcgttgaatgatacaggatggttgctgtataactaacataattaagtttaccttaaagaaatatgctaagaacatcaaggcctttttaggtgttcctgtaatttggaaagggtgtagccagtaatttataaatagattgttcttgttgcacaccaaagggcaaatctgggctcaccctttttgcatgttgtgtgaatttaacaacttgtgttttctgcattaatctatttttagaggggtataacccctcttttagtaattcgagggatttggcttagttacacttggtaaagctacaaaatccagaggtttgaatcactcctaaataaagagaagcctcagtattagccaattataagctttctttaaaagttgtaacaatttaggtttccagggtagaagaagtagaattatttgattttttttggtaatgaactaaactatttaaattgttgtatatgtttgtttgaggatggtacctgcctcatttcaggacattttggatatcacgtgagataattattcacaagaaataacaataaaaattccagttatggttgttacttttatcatctgtacttaatatttatccatcaaaatttacatggatattcgtgatccataacaggatatttcaagtcctgagcgttctaattgtggactttatattgattgtcttctgtagtgactgcggaaaagtttatgctacatatggctttatctgtttgcaacttaagcaacactttaagcatacttcatcaccccagcaaaaagctggtcaggtttatgagcttggcatcttattggtgcatttttgtctctgctgttctctgaattttgtgtcataaaaaccagttagtctccatgagggctaaattgaatgagagtttttttcctctgattttaaataaatatcacttacaacagagctcttgggagatgccatttcttcaggactctcctctgacccacgtcccttttaagttactctttctcttaatgttaatatacacagttctcatgaacatcaaaagtttta

SEQ ID NO: 85891 - DNA, 1002 bp, Homo sapiens
gcctccgcgcgacccggcgggcccgcctccgccgccgggtgcacgcgcagcctgcgcctcgtgccggagcagagcagaggccaggatgcggagttgtgcactttgagccggccccatgaccctgagcacgttggcccgcaagaggaaggcgcccctcgcttgcacctgcagcctcggtggccccgacatgattccttacttctccgccaacgcggtcatctcgcagaacgccatcaaccagctgtgagtccgccgcgcgccctccgcctccgcgaacgctcagaaagtttgctctttcagcagccgctttccccagcatcctggggagcaaacaatcaagcgagggcgagcgcgcatcctgcttgcctggaggtctccgtgcgtctggagggaaggatgctggggtagaacggtggggggattcatggaggcggaaagtgtcccggggtgggggtggacggaagaatcctttgggagaatttccgtttaactttgagggactttgaaagtgcgggttgtccctcagaagttgtggtgaccgagtgacagctgagctgtttggcacttggaagacttgggtgaagggtagtcgacagaatcggaagcgggagtccctgtgggtcctgctggtgagcagctttccgtgattatgggttttttttttttaaagtttctattgctaaccatttacaaaaagaaggaccattcttcgctcctgctggttgtagtctggagtgattccagaaggctagatttcggtagtttctattttatctcctcctgtactactggtacgtgctcacagcccaagcctgcacgcacaccttcattcaccaaagcgcaaatgcatctttaaatcgtcgctgtttttgaagtctctagagagttgtcattccactgtggtttagctgtttctgagaagtgtgtgtgctgaagcttgtggttaatatcacttcacagttatcaagtagaggaacttttcctattcaggttccatcctta

SEQ ID NO: 85892 - DNA, 1134 bp, Homo sapiens
cattaaagcactactgcttcatttcctttcccatttgtggtttccactagtctggttctacatctctatcttgaactaattaaactggctcagactggagcagctataccaggcataataccaagaggagagcagaactggcctgggtactccttcactgactgtatttactctttcttgcctgacccctatgtcttaagggcatgtccttagctcccatttcttatgtatattattacctttcactcatttattcttttaaccaatatgtgctgagtacctcctatgtgctagacactgcagtggttgctgaggatatggtggtgcatgtgataaaccataaacatgattcttccctttgaaacttatactctagtggagaaaggtgggattaaacagctaattatgcagtgaaattttaaattatgatcaattctgcaaatcggaaagtatacaatactatgagaatatagcaatcagggacctaacctggcttgggggaaaaagtgatgttaaggttcatggtcaagggaaagctttcttggggaaatggtattttgagttgtactctaatgatgagttgaagtcaaccagggaaaagttaggtggggaagacacgaattaaaaacttacagatcaggaaactggcacattcaaggaactgacagaaggtcagtaaggctggaacaaagaaaataagggagaaaataactcaagctggtgctgataaagtcagcaaaaggccagatgctgcagccttataaactaagtcaaaaatcttgatcttggctaggtgcggtggctcacacctctaatcccagcactttgggaggccgaggcggaagggtcaccaggtcaggagatcaagaccatcctggctaacacagtgaaaccccatctctactaaaaatacaaaaaattagccaggtgaggtggcgggcacctgtagtcccagctactcgggaggctgaggcaggagaatggcatgaacctaggaggcggagcttgcagtgaaccgagattgcaccactgcactccagcctgggcgatagagcgagactctgtctcaaaaaaaaaaaaaaaaaaaatcttgatctttatttcttggacaacaaaaagccactgaagagtttt

SEQ ID NO: 85893 - DNA, 1026 bp, Homo sapiens
catagaggggaacacagacaccagggcctaccagagagtggagggtgcaaagaaggaggggatcaggaaaaataactaatgagtcctaggtttaatacctggatgatgaaataatctataaagcaaacccctgtgacatgagtttattcatataacaaacctgcatatatacccaggaacttaaaagttaaaaaaagagaaagaaaaaaaagtgtaagaggaacccaggaaaggaggtcagattgatgcgttaagagaactcaacccacctttaccgatattgaagatagaggaagggagccatgagccaaagaatgcagatagccactagatgctagaaaaggcaaagaaattgattctcctaaaaatagttagggctaccataacaagtataagccatttaaacagactgatcacttaaataacaaatatttattttctcatagttttggaggctgaaagtcaaagatcaatgtgttggcaatgtgttgatttcttctgaggctgaccttcttggcctgtagaaggctgtcctctccctctgttttcacatggtctttcctctgggtgtatctgtgtcctaatctcttctctttttctattttatttatttatttttttttgagacagggtcttgctctgccatctaggctaaaatgcagtggtgtgatcatagctcactgtaaacttgaactgctgggctcaagcaatccttctgcctcagcctcccgagtagttagggcgacaggcatgcccagctattttgtttttatttttttgtagagatggcatcttgctatgttgctcaggctggtctcgatctcctggcctcaagtgattctcttgccttggcctctcaaagtgctgggattataggcatgagccactacatgtggccctaatctcttttcatgagaatatgagtcatattggattagggcccacctatattggattagggcctacccatattggaaccacccctaggttactaaacctcattttaacttgattactctttaaagg

SEQ ID NO: 85894 - DNA, 1039 bp, Homo sapiens
aagagcaatcataatgtctaatagacaactgctttccaccagtgtttttccatttaacaaaatcaatcaggcttattaaaggatttggctgaaataagagttccctatgttgtattaaggacagtaactcatttcagtgttctacaatgtaattattcatctgttgttgaacatttgagctgatatatgtaatataagaaaaaatagggaatatttttgtataaatatttatacacctctctatttctttaaattctgtaatcgactaataggtcatgaacatctttaagatttttgacacaatgtcatattactttcagaaaaattttactattttacactcccagccattagtatgtgagagttcctctttcacttttcccaggtttggaaacatttataatctcttatctttgccagtctgaaagatgaaagtggagcttgttttattttgcattttttattaattaagtagggcatgtttatttttatgatttattttcttatttattttaaaaaatcaaatgaatcagaaagcactaatataaatagaacagtgtatctttattccacactgacatgaaaaagaattgcctacaaatggctgcaagagagtatattttcaaatcttgttgtcttgagagattagatgtaaacttacaattctgctatgaatatctcaagctctaaacagtattcagtaggatgttaacattctgagtccaatgttccagaacataaatttgccagttctctgaaaacactggaacagaaatggaaaattcaatagccctacttcagtgacttccttacaatccaccaatgggcaaaatgcaggcaagactgccagctgctctgtatctgcaaacatttgtgcagaactaattttaagagcagatgttggaaataaagagaaaaaaaaaaacaattgcagcctcccctctgagaaagttagacctatcccgtgacttctcagatgccccataaccctgttagccagagtttcattccaaaaataccatattttgcttccttactt

SEQ ID NO: 85895 - DNA, 1101 bp, Homo sapiens
gcagattgacccaggaatatgcatctttacaagcatccacaggtaaccctgacacaaaaaatactgcttttggcagtgaggaacataaaagttttatgtagagatgtaaggtcagagttacaatttagagtggattgttgcagttgccaagtcctggaactaacatagactcaaactaaggcagttgtggttgggatagacaggatgagatagattacagaaatatataaaaagtgaagtggtagaggcctgatgatggattatgaggtgaaataaagatagaagactggttaactcttgaagactttgagcttggttgggctgagtagatggcagatgatattaacaaaagtacaagaagtaaagctttagtgggaagatgagttcagttgcggaccagctgaggtatgtaatcctgtggaatatgttagcaaacatgttccaattaggcagtaagatatccaagaagaccagtgatgaaaatatcctaaagtaatgtttgtagtctcttgaagctgtgagagagatgacatcactcaaggaatgcccatggagatagatgccaaggacagaaccctgaaagcccccatatgtaaggggtaaaagtagaaaaggagaatttgacagactgaaaggagcaatcagaaagcaatttgtggaagaccagtagaaaatagtgtgccaaaagttttaggaagaaatcaatggtccaattctgtcaaatgcaactgagaaattcgataatacaaagaaaagtgttatgagttggtagtgtggaagccacctgtgactttggctacagtagtttcagtggagaggtgggacagagaagcctgattgaggtaagttgaagagaaaattgatcaaacaaattgtgaatataggccaggtgtagtggctcacacctgtaatcccagcacttgtggaagccaaggtgggaggattgcttgagcccaggagttcgagaccagcctgggcaacatagtaacctctctcactcatcatatatatatgtatgtaaagaaacagtaaaaatagagtattcattttcacaagagttctcatgaatagaaggagaaaaaggattatatctagatggag

SEQ ID NO: 85896 - DNA, 1044 bp, Homo sapiens
ctggtctcaaactcctgggcttaagtgatcctccagtattggcctcccaaagtgctgggattgcagtcatgagttaccacgcctggcctcagcatagtttctttcataatcttcacatatactaatctgcaaaaactatattgtgttctgtaaggtcatcttagtttttataaaagataaggaaatgttttcttcacattaaattacattaaaataagctgaaagcacttatttattttctaaaattagtatttagtaatagcattccctaacctgaactgcagaagaccatttaaaagtagctctgttccctctactatgatgaccaggtttctgctcttcaaagagaaagaaataagaacaaccaacattggcttactctgtgctaggcactattctgaactctttatcaatatgatctgattcagtcctgacaaccaccctctgaagatgtgtactattaccatcctcattttacagatgaggaaatagaggcacagataaggggtaggacaggattagaatccaggcaatccgacttcagagacccttgtcttgaaagcacgtaccaaagattggcctgccttacccttcttgtcttaaactccagtcttgaattccatgtcatttttgatgggtctaggaaataggacctaggaaatacacctaaagtactctgttttgtttttgtttattcttactaaagctcaagtttatcctctattgatcctcactaaataatttcgtagttataatatctaagatgtacaaaaatttctatgcctgctccaagatttttttttattgtgttctatgctaatagcttgcttttataacactactactgatctcaagtattaagttgttaacaaaatatcctctataggcatataattaaataagataggtggccccaaagtagtataagctgcatgatgttgaagaaattacattggctcgataggagagccattcatctggctttgctaccacttaactctggctctggtcaatcttttcatctttctagtcctggttttctta

SEQ ID NO: 85897 - DNA, 1131 bp, Homo sapiens
agtactttatgctagtttttggaaagtcattaacataccatcaaaccttcttaattcactccactagtaaactctttggtttgtggttactaggcctgattttgaagaaatcgattgaaagttagtagagtcatgcaaataaactagaaatcagtactatagtaacatttattttccttgggcactgttgaaaatagcttatgctatgataatatatgtatatcaagttgtcatcatactaatttacttgaagtgaatgattagtatacagtaagaccgtgtacacttgatatgacttcattagccaaaacttgagttactttagaatcttgaggtatgttaatagtcacttttgacataggtaattaaattgatcatgtaataagctcagttgttgagcaaaatcactaatatttctatatctactagcctggttatttcagttgtttatacttggccctgaatgcaaaggaatcctaaggctggtgtaacaatcagcatcattagtataactgataagccagcttcctttctctttaaattgtcttcctattggacttcatccagaattgtgttcagctgagttgtttcgaggtccttgtactctagcatttggctgctgtctgacctccatatattttgctgttctatctcttgctgtatgaataggttgggttgtttgttttaaaatagagagcaaaaagaacctagaggaccatgaaagaagagatttaattttgtgagactggaaatttacatttttttattaatcactttaagtacgctgttaatacttttacactataggatgcagggcattttaatactgccagctctttagtgttgtttcattaggcattaaacaatatgctaggtgtgagtgaccattgtagatactaagatgtataggaaattgacctgttcatcaggatcttgcaatctggggggctggggcattggaggaagaacaaacataaggtaagagggaaaagaagaagaaggggaatgatactgtaggtacctgaagagtttgtgatggtcataagtattgtctgaattcagattaagataagttcactaatggcaatgttaataataagagtataacaatatctaacatttcttgggtcc

SEQ ID NO: 85898 - DNA, 1020 bp, Homo sapiens
tcctttctcctacagattttgaggcagccggtgggctccgaaacaaaacagaggtcactggatccgattcccagtaccatagaagtgactcaaaccagcgattcaaccgacaagcaggatccgggccacccaaagccgcgcgagagtttacgtgacgacatcggcgtcagcgtcacggaggcgtcggccacgttcagcggacacgggagcaagatggcgattccgggcaggcagtgagtgatccgggagttagggtcaggctgggggatgagaaactacggcgactgtatctttggccgaggagttttaaatgcgctggaagtgaagggactgtgtcgtcaagggtagagacgggaaaaaacgagaagtcctgaggaacatagattcccctcccccgtacattttcccggatggaagcccgaagtttgagggagaaacttgtgaggaaataaaggaagttaggctgaggggcagagagcgagacttttctattttccaaaagctcggtctgaggcccctcagtcttgcttcctaacccgcgcttgagtttctccccgcttggatgctctcaggggcagtgtgaagagagacagttcctggcttccttagagggccttgttctccttggcagaagctcaagtcctgattcccgcccttccttctcgttttaggaatattgttctgagaagccacagaaaaagggtaggcatataggaaattggggtatacgttgccgcaaaagagacaaatactgtacgtacttgaaagttttacctttgatgtgtaatccttacttttgatgcggcctcccgtgatctccgcatcttaaaggccaaaacgtgagaaactaaaggagttggatctgatgggatggttctctcagatgctccgaggcaaagcacatgatcttaataaagtgtaatgcgaacttgccccatggctacttgggtttctcagttatcttttaaaaattttcgtgagttacactatccagtcagttcttagaaactgtgtaagtac

SEQ ID NO: 85899 - DNA, 1063 bp, Homo sapiens
catgtgaacatgaatataaagcaaactgaaatatgaaaaggaaactaatatactgaggattcctgtgtgctcattatactttatttgatcttcaggatcactctgatgtattattattcccattttacaggtcagaaaattgaagctcaggttaagtaatttgttcaaggccatgtggctgataaataagtgtcaagattgggatttgaacacaggcctatctgaccttcaaacctatactattcttctgtcttgccttgttttaacagtagcgttacagaatgtgaatgaaatgtagagaatgaaatgattcactttgttgcaggaaaatcaaggcaggaataagcatttaaataacattcaaggctggtttagatttaaataggcaaaaatagaggtgaaataatttcatttgggagagaacagcaagaaatacagaatggcatacaagtacaaggcatttttgtggaataatgtggctggagaagagggtatataggaaaaaatgttgcagatacggttgtaacaggattgggccagattgtggagtaccttaaatttttcgtataaaatttcaactttatattttcaagtagtttttgagtaattcggtgatatcatcacacttttgggaagataactcttgaattgtaaaacaaagaaagggagaaatgagagatgagtttaaaaatgcttgttagaaggcttttttagtagttcaggtgagagatctcaacctaggttgaggtcattgggaattaatggggaaaaatgtgagcgataccacagaaataagtaggacctggcagccacattgaatatatgggaaagagatggagtcctgatgcaagatcttttttttttttttttggtcatcattttccctcattaaaaaaatatataattcacacactgtatactttacccttttaaagtgtacaattcactgtgtgtgtgcgtgtgtgtgtgtgtttttttttttttttgagacggagtctctgtcactcaggctggagtgcggtggcgtgatctcggctcactgcaactgcaacctccacctccc

SEQ ID NO: 85900 - DNA, 1056 bp, Homo sapiens
acacattttatctgatagaagactaggagagaaaatattgggacattttaaaagcatgaggtagatgaaataaggatacaaaattgaatacttagggttgtacaatgctataggtgcacagataagtaaaaaataataaatgaaaatgattactttttagcatggtagtgtgagttttttttcaaaatcatattattattttgttataattttgacgaatacaaggaagtgagtgcttaaaaaaaaaaagataaccataattgtgtattcccaaagtaagaagcattagcaagttacaggattacataagtgtatacacttccattcctttcactatttcttgatatttctcctctttaatctttttaaaaattttcttgaaaaagtaagttgaaggtttggttttcctaatgaaaaattaatcttattttagctggaagcctgtttggcttactattggtaagaaaaagttaaaattttaatctgtctgaacattatagtacatccaaatcaataaaatgttttagttgtggtttttcatcagttttaatcagataatgccttacttctgtagatatagtctagtatagttcaaataaaaagacagttgtacatagataagacaaagcatattgtgaaaatgttgggaaatttaggttattttaatgatggctgagaatttgtgaacttttctcatatgctattaaactgaattactagtaaatttatggtaccgagtatatcaaacagtgagggatttaaagtaattttgcaatttgctaaaatttcatccttaacatactggctaagagtgaaaaagcaagaagagagaaaaggaaaaggatggaactaagacaattctattagaagtggggagatggcaagaaaattctgtcctccttatttttctttttcttttttaaaatatttcattttgagacagggactcactgttgtccaggctagagtgcagtggctctgtcacagctcactgtagcctcaacctcctgggctcaagcaattctcccacctcagcctcccaagtagctgagacta

SEQ ID NO: 85901 - DNA, 1307 bp, Homo sapiens
attgcttaggctggagtggagtggcacaatcttggccctctgcaacctctgcctcccaggttcaagagattctcctgcctcagcctcctgagtagctgggattacaggcatgcactatcatgcccagctaatttttgtatttttagtagagacatggtttctccatgttggtcaggctggtctcaaactcctgacctcaggtgatctgcccacctcggcctcccaaagtgctgagattacaggagtgaggccactgtgcccggcaacataagattattttcgaactgcatccttcatgacatttatatgtgtatttgcaactgtatgtgtatgtatatgtatagacacacacatccctatgtctatatagatatatctgtctttctggaagtacgacatctcttttacaaaggaaagaactgttatgcctatgcatacaatacacttcttttttgaaacatgttcggagaattgttagtcatgctcctcatttcaaggcgcacactcctatcatcagcctagcctgcacaaagctcttttcttctttattaattttcctcttctgatcccctctcattcccctttaaatatatatatgtgctgcttggatatccgtgtttgatatatgtgctgatgtgtttgacatatgtgctacctggatatctgtgtatacttttaaattatattttgttttgagtacatatgattttgtaaacataaatgttactgcattatctcatttttttagtcaacactgtgttacagtatgtatacctagttaattgtttttaactacagcatatacgtctactgtattttatctatcccattccttctgagataaacacttaagttaccttcagttccctgctaccacagtgatattattttaaaaaattctcatacatgtcccagtagaaacccttgtgaaagtttttatggggatatatattcaggggtgggatttctagatcatagggtatgtatataaattattgcactaaggccgggcgcagtggctcacacctctctaatcccagcactttgggaggccaaggtgggcggatcacgaggtcaagaggttgagaccattctggccaacatggtgaaaccccatctctactaaatatacaaaaattagctggacgtggtggcgtgctcctgtagtcccagctacttgggagactgaggcaggagaatcgcttgaatccgggaggtggaggttgcagcgagccgagatcacgccactgcactccatcctggcaacagagcgagactccatctcaaaaaaaattatttcactaagt

SEQ ID NO: 85902 - DNA, 1087 bp, Homo sapiens
aaaaactgaaataagttcagattttctttctatcaactcttgttctttcacaagcacaggctgatttttaagggcatttgcatctgacagttatctactagtagagtgatggtataaaattatattaagctactattttaaatagtcatatttctactaaatgtgaaaaactagcaggaacttttctgatttttttttaattaagataataccagaaaaaagaaaaaaattatatttagtttgatgttttattaaagttaaatcgcattataaacaatttctatctctgctacacctaaatttttatggaaaacagtttcaatattaatcttgctagtaagtttatattgaatgtagggaagacaatcttatttgggccaatcatttctatcttaatgaattcattataaaaattataatattaacaattactatttttttactcttttcctaaatcttttttatttccttagcccaagtatattcacaacttgctaaaagcagttgagatcagaaaaaaggaacaggaaaaaagaatggaaaagaaaatacagagagaacgagaaatggaaaagggggagtttgatgataaagaagcatttgtgacatctgcatataagaaaaaactgcaagagagagctgaagaagaagaaagagaaaagagggctgctgcactggaaggtaaaatgaaagagtgggaaaggcacaaggaaacagtagcagaatctctcccctgtggttagctgtttgctctgtcactgaactttagggttatgagtttgtgatcataatttatatataggaattcaagacacaaggaatatggtattatatagcagtataaaacagaaaggaaagtttaactaaaaacacagttgaactcttcagtaactattatttctactagacttttctcttagttctcattttgtggcttttgccttagaacatgatctgaaatgtaaaaacatttattacaaagtataacgccatggcatttgtcagaaacaatataaatataattttaaaccctagttacatttttttgggatgagaaaataatagagtaacaccactcaaggaggat

SEQ ID NO: 85903 - DNA, 1062 bp, Homo sapiens
agatctggtataaaggaagaaaaatcaaggggcttctccaatgaagtaagttcaaaaaacagaataccacaagagaaatgcattcttcaaactgatgtgaaagtagaggaaaacccagatgcagacagtgacttcgatgctaagagcagtgcggatgatgaaatagaagaaactagagtgaactgcagaagggaaaaggtcatagagacccctgagaatgacttcaagcaccacaggagtcaaaaccactctcggtcacctagtgaagaaagagggcacagtaccaggcaccacacgaaaggatcacgaacgtcgagaggacatgagaaaagggaagatcagcaccagcagaagcaatccagagaccaagagaaccattacactgaccgtgattaccggaaagaaagggattctcataggcacagagaggccagtcatagagattcccattggaagaggcatgaacaggaagataaaccaagggcgagggaccaaagagaaagaagtgacagagtatggaaaagggagaaagatagggagaaatattcccaaagagaacaagaaagagatagacaacaaaatgatcagaaccgacccagtgagaaaggagagaaggaagagaaaagcaaagcaaaggaagagcatatgaaagtaaggaaggaaagatatgaaaataatgataaatacagagatagagaaaaacgagaggtaggtgttcagtcttcagaaagaaatcaagacagaaaggaaagcagcccaaattctagggcaaaggataaatttcttgaccaagaaagatccaacaaaatgagaaacatggcaaaggacaaagaaagaaaccaagagaaaccctctaattctgaatcatcactgggagcaaaacacagactcacagaggaagggcaagagaagggtaaagaacaagagagaccacctgaggcagtgagcaagtttgcaaagcggaacaatgaagaaactgtaatgtcagctagagacaggtacttggccaggcagatggcgcgggttaatgcaaagacctatattgagaaagaagatgattga

SEQ ID NO: 85904 - DNA, 1049 bp, Homo sapiens
atttaacagatgcatttgtaatcccgttaactaatgtagtttaagatgtatgatgagttaataccaaagatgagtaaaatgtctaacttttttctccttcctctgtgtgtctttccaacagagtcaatcccgacgtgtcaatcccgacgatagagagctcggaggtgatccacaaatccaagcacccagagatcaattgggatccttggcagatggacatcagtgtcatttactaaccagcaggatggagacgacgcccttgaattctcagaagcagctatcagcgtgtgaagatggagaagattgtcaggaaaacggagttctacagaaggttgttcccaccccaggggacaaagtggagtccgggcaaatatccaatgggtactcagcagttccaagtcctggtgcgggagatgacacacggcactctatcccagcgaccaccaccaccctagtggctgagcttcatcaaggggaacgggagacctggggcaagaaggtggatttccttctctcagtgattggctatgctgtggacctgggcaatgtctggcgcttcccctacatatgttaccagaatggagggggtcagtatcacaggctgcgagtagaggctgtgacccagggtgggctgtgacccggagtgggctgtgacccggggtgggctgtgacccgggtgggctgcgacctggggtgggctgtgacctgggatgggctgtgacccgggtgggctgtgacctggggtgggctgtgacccgggtgggctgtgacctggggtgggctgtgacccgggtgggctgtgacctgggatgggctgtaggtcctcttgagaggccagaagacagattatgtcttttcagtcttcactggcgtaagactaggaacatgatgacttagactttcgagctggtagaaaagtcaaatctcgccaggcgtggtggctcacacctgtaatcccagcactttgggaggctgaggcaggtggatcacctgaggtcaggagttcaagaccagcctgaccaacatggcaaaaccccgtctccactaaa

SEQ ID NO: 85905 - DNA, 2404 bp, Homo sapiens
ccatttatttatgtttttgttgcatttgcttttggggtcttagtcatgaattctttgcctaagccaatgtctggaagagtttttccgatgttatcttctagaacttgtattggtttcaggttttagctttcagcctttgaccatcttgagttgatttttgtgtaaggtgagagatgaggatctggtttctgaaggggaatttgtgttggcctagtggagcctgagatgcaggttaatcctccttatggaaggcaactattactaggatgggtacccgatgacaccacactttttctctcagctgagctttcaaccttaaatggggcattagtgccggggcacctctgtatagtcctaacccactggagaggccttcctaaggagagcaggttaagcagatgtctgagtcttctagttccgcctgatcgtcatcgtagatttcctcctaggaaaacaaggactgttttatcatttgactcccacactatcatctgcaaataagtgcatacctaggaatgatgacttggccccatcagaatgctcacagcagcccgcctggttgttgtaggagtgtgtgatagaaaggaatgggggagaacagccattgacactggtagggtaagaaaggaactgggatgcttgcccttctgaccctagagatttatgccctaggtgtggctgtatgaatgagaagtttttctgcctccctactagtatacaggtcatcactcaccatcaccaaggcagcggaggaagagagcatcagtacaggatctggtgttagccttaggtccaaggcccagctctgaacctcaccatgtgacctgggcacatcacctagttactcaagacccggttttctaatttttctaaaaatagagccatgcctgtcctatctgcttcacagaattgctaataagatttagattaaatgaaattacagatgggaaagctgaaaaatatgtatgaatattagttttgtaaaaggtttatcctacaaaaagggtttctgctctttgtcccttgccctctggactcataagtcttctgttcttttctccaggttacctgtgcatgacagatgagtggttctctgagtatgtctacgaagtggtggtggacaggaagcatgtccctgaagaggtgctagctgtgttagagcaggaacccattatcctgccagcatgggaccccatgggagctttggctgagtgatactgccctccagctctttcctccttccatggaacctgacgtagctgcaaaggacagatccagggactgaagccaaagttatgcaagggactgtgtgttgccacaggacacagtcagatttccagtctccaccaggaacctcttcagaaagtgtgctttatgctgaaacagaatactgttaaaggaaaaaaaagaggggggaagatcaggtcatactatctactctcctcatctctaacagctcaggatctcttagcattttaattagatgtaattgtttgtctttaactgtcaaaaagtttggttctgtgtctgtgttttaataagacgagaggacgagcgattgaggtgtatggagagaaaacagacctaatgctccttgttcctagagtagagtggagggagggtggcctaagagttgagctctcggaactgcatgctgctggacagtatcactgtctttcctagatggcagtcactgaattccattttttcaaggtaatttcttgtgcctctaatagcccaagaatgggaggttgatcagatctgacatgattccttcctgttctgaactgtggggtgtgcacatctctgcttgagtcaggtttgagtagaggcttagagacagttgggtgagaacaaccaaaatcttatcatggtctcagtcataatcattagggggaactctagccaaatggtttaacttctgcctgtggaactggggattgggtgggcaggaaaaggtgatatccattctttctgataactagatggtgctgagaagcttttgaataaaaactttgctaaatgagaataagctgatttatgtgatctgtctgagaagtgtttgtttatctacaaaagaaagcagccaggtggctcatgttcttgaaagtgaaaaaacaggaaaagggcttccctcttcagcttctctgcaagatgtgtactctttcccagaccgccgattctcaccggcatctgcaaagggcttccaagcgcctgtttaagaaggactgttcccctaccgcataaatgttctacccagatccagggtccctacaagggtggggagtgaggctctgttgggcccagccttagaataggtcagtaagttatcttactgagattgggccaccctttcaagaacaagggtaaaatagaaaacattttcacaaaaaaaactgaattt

SEQ ID NO: 85906 - DNA, 1057 bp, Homo sapiens
ttggagagagcgcctaggaagcccaggactagagggcgtcaggaagaacatggtggtaaatagtggaacagcagagcagacagaaaatgggtcaaggagaaaggctgttgggttggacttaaggtagtttttggaaacttcaggaggggtcagggtgcaagcccagctgtcctattatgctccatcagcagcatgtcagtacttcgttctttcaaaggctatgtatagtggggttgcaaggaattgaagctgggacaattaaggctgtaaatcttggccccatatggtgtttgtaacctattgtaagaataaatatgtaaaacataaacacaagaataagcgcagagtcacacacgggataaactgcaagggagatggtcagtgactggaactgtgaggcctccttagggattcttcaagggtgaccctctttagggaggatgttagggctgtggctttttttctgaaaagggagagggaggccagccagagaaatggtggctgagaagtgcagctcttggcatttggagcatgcgttgaacaggtcagaggagtgaagccaagaaataatgtggcttgccattcacagagcttttgaggagtgaccgacaagcagactttgtctgaaacaaataggagtagcgatagtttggggtgagagaaaagtcattgagtttcagtgggaaaacaagacccttggatggcatctaaatttgtgctttcctctccgggttcaccctcagagatcctggagagctgtgtgtgccctcagggctgcctagctcatgctcattggtctagagaaagaagtcagccgggaggtgaacaggcttcttctgggctccttagtagaggggcacttctcaggctgtggacacttctgctgactgaactttgtggtggtttaatggtttaaaaaatacaaaccacaagccaaaacaaccccttttctctaccacattttccaccctgcatttttcctagtatatttactagggaaacggtaccttctaacctttgtttctgaaagaggccgcaagtaatatccggctataag

SEQ ID NO: 85907 - DNA, 1107 bp, Homo sapiens
taagtgaagatatggaggatattttctaattctgcaatgttcactgaaggaaaatacttaccttttaaaaattttgtctctcctggttttcattttgaaccaagatgagttttccatttttcacattgcttttgttcctttcagatacatgaacatttgaaattgtttttaacccacatttttaatcttttcttacaagtgagcctctctgttcctgatttctttcattttagtaaaattttcagacttccttctagaaaggagcctctaaatggtttcagttaaagatactttggcatgttagagattagaaagaaacatgttatcaattcagactatatgtagatttctgctgcttcctaaaaaccaacattatgacctttaattgtctcaccagcccaactgccacaagtgattttggagatggtatattcaaagctaggcacaaaaatcaacatattcttcataaaatgctatgttgtagaaccaggtgagttgtggagagacagttactaataattaattcttgattttagatgctgggcagtaatttaactcattgtagtgtcacatttctatgtcaataacatggacaatttgtttctttatgagctcctacagtttgtatgtagccatcaaatgaaataatgtatgcaggcatttttcaaactgtatattgttatataaatctaaggagttatgaacagcccatatttctgttggaggtactcaggacataaagctacagggcatcttgcttcgtgagaattcaaagttcactaatgtatttgtatttatttctcctcatgacatcagagtagagtaactcaggatgtgaacatgggtgattatacccaggttttatgtgaagaaactaaaacttactgacagttgtgtcttgtttgggttgcacagaatcagagatagaattggaattcaaatctcttaatttgacacagacagcttccctaaaattccctatgtattacttacaaaagacaatcagttatttgcaggtctgtttgaggttcagttctggatctctagtacaataatggaaactaggcaatgttgggccagacttgctgaaacaagagtgaattgtag

SEQ ID NO: 85908 - DNA, 1377 bp, Homo sapiens
aacagtagaagtgcctggcttttgtttatgaaaatggtctttttacttttgctttgccattcagtctcttctttgaaattcaatatttgtgtaactggatcagtaaaagaatgcatttgggagagtatcattatttggtttccccaagtagaaaatcaggcagtatgatgagtttgttttgttttgtttaaaaaagactctgaccaggttttagaattattcctaaaataaagtaggatgcatttgctttaatcaatattgattgattaaaagcaagaatccccagcttcaaatgtttactgcttttagtaggttaatatagtttttcttagtcaagtagcatttttacatgcctattttatgtatacaatagaatagaaaggatgaaatagtatttattgctttgttagtttattatgtttttaccccaagagattcaaattccatttctactggagtatccctttagtgatcgtaggaaatatatagccctgaccaagtactgtttagagcaggctgcctgtatagagcaggctgcctgtatagagcaggctgtttctttcaagtggctacagaagagctaaaattatatgacacctcagcagggagaatctggcttcagactactcaccatcatccacttttttgcaggatgatcaggatggtgctttcacaaaatggagagtggagaattcatggggtgaagaccatggccacaaaggtgagctcagtttggtaatactaactccaggtgactgggcctgctctactctgcctgtctgggtgtcaagctgctctagtgtggaggatttctcagtaattggctccactgactagattattctacagaaaaatctgaggatctgatttgcccccaggattctcctgaccattatggcatgcctgaactcccaggttggctctgagactgctatgtgctgcatttgttgcaaactgtgttgaccctcccctctttgtagaccgcttggctagtgaggaggttgagtgcccttgccaggacacttgctatatggcatttgatgcattttctttttcttttttttttctttttttttttttttggacagagtcttgctctgtcgcccaggctggagtgcagtgacgtaatcttggctcactgcaagctccacctcccgggttcacgccattctcctgcctcagcctctggagtagctggggctgcaggcacccgccaccactcccagctgattttgtatttttagtagagacggggtttcaccgtgttagccaggatggtctcgatttcctgacctcgtgatccgcccgcctcggcctcccaaagtgctaggattacaggtgtgagccactgcgcccagccttgatgtattttcatct

SEQ ID NO: 85909 - DNA, 1037 bp, Homo sapiens
tcgagaccagcctggccaacatggtgaaactccgtctctactaaaaatacaaaaattagccaggcatggtggcgcacatctgtaatcccagctacttgggaggctgaagcaggagaatcacttgaacctgggaggcggaggttgcagtgagccgagatggcgccattgcactccagcctgggcgacagagtgagattctgtctcaaaaaaaaaaaaaaaaaaattgcttttggagcagttcttgctagtaggaaaaacaggtagatgcacctcctaattgtgtctcttacgcgaattagaataagcaaggacctctctcacatgtattttgccaccttgtgtttctttgttacttaacaatgtggctgtagtacttagcttgtaggcagagatgatgagcttgatggaaacatgaacctagaggagagctgtgtgttgcttgacattcctggttttgtgccctaattaatgtgttcttgatcttgatagatttgtttagtgaatgaccctaggccccagcacaagtacaacaaactttacacagtggaatacttaagcaatatggttggagggagaaaaactctatacaacaaccagcccattgacttcctgaaaaagatggttgctgcctccatcaaagatggagaggttggtattgtttctgtattttgcacattggggttaaaacatcttttacttctttggtataataggaagatggggtttatgttgactttcttcctctttcttctgtttctaggctgtgtggtttggctgtgatgttggaaaacacttcaatagcaagctgggcctcagtgacatgaatctgtgagtgcaggaaatttaaaatggaaagtcatttgtgggttgttgctgttggagtgtgctgttggtacaaaatgactctgccgaggttcatccaaagatgaaggttgacctaagggcgcgtctctttctttgcatcctttagagtttgaggactcatagcagaaactccacatacttaaacactctaacccaggacatcaaaatcccac

SEQ ID NO: 85910 - DNA, 2147 bp, Homo sapiens
ccactgcactccagcttgagtgacagagcgagaccccatctcagaaacaaaaaatttttcagggtatattttggaagtgaagctgtcaggacttgctgatgaattggatgtggaggacgaggaaaagtattgggataatgtcctgggatcttgaagggtgaacttacagataggaaagaaggctttttggcaattagggcagtgtgagggaaccaatgtgtagaaaagggtagcaggtgtgaatgagagaagtaataattgaagaagcaaggttttggaagagggaaagaatagatgtggtctaaagtagtgccatcagactttaatgtgcacatgaatcaccttgggatcttgttaaaatgcagattgatctagtaggtgtgggggtggggccagatagtccgcatttctgtttctttctttgatataaacacctctagaagtaatctcaagatcattatttaactattagttatcatctatatgagttcattccctttaacatcacagaagtgcacatacttttagagtgtacctttttatgtctttctgtgcccgaaaacatttaatgcctccagaaggcatctgcttttctgcctgcttaggtgttttactttaaaaaaaaaaaaaaaaacaacaaagaaacaacaaaaaaaaaaacacagatctttgcccttctttcattccctaccagaaagtagtagacagctgtcttcccttctcttcttcctctgtgaataaacagtgaataaacagtcactaaggtaggttccttactccttctctcctataactagctcatttacccacagcactgaacttttttcaaagttgagctgttttctgtgactgctttagtgttcttatgaccattctattctttgatcaataggtcgttttacctttgagactactttctccatcagtaaaactaaaaaaagttggggtaggctgtgcatggtggctaatgtctataatcccagtgccttgggaggccaaggcaggaggatcacttgagcacaggaacttgagaccagcctggccaacacagagagaccccatctctacaagaaaatgaaaaaattagctggatatggtgatgcgtgcctgtaattctagctacatggtaggctgaggcaagaagatcacttgagcccaggagttcaaggctgcagtgagctgtgattacacccctgcactccagcctgggtgacagagggacaccctgtctcttaaaaaaataaaaagaagttggggtaaatgattgtagggttttgcatttttatacagtagaagtaactaatatttttacagtgctttagactttactgtactactttctcaaaaacccagtattgcaaatacaaatgaagactaagattctgtctcttctgcagtggtttcaagcactgaaatcttctagccttaacagtggaaaggtaaaattagacacagataataagaacttagaatactagcatgagagtttgccccaattcaataggcaatgagaagtcaggaagatttttaagcagaagaattatatgaagttttgctctctttcaagcagtttggttgttatcttcgaactaccttactgttctaacctctccttcattctgtgtctgcctgtagctgccttaaaaactgttgaaggttctcacgcttctaagatttataactgactctcaactgctgcatctttccttcttcctctcacttgatgtctgtcatgggcgtgggaattaactaaggcccatatcatttgtctttaaattgggatctacacattctttccccttatttcatatctcattcttttacctttctctcctgattctgtttcttttaccatgctacacttcagcaagtcatttaaaataaacagatctctccactagggagatttgtttttttatttttttgagatagtatcttgctttgttgcccaggctggagtgcagtgttacgatcacagctcactgcagcctcaacctcccaggctcaagttatcctcccacctcagcctcccaacatgctgggattacaggcatgagccactgcatctggcctgaaaatatttttagagatcagttacaatggagctcctttataaaatgagacttgagaggtaggacccttcttta

SEQ ID NO: 85911 - DNA, 1014 bp, Homo sapiens
gctacataatttgcctttatttagggttagattaagatggtgggggccaggcacggtggctcatgcctgcagtctcagcactttgggaggccaaggtgggcggatcataaggtcaggagatcaagaccatcctgaccaacatggtgaaaccccgtctctactaaaatacaaataattagctgggcgtggtggtatgcgcctgtagtcccagctactcgggaggctgaggcaggggaatcacttgaacccaggaggcagagcttgcagtgagccgagattgtgccactgtactccagcctggtgacagagtgagactccgtctccaaaaaaaaaaaaaaaaaaaaagatggaggtatagtaggaatgaaggttctgcaaacagttgtggaaaagggcccagataatacttgctgtagataataagcatccttttggcttttgatgtttgctttaatgatctttgaactaatgatgtgtctaagattgatgtcctcatcattggtagagcgtggtaattggctggtaagaattagggcagatatgtttcacatatttttttcctcccctactcctgcctcagagaaatagtagatccaactttaccaaatcctgagtatgaatgttttataggattatttacttaatgattctacctaaactatttactacagaattctgtgtgtaagggttttttcccccttagagacagagtcttgctttgttgcccaagctggagtgcagaggcgcagtcatagcttactgtaactttcaactcctgggctcaaatgctgcttcagccacccaagtagctgggactacaggtgcatgccaccatgcccagctcatttattaaaaaaattgtgtagagattcagtctcactatatttcccaggccgatctccaccacctgggctcaagcagtcctcccaccttagcctcccaaagattgtgcatattataaagtgtgagccgccatacctggccctgtgtataaggttttaaaatttttacaat

SEQ ID NO: 85912 - DNA, 1136 bp, Homo sapiens
aatttggatttttttgtgacccctctaaggaactctcagaatattcccatctgttaaagtaatgattaggaagctttagtcatggcaacgaatgtttaattgaattgaaaattacttattttacactgaaaaaactgagcttaaaacttactttgccttttagtgtaggacttggacttggattttctaattcgtagtttagtggtctgtataatcattcttttatcatttcataaatattaaataccttctatgagtttggcactgaggaaacagatgagaaagacatagtcactgctcttaaagagctcagtctcttgggaaaaagaaaacacatctataatgatgataaatcctatgctagatgtgtaaaaactgatttggtggtcatagaggagggagtgactagctcagtgagctgaagctttcatagggaagatagctcttgaaagagtagtcagaatttaccaggtagataacaagaccattctaggcaaaaggaattgtatgaacagtgccataaacaaagatagaaccttcagggaatcatgtggctgaaacataacttttttcagtatgatgggtagcaaattaagctagaaaggcagagatgtaagggatgttggatcgatgccagaacatttggcttctttctgtagaaataaagacggagctattgatggttatatttgttaatgtatgtaaaaacattttagaaaatgtaaaaagcactaaaatatgaggtggtaatattatttatgatcaagacagttaagaaactttattattaatactatccatgtccagaatgaatatgcataaaactgcaattggtttgaggaaagaataaatgtttccgtttgtcagccagtaggccctttattaggcttcctttcaagactgtatggagttaaaatggcctactttttttcactgcgatggaaaacactaatgcttcacttgtgttttcctttaaatcttagagatgcagcatagtggagcagtggagtgtgtaatctctgaagtcaggctatctgagctctagtcttctcattactttatatcctgggacaagttccttaagctctaaaggctcagttcatatttaacatgtctagcctagtgcttggcacaat

SEQ ID NO: 85913 - DNA, 1053 bp, Homo sapiens
actgcactccagcctaggcaacagagcatgaccctgtctaaaaataaataagtaaataaaatatatattacataggtgttcattaaatgttttgttttagcattggaatgtaaacactgtacacatatacacaatatattgggatacatacacaggtaaaagaagaaacttcagatattctgatgaagtcagatactgatgtttatttaccaattttagtttaaaaatacttattatggtgcttgtttcagcatcgtaagtccccaaactggggtgatacagaaaagattagcatggcctctgtacaaggatgacatgcaaattcatgaaggtttcatgtttttaaaaagaaaaaaaactattatgttgattccatggtaattccaagactcccattctgttgataatgccaataaaattattgacacttttttcttttaatgttatttaactttctttactctttaggttgaacgctgttatttcttcttgagtgcttttgtggacacagcccagagaaaggagcctgaggatgggaggctggtgcagtttttgcttatgaaccctgcaaatgatggtggccaatgggatatgcttgttaatattgttggtaaaagttctttctttaatggaactgaaactcagcatgattaagtaagcctgtagttaggcatgggccaattctttggtggttgtgtacagagtagaattggtctccaagaaggatatatagttatttctaaggacctttagttcacattctcacctataaagtgccttcttaaatgaggattaaggagagagctactgtgaaggatgggttggagaagaaaaggtagtattaaggagaactaattttccatgaaaaaattgttttcttctccattgatgtaatcaggaaacacattaaaactgtagctgtgttaaaatgtcttcaaaacatcttttggggaaatctcatcatgctgagcactttacaaaagtatgatagatacacttgagcttgaccaaaaggctgagaagtgacaaagtatagtagataaaaaggataac

SEQ ID NO: 85914 - DNA, 1099 bp, Homo sapiens
tatttgtaaataccaagtaaatatttttcttgtatatttgtcaagttttgtgtgtgtgtgtgtgtttaatagtgtttaatatgcattgataccttatacattgttatgtaagctacctatctttttcacttaccaatatattataaacatattttcatattagtaaaaaggttatacccaatacaagtcaaagtttttccctcagaattttccctcagaaaagagataatttccctgtatttaagaccttaaaagacttttctaatggcgctctcagttaatttattttgaagtagagtacaatttggagaaggcattactctgaaaaatggattctttatttgatacgtaaagagtgtttttgtgttaaagatattaaacctttgcatatatattgctaataataattaccacctttcttgttttgtttttaatctttctgctctttctgatttactctttctgaattgtccagatcgtgtcatgagttcattggtgggaaatacagttggagcagtgcagtctatgtgaaccctcataatttcttgatgtgctttcttgtttcagggcgatgctggatcttttcttgtctgaatgttatgaggcttccattcatgaaaaagttaaatattgaagaatttgagtttagccaatcttacctgtttttttgggacaaggtatgggacagatctggcaagattctttttgtattgatatcagccttggtagggactgcctcttcttttgtagcttttccagttatagcctgccctttcataataggtgagacaccttttattctgacttccagagtatcaaaagttgactctttcaaaggcagaactgtttttggttggtaggtggccatttttttgcaatgaaataagtttactgactcatcttactgcttgcttgtctatttaaaattttaaattttatattcaatattcaattcaatatatctccctttttaacatctttttaggttatttgttcttttctaggacctaatttccctctcaagaacttgtctgaaaaacagtaaataattttatttgattgtttatttgtttatttatttttttgagacagtctcacc

SEQ ID NO: 85915 - DNA, 2124 bp, Homo sapiens
gctcccttttggcttctcacaaggcttcctggggacgattccccgatgctagagtactgggggtctgggcccacagggaacccgtcagcctccctccttggagcgggcctgatcccgggagggcgcccgcgcggcccggaggcgggaacctagggggagaaggcgccggcgccgccctggcgcgcagaccatctgtgcggtcctgcgcgggggcaggcgcggcctcagcccccgggcgctggcggacccagcgcgtcagctaggccgcccccgtcggccctcccccgggcggggccagccccgacggcgctgactcagcaacgcgaggggggagttttgtccctccgcggaccccgtttctcccagcctcagcctccccgccgccgccgccgccgccgccgccgagccggtttcctttttccggcgctccgggtgcgagagacaggtcgggccccctaggcagcgagccgcagcgcaatcccggcgctcgcccaaggaccctggaagctaccgttaccccgccgggcagcgtgggcgccatgagcagctcgggtgaggtgccgccgtcccccgccgcggtcctctggaggagctccgcggtccccgtgaggcccggcggcggggaaggccgggggctgggacccttggcgatggcggggagggagctttcggggcaggctggatcggcctggagggagacagctccttggaggaggatgccgcttatgggtttccccgctgcagcgggcaccccaggatgcgcttacgaagttagattcgggacgcgggagccccagatcagccctttccccctctttttgcgttaaaatcctgtttggtctcccaacaggactgaattcggagaaggtagctgctctgatacagaaactgaattccgacccccagttcgtacttgcccagaatgtcgggaccacccacgacctgctggacatctgtctgaagcgggccacggtgcagcgcgcgcagcatgtgttccagcacgccgtgccccaggagggcaagccaatcaccaaccagaagagctcaggtgtgggcttccacttctcccatacgttccttgaccttcctgacagcgtcccattttggtgtcttatttaagagtggtcttaaattcgtactgaaagaactggtcgtaaattcgtaaagaatgaggcacaggtacaggcaggtctaagaacattacccatgtggtttgttttgctgttctgtggcttgttagtacatgcggttagagtacaaaagtgacatgtccatgagtatacgtttgagtgtaattgactatattatgttccaatgctgtgtggtttgtagcccgtgtcttggagatgtatggtcttggtcacaaaacagaacatgtgaaaatgttcatatctttggaggactccccagaaatgccctgaaggccctatactatgaaatagaaaagatacaatgtaattacattaaaatgtcatcagatgttacttttaaatatgcttcttggttacaactgaagctaatgtgctgatgggctcagttcccaccagtagatcagtttgtaatacagaaaaaagttctgttctcatgccttgctggtcaagaagtctcgttttgctatctgctttctagcaccactctcagaaaaaacaggtatagtgaaagattggatatccagcaatctaaataaggagcacattctcacaacaaaattgtactaaacggattttttaaagtctttctatacttaaaaacgaccccccagtctatctatacggacaggaagcacatcagtgcttgtttagagtcggttagaactcacaaagcacacatttaacgtgagtacattttattgtatgtacattatacctgaataaagttgattttttaaatgttaaggaaaaagtcaagaccttacaataattaatgttttgctttagaagaaagtgcttggagtggtgtgggctctcaggctacagatgatccagttagtaatgtcacagtggtcctacatagtttagattgcagtgacccgttagggaacaggtcaggtcttacacattttgcagtgtcacttttacatacaaaagatccaaatagcatgtgagttgtgtagtttattttcat

SEQ ID NO: 85916 - DNA, 1023 bp, Homo sapiens
gattcccgatagtcctcttagccacggagggacactggagcccaaaaatggcagatgatattcccaggatcttccccttgcctatttgacagaagctgatttttctccaatttttacctctgactcagcttaagaagatatggacttagctggagaacttgcacagatctgtgagccgcttcattttagactctgaagggtttgtgatgtcatttgtgcaccttattagcctgggcagaatggctaatggtcacacttctaatacacactttaagtgttattaagcattgcatgaggtttaaaaaattacaaagtagaagaaggaggacctcaagaaattagtataaaacaagagaatgttataaatatttatgaggtatgttggtgtacccagttaaactttacaggaattgttcccactggcaagatgtgtgtgggctgcaataacacggaccatctctgtggaagaggtagagcttgagctatctccagagatgggcaggattttcagcaaaaaggagaggaataaaataagagggaactcactccagatggcatagtgtctgaagtgagcaggcatctcttccccttttctagcatcagcttttccccatttttgtatcttcataaggcttttgaagcaataactgatcattccatctggattaaaagaagatttctgagggactgctaagataaagaagtttccctgcgggacttggaatcatttcttctacaagatttcagtcatatatagaagatctagaaaattcttgagtgttaggacagttcctgagtcttttcgtcttctatcttttactttactcctcttgataagctctcttgtagatatataatttcacatagactttctgggaggatttttttttcttttaaatacgatcgtgtcatcacctctgaacatctgcgtaagaaatatgactttgacatacacttattgacagagctgtgatggccagggctttttggagatgatacaacaaatgcaccgtttgcattgct

SEQ ID NO: 85917 - DNA, 1011 bp, Homo sapiens
aatgtcaaagagaggatgtcaaagatatgactttgaggattttgagcttggattagaaagaatgggagtgggaaaaactaattggatggtggggattgggagacagcaagcgagtgagcatgtgtgtatgtgtgtgtgtgtgtgtgtgtgtgttcgttcaggtgaaagaggagtgaaaactggaaatattaatagtacttgatgtactagtcacaagtacccaatgggcagttagggaataggttctagagcttgggagagaggtcaagatgagaaagagatttagaagttttgagacatttggaaagcatatggcagtgtagatgattttgaaaattgaattaatagtgttttctggcataatttaattgcgtggagctagaagttcaaccagaacatatatataaatgaacagatgggtgctttttttttttttttttttttacctctaaagtgaatgcatttcgtactgggatgttttccttaaggaatgccaacaattcagatattaattctcagcctgatcatattttaaaggtacagttgataatcaaatgtgcattagtaaagtgcttttggtcttacctgatcttgcacattaaagacctggttgaggctttttcttccctttattttctcttttaaaatctgagtgctgcctaatttaaaaggaaagcaaaaaggtaaaacaatactccaaaacagaatatttgcttggagtcacgagttggctttagtaaattgaagcataacctagtataaagactgacctttaggagcagtgcagttgtgtactttgtaacgtgataataggcctaaatgaagagaacctaacactcctttaggatttggcccccagtctttagatctaatgtgtataaattggatgtacttttttcttttccttttttcctgtttaactcaggtggtagagaatgggagagtacatttaaaaaaaaaaaaaaggaaaatacagttcaaagagctatgtgggagacagtgttaaccaag

SEQ ID NO: 85918 - DNA, 1030 bp, Homo sapiens
gtcacatagtctaatagtacaatgggatgtgaagcatagttgtagcattagaggaaggacaatttttaaaacttgaaaagatattcagctgtgtaaagcattgccttaaagctaaccgaataccagagtagaagaaacccattgctctgtaaatgacattttgaagaactgtcttatcagctttctaatatattaaatgaatggtttcccacctcccctggaaagctttctggaagctcactttgataaggatttaattgataacctttaatcttgagctttcctacttgaaaaagaagttggaatgtcagtttgataagacactgcaaagaattgtgtaatttatcccttctttgagtactgtagcagtggttacaatggagtaacaaccacatctttcaacatgttctttcctttgagtgtaatttttttggtatacattctagtgtgtggtacttgagaagatttggtgagagaaatagttgttcaatctggggttctttgtgagataatgtcctaaaactcttaaatttacacatctctctttatttagtttgagttttgatagatcgctaagtgtaagaggatgaaaaggctactgtgcttttataatattaaagcattgtatgtcttaactataaaccatttactttttcaaatttttttttcaggtatatgccattgactgttactaatgtagtggtgaaagaaggaccagccacagaggtggatttttctcttaggccaactgtaacttcagtaatccctgacacgacagaggctgtatcaactgctagcacagttgctatacctaatattctttctggaacatcatcctcctaccagccaattcagccaaaggactttcaccaccaccatttccctgatatggaaatcttcttgagaaggtttgccaatgaatatcctaacattacccggctttattccttgggaaaatcagtagagtcaagagaactttatgtgatggagatatctgataatccgggtgtccatgaaccaggtaattggt

SEQ ID NO: 85919 - DNA, 1010 bp, Homo sapiens
aaatgagttagggaggattccctctttttctattgattggaatagtttcagaaggaatggtaccagttcctccttgtacctctggtagaattcggctgtaaatccatctggtcctggactctttttggttggtaagctattgattattgccacaatttcagctcctgttattggtctattaagagattcaacttcttccacatgaaggtataggtgttttgcttgtatcgcaagcatcaaagtgccctcacatgaacacgttagcttatcaatgctgataagagataaatttggctttttactaggaatgttgcttaccttttgggatctgagctgtttagaacttcttcagagtgactaattttaatttttatcttttaggaggaatgcaggactggaactatttacaaacaaattgctttgaagtgactattgaactaggttgtgtgaaatatccacttgagaaagagctgccaaacttttgggaacagaatcgaagatcactaatccagtttatgaaacaggtgactattcaggagtgaagtatgaaatttctcccgagggtgaaaagatttttgtgcgtacacgtggtttttgtgcagtgattttggaatacactctttaaaatttcaattcattttagtatatttaaccagtttgtatattccaaggtgtttaatatatttatctagaaaattcgtgaatggaaatgagtttatttgtatatgtgaggaaaagttgaagaaaatgattgaacaaggtagtgatattttgctcttaagggttagtggtcactttttacccgtgtttaaaaaagaccagcataaattggatacacacctaatcattggccaagtgatagaaagatgggctgtggagtgaatgtttttattctttttcttgttgccagtgatttactgtgaaatgattaatttccttttgtttggatatgtgtggtggccagtaggtaaagattataagaaatatactaatgttaattaggataatca

SEQ ID NO: 85920 - DNA, 1007 bp, Homo sapiens
aaaattagccttcagaaatattttaatgaacatttacattgaactttactctgaactcctaaattcctgtttgttccatttatttgtgttgacaatctgttattttgaatatgacctcccaagataattagatgatgatgtttattattgaaatctggtgtccttgtacttaatccaggttcatcagggcgtcagaggatttgttctagatgccacagatggcaggggtatattaaatgccaccattagtgttgctgagattaatcacccagtgactacttacaaaactggagattactggcgtctcttggttccaggaacttataaaatcacagcatctgctcgagggtgagtgactgaatgctttgaaatagagtgctcggaggacaaacatggctccattctggaggattattactagaacgttctagagagcctgttaagcaactttgaatggattgctgcgaagtttagggctggttatacctttgactctcctttagtggcagatagagtacacgaaaaaaaaaaaaaggaaagattcctggggtaaatattctagttattgcttagttgactcattgtgacatgcttccaacctggacattaaacaagacattttagaatacacatcaaatcctgatcctcatggccttaggttttttatttaaaaggagagttaggctgaagtaattctacagtcagttccaattcatagtagaatttattggaaatgtgttcaagatagtttttcctttaaaggagtaacagaagtgttagttgatgaagcacaaagaacatagaaaatgcatagaaagaacatttctcgttcttttaatttgctaaatacaggtaagcccaaagcaatgcagtctatttaacatgctagtaacttttttttttttttttttttttttttgagacagagcttctctctatcgcccaggctggagtgcatggcactatctcagctgcctgcaacttctgcctcctgggttcaagggatg

SEQ ID NO: 85921 - DNA, 1987 bp, Homo sapiens
atatcacccacatgatggtttttgtttgtcaggtgctactatgtcggcattgatcctaacagcttgcattatttggtgcatctgctcaatcaagtctaatagacacaaggatggctttcatcggctcaggcagcatcatgatgagtatgaagatgaaattcgcatgatgtctaccggctccaagaagtccctcctaagccatgagttccaggatgaaacagacactgaagaggaaacattatattctagcaaacattgaaaaacacattttgcatatctcccagcataagtaccaagcaaaattacagttcctcttgggagaacactgcattaagaagagagactctcttgcttcttcaaagagctttgggaaattaaattgctaaatttgtattctctgtgaatttcactggcagttttgaacttcccttccttaaagtactctaaacctttaaaaaaaaatctgatttatgcagcagagatgggacagccactttttctttttaatttaagatgagctatttggagcttatgtaataatggcataaagccaactagaggatgttgtattttgcacatcagatgtttactagtggctttagtatttttctttgttttaaatggccaaaagaatccagaaacattaaggcagggacagcagtcagaatcgacataaagctttaaaaactcaaggttttttcaacctactgaggagtacttttctctagttgttaaatagctggagtttttcttattcaggtttaatggaggttgaattgatttttaaacacatataacagtaggaaatgaataaatgggcttctgcatttggctttctacctgttccaaggctagatcggaactggtagactacgctgtaagcaggatttcactacctctcttaaggtttagcaaacttctaaatagcccattttaagggagaacttactaactttattgtgaaaggtctaaatgcccacttgaatgaagctgagagagagatctagcaaaagctaaaactcatgttgtctatctttgaacttggtaaaaacccacaggtgctgctgcttatatctgtgaagcactagcttattctaggaatgcctgattctttaatattgcctaaatcggaacctttttctatgttgcacacatggttttcagatgacccagccatctacaagatctgaattctactgaaaatatctagaaatgtggaagagacctacttgcacattcttaacctgtatttgaacacaaaatatctatacttcatgctccagcccaagcctataccctgtaatagcatactattattgaaatcgcttgaccggtcttgttcacataggcctctgggagtgatttggttctttgccctaatgtttcatttgacggtctctttttgatcaaccaatttttctaaaagttcagtcgaaagcttttaagtatagcttcctcccttgaaaaaaaatgtaaactatgactgctgagtgataaaacactgtggtgtgaaagtgtcatcttcactgccaatcaggcaaagaccggaaagatttgcattttattatgtctgtcttatcatgcaatggaaatgatgctttttgtaagtatgcatcttaccaatgatgtaacggtttaatacctttgaatgttttaataaccaagttgctgctgaacttatactaaatcaggggaccaaaaaacttgctcttatcttctcaaattgtattctatatccattaatgtatcagttatcccaaagccttcaggtggaggggtttaccaccttcctaggtcgttcaaccaggttttgtgaggaatgcattcaaagtggctttataaaagaagattttctttagcaagaataatgaggtcatgtcatttgttaataagtatctgtgataaatccgtggttcaaggttaagccattctggtattctggtattagcaactgtaaattctgccacctcatacatggaacagagct

SEQ ID NO: 85922 - DNA, 1906 bp, Homo sapiens
ttttcagctttatttttaagagtacagtcaggaaaccaacaaggggcctaagagtggctgcccctgcttgggacattacagcaagtgaaacaaagttaatgtgacaagctttgctttgttatcattggtcttcactagaggataccttttacatgtacttctctcttggatcaaatatgtctttaactgtacatctcagtggctggaggccatgccttttaagcatgtgtaaaatttttaaagaaatgaacatacacatagttattttagtaatatttcctgaaagaaaaaccaaattctgctataagtcttgatcttcaatgaacttttaaataatgcatttagctggaaaacaagactttcccagcttgtattacctagaagcgtgaatgtataggatacctgactactaagactatattctcagccctgccctgtcttttatttgcgggtctaatctaatattagaatatattaaccgcttaaggcattgaagccatatgggatggggaatgcatttcttcagtgtttctccgagagactttccatttccttggagttatggcggcaagtaagtatcatagtattaagaaatttgcctaaatctgagttgtgcctttctttactcacaaggcatgggctttgtcctggtgatcagtttgtaagccttcttccttcccagctccttaataaaagcaaagtgattgagtaggtaatgttcaaagtgtctgcctgtgtacatgtacttgtattgattatgtagttcagtaagatgtgcccaagtcatttcagaaagaaagacccttcagttttgatgcattttgctgaacacttgggtagtgagtgggatcctatccagttgaggaatgcttgcaatgctcattgaagggatttgctttgggactttgtcatcttccagaaaggaaacatattgtatatttggcccagtgtgattgattgctttatctttggtaacttttacttgaatgggatttgctgaattaatgactattgaatttaaaactaattatgagttgacaaataaataaaaggtagtgtttatgtctgagcttattgtgtttgagctaacaccaggttactcagtaaccatgacctgctcctccatttccatttattctcaacattaaatagttttatcttgttgttgccagaaatgcacttgtgccaggtattgtccctgctgtatgaaaagcttcttggcaatgaattctgtaatagtgccctacattatggttttctggtggaattgttttaacagtgacaacccaggatttccaatatatttttgttttattgttattaccaaaaattccactatgattgatgttcagtgattttctatagcaacttttttggtaactctttgggtttctgatttgttttagctaaaattttggggatatgatttgggtctttgattaatgtcagctgaacttggatttctagttcatgaagaaatctctcccaatacccatttatcctatttttagcaataattcgttaatgattccacttgattttcagaatattgtcctggttgattttgatttgacagcatacattatgaaatttgaaagtaggttaccattttgaggcagttggatataaattatgtaaatatgtatgattatgatttttataaatggcataacatgagtgtactaactaccttctatgctggccatgctacagattttctggaggtatgacaatagtatttttttatgctcagattaaaaatcagcttttcacctctccagtttttccaagtgatactcccagttctagagcaatctacagctgtttatgtgaggtgcccaacacccattcatctcaagtgcttcagtctttggtttatttcatgcactgtgccttcaaaatgaaa

SEQ ID NO: 85923 - DNA, 1087 bp, Homo sapiens
ggaaagcagccagtggagaagagcgcatacgccaaagaacgtggatgatggagcacaggcggggaggtaggatgaaggaaatggctctgggaagaaagggtctctatgtctgagaaaggaagaaattggctgaagatacaaattagagacaaggtgagggaaattgagggagttgcctgaggatgattctcctcccagtcaagtaggcacctgctgagagaaaggataagccgagatgagggagatgatgatggtttggggcgcagaaagcgggaatgaaagacaggagctaaagccgaagttttttctctctcgctacttaaaagctgtaagataacgaattgatcagcaggtggcagtgtccgcggaggctcgcatcccgtcggccctggctctcaaggcggaaacacgcaccatggtgactttccggcctgcatcgcctctgctcccctatcccggctgacgttggacgacaaagatggcggcagggaccagcagttactgggaaggtgagggcgagaaggcctccgggtgcgtcctacgagggtgagaggggctgagtgaggacagatcttgggagaagcagcacaggaaagaaccagactcccggagcggccgagctgagcagcggggcttgcctaagtgggatccccggggccttggggataccgaacggtctggggtaggggtctggcctggccggggcgtgtgagcgggacgtggggcaggggttgggcagagtggacagagcggggatgtagaggaagagggctctcaatcgcctgggtagaattgtgttgagggagtaatggaactcggacgaaggggcttggggtacgaactctgagaggaaacgaatgttgagggagaagatccagagccccggagactggaggagtcagcgcattggagctgaggtcactattggaaaactgagtgggaaaagagaaggaggaacttgcattccggtccgtcggaggaagtatgaagagaataggagacagaatgtctcttattgggtctccatgacaactacaggttggggacttccaggactgggtgtttgaaggaggagaaaataacttac

SEQ ID NO: 85924 - DNA, 1089 bp, Homo sapiens
tcttgccccctctgaagtttataagtgactaatctgctttgctgggcaagtccttggtttccttcttttaagacttttattttcctttttttgagacatagttttgttcttgttacccaggctggagtacgatggcgcaatcttggctcaccgcaacctctgcctcctgcgttcaagcgattctcctgcctcagccttccgagtagctgggattacaggcgtgcgccaccacacctggctaattttctatttttagtagagatagggtttctccatgttgatcaggctggtctcaaactcccgacctcaggtgatccgcccaccttggcctcccaaagtggtgggattacaggcgtgcaccaccgtgcccagccaacacttttctttatgggggtaacaagatcagtatatgatcattttcatagtttgttttctttagaatggtgctgtgatttttgtgtctactttttatgtctaattatttgttgttataattttgttaaagatctcaggaaacaggctcgacagctggaaaatgaacttgacctgaaactagtttccttcagcaaactatgtacaagttacagtcatagcagtacccgagatggaagacgcgacaggtataggtactaccagattctgtctcctatgccttaactgtgtttttaaagcattaaaaaataaactaaaatatataacttctgtaagttggtctattggtgaatttttggtgttttgttttgccattcattgttttattttttagtgacttattaaaattcttctgaattctcgagactagcatttatttggaatccttaggcaaagattgttacagtgtcagaagaaacctgctagaacttcagaataagtttgtatcaaaaatataagtgtctaattcagccagtgtagggaaaaggtggctgatttgcccgtgtggcatgtatttcttgtgtttttcaattgctaaatggacctgtggatctacccaggtgccaggtatacatactgcttttctggtgtttattgtattagagggtatctaatgcactgtgtatccttgttattaattatcaaagctatctttaa

SEQ ID NO: 85925 - DNA, 1091 bp, Homo sapiens
ttaaaggactgatttgagtaatggatcctctttaactgaacttctttttagttctgatacaacaccccttttaaatggatcaagccaagacagaatgtttgagacaatggcgattgagattgaacaacttttggcaagggtaagtgctttctgttaaatggctattttgcaaataactgtatacttgttacgtaggatcctggattatattgagacagacatgtttattgaaattatccattccattcaatatgtgtacctccccacaccacttgaattttgatgacagccattctcaggtgatatgatgttattttggtctttatggattatgtgggggaatgctgaattcttacttgctctcttgtttgttttttgttttgttttgttttgttttgttttgctgtcaaccaaaagggcatataggcaaataatttgcttttagctgtttatagtgcttagtaaaatattttgattgttttttttttctttatttctagcttacaggggtaaatgataaaatggcagaatataccaacagtgcaggtgtcccctccttgaatgcagccctgatgcatacattacagcggcatagagacatattgcaggtaatatattgggctcgagatgttttcattatcacaggagtttgggtttttttttttttaatccctgcattggatatgtgcacatatatttaaaaggacaaagagaaaaatctgagaaaataaatgccatgctaaagggacttgttttacttttttttggggtcaccattataaaattctgaaaatatctaatagctcttgctatttcttggcgaagttgagtaatattcatcactgggtacatatacttccactatgggagacctagctagctagctgtaacagtgaaatagccaatggtcatgtatagacaataacgtggtgggtaagcgtgtactttcagctagctttgaagataatatggagggggaattatttactatacttagtatattgtttaagaaaacagtaaatgtgtatgcaccaataaaactaaataaacttttaaagatttaaatggaggatatgttaaaaatatggtag

SEQ ID NO: 85926 - DNA, 1778 bp, Homo sapiens
atctcttcataaattaagggctggttgtgtattcacattttatgatattttatatttcttttctatttttataattataattccctttcaacagtttttcctgattaaagatattttagtagctggcttctttttaaactctttttaaactttttaaagtttttaaactttaaattttaagaagcttttgtaatatgtgatttgtctgtttatgccttattttgtttgttattttgaagcaaacataggaagtggcttactgccttgtataaaaagatatcagagaacagtggagtcatttggaaaaagcgcagtggtaaagtggcttcggaagtgattttttccccttattttctggcacagtgctttctaagatgatgttgctcactgtagttttctttcacttttaaaggcatgatggttccaggcaggataatcttaaatggtgatttgtcatctttttttccccttgcagcattgctatggcaacaaaagaaaatatgacttcacagagaggaatgttgaagtcaattcacagcaaaatgaacactttggccagtatcctttttgaatgttcgcagtctgtgttttgagggtagaggggagaagtgtctgtgtgtgcttttatagggggcaggttgccatcatcagtagcagtagagcccatcagtaattgcataatatgaatatactgtgcattcctactttgtgaaagtttatgctctttagtaccattcctaaaagactgcacctcagaagtttcttactactagatgtagaagaaaaaaattataaatgtgaatttaaaaattatccaccaatttcttctacattttagaaagcttttaaattcatgttagaactccacactatacattattcttacctaaacatgataaattatatgcctttgttgtttttcccatttagagataagtcagtggcagatgcttggaagggggaaggaaggagacagccacccgtgcagatgagctatagctactgatggagtttgtaactctatgcacaggctgaattctaggatacattctccacttgtttgttgtaacctctactttaaaatgtttcagttttctgttttaaattaggattattaatacttcccagaaacccactagggaaccagaaaagcctggcactctgagtcatttcattcagcgaacctctgaaaagacaagccttctaggcaaaaagctttcctccccaactgccaaagggggaggaacctagaattttcaaaagctgagtatcttgtagtcctagataatttgagttcacttttagtttgatatgtctttgcctaaggaaaagactctcctgatgtgtgctgttattctccagtccactgtgaattttgttcttgccttgtcaccctaagtataaaaccacatgtctaaaatcacattttagatagggctataaaatttacagagtgctgttatatacattatctcattttactaaactatgaactcaattgccagccagaaaagctgatcagtgaatttaagagtttgtatttagtgaaacttttgaaactttgaaatagaagtgtgagtcagatagctgatgatttaaaacactaaagcctttctcaattgttcattagaatttaccaccactcttctttgtgacctcttctctactgctctgtaagcatctctcccataagttctctctctctttttttttttttttttttttttttttttaagacagagtctcaccctgttaccatccaggctggagtacagtgg

SEQ ID NO: 85927 - DNA, 1129 bp, Homo sapiens
attcttctgccttgggatcctgttgatctatgaccttacccccaacctggtgctctctgaaacatgtgctgtgtccactcagggttaaatggattaagggtggtgcaagatgtgctttgttaaacagatgcttgaaggcagcatgctccttaagagtcatcaccactccctaatctcaagtacccagggacacaaacactgcggaaggcggcagggtcctctgcctaggaaaaccagagacctttgttcacttgttgatctgctgaccttccctccactattgtcctatgaccctgccaaatccccctctgcgagaaacacccaagaatgatcaattaaaaaaaaaataatataataataattcttgtcctcttattttacactcataatgagaaatcacaagttctttcttgatgatctgtgctatagatttctactctgtctcctcaactctgttgatatttggggaaaattctgtttttcatagattctttgagatgctgatggaccagcttcagcatgtttgaggttgtctgaaatggagatcactgtaaaactgtctttttcttttaaattacaagtacactggggttaactgtattgctggaaaaacatcaagaatgacagtcttatatttaaggcaccagtcattgtttccattttttttttaattcttcccttggattaatattttctactgaaaagaaatgaaatctcagttccactatgataaaagaaacgaatcaccagtgtctgtcagtgcccccactgctcctcctcataccagcattgacactggtagctgaggaaggggactgctcaatttctaatgtgatctattcaagaagccacatataaaaaggcattgagggctcactgtccagagaattgcttttgtaaatgctccacaacgtatgggcaaaagtttaaggactactgcctgatgtaccaggaatcctgagttctgtgaaaatctgttcattccaaatctgttaagcatttccaaacatccagagaatggtttcactgttgagggtgcatgtggcagaatctgtctctctctgcacctgtcttctgttaccatccctggacagtgacagattttaagccagccaccagaattcttttc

SEQ ID NO: 85928 - DNA, 1023 bp, Homo sapiens
tggacgcagtggctcacgcctgtaatcccagcactttgggaggccgaggtgggtggatcacaaggtcaggagttcaagaccagcttggccaagatggtgaaaccccatctctattaaaaatagaaaacttagccgggtatggtggcgggcacctgtaatcctagctacttgggacgctgaagcagagaactgcttgaacccgggaggcggaggttgcagtgagccaaggtcgcaccaccgcacttcagcctgggtgacagagcgagactccgtctcaacaaaaaagaaaaagcacctacctcatagattgttgtaagaatgatagatagatataaaataattagaacagtgcctggagtatagcaagaactcaatcatggttgctgtactatttagaaaaaaacaattgtggtgagattgctctttttaagctagtggctgttaagtatcattcatgttatatttttaaaagtatgaaatgacctttctacttcatttacagagttgaaactgtgggacagccagacagaagagatagcataggagtgtgtgcagaaaaacaggatggatatgactctctgcagcgggatcaagctgtgtgcattagtacaaatggtaagagataaataactgtcattctcttggaaatatattaattattttagtaatatgtgaatctgttccagttccatacatttatagtaggagatgagaaaatttaggtatttttctttttctttttttttttttttattatgaagtctcactccatcactcaggctggagtacagtggcatgatcgtagcccgctgcagcctgaaattcttgggcccaagccatcctcccacttcagcctcctgagtagccgggactacaggtgcatgccactgtgactggctaattttttttatttttacttttttgtaaagataagttgttgcccaggtgagtcttgactcctggtttccagcaatcctcccaccttggtggcctcccaaagtgctgggattacaggcgtgagcc

SEQ ID NO: 85929 - DNA, 1050 bp, Homo sapiens
aatcccagccactcaggaggctgaggcatgagaattgcttgagcctgggaggcagaggttacagtgagctgagatcgcgccactgtactccagcctgggtgactgagcgagactccgtctcaaaaaaaagaaaaaaagcataggccgggcactgtggctcatgcatattatcccagcactttgggaggccgaggtgggcagatcacgaggtcaggagatcgagaccatcctggccaacatagtgaaacctcgtctctactaaaaatactaaaaattagctgggtgtggtgaggtgcgcctgtagtcccagctactcgggaggctgaagcaggagaatcactggaagcctggaggcggaggttgcagtgagcagagatcgtgccactgcactccagcctgggagacagtgcaagattccgtctggaaaaaaaaaaaaaaaaaaaaaaaaaaagcaaaaaaatttactggccaagaatttgttttgtcctttgtgaatcattaacagcaagtctttgtaagagacaacactgtaaacatattatgtatatgctactctctaaagtaaaactgaaagcaagcctcccctaccactaattaatgttgtttctctacccatttctttctgtaatggaaaagtttcttttttcttgttttcatgttatctgagatgtattctttatagtcatgtttctgaatagctcttcgtagaaactaaagaccagttttgacttagagaagtaaagtttgcctgattttcaccatactcaccttagtgtaacaagctctcctctaagttttaagtcttgagatgggattttattgtgaatgcttgacccaagttccttttgttctcaggcccttattatttaaggcatggagaatatctgaatattttatctaagccagtgttgctgtattcctctccagctaagtaatttgaattgtcagcggttgtcagattatactagtttgttttgtctaatttttgacacctcaccccttaatgaagaatgactcagtaaacagaaaaataccaacaaagagagagag

SEQ ID NO: 85930 - DNA, 1015 bp, Homo sapiens
taatggaatcttttattttattgaacttgaccatggcccctaagagtagtctcccatttccatgttttatttaacgtgtctgtattgaagatatccctcaagagattctaacagttttcaatatctttgctttgaaaaagagtggacagctggttttgaggggtacagtctgagcagtcgaagaaatatagcacttcggaacgattctgaatcatcgggtgttctctactccagagctccgacttatttctgtgggcagacattaacattcaggcaagtagatattaaaacatctcacctgcctcaggaagcagagtgaagtgcatagagcatacataagctttgaattcaaaacatcctgagtttattccgtcatttataggcagtgttactgtgggaaggcttctttatttcctgtagctgtagttttctcatctgtattcacagggttattacgtagattaactgggaaatgtatataaaatgcttgttatttaatatgtttatatctcttttcctcttggtaagtagaggtaagtagagtatctctcaaaagtcaatcttaggctgggcatagtggttcacacctgtaaccccagcactttggtaggccgaggcaggtggatcacctgaggtcgggagttcgagaccaacctgagcaacatggagaaaccccatctctactaaaaatacaaaatcagccgggcatggtggcacatatgcctgcaatcccagctacttgggaggctgaggcaggagaattgcttgaacccaagaggcagaggttgcagtgagctgagatcatgccattgcactccagcctgggcaacaagagcgaaactgtgtctcaaacacacacacaaaattaaaaagtaaatcttaaaaatttagaggcctggccaggcacggtggctcacacttgtaatcccagcactttgggaggctgaggcgggcggatcacgaggtcaggagattgagaacatcctggctaacatggtgaaaccccatctctact

SEQ ID NO: 85931 - DNA, 1059 bp, Homo sapiens
gagttaaagatctgagatatggtgaagcccagtctctacaaaaaatacaaaaaattagccggacatggtggtgtgcacctgaaatcccagctacttgtggggtggaaggaagaggatggcttgaacccggggtgtggaggctgcaataagccgagatcacgccactgcactacagcctgggtgacaaagtgagaccctttctcaaaaaaaaaagaagggagataatgatgtgatggcatattttctatggccttcccaagaataccccatattcagcatgtgggcctgtctgcttggtccaaaatggctccgttcaaaatttttaagcagtgatgctgagagaagtcattttctgttttttacctaacataaagcttttctccctaggtggatgatgactttacagcccaagattacaggctccagtttcgtaaatgtacttcaaatcattttgaggatgtatatgtaggttctgaaactgaattcatagtattgcacatagaccccaacgttgattaccagttcagagtctgcgcccgaggagatggccgacaggagtggagtccttggagtgtcccccagataggtcattccacattggtgcctcatggtatgctgctaaccttttctctcctgaagcctaactatatattagaatacctgtattctgtgctaagggcagcacactgacaaccagctattctaagcatagatcctgaattgataagaacaacatgcaccatgtcttttactcagattacctcatgtgatttttgttttcatcagttcttcagagtccaaaaaaaatgctggacaagatttttagcctcattgaaaaccaaagattgaaaatattatgtagggcactgatattcctttttattcttttttttatatttgaatgttatttagttagtttttttgagacaaggtctcactctgtcgcccaggctggtgtgtggtggtgcaatcatgcagcctgacctctagatccttctgcctcagtctcccaagtagctgggaccacctgcatgcacaccacacctggctaatttttta

SEQ ID NO: 85932 - DNA, 1011 bp, Homo sapiens
tttacacctgtaatcccagcacgttgggaggccaaggcgggtggattgcttgaggccaggagtttgagaccagcctggccaacatgttgaaaccctgtctctactaaaaatataaaaattagacgggcatggacctgtaatccagctacttggggaggctgagacaggagaattgcttgaacccaggaggcagatgttgcagtgagccaagtttgtaccactacactccagcctgggcaacagcaagactccatctcaaaataagtataaaataaaataaaaaattatccgggcatggtggcgtgcgcctgtaagtcccagctactcgagaggctgaggcaagagagtcgcttgaatcggggaggtggaggttgcagtgagctgagatcgcaccacagcactccagcctaggggacagagtgagactctgtctgaaaaaaaaaaaaaaaagcgtttcactgcccattaccactgttactaatgaaatagttgtgattataatccttggtatagtattactacacattttttcaatccaatatataaaagaattgttaaattttagaaattatcaatgtattgttgaaatggagtcatattccagtaaaccagatcttttggcttaaactggacagttatgatcctaccaattttctgtcttacttatatttatttgaaaagagaatctttgtgtaacatcttgcaaatcccctactgccatgagaattaattactgggggcttcaggatctttcaagcatgtgactgctctaaaatatttcttgtattttttaactctcagttagaggtctcataacacatgagctttgtttcctcagcttaccagaagtacctttactggttgatgtgccttgtttatctgctcagttggatgactcaattcttaacatagtgaaagaccacatttttaagcatggaacagtagcatctcgcccaccagtacagatagaagaactaatagagaaacctggaggcatcattgtacgatggt

SEQ ID NO: 85933 - DNA, 1054 bp, Homo sapiens
caagaagtgtctttagccaatacataatttacagatttatctgggagctcttttaaaatagtgttctatggccgagcgcggtggctcacacttgtaatctcagcactttgagaggccgaggcaggaggattgcttgagtccaggagttcgagaccagcctgggccacatgatgaaaatccgtctcgacaaaaaatacaaaatatagctgggtgtagtgacacatgcctgtggtcccagctacctgggaggctaaggtgggagaatcacctgagcccaggagttcgaggccgcagtgagttgtgattgtaccactgctctccagcctggacgaccaagtgagaacctgtctcaaaaaaaaagtgtcctgtaagtacaaaacagcatggtgtaatgaaagagcatagtctttggagttagactgtttctggcactgcgaagccttgggtaagttgtcttctttctcttctttggtcctcactttctgaaagtgcattgtgaagatttattgagttaacagtgaacgcatggaaccattggtaccacatcaaatatgaagaaattcactcagcagtggagctgcatttttaaattagtttcataaagtcaagcaaatgaacttgattagttacatgattggattaaaggtgactaggctttaaatcatgaaatatttcaaggaaaagaaaatgatcccatggtggtatcaagtttcaaatggcagtggttgggattctatgagcaaaagggaccaaatttacaatgagagtacaggaggtgaatttggaaattgagtctcatttttttagccctctgtctgttttgtgttcacttacttccttttttctgaggttctgaaacaaaaacaaaacgtaggctctgcaacagctgaaggagcttttgaattctttctgaagaggaaattgactttacctaaccaatgcacttcctgtgtatgctatatccgctaaagagcaagacaggacctcagaggcacagtgctcaactgcagaatttcctcttggccattcgaaatgtattacagcgttctgacac

SEQ ID NO: 85934 - DNA, 1505 bp, Homo sapiens
ctacagtgagaaatgccagtattttagtctgtgtgttgtagttcactctataaaatgactatgttggctttcatgtaccttttggtattctgattcagtatttctcaggacactgacaaaagcaagtctctgctccttcaagagcaaatggtaagatcctggtacctaattaagatactagttggtggctgggctcagtggctcacgcctgtaatcccagcactttgggaggccgaggcgggtggatcacatgagatcaggagtttgagaccagccttcaacatggcaaaactctgtctctactaaaaatgtaaaaaaaattagccaggtgtggtggaatgcacctgtaattccagctactctggaggctgaggcaggagaattgcttatacctgggagatggaggttgcagtgagccaagatggcaccactgcactccagcctcagcaacagaagaagactgtctcaaaaaaaaaaaaacactcaaaagttatttcaaaaaaccaagacaggaagtctcagtagcttagcaaagaaaagaaagctgttggccaggcgtggtggctcacacctgtaatcccagcattttgggaggctgaggcgggcggatcacctgaggtcaggagtttgagacaagcctgacccatacgatgaaaacctatctttactaaaaatacaaaaattagccgggtgtggtggtgggcgcctgtaatcttagctactcgggaggctgaggcaagagaattgcttgaacccaggagacggaggttgcggtgagccgagatcatgccactgcactccagcctgggcaacaggagtgaaactgtctcaaaaaaaaaaaaaaaaggaaaagaaaagaaagccattattgctccttttatctcccacttccccttctgttacccattttgaaaacactacaaaaatctgtgtataatttgttacagtagtagtatttaaagtgtccctattatagtattctaagaaaaggttaaatccagatacagggaaaaccaagaacagatgaaataattttttttttttaatgaagtttcgctcttgtcgcccaggctggagtgcaatggctcaatcttggctcactgcaacctccacctcccaggttcaagcaattctcttgcctcagcctcctgagtacttgggattacaggtgcccgccaccacgcccagctaatttttgtatttttagtagagacggggtttcaccatggtgaaggctggtctcaaactcctgacctcaggtgatccgcgcatctcggcctcccaaagtgctgggattacaggcatgagccaccacactcagcccagatgaaatagttttaaaataacctactacttacagacaactgcagttaactttttttttttttttttttttttgggatggagtctcactctgtcgccatgctggagtgcagtggcgccatctcggctcattgcaacctctgcctcctgggttcaagccattctcctgcctcagcctcctg

SEQ ID NO: 85935 - DNA, 1077 bp, Homo sapiens
gaaaagaaagatattaaaataccatctaacatttcagtcagttaagatgtattctatatgaccatgattattgtttttgtattagcaattaagaatcagagttgacactaaatgagtgagtttagcacctgggagtaattaatttctcttgatattggatgcattaaaaaaaatcgtgattacaccctagatggttcagtattcaattttcaaacctgtattttttcaattttatatccaacaatttaaatacaggacatgcttttctgtggtttagtttattatgagctttgttttgttttgtttttgaggcccattgtcttgggcttcagacagaaaacactaaatgaacatcgatcacaattaggttcctgatgacattgccttctgactagactgagtaataatgtagttctcttttgtgagtgtgagtctcttttgggaatgtgttttgtgccagtggcagttacaacagcatctctcgaagctaactctagtggattgtgcatgtttgggtttgtggcataagtcctctgtcaacttgcattttaaggaaggtctatggtacaaaaatattatcaaagtaagcagctgcttttgtttggtggtttggatatttttagggttccagtcattttcagaataactgtaaaatatatggcactttagtcaaggattttgcatgggagaagcatgagaagagcagagaggaagggatgccacctgtcgtctgtattttttacttgctgattttatatctttttggcagatgatttcttttctttttttttttttttttttggcgggggtgcggacagggttttgttacgtttcccaggctggtctccaactcctgggctcaaaagatcctcccacctctgccttccggtgatggaattacaggtgtgagccactgtgctgcctggcatgtgactttttttattgagatataattcacacaccgtaaaagtcatgccttaaagtttacaattcagtggtttttagtatattcatagagttgtccaaccatcaccagtgtctaattcaagtatatattcatcacccccaaaagaactc

SEQ ID NO: 85936 - DNA, 1059 bp, Homo sapiens
ccgagggagtcattttggccctctcggctcaccgtccgcgcagcctcctgaagcagccgtaaactccgccccttgcgcgcaggacggcgcgaaaacccaattgacaagaattccctccgaagctctgtggtccgatctgcggtccgcttgctttccctgcccggtcccgagcgctcagcctgaagcgccgctttcgagggcaccctgcatacactggccgcgcctcagggatctcattgcccgcgctttctcattgcctctttccgtgttcgattcggctgatctgggcccagcctccgctcccgctctctgtcggtgggcgcgggggaatccgaaacggctcagcagaatcccagcagcttgctgctactggagcgggccgcctccatggcctccaggcaggccgggctggaccgcgtgaggtcctaggagacgggattccgggaagcggggagtatggtgggggtcctggccatggcggctgcagctgctccgcctcccgtgaaggactgcgagattgaggtgaggttgagtcgaggatctgttgagttccttcctctatcttttgggggattggaaggtgggtcttggcggaaggtgatcctgactttgtaaggggaaaggtgggacattgtgaggacccacagctgtgacacattgtgtgcaacagttgccagagtgtgtcgtttagagtcgtgtcaagtcctgataaacatttggattctgagatatttgcggggtcacagtaaattggggacttaagataacacggccagttcccagatcccgaaatgttggtggaacgtgatgttttggacttccgacatgtcacagaggatcccagggtcaagttctgggttcgtgatacggaatcactgaactttagcgctgaagaagatctttaagttaaactagttcatacatccacctgtgcttggaatgccactttagaatgtcactacagaaatcaagcaaggtacttaaagaaaacagtttctcatggcttagtatctgcggttaggaatcgcagtgtaacatgttcttttgggtttatcaggt

SEQ ID NO: 85937 - DNA, 2055 bp, Homo sapiens
tatttatcaccactagggaagactagagacagggtttttgctccaccaaaacctagtaatattctggattattttagaaagacttcacccacaaatgagaagacacaattagggaaagagtgcaagataaagtcacctgaatcagtacctgttgacagcaacaaagactgtacgacacctttggaaatgttctcaaatgtagagtttaagaagaaaagaaagagggttaatttatctcatcaactaaataatattaaaactgaaaatgaagctccaattgaaattagtagcgacgatagcaaagaagactatagtttaaataatgattttgtggaaagtagtacttctgttttacgttacaagaaacaagtagaggtacttgcagaaaacattcaagatacaaaaagtcaaccaaatactatgacctccctgcaaaattctaaaaaagtaaatcctaaacaagggaccacaaaaaatgacttcaaaaagttgagaaaaaggaaatgcagagatgtagtagatctatctgaaagcttacccttggcagaggaactaaatttgcttaaaaaagatggtaaagatactaaacagatggagaatactacaagccatgcaaactctagagataacgtaactgaagcagcccagttaaatgatagtataataactgtctcatatgaggaatttttaaaaagtcacaaggaaaataaagtggaagagataccagactctacaatgtcaatttgtgttccttctgaaactgtcgacgaaatagtcaaaagtggttatataagtgaatcagaaaactccgaaatttcccagcaggtacgctttaagacagttactgttcttgcacaggttcaccctattccgcccaaaaagacagggaaaataccccgaattttcttgaaacaaaagcaatttgaaatggaaaatagtttatctgatcctgagaatgaacagacagttcagaaaagaaaatctaatgttgttatacaggaggaagaattagaattggctgttttggaagctggaagttctgaagctgtgaaaccaaaatgcactctagaagaaagacagcaatttatgaaagcatttaggcagccagcatcagatgcacttaaaaatggagttaaaaagtcttctgataagcagaaagaccttaatgaaaaatgtctatatgaagtaggaagagatgataattctaaaaaaatcatggaaaattctggtatccaaatggtttcaaaaaatggcaatttacagttacacactgataaaggaagttttctgaaggagaaaaataaaaagctaaagaagaagaataagaaaacattagatactggggctattccaggcaaaaacagagagggaaacactcaaaagaaagaaacaacctttttcttaaaagagaaacaatatcaaaatagaatgagtttaagacaaaggaaaacagagtttttcaaaagcagcactttatttaacaatgaaagtcttgtttatgaagatatagcaaatgatgaccttctaaaggtttcctctctgtgtaacaataataaattgtcaagaaaaaccagcataccagttaaagatattaagcttacacagtctaaagctgaatctgaagccagcttgctaaatgtttccacgcccaagtcaactagaagatctggaagaattagcagcacacctactacagaaaccattagaggtattgattctgacgatgtacaagataatagtcaactaaaggcttccactcaaaaagcagccaacttatcggaaaagcacagcttatatacagcagaattaataacagtaccctttgattcagagagccctattaggtaaggtttgtttttgttctaacgttctagtattctgcatgtattattagctggggacaaaaatgcttcaagtattggagggtatttttttttctagaacacagctgtttaaaagaaaaagaacaggatttcttttttttttttctttgagatggagtcttgctgtgtcgcccaggctggagtgcagtggggcaatctcggctcactgcaa

SEQ ID NO: 85938 - DNA, 1024 bp, Homo sapiens
gggttttaccatgttggccaggccagtctcgaactcctgacctcaagtgatctgcctgcctcggcctcccaaagtactgggtttacaggtgtgagccaccacacccggcaagtttgattacttttgaatcagtggtttgaaactgatgggaattatttttttcctcctgtttcagaacattccagaaattggagccctagttggttctttgctgtctatctatctgtctatgcatctctatctatctctctggaaacaagttctcactgtgttgcccaggctggtcttgaactcctggggtcaagcaatccttccatattagggtcctgagtagctgggattacatgcagatgccactgcaccagctctattttatctatatttaattgagattcttgtgtatgttataatcatgaaaatgtttctgaataccttatttttatttcagaatgaaattcaccagaattagtactcccaaaaaatctaagaaaaaatctaacaaaagatctgagaaatctgaagcaactgatggaggttttacttctcagattagaaaggtaattaaaatattagagagtcctataagtgccattctgtttccttaaaaaacaaacaaaaaacccccacattactatgggaagtaatgagccaaaataaaattcatgtatttcataaattggttaactacaaccctatgatatttttcactattatcctgttcctctagttaattaagatatcttattgtgaggtgaaagcaattgataaaggcagagtataatttacttataaaaagctttcttagtgagtttacatcgtgatcatttttcctaacactgccgatcttagtttgggctcctgtagcaaattaccatagactgagtggcttaaacaacagaaacatatttctcacagttatggggattgagaaatgcacgatcaaagcatcagctatgcagtgtctggtgaagctgtcttcttgttttctcacatggtagagaacagctagagagaggggtctcca

SEQ ID NO: 85939 - DNA, 1100 bp, Homo sapiens
gagatcatgccactgcactctagccttggcagcagagctagactctgttaaaaaaaaaaaaaaaaaaaaaaaacaaccttgaggccaaggtccatgtattataatactgttttctttatagtatccagcctagagccattcatatagtaggctgggtaactgtttggatttggaaagtactttgcctgaatttggtgactaaaattaaaaaatagattgccaagtctatactacagacatcctcttgggtgttttgctcacatgtaaatatatttacctggatgatttcaagtaagaaataaaggcaaactaatgataactagacacatttcaatttaaggcccctggtaagatttgaataaccatttctttgttgattatttaatgtgatttgtgattgtatttttttctattattaaatataaaatattttcttgtgatgtaaattaatgtttcaattttttgtttaggcaagcaatacttcaaaaaacatatcaaaagcaaaacaattgattgaaaaagcaaaagctttacacatcagtaggtcaaaggtgactgaagaaatagcgatacccttaaggcgctcctctagacatcagacacttcctgaaaggaagaaattgtcagaaacagaagtaagtattataaatatctgttggtataaattctctcctattttgctgtttggagtgggagaaggaaaccattataaagttataaggtaggtttgtgtgatagcttgaagtggtagagagaatatcattttcagttttgctttaaaagccttctgcttttttttgtctgcagaatacagtttgaatccttcttaagtcactcaagatctttcataagctgaactacctcttccttttttttttttgagacagagtttcgctcttgttgcccaggcgagagtgcaatggctggatctcggctcactgcaacttctgcctcctgggttcgagcgattctcctgcctcggcctcccaagtagctgagattacgagtgtgtaccaccatgcccggccagttttgtatttttggtagagacagggtttcacagtgattggccaggctggttttgaactcctgacctcagg

SEQ ID NO: 85940 - DNA, 1012 bp, Homo sapiens
cataagctttatatttagtgactaaagctattttttttttttttttgagttggagtctcaccctgttgcccaggctggagtacagtggcacgatctcggctcactgcaacctctgcctcccgggttcaagcgatcctcctgcctcagctccccctagtagctggaattacaggcacacgccaccatgcccagcaaatttttgtatttttagtagacacggggttttgccatgttggctaggctggtctcaaactcctaacttcagatgatccacctgtctcttggcctcccaaagtgctgggaatataggcgtgagccaccacgcccggcctaaagctaatcttacgttgatactgatttatgatggacagaaagtggttggtagtattgtaattaacatgaatagatgatgttggtctgttattgtgcattttattctttattgcagttcatgaggacaaggaaggaatttactgaagaagtaagaaatcttttgcttgaggaaattaggtggtcaaatcctgaattttcattgaaaaaatattttcccttactcctaaaaaaacaaattgagcaccaagtactttcttccgagtgtcatagtaaacaaggttagtgataattattatcatttatgttaacataccagttttgggtttttatattatttattattttatttttatttctgagacggagttttgctcttgtcgccctggctggagtgcagtggcacaaacctggctcactgcaacctctgcttcctgggttcaagtgattctcctgcctcagcctcctgagtagctgggattacaggcacccaccatgacgccctgctaatttttgtatttttagtagagatggggtttcaccatgttggccaggctcgtcttgaactcttgatctcaggtgatccatctacctcagccccccaaaatgctgggattacaggcatgagccactgcgcttggcctattttttctttttttttagagtgttgctctgtcaccca

SEQ ID NO: 85941 - DNA, 1031 bp, Homo sapiens
agctgggaccacaggcttgcgccactgcacctagcttattttattttttaatttttacttattctcttgagactgggttatgagactggctagtttttgtatttttggtagagaccaggtcttgccatgttgcccaggctggtcttgaactcctgggctcaagtgatcctttcgccttagcttcccaaagtgctgggattacaggcatgagtcaccacgcccagcctaacgtgtcagttttgaaaaacactaagacttaaccaatgacacttggaagtgttcaccacagacaacattgcttacacttggcagggagaattgttcagctgaagtaaaagtatcttgtacaatgcaatgtgcaacattaatccccgccagtttccaaaaatgccaactcaaagatagctttaattatgttaaaatattatgtacttaaggaatgccttagataattttagcttatatagcttgtataaaagacagtctaagtattaaaatctccagcttgctttcagtatgttatatttgattcttgcctttttattttattttattttatttattttttgagacagagtcttgctctgacacccaggctgaagtgcagtggcgcgatctcagctcagtgcaacctctgcctcccagatttgagtgattctggtgtctcagcctgcctagtagctgagattgcaggcacctgccaccatgcctttctaatttttgtattttttagtagagatggggtttcaccatgttggtcaggctggtctcgacctcctgacctcaagtgattcactcgcctcagcctcccaaattgctgggattataggcatgagccaccatacctggcctatttatttattttttaagagacacggtctcactttgttgcccaggctagaatacagtttgtttgtttgtttatttatttttattttttgagacggcgtcttgctctgccgcccaggcagtggtgtgatctcggctcactgcagcctcagccttctaggttccaccgattctcctgcttc

SEQ ID NO: 85942 - DNA, 1066 bp, Homo sapiens
agggtctcactttgtcgcccaggctagagtacagtggtgttttcatggctccctgcagcctcgatctcccgggttcatgtgatcctcccacctcagcctcccaagtagctgggactacaggtgcatgccaccacccctggctgatttttgtatctttagtagagatggagtttccccatgttaccgaggctggtcttaaacgcgtagactcaagcaatccgctcacctcaacctcccaaagttctgggattagaggcctgagccactgcacctggattgcctttgcattttaaagttacaagactattggatacttggaagtgatattaatattactggtttttgttgattagtaagcacatgcacttctttaattcccaaagcagaactggaggctgatgtcagccataaagaaaccaaaaggaaactcgtagaagcagaaaattctaagtcaaaaagaaagaaaccaaatgagtattcaaaaaatctggagaagaccaataggaagtcagaagaacttagcaaaagaaacaactcttctgggataaagctagattcttccaaaggtatattttctaaaacatcccaaaagaaatagattgctttgaggacatgcaaagtggaaaccaaagcagtagaagattttgatatgctttttaaaaaattttaattcaattgtattttaattttagattttctttttcttttttgagacacagtttctctcttgtcacccaggctggagtgcaatggcacgatcttcgctcactgcaacgtccctccacctcctgggttcaggtgattctcctgcttcagcctcccgggtagctgggattacaggcacccacctgcacgcccagataatttttttttttttttgagatggagtcttgcacggtcgcccgggctggagcccaccatcatgcccagctaactttttgtatttttagtagagacggaattggccaggctggtctcgaactcctgaccgcattattcacccacctcggcctcccaaagtgctgggattacaggtgtgagccaccgtgcctggccacgcccaggt

SEQ ID NO: 85943 - DNA, 1098 bp, Homo sapiens
cgctctgtcgcccaggctagagtgcagtggcgcgatctccgctcattgcaagctccgcctcccgggttcacaccattctcctgcctcagcctcccgagtagctgggactacaggcccccgccaccacgcccggctaattttttgtacttttagtagagacggggtttcaccgtgttagccaggatggtatcgatctcctgacctcgtgatccgcccacctcagcctcccaaagtgctgggattacaggcgtgaaccaccgcgcctggctaacactttaatattttaataagattatggtggttatttttttttagggggaagggtttggtgtgaagaattttaaatgtaatgttgttttaaaagtacctctggcattttgtaaatataaatatttctgcaaatacctactgtgacattgtaacaataatgtaaatgactaataattcatatatgtttatgtcaaggaatgaataccttaattttttttttttttgctttagattctggaactgaagacatgctttggacagaaaagtatcaacctcagactgccagtgaacttataggaaatgagttagctataaaaaagttacataggttggtaaaatgtgtaaggaattgagaaatagtttacaaacttagttttactgtttttgtttcgaaattgtagttacaaagtaatatatctcatgataaaatcttcaaaaaactggtagaagtttaagtgaaaagtagccctcttttcttacatttctacttctcagagataatcattgaaaattttttgtaaaagcttccagaaaaatatttttatgcatatgttagttccttcctttctaacaaatgggatcacattactactaattcaggtccccagtccttcatcttcaattctcacatccaaaaaattctgaataatgaaagtttattgactttattacatgaaatttgttacacctttacacttagtagaatttacaaatttttttttttttttttttttttttttttcaagacagagtctcactctgttgcctaggctggagtgtaatggcacgatcttggctcactacagtcgctgcctcccaggttcaaca

SEQ ID NO: 85944 - DNA, 1085 bp, Homo sapiens
gggctgaagcaattcacctgcctccgccttccaaagtgctgggattacaggcctgagccactgtgcctgccctgccacctcagttctttttaattgctgtataccagtttctaagtgagtgtactataatgtatttttcccaatggtgtatttttatgtttttcctgttagaggctaatatgaacaatgctacagtgaatattcttacacatatagtcttgtatattttggcagaaactacttcatttaaaaatgttcatgtccatgtaaaactattttactctttagttgattcacaagcactgtggagtgtttagaaactaacaatatgccatataaagctgtactagtaaaaataacaagaaagccttcatcagttgaatggccagtggcagagaaactaacaatatgccataacttcccccgataatcattttaacataaagtctaaggcatagctatattctgtgaattatttttattatgttttcttgtggcagttggttgaaagactggaaaagaagagctgaattggaagaaaggcagaatctgaagggaaaaagagatgagaaacatgaaggtattttgtgtgtctttttttttttttttaccatttcactgaacatttttagagttacattaactaaaactttctataaaatttcttttttttttaatttttttttttttttggagacagagtcttgctctgtttcccatagtggagtgcagtggcgcaatctcggctcactgctacctccgcctcccgggtcaagtgattctcatgcctcagcctcctgagtagctgggattacaggcgcctgccgccacgcccgactaatttttgtatttttagtagagatggggtttcaccatcttggccaggctggtcttgaactcctgacctcgtgatccacccaccttggcctcccaaagtgctgggattaagcagtggcatgagccactgcacctggcctataaaatttcttaattggtattttatatttgattttctactttttttttttttttttcactctgtcacccaggctggagtgcaatggtgtgatctcggctaactgcaa

SEQ ID NO: 85945 - DNA, 2250 bp, Homo sapiens
aaaaaagtagctaggtgtggtggtgtatgcctgtagtcccagctactctggaagttgatgtgggaggttcacttgagcctagaaggttgaggctgcagtgagctgtgattgggccactgcactccagcctgggtgacagagtgagatcccatctccaaaaaaaaagatctattaactatatttcttcatataatctcatacacagtctaatgtcaattttctgttgtttcaaatgatttgttcaaatctggatccaaacaaggttcatatcttacatttgattcagttctcttaactttcttttaatctcgctaacaattcactcacctttcttttcatgtcattaatttgttgaagaatctgagtcatttgtcatgaaattcttcacattctggatttgtctgctgattatatcctcatggtgtcagttagtatagtcctcttccctatatttcttgtaaactggcagttagatctatgggccttattagattcaggttctgttctgggtctggcatacatatacaggtggcctgtgtacttcctatgacatcatagcagattatcccttgtagattacaaaatgataattttataattctcttttttgcatttattagaattttaaaaggaagcactattcctcatcaactctttggatgctttggaatacagtttataggcaccagaaatgcttcattcattcctttatttattagtacttagagtgatggtgtcctagcaaccttgacagttgaccagtgagtttttgtgtagtttaattttttaagtattattatgaactcatggatttttatatatataatatgtttcacctctttgtgtttattatttctttgttgctttggagattttctcactggttttaagtaatttgattatgatgtgccttggtgtacttctcttcatgtttcttgtgcttgggatttgttgagtttcttgcatatatgagtttatagttgggaagatcaaagttgataaaatttcaaccagtatttcttaaaatattttttctgtcctccccttttcctttggcaactccagttattattataggtattttagaccacttgaaattgtctcctggcacactgatgctttgttcaatttttcagtctttttcctctttttgtttcagtttggttagttgttattactattcaagtttacacatcttttctgtagtatctagtatgctgtcactgctataagtatagttttcatttctagaagtttgatttgggtcctttttatatcttctgtgtttctacttaccatgtgcccagtctttcctgtaggtttttgaacatatggaatacagttataacaactgttttaatggtcttggttattaattctatcatctgtgtaatttttgtttttttgaaacggagtctcgcacttgtcgcccaggctggagtgcagtggcacaatcttggctcgctgcaacctccacctcccaggttcaagcaattctcctgcctcagcctcccgagtagctgggattataggcaaccgccaccacgcccagctaatgtttttgtatttttaatagagacagggtttgaccatattggccaggctggtctcaaactcctgacctcaggtgatccaccccccatggcctcccaaagtgctgagattacaggcatcagccaccacgcctggcccatctgtgtcatttctgagttgttttttcaattgattgattattccctctttcattatggattgtatttttctgattctttggatgcctgataattctgattgcatgtcagactttgtagagtttgccttcttgggtgctggatatttatgtattcctgactgttcttttttttctaaatttatcaatcctgcactttttgtacctataactgttcgttaactttcttctgtgatgtggttaagttagttgggaaaagtttatcttcaggtcttgtgtatgtgtttgtttttgagacagtctcaatctgttgccaaggctggagtggagtggcacgattatggttccctgccacctcgaagtgggcttgggcaatcccccaaccttagccttttgagtagctaggactacagaccaccgcactcagctaattaaaagaaatttttttttgtagagggggtcttgctgtgttgtcaggctagtctcaaactcctggcctccagcagtcttcctgccttggcctcccgtagtgctaggattacaagtgtgagccgtcacca

SEQ ID NO: 85946 - DNA, 1125 bp, Homo sapiens
cgagcactttgggaggccgaggcgggtagatcacgaggtcaggagatcgagaccatcctggctaacacggtgaaaccccgtctctactaaatatacaaaaaattagctgggcgtggtggcgagtgcctgtagtcccagctactcgggaggctgaggcaggagaatggcgtgaacccaggaggtggagcttgtagtgagccgagatcatgccactgcactccagcctgggcgacggagcgagaccctgtctcaaaaaaataaaataaaataaaataaaataaataaatgactggcttaaccttctgtactggtagaataaataaatatagtaatatttggatgtacatagtatttttaagaatgaaagaaaatttctgtgtctttgatttttaactgttaagagtagaaatacagaatgtggctaactgtcttgctacctgtatgatttttagaatatttatctttaagtgcaatttgtttttgggcagaaaaaataagctcccctaagaaagttgttacatcaccaagaaaagttcctccaccatcaccaaaaagtagtggaccaaagcgagcacttcctcccaaaaccttggcaaattattttaaagtatctcccaaacctaaaaataatgaagaaataggaatgcttctggaaaataataaaggtaagacattaaattgacaaattttatattttttaataataatgacccttatacctaaaaatgtgagcacattttacgagttcctgttgctatttattaaatctcagctacactgaaggttctacatgtagaagtgttaatattttgtttccttttttttttttttttttttttttttttgagacagagtcttgctctattgccaggccaagctggagtgcagtggcacaattttggctcactgcaacctcttcctcctgggttcaagcaattcttctgcctcagcctcccgagtagctgggattactggtgcacaccaccactcccagctaatttttgtatttttagtagagacggggttttgccatattgttcagactggttttgaactcctgacctcaagtgatccacccaccttagcatcccaaagtgctgggattacagatatgagccaccacgc

SEQ ID NO: 85947 - DNA, 1050 bp, Homo sapiens
accagcctgggcaatatagtgagaccctgatctctaccaaaaaaaaaaaaattaattagctttatgcactaattagtgcaatttctaacctggtttttaaaaaattgtgtatttttcagtgttatagtattcatatttataattttgttgtaagatattctatcaagctatactgttacttaatcctaaggggttttatcaaggtttataaaactgccttcagtgttcaggttggagaatctcctataaaagtttccttgctgtcttgcacaatatacagttaataaaagaaatacatgtaaatgcttttaatttaatggtatattcccttatatttttaaagcagtttcatcctcaagaagagcatttaagataatgtgaattttagcaaaatttgtctcacttttagatactatttgtatgtattattgctgtatctatttgaactcagcagttaaccacatttctctctctgttttgaagctaaatgttgccagctacctacaaatgatttgcttaactgagaattttagaactgatgtaaaagactttgtaaccttgttaactgcaaatacttgtgatatcagaaaaagtatcctttacttacaattctggattagaagtggaggtggagttttagaagaacgaccattaaccctttatcgtaagttgatttgttattaaagaaatttctattatgggaccctatttaaaaatctgtgctatggctgggtgcagtggctcatgcctgtaatcccagcactttgggggagtgaggtgggaggatctcttgaggccaggaggtccagatcagtctgctgaacatagtgagacccctgtctctacaagaaaatttatgggaggccaaggtgggaggatcacttgaagccaggagttcaaaaccagcctgcgcaagaaagcgagacccctgtctctacaaaaaaaatttgcaaaaattagctgcgcagggtggcatgtgcctgtaatactggctacccgggaggctgaggtaggaggatcacatgatccccgaagagtttgaggctgcag

SEQ ID NO: 85948 - DNA, 1286 bp, Homo sapiens
gccacctcacctggcctgaaattaatattaggtatttatttttcttctgtgacttgcctgctcacagtccttgcactttttctgttggatggctttgaaagtcccccaccatcacctcacttaatttatctcttggtagaaataatgcttatggccaggcgcagtggctcacgcatgtaatcccagcactttgggaggtcgaggggggtggatcactcgaggtcaagagttcgagatcagcctggccaacatggtgaaaccctgtctctactaaaaatacaaaaagtagccgggtgtggtagcgcgtgcctgtaatcccggctactcgggaggctgaggcaggaaaatcgcttgaacccaggaggtggaggtttcagtgagctgaaattgcaccactgcaattcagcctgggtgatagagtgatactctgtctttaaaaaaaaaaaaaaaaaaagaataatgcttatattgtactcttaatgaattaaacacatatgtagagaactaaatgggggtatttgtccagaagatgtcaaaggatctcaggctttaaataattgtttgatacaatttgtttaatacatatatagagctaagattttcttttattttgtaggtggaaatagcagaaatgtacaactagtttgctctgaacatggccttgataacaaaatttaccctaaaaatactaaaaagaaacgtgtagaccttccaaaatgtgacagtggctgtgctgagaccttgtttggccttaagaacattttttccccatctgaagacttattttcatttttaaaggtattttcaatgtctgttttgcaatgttgaatttatattccttttcatattcccaacattagcctcctatcttttgaatcttaagtttaacttaaatgtgcctataatttgtataagccttaggtctctgattttaacacatcctaccactttgacaaatggtgcataggcattgctctgaatgcatattataggatttagaatagcatttagaaaatttttcagatagactatttcagaaaagtggttttaaataaatgagcttctaataatattggagtatatactaaatacatagagaatttaattctccaaattaatcgtctaaatttaatttttagacatagtactattttgatatattaaatatagataaataaaattatgaggggtagtgactcagtactttgaatttagaatagggataacactatattcatacaggtagaaaagtattcaaactatgtactgctgtaacatttctttac

SEQ ID NO: 85949 - DNA, 1552 bp, Homo sapiens
tagtcagtcagcagctaatttagagtaagtcttacttcctttactttttattttttggtaataaatcgtaaaggggaaatcaatagagttttttcttaatttaaaaatgctgtactattgatcatggtaagcccttaacattaataatgtagcttctaatgagatagctaaagagaccagcttgatcgctgggaagagaaataatgagtgattggggtggatttaggtaatgcttgaatgacccaggaaggagtttggtcttgctgtatagttattgagattttttcagtatgggagtgattgatgtgttgacaggaaattaatctggaaatgtcatctggtctagaccagaggcaaggaaactaaactggttgtgattgggattactgcatttttcttgggcattaaaaattaaaaacaatgcattacttttacagcaatgcttggaagaggatatcagtcattaaaagtgtattttcgagtcgatctcttctctatgtgggtaatagacaagctagtataattgaatacctgccaacccttcgaaacatctgtaagactgagaagctaaaagaacaaggaaaaagtaaaagaaggtaaaggctttattaaaaacaacattttagatagctttttcaagattaatacatattttcataagatgaaaatgttaatattaaattgtatttttctttgtaattttgacagattcctgcactattttgaaggaattcatcttgacattccaaaagagactgtgaatactttggcagctgacttcccttaatgttccatactaacaatgctttgtatagattatcatgtggtccttaagatacatttttatattatgtggatcttcatggaaaagtatatttctcgatgtacattttaaacaaacaatttgtatatttttttattggcgggtaaatatttaaaatatttgagttacaaattttatatatgattgtaattttttttctgaattttttgtattatctgatttagctttgttggagtattttttgtatgtgagtgaactgtttctggaaggtagagttcattaagatgaactccctatttcaagtgtttatattatatattagcttaatattcagatacattatcttggctgctaacattagtgtcactaaagttggtatacaatctcccactgctaaatttgactggctttacaaaaacaaaaacattatctggtgaattatatttttaacctaaaagttaaggatcctcatattgtacagttttttttgtgtgctttttttttttttttttgagacggaatcttgctctgtcacccaggctggagtgcagtggcctggtatcggctcagtgcaacttttgcctcccgggttcaagcgattatcctgcctcagcctcctgaatagctgggattacaggcatgtgccaccttgcccagctaatttttgtatttttagaagagacagggttttaccatgttggttaggctggtctcttaactcctgacctcaagtgatccatctgcctcggcctcccaaagtgctgggat

SEQ ID NO: 85950 - DNA, 1043 bp, Homo sapiens
cagttcataaactataaataagtttatattacataaactagttaggcattctgaatttgtagattatgtttgcatctaaaatatttacacttctggccaggcacggtggctcatgcctgtaatcctagctctttgggaggtcaaggcaggtggatcatgagatcaggagatcgagactatcctggctaacacagtaaaaccccatctctactaaaaaaaaaaataaaaaaattagccgggcgtggtggcgggcgcctgtagtcccagctagtcgggaggctgaggcaggagaatggcatgaacccagaaggtggagcttgtagtgagttgagatcgcgccactgcactccagcctgggagacagagcgagactccgtctcaaaaaaagaaaaaactaaaatgtttatacttctaattaaatcagtcttttcttttaggcagttaatagtatcatatctatcgtttttggtactcgaagaattgcctgggctcaccttgatcgtaagttgacagtgctggactggcagcaaagtgaccgttggagtttaatgagaggaatatactcatcatcagtctatttagaagaggtaaggcagttgcacctccagattcctacctgctagagctccttgtgtagtttaatcttctggtcccaaaaggaatgtaataaaatagtaaagatgggttttcttctggtacttgttactcacttattcctattatgttttccatcacctttgatttttaaaaattcaacctttagttagttcaagaaatgccttatgcatcgaaggcagatactgagaaaatcaatggtatttcattctaaatgttatagaacattatcactcttttatttataaagcttatttttcaaaatgccatcacattgtctcatttgagttttcaaaaccttgcgaaatggtcaggaattatcaccttaatggtcaggaattaccaccttgattatacatatgaaatctgtggttcagtcaagcatctgatgtgattagtcagttgcagaggtgattgattcttgctag

SEQ ID NO: 85951 - DNA, 1029 bp, Homo sapiens
ggcaggagaatggcgtgaacctgggaggcggagcttgcagtgagccgagatcggccactgcactccagcctgggcaacagagcaagactccgtctcaaaaaaaaaaaaaaaagatgattctccaagacaatttaatattgtcctctattagttcttaaattccaggaaagtatttgtgactttgcaaaggatctagtcaagcttgcaactaaccccaaaggaagtaggacatccaacttatattttgctaaattttccttttagagaggtggagatgctttctgaccccgtcgaggtcatccctgtactgggccttacataatttctgctgtcggaaaaaatccactacacctaagaaaattactcccaatgttactttttgtgatgaaaatgcaaaggagcccgaaaatgcacttgacaagctcttctcttcagaacagcaggcttccatcttgcatgtgttgaatacagcatctactaaagaacttgaagctttccgattgcttcgtggaagaaggtccatcaatatcgtagagcacagagaaaactttgggccatttcagaatttagagagtttaatgaatgtgcccttgtttaagtataaaagtacagttcaagtttgtaactccatactttgtccaaagactggacgggaaaaaagaaagtcaccggaaaaccggttcctgagaaagctcctcaaaccagacatagaaagagaaagacttaaggtatattcttcatgtctgctatactgcctaatatttgagaacctactctagaaagcactcttctgggcattgggttgggaagtggctaagacagggttcttcaggtttagttggcaagtatatgatcactaccaaataatgagatgtacagatagtaaattggcagttgagaggagagaaaacaatgggctgtgactgttgtggaaagtttactggaagaactcaatttaggtcttaaaagagagatcctttggatgggagaggagggcattgtaggtagaaagaacagttgatgctgaga

SEQ ID NO: 85952 - DNA, 1030 bp, Homo sapiens
gccctcaacctcgaggtcttgcctgcaaacaaaactagtctggcttcttcttctttttttttttttttttttttgagacggagtctcactctgtcacccaggctggagtgcagcggcgccatctgggctcactgcaagctccgcctcccgggttaacaccattctcctgcctcagcctcccaagtagctgggactacaggcgcctgccaccacacctggctaatttttttgtatttttagtagagacggggtttcaccgtgctagccaggatggtctcgatctcctgaccttgtgatccgcccgcctcagcctcccaaagtgctgggattacaggcgtgagccaccgcgcccagccctagtctggcttctgagtgtcttcgaggtcaacagacagggaaagaaggagatggccaagaggagattcagaaattggggtccgcatttagctcacctcagactctgggagttcaggaaaggccatttttaggtactgcagacgggctgcacggagggcattgaaccagtccactatctcctgcggagagaagtgcacaggacacacacacagcagtgagatggggtgggtgggaagctacctctggtggcgggaagctagctgggcattgggtgtggggcacatatattcagcacctgcacacaccccacagctcggctcaggggcatccagggaggattgtgtcagagcctcgtgggctaacccgggcaagcaggaagcctctgacagggataaccccagagccctggaaaaggattgagtgaactgcatgggagttctgcaatggcctcggacagtgcttttcaccttctaatgcgtgcaaaatcacctgaggctcttgttaaaatgcagaggcatatccagtaggtttggaatggggcccaagactctgcattcctaacacgctctcaggtgatatgatgctgctagtcagtggaatgcactctaaggagcaaggctctaggaaatcattgtcctcagatgtcaaagattggcatttgggtggggagcag

SEQ ID NO: 85953 - DNA, 1041 bp, Homo sapiens
gtccacactaagcaaaatagaaaggccagagctgtcctggcaaacaatggaagaagggagcaaaagactcagaagtgggaatgacatattatttacatcctatcctgtcagctgtgttctgctgtttatcacaagcaataaggaatgtgctattgagagggacacaagcatcactgagaagtccaatagtcacttttctctgtagaccagggcttatagtggaagatgtttcaggagctagggtccctgatagcaatgggcctgctagagaccaggtagcagtgcataactagcagaagattaagtggcattgttagaagtggcaagatagaatggcatccaaggaagcctgacccacaggaagctatgaaggtagttagtaggatactgtgtgcctcaagatgtagtttttaaaacacaaggacagataaggaggcagctgagaggagctgccccaatagtcataatcccttgccctgtttctcaacctgagccaatttccagaacctaatgactgaggaagaccggattcccagcaagggtatatagtgatgagtccttgtcctctctgaatgggtacttagcatgggcatacttggtggttggcagaacctctatgatagttccttggcctgtggagcaagagctgtcatagtggggaaggccaaggccatacctggggaagcttctaaaactgcacccctctcacccagccaacagtcgacatttttaaaaagtggcataccctgggggaacatcagagaaaaggatgcaaatacagagtagcagggctcccactcaacaaggctgatccagctgctgatgccaccaaatgcccaacctgccagcaacagcacagatcttttgtcatttactctttattctttttcctgctgagaacgtagatcaaagcctagaagtgaagcagctattttgcaaaagatggaagctaaaggaagcttgggtccctgatacttcttcaagcagctgtacctgccctgaactgcctacctccagagttctggttacagaaagaaaaat

SEQ ID NO: 85954 - DNA, 1050 bp, Homo sapiens
agaaatagatgtaaattttaagcattatatatccttgatttcattatgtattattctcctggtcactttatcaaaacttcttcagctgttagaagttgtaacattgtttcccttttatttagttatataatacacttattgtacattcttaagtgggagaatagaatttgtgagaataccaacagaaatacacatacagctataaatatgagattatgattctttcatgttggcattgcacagtctatttttgtaaagttggtttttatattctaagaacattttacttagagtttgattacatttgaggcaaacttttcaactttggtagtatttgaatgaagattcctggatgtggtttttttaattgttacatctactttttcagtttttctttttccctataacaaccctcaaatccttcatcttgtcttttggagtatttttttctatcctcctgtctttatcggtgccttctattcctgtcccaccttgggtctgggaaaatgtgcctttatgctccatgtgagtcttcttccttttgggtaatgagtgcggagggaaaaaaagcacagtatttctttccctgttatgtttcagtttttggcctctgataagtgaatctggagtagggaatgacagtgatagtaggttttgttttagtcatatattggcgacaaagatcaacgaagacctgaagctcttgttcctctcatgacacaaactacccacaggtgcatgccaccatgccgggctagtttttaaattttttgtagagacgaggtttcgccatcttgcccaggctggtcttgaattcctggactcaagcgatcttcccacttcggcctcccagagtgctgggattacaggcatgagccaccgtgcccaaccgagattctgtctctgaaaaaataaataaataaataaaataaatacataaaaataaaataaaaacatttgaagacatcttaagtacaccctagattcccacccccaccaaaaaatttcattcattcttcaaccatttctcaaagaacatgttttcaagac

SEQ ID NO: 85955 - DNA, 1027 bp, Homo sapiens
gaaaaccacaattggatgaactttaaaaatcaatactaaaaaaaatattggagagctatggatgtaatgaggactagatgaattagaattccagaaatagaagagatctttataggtgagcagaggattgctgacatttgctgattctggacacacactgaaggaaaaggaaactagagaggaagtgcattttactaaaactgcaacatatccctggcccagttcaattcctgattggactgaggtgatcagcctatcttatcccttttgcctaatagaggaaatagacagctcttactgaggagatatattctggggtttctatggttctttcgtttataatactatcatactattaactattctagagatgtgaaagggtggaaaaattcaagagaaaaataaaacttatagaagcagactcagaaaattgaagttcatcagacaaagacttattttaaaataactataatatacttaagaaaataaaggaaaatacggagaaaatggatgaaaattttcatagagaattggaatccacagaaagaaaccaaatgaacattctaggaatcaaaaacacaacgttggttgcttaaggtctttatttgtagtttaattagaaactttggcgcaggactctaggacactccacctccccctcattctttactgttcttaaaaaacaaaaacaaaaacaaaaaaaacccaggtaaatttaatgtatactatttaagttccacgagagcagggcctatgtctgttttgttcgttgttgtactcccagggcttagtatagtgcatgccacattaaaaaacaaaacaagacagaacaaaatcttccttaacaccaccatcacaaacccccccattaataattaattgacattaatctgaaattaattattcattgtaccggttcagtagcagactatacacagcagaaggcaagactagagagcttgtggacagatcaatagaaaatatctagataaaagcacagaaaaaaaaaaaagaatggaaagagtag

SEQ ID NO: 85956 - DNA, 1058 bp, Homo sapiens
gaatgaaagaattttaactttattctgtgggttcagggagctgttgaagagtattaagcaagtgagtggcatgctcacatgttctgaagagtgtttcctggtagtgatatagaagatggatttgaagggacagtaaaggcaagaataataattaagaaattgttataatagggatgatctgagccagggtactcattataggaaattaggggcaaccttgtcatgagatttgtttaggagatgaaattggaaggcttcagatggatgataggggtaaggaggaaaggaggagatttaagtgaataagagttgaggagagggaggagttgtaaatgacaagtttcttgtttattgttttgaataaaggggaaaattgttttcagttattcataaaggacttaaaaatgggctttgatcccaaaagttgttttgaagttatttcctgctttatctttggagacccttcttcccacccccacatcaaagcaaatgccctcaactgctttagatgcagtcttgcattgaaataggtatcacattgttttattttgcttgaatgggtgctgttggcttaaacatctaattgcatctgctttgtcttctttagttgtgtctacttatgggccaaaagagcatttctacctctgtaatttcatttgcatattggttttcagataaattgaagattaattatatgaagtatatggtttgtaatctcaattgaaggtgaattttttattttcctggttgaatataatggaatcattttggtatggagaagaaatggttaaaaatagaccagtgggtcatctcagtgtgaaagtcaagaggacttctaggcttaagcctggtagctaaatttctgttggctctaccctcttcatgatgagtccaagtttattttgatctgcatctttcttttttttaatgaatgaaattctccttcattcagcctggtaagtaacctggccattagtacgtgactaaatagctgaagcttctggcttgaattaagttataaacttagcacagtggcaggtgcttgaactgccatgtta

SEQ ID NO: 85957 - DNA, 1041 bp, Homo sapiens
aagttggtggagaactaactttattgttggaggctttctaaatgtatgtcttttctttgaacattagtttgttccagaaaatattgcgtggttggttgcctgggaagatgtatgtctgattttcggacttggaagcaagataaaggaaagaggctgctggtttatggtatagagattttcactcgttaagaaagtaacaaagtaaggaagtaggattattgtagaaatattattttacagttcaagtttgtaaaacacaggtgaaggtaatcgttggtgggtctcttcctctgagatcaccaaattatctgtagactggttggtagacttggagagaccacttgttcttggacaacagttagaagcatactgccctaagcagtaaaaaggtgattgttgagggcagcaagaggcggtgtaacataccagttcatttttcttttcttagcaagcatgtactaattgccttttaaaactcctgaccataggggataaaacgattacaagaaagataccttccctgctcccatggaatttacattctagcacaacagtggatattaaacaacgtatcatctggttatgtaattacagtaataagaatcatgtaggagaggtcaaggaagcttactgctgtggggttcaggatggcatctccgaaagtatgaataaggaaagtggtgggagaataaaaggagagtggcagagactcagactgagagattaattgagataatgacaattgtgggattcaatgaggtgtataatgtgtttagtgcctggtacttgtgctcagtaagtgctaattagtagttgtttatagcaatactgttatcttggatgatcaaatagaagatccctagcaagtaattttataaagacaaaaatttcgtgtcaactctgtaataaaacaatatatccttagaatcagttatcacttaaaatccttattttatagaaatttttgtgtttcaaaagtatagctagggcaagtcccccttcagggtggatacttaaaggagatgaaatcacttcataaag

SEQ ID NO: 85958 - DNA, 1042 bp, Homo sapiens
cttctaattctttcttgagttctgtcaacttatttctatctgtaattcttatttgtgttattccacatcttttgtcattttcttaatttctcttggctcactttgaaataataatttacagttttcatctgttggtggatatgtctttttggaaactttgattttctgttgtttagacccttatttttatgtttttctgtttcttactcctttttcttaataataactttacatattatttgaccatagaacttttctgttggcttatttttatgtgaaattaatttttctgaattggtaggagggatttgtaggccaggatagctttgtagctttatgtctctagagcttattctttttttactttcatgaaataaaaaaaaaatggtctcattctttcagagatctcttgttcatctctctctttttcatttttatttggacctttttccttttctccctttacccctgttttcagtttggagttcattctcagcagtttcttctcagtgtgggctagaactgtgctgtccagtcagatctaataattacatgtgtggctacttaaagctaaatttaaataaactttatttaataataacttaaataaactttaaacttttgatttcttgtctataccagctatgttacaagtggttaatagctacatgtgacgactagtggctgttgtattgggcattgcccatgtagagcactatcattaccacagcaaatcctattagacagtgatgcttttgagtgtgctccattctcttgagacttttatcataggcctttttcattcatctgcaaattgcaatgagcataactaccctctgttttggctaatattcctaaattgggctgctgtgctttttattaaggatgcagtacattgggaatctcctcttgtcagatccattagacattctccttccacctgctttctcttgcatagatgcttataccacattagtatttttgttttttgttttccagacacaggatctcgctctgttgcccaggctggagtgcagtggct

SEQ ID NO: 85959 - DNA, 1078 bp, Homo sapiens
accccgccaatttcatttagtatttccttttttttttttttttttttttatttgagatggagtctcgcccgatcgccaggctggagtgcagtggcgtaatctcggctcactgcaatctctgcctcctgggttcatgccattctcctgcctcagcctcccgagtagcttggattacaggcacgtggcactacacccagctaatttttgtatttttagtagagtctgggttcaccatgttggccaggttggtctcaatctcctgacctcgtggtctgcctgacttggcctccgaaagtgctgggatgagccaccgtgcccagcctatttagtatttctttactatcaaaataatcgtccattattaactgatttagcaaacttgggcatgcccctcggtctctttccacctttagttgtactatgttaaaaatgagaaagttatattcaggtttgtttttttcacagaggaacattgctaggtttctctgttagcattagcagggtttaatattaacagtaagtatgtccatgatgctttaaatacagaatgctatttttgagcagagtagagatgaacttctagacagtggaacttaactcattcacagagaaatgtaaatgtggtcttctcatagaatattttttctcatgggatttgtctgcttgtgttctgttatcccttcaattgtgtagctgagggtgcttatcttactgagtgagtcttactgttttttccccaggttttatagtttgttcttgcttctgaacaatcagcagttgtttgccattattgacaagaagtctagggcatagattttcttgatctgtttttcttttaatgtttgagttcaatggataagggaaacggttgtatgcattttattgcagacattctctgaaataatttttagccacaagcaaatagctctgtttctgtgagtcatcatttcttcttatatagtgctggataaagaattctattttgtagatagagatttatgacttccagaaagaaagctgcaaaaatggaagtttccaaagaatttaagatttgctataataaatgctatcatatatt

SEQ ID NO: 85960 - DNA, 1056 bp, Homo sapiens
ttgggaggccaagacgggcggatcacgaggtcaggagatcaagaccatcctgtctaacatggtgaaaccccgtctctactaaaaaaaaaaaaaaaaaaaacttagcggggtgtggcggcatgtgcctgtagtcccagctactcaggaggctgagacaggagaatggcgtgaacccgggaggcggagcttgtagtgagccaggatgcgccactgcactccagcctgggtgacagagtgagactccgtctcaaaaaaaaaaagttaactatataatgttaacatagtcattctacagtagtacagaacactaagtcttattcttcctataaagctatatttctgtatcctttaacaaatctctacccaccccgattctccctacccgacccttcttacctctagtgtcctctcttctactttttactctttttagcttccacatatgagtgagagcatgtggtgtttaactttttgttcgcatcatccttggtgtgtttccttttaagaaagttgcttacacaataccctaaacttacaaaactaataaactggaggtgtagaaaatcatttaccttctttatggaaaaaattagtattttccccccaaaagcaggaccatttataaataggtaaagagatttacggaaagacatttaacattttttgtagctcctctgttgcagtgtgtggggcacagtttagtatttgcacatatgaatatgtggctgtgttcccagttatattgaaatattttaatatttgggaccctcttttcaaaacaaaacagcattgttatattggcgttcatttagtgcttattaaataagttttcaaaaccatagtctcttgttaataaatacatatgtagtattcattttgaggatagtgagtacttaaaattcactgtggtgctatagcatgtttttgctataaaaattaagactttgatcatttcgtggcataaaagtatagttaaatccccaattcaagattctggtacaggtctatatgtgtgtctaaatcctacatatttttaaagcatgaagcaaaacagca

SEQ ID NO: 85961 - DNA, 1349 bp, Homo sapiens
tggtaccctaacagttgcgaaaggttacccatgaagttttttctttcaatattataacaggcttgtgtgttttaatttattgtatgtgtttccattgtagacataattcttttgatcctcagattatcccatttttgacagttgagatgcctaaagtgcatacctgtgtgatatttgacatggttctgatagttgttgatagtttcctgttttcaagcccaaggtgacctgccctcaccttgtatatctcttgcccccatcctggaattaactaattttcccaaagaaccctggccgaaagtcggcaatatttagacacctcaatcttaaggataaggatgctacgatgctacgtttactgaattatcatggtttcttttatcatatcccttgtttgttatgttcctttaggtttttataagaaatatttattgccttatttttatatatgtctttactcttatgaactcatctttgggggaagaatctgttgaattcagaatttagggatacccgaagactttttttgtttttgttttttttaagagatagggcccactctgttactcaggctgaagtacagtggtgtgatcacagctcattgcagcttcaaacttctaggctcaagagatcctcctcccttagcctcctgagtagctgggcctataggtgtgtgccatcatgcccagctaatttttgtattttttttagagatgatgtcttgctatgttgcccaggctggtcttgaactcctggcctcaagtggtcctcctgccttggcctcctgaagtgctgggattacaggtgtgagataccacacctgtcccctaatacttaatttgataagttaattttggtttttactttttaggttacaggaattaactgtttgttcagaagacaatgttgatgttcatgatatagaattgttacagtatatcaatgtggattgtgcaaaattaaaacgactcctgaagggtaagtttaaatgtataatatatctgaaaaaaatcactgggtcaaaaactagtatcatgaatgtactaattatattaattgtgctgaactagaacaccaaactggattttataatgacatttccttgtgaaataaccagtaatacaaatgggtaattatttttcaatctttgaaaataatgcagtagagaaaatgagcattttaaatcttggcaatggaaagttttgcttaactacaatttttgttttcaatacagagaatgcaagggtgctattatttcatttttctggaatttgatctctcaagggtggctataggttatagaagctatctgtttagctattgtagcactttacaaagattgtctgtag

SEQ ID NO: 85962 - DNA, 1033 bp, Homo sapiens
aatgtaagacacaactgcaaggcagagaatacagactcctggagaactttggtaattctttttgggaagctgttcagtctttgttgcttgggtacatcacactttgcataaggcccttcacagtgagactgaatacatgatcatccattctaaaatgtgagcttttccaggatagatcaagatagctcttctaacacatagacagtattacattgcttgtctacttaccagaatgcatttgtgtagttgcttaaatgaagttccatgtttatcttttaaaaatgttgcccttgggtttttacatagtgtcagcttttactttaatgccagggattttgttcctatctaataatgtcatttaatatatttttcatgcagaatgtgcagaaaagctatttgacttggtggatggttttgctgaaagcaccaaacgtaaagcagcagtttggccactacaaatcattctccttatcttgtgtccagaaataatccaggatatatccaaagacgtggttgatgaaaacaacatgaataaggtaaggagggcaaaattatttccattatatctagatgtgaagcagtttattttactcaaggtgtgtattactttaggcttattatttaagcaaagtatttcagggaaccatttaaatgatcattttaggtttctttgtttgatggacttagaagagacatactcatacataattttatttggcagagggaaaataataccaggcaatgaacaaagatttaaaataatcccttagtttcattcttttgtctgagaagactaaacgatacctctgttattattaaacgtagtttctctaatattcactacaaggattgccctacttgagttcatcacttttatagtgtgttatttgcatgtacttagggtatgtgtccatatagtgctactgaaattatctagtaactcattttaagtattttagaacagttttcaaagaattttgccaggaaggtaaggctctcgcatataccatctatagtgaaattggcaccatga

SEQ ID NO: 85963 - DNA, 1963 bp, Homo sapiens
gaaccactaatcacttttaaagctttgataatagcattcttacctgggaaaatatatgccatgtatgcacgtgtgccagaaattgtaaaacattaaacttaaaaaaaaaaaaagaagattggctacagattagctctctgaagactttatttttcaaattcactggctaatcatcgagaaaagatgtctcacatgcacatgctcataaagtgggcaatttgtctcatgctcactattatgttttataatataatatgtatgagttagtgtttgaattaaagacgttgtttgaagactttggaaatcatggtgtgtgtttgcatggtcttagaaagttcccgacaaaaggataaaacttaaaactacagtgataaacagagcatacaactcacgtaattttgtactttttcttcctattggtctttgtttttctctagtccgcattggattggtggcctaagattgatgctgtgtattgtcactcggttgaacttcgaaatatgtttggtgaaacacttcataaagcagtgcaaggttgtggagcacacccagcaatacgaatggcaccggtaagataaatcacgaattttgaatctcacctcctttctattgcattttttttagtgtctttatcctattcctgctgctttggttattttagagaattgaatgggtccttcatttcctctaaatgttgtggtatgttgtatctagaatattgttgaatactagattatgtttgttttccactgtttccatgagttgaacttaacttttcttagataaattttctcacaaaacactgaaagtcttaatgaatgtcaccttttttttctgtttttaaagttttttttctccttaaaacttttgaacaaaaatattttgattagcctctcacgttttggggatgagtaagggaagctgactcctgggttagagtgaatgttgctgccaatgcacattttagctaattgaatggtgactattaaacataggaaatgaataaaatttagagtttttgtatttaaaataaaaatattttgtatttcaacaaatatgccttgaggttttacaactgataggaactttgatactgacatttgactctaaacttaataaaaagcagacttaaaattgggtattctcacagattattactcttaatatggaattttaaaactcctatggaatcaatttaaaaagataattataagattgtggaagtcatttttttggtgtttatgtatagcaagagtattatacaagagcaactcttgacattgattggtggtgctttgtcttctgcttcttattttctattattggctgctgtcgctcacatgatcagatgccaaccagtcactgttttgcatggcagtgggcttctgtggctgtaagtatgacccattgtaactacatcagaaaagtccttggtttctttgacttttctgtgtatagttaccattatagtcacatcttgtcatttcaactgaaaatatagcatgtcttcacctgttggttttatctagtaagttagtcatttcacagttaggagataatttaaacagctttctccctggcatgcttctctttttccaagtccccttagtcagtgaaatattttggttttatacagttgtggttcactcttatccagttgtcagtaattatttctgaggattgtttatcttagatgttcaaatagagaagttttttatgtcatatattttgggattattgagcctaaaaaatatagccaaaagatcatggcaatgatgtttccttaagtaaactttaaaatgcaaggttaccttttagttgactttttgtaatgccaagtacttcacttttttttaagttgaagaaattttcagtacaggtataagttaattggaggtaagcataaataatagctgtttaaatgtcatttaataagatatttttaaaaaatcttttaaaacta

SEQ ID NO: 85964 - DNA, 1024 bp, Homo sapiens
catatagtttctgtaattaatcaatttaggaattctgttatggcctagttttcggagtacttgatttaatgagtttttatctggtactagaagcatagctgtgaaagaccttaaatgtatgaaactcatatccttttcagtatttacagcttgttattaataaattgtctctttagaaatagactaatggtgaagtgggtttattcacatgtgacttatttgatatgttaatgtagtggaatttggcattattccaaagatacagaaagagattagacttcagactttcatggcctcgcctatggtataatctccagaatgtgagtatgaggaatccagtaatgaattcatagtgccctggtaggcatagtcactcttgtgacatacttggtgtatatacataccagagttaattactggtccagaagaacttaatctcaagagccaatttctggttatcccaacatggcacagtataaaatcttatggaaaaaaaatctttgtcattgagatcaaattatagttttcatacagtagatttatattgttgatgttttactcatgtttatgtcagacttaatttatatttgtagaatctactgtttctgatgatttagagaatgggaaactgaaagaaattttaaagaattaagtaaaccttgtttgttctaatgggtttctagtgaatctccttcaagttggggcatagagattgagaggagaggttttttaggagagtctcaaacaggaagacaactcaaataagtgtttattcctcttggttgtcagtgcttcagtaaagcttatttatttatttttttctagcaggcagatagaagttcctgtcactttctccttttttacggggtaggatgtgatattccttctagtggaaataccagtcaaatgtccatggatcatgaagaattactacgtactcctggagcctctctccggaagggaaaagggaactcctctatggtcagcttcttctgtactttttctgtatcattttatgtgctct

SEQ ID NO: 85965 - DNA, 2124 bp, Homo sapiens
ctaggtaatatagtgtaatagtgaaaaactgcttagaatctagttctattactgctctttgtggaactttgggcaagttcttaacatccttgttcctcagttcctcaactttaaaatggggacagtaatagttcctgccccagagttgttaaagagggttaaataaaaggatgtgtaaatagcacttgacacttacaagctatatctgataattataattattataaacctccactccataaaaaacccattcataccacagaagtatagaattcgtaccggctaacaaaggtacagatttacagggataaaaacaaagtattttgcttcatgttaaagataagtgtttctgtgatttgtgtttgtgtgtataatttcttttaaatataaatcatatttcaagtgaaaatatcacatcattacagaagagtttattttccaaaccaaaacttttttcattcctaatttttaatgcaaccttgttaaggaagaaacacctaagcagtatgatatttactaatgtctgttttacttgtagaatttgcatttattttatcaattattttctccatttcgtgtttggagaataagtaattcagaatcaaatgtatcttctacagcaatatttagttcttgtttatgcccttgtttcaatgagtgctgcagtgtacttattttattacttccctatagcaagtagatagaatttcctgttacttcctctttttttgtcatttctaattgactgggaggtacattatattgttactgcagtagatttacgttatggtgtttacctgtccatgttagaatcagtttacatttctggaatctggaataggataatatctatttgatttgaaattgaacagatggtagcattatgttggtccagataatctcatttctcatttggacaagatattttggggtttgaaaaattcctataatgattaaaggaaaaagctcttgtgagttattgtatgcggagacacacacacacacacacacacacacacacacacacacacagtttattgcattgttagattttatacataaaattacccaagttgcaaatatatgtcttccacccttgactctcaggatagtgcagcaggatgcagcggaacccccccgatttgccgacaagcccagaccaaactagaagtggccctgtacatgtttctgtggaaccctgacactgaagctgttctggttgccatgtcctgtttccgccacctctgtgaggaagcagatatccggtgtggggtggatgaagtgtcagtgcataacctcttgcccaactataacacattcatggagtttgcctctgtcagcaatatgatgtcaacaggtaaatgtgaatagtggttttttttactcagtctgcctcaaagcacatggcatctgattttgagaatgtatttaaggtcactactttgtaagtttacaggggaaattcaagtagcttacttgaaatccttttctgaacaaagtaagatgaaaataaaaagcatttgaaataaattgttagtcttccactgagttgttaatatgctatacattttaaaaataactggcagtagatgttactatcagttatgattatgtaatttactctgcctaagttgtagatagtgaagttttacaaacattggcgtatgttttgagtaaattgtaggtgggaatagctattttattctgtggacattgtagagtccaagataagtacctttcctgtgaggttagtgaaaggaagtttttggctttatcatttgaagcatttgctctgctcttcctactccttttgggtggagcttatcaggttctccattggcaggcagggctctaagtgcagtaacttgatttgctgttgtatttgcttaggaagagcagcacttcagaaaagagtgatggcactgctgaggcgcattgagcatcccactgcaggaaacactgaggtatgcccttagcaacagaaacacccctcccaggcgcccaccctcaatttggaagcctcttgttacatatgtgtgatcaggaatagcttttgaagtaaatccaagatacgtgcatattacaagtataatatctgagtatttaatatacatcaagtttgaa

SEQ ID NO: 85966 - DNA, 1050 bp, Homo sapiens
gatgacctctcattttgccaagagatgaaatttaggtgagttctcaaaagagcaatgtagggtcttgtaaatcttaatatgtccaatgaagtacagaaaaagagtagatatgcggttattggtagaaaggaggacatgaaaagagagcaatttacatgtttgtttttctctacatctcttctcaaatttccctaagctttgtgcctgtgacaatgctccctttttctaaaactgtgctatacttgagctaagaatttgattctatttccaatctgataccataactaagggccatgatggaggataaatatccatgttgcttgttcccttctggcttttatgtctgtgatagcagtatctcttttataaagtcgtcatgtcacttaggttatctggcaaattatttgcactataagaaatcttacgtgactaaaggtgtgtgtgtggcttcaaaaacattgtttgctgtttctcttttctccaccattctataggaataagatggtagaatacctgacagactgggttatgggaacatcaaaccaagcagcagatgatgatgtaaaatgtcttacaaggtaaaaaaagaatgaccttcaagtattagtgggttttactgtgagagttataactacttaattacagctttatacttgtattttgtgtgtatttaaacttttgagatgtcaaacttttgtgtttgaaatatgtaaagatgctaatctttattactgcttttttttgactgatagactttcagtaaaattaaatgtgaaagagtgatatgtttgggaagttagtgttgtcagtttatgaagaatagtctacagttattgggaaataagatacataaagcctcagattgcatttgtgttatgattagatagataaaggtattatttgaggaactcattgtgttgaatctttttaagaaataattgatttcctgattcaagcaccagagacagaaaaaaaaggaagtaatcaagtctgctttaatgatacttattgacacatatcagaaaatgattaaacactatggactgtata

SEQ ID NO: 85967 - DNA, 1108 bp, Homo sapiens
atttgagctgaatcttggagattttgtctcctagtaaagcgtaggcctctcttaatagcttttaccggttaatccttggaattaacagctatcatagacattgtatatagtcatctatcataaacaatgtacactgttaaatctcaggataaatattaatcagtcatcatttgccttaatttagcaagtggttgtcaactttgggtttacatttttgctactctttagcttcctacctaagaataaaaatgggattgtttgcactaacctgattttgttttgttctcaggatgaactagctcgagttctggttactctgtttgattctcggcatttactctaccaactgctctggaacatgttttctaaagaagtagaattggcagactccatgcagactctcttccgaggcaacagcttggccagtaaaataatgacattctgtttcaaggtttgtatcattcattttgtgtgtatgtgtgtgctgaggtatgtcaagtaatgattatgtacagaatgtgcagggctgattgtcttcttttaaggtaaaatatatggagcaggtataataaactcctattcgtgcatttctgtaggtatatggtgctacctatctacaaaaactcctggatcctttattacgaattgtgatcacatcctctgattggcaacatgttagctttgaagtggatcctaccaggtttgtcatcttttcacatagaaccgctgttttttgtttttttttttttgtttgtttgttttactaacactgcatgaagcaaggcaccttctccccttgatcattaaaattagtttttaattataaaagttatatacaaatacacgtttctttaatgatatctgtaatttttttttaaggtatccttttatttgccttagatccagggacaaactagagaaaggtgtctttgacttccacctccagagactgttactagttaagtctgttcccctgtcctttttccatgcatttacatattcatatgcagtcacttgcatgcatactctttttctaactcacttcttctatgatgaggagtgacttaggagaagggaaagaggctaataggtaatgcaggctgcagtt

SEQ ID NO: 85968 - DNA, 1039 bp, Homo sapiens
taagtaaacaagattcttgccagctttcacagctaagaaaggaggaaaatagtgaaaatagatttttaaacactatatgtggtgattattaaacagtatgttatgctttttagagcacttcacagtaaaatatcctatattattttaataacaaacctggtttattatgttaaaatttcacataaaattattatctttaaaaacatgaattaaaggtggtatcagtgcattgtttaagtattgggtaaaagcattgttgaagagcagagacagcatgctgtgttgttattaaataaggctttattttttaattagtaactggtaacagggaatgttacatttactgattagaaagaaagataggaaaaaagctttggtctcaagatagtattttattgagtctgcttcccaaacctagtttatttcttttggtttgctcttttgtttttattcatcttccctcttctggctttttcttgcccctttgcctttggcagtaacagaaaggtaccttcctgctcttctgtgttctgcctggagggatagtagtccctttgggacctactggggaaatgttgaaagggaagtgagtatattgctagctaataaacttccctggactttagctccttttttgagttcatatcttggcctttaagccttttcaaatcatgtgttaaccagctctattactttatataccttccttccttagttgactggattaaggttatttaagaatagccaactgtgaacatgtgtcagatttataattaaatcattttctcatgtgttgttttcacttctcctgatggttttaggataaagataaaatgattcccaaagtggatattctcgtatggtgagagaattctaagaactaatttatgattctaaataaatctcaccctttttcagtaaatctgcttctccaaactgaagtagtttacacacagttttaaggctataaatgatagttatataccactgttactaatacatttgtatatagtctaaagtttgaaacaaagctctgtga

SEQ ID NO: 85969 - DNA, 1148 bp, Homo sapiens
ctttgggagaccaaggtgggagtatctcttgagcccaagagttaaagaccagcttgggcaacatagcgagtcgtctctacaaataatttttttttttttttaattagccaggcgtggtggtgtactcctgtagtcccagctactcgggaggctgaggcaggaggattgcttgagcccaggtggttgaggctgcagtgagctgtgattgtatcactgtactccaccatgagtgacagagtaagaccctgtctcacaaaaaaaaaaaaaaaaaaagaaaacgaaaaagctttacatataagtttctaagctgtacatataaattatctaagctttaaatatagatttttaaaattcaaatcaaaatttaaatttatagacatatacttttgttgtgtccattgaagattttatttttgattatattaagtaaatttgcctagctatgatcaaattgattggattataaagacgtttctaatgcttcagccttctaattctcagcatatgtgagtttaacataatgtacaccatcattgttgaaattaatttgctgcttctaacactcttgttcagtgttatactaatgccattttgtagtgtatcacataattaaaattcaggctttctgtgtttctctagagcatgttttctagcctttctaacactgctttatttattaagattatgtctaaaattgtttcttgaaatgtttttttttctactagagttattttcaaaaaatttttttttaatttctgggtaacaccaagttttggaatgtatttctcagcacaggtaatacgagctcctcatggaaacaaggggaatctaattggtaattcgagatattttagagtacattccaaagtatgaagacagtatactcataaatttaaaatgttgttttatggagttgtgtgctttaacaaaacctaatgatatttaagagcaagctgactttctttttgggtgtatatgtcatggattggaatatgtaaaatatagagagaagatctggcttctagtatatagctgtgtagtcacattacaaataactgtttattattctcaaatatatagtgtataatgaggtttactttgaaagttaactgtctgcctaactcagggagaatgcagtaactaagcat

SEQ ID NO: 85970 - DNA, 1046 bp, Homo sapiens
agtggtgaatgaaaaaaaaacagtccttttataagttgacttacgaaacttgttatgtagcatttttattggtttttaaaatcagtttttagttccaaaattatattgattctgccatcagtgatacatatatttatatgatacatgagacagtatgtgttcctgaggtgtcgatattttgggttttgacatgaattatttttaaagatgtggaagatggtaaaagtgtagtacttttcataaagtttacaatatgcttttgggaaatcactcagtttttcattaaattctgaggctgagtaccattaaatcaggtgtaaatatgagtcacattttaaaacttctttgtcctagagaaaaccggtaaatagctactttcaaagaagtattttgtctaattgatgataaccattacaaatttccttgttccttctccactcccagtgcttcattttactagcataaaaaataaaacagtattttgaaagctctccatgtgtttcacagcaggttaacattttataaactaactggttctttgaaaattaaactatgggttttagttttgtaaaaacttttagaattttaatgagttaaacgtatgagatgctaattcttttaaaataatctattttaaaataattataaagcagtttttaatccttttccctcctgctaactcactccttaaaggctttaaaatgttataggtttcttttgtctgcctttatttatttatttatttatttattttgagacagtctctctgtcacccagattggagtgcagtggcacgatggctcactgcaacctccacctcctgggtttaagcgattctcctgccttagccttccaagtagctgggattacaggtgtggctccaccatgtccagctaatttttgtatttttagtagagatggggttttgccatgttggccaggctggtttcgaactcctagcctcaagtgatctgcccgcctcggcctcccagagtgctgggattacaggcatgagccaccacgcccagccagagaattgtctaaga

SEQ ID NO: 85971 - DNA, 1036 bp, Homo sapiens
tgtaggaaacaaatcaaggttgagaaatagtagagagacggtgaaggaagatcagtggaagatgggaaacttgtctaatagggtcattcagatagccttaagaccaagaagtccaaaggactggagtattagggaatcaagaaagtaagaaaattgcattgaacctcccgccacccccctgccctttaacaactctaagtaacccctgctcaccttcccatgaaaggcctctctccagctctcatctcagttgccatttctaaattgcctaagatcattttaattttcgtttgcgtttgagatgaaccatatttgtattctaaccccaacctttaatacaaccaggatatttttacttttccgttgttgtctaagtaaaaagcaaacattggtaagggaggtagaagatgtgtttccccctcttctttaaaatcttattagtttacaaatagcaaagatttctggaaaacaaagctgcgtttttttttttcggaatcagaaactgttatatttgtattccctctctgtggtgatctagaaaaagctaaaggaaagattggacctgctgcagatcccttagtgagattcaatcagtttggtttccatgaaacctattgagtcttgtggcctgagaatgctaagaattctcagctctgctgcttattagctgcataatcttttttttttttttgaaatggagtttcactcttgtcacccaggctggagtgcaatggagcgatctcggctcactgcaacctccacctcctggcttcaagtgattctcctgtcttagcctcccgagtagctgggattgcagacatgtagaaccatgcgtggctgattttgtatttttagtagagatggggtttcaccatattggccaggctggtcttgaactcctgacctcaggtgatctgcctgcctcggcctcccaaagtgctgggaattacaggtgtgagccactgcacctggccttagctgcataatcttagataagtttatttttccaaatctgttgcttcatatgttaaagctg

SEQ ID NO: 85972 - DNA, 1037 bp, Homo sapiens
ccgggcaaggtggctcacacctgtaatcccagcactttgggaggccaaggcggggaaatcacttgggctcaggagtttgagatcagcttgggcagcatggtgaaaccctgtcaccacggaagaatacaaaaatcagccgtacattgtggcatacacctgtagccccagctactcaggaggctgaggtgggaggatcacttgatcctgggaggtcaagactgcattgagccgagatcacaccactgtactccagcctgggcaacagagtgaggccttctctgaaagaatacattaaaacaaaacaaaacaaaaaccccaagttacaaagaagagttttcctcttaggaatattgtgatacctggcaattgctttttgggtggtagtagtaaataatgataatagctaacatttcctaagtgctttctctgcatcaggaaactgtgcatattacataatttctcatttaatctacataataaccttctgagatattattaacaattaattgacgtacgtataaactgaaacccaaacatggctatcagaatgatctggaacattaaaacaaacatatccccagcccccatttccaaaccaaaatctcaggggcagggccttatttatatatttaacaggcactccaagtgtttcatttattactaaagtttgggaatctcactgggtcatgtacttaattcatggtagcacaactagtaagaatcagaattcggtttcaaacctaagccaaagctcttaacaaatgcactattaattacatgcttattactattataattgtatgcttgggtaaatctttgtagatgagcatgaaaacctaaccaacagttatgagatatattactctggggaaaataagttctcgattccaggcatctgatttacaaatggttttttgaaacataagacaagagtgtactcaatataagataatcttgtcattggcgcaatatcattatacattacaaaggttagcagaattggcaccttttcttagcgaaatgacatattactatta

SEQ ID NO: 85973 - DNA, 1051 bp, Homo sapiens
gaaatgaacaaaaccaactccttcattttgcaaatgggctcagacaaggggcataacttacctgagggtgcatatctaaaaatgacccaagctagaacttaagtctgtgacttaaagcccaaattttaactgtagaactctaacatatatattaaaagttacatttggctctaatatgtaattgagaacatttcaaattaatgttaccttttgatatttttctttgaagagtaagaattcagtctttctccagcgtctatggggaatctgatttctcactcactgcatgctatttaaatataattagtgaggaagtcatgtgttctaaacttgacctgccatttgctctttggaagtatccaactgagtgtttccagacaactacatataaacagatagactttggcagagattaaagaattcaaataaagttctaaaatctgcttgctaatttaaagaatccagtgaatagcatttgttattcctcttaccatgtatacattaatgaattgcttcactggattgactctaactagatgaatttactattttgcctgctgtgattattatgattttaaaccaagtaagtgtattaaaggtgtctgcgttttccttagaacatctgtacatatgtttatagggcagtttctacccatggttattttgaagtttaaaaaataattcagtaatacaacatttcaggtatttaatttttggtaaataaagtaaccttagaaaagaagttaaacttcattaatatgaaacttaagaaaaggattacatatgaaagtgatactttttcatactgagtttacaaacttttgtgtgtttgtgtatggttttttaatgtattaaaccagtcaccttgaagtgcataaagtaaattttttgaaggaattttgtcttttggtcagccgttttccatgataactagcatatagggaaattgggttgtattctgctaatgttttcatcatattggccagcacactttaaaaattgcaggactgtgaacaatggtgttgacatacaaggaaattgcaacataaat

SEQ ID NO: 85974 - DNA, 1092 bp, Homo sapiens
aactgtatatgatttttaagcctgatgtctaacttctcaccaatcttccattcttgctttcttctatcaacgcctactagaaacagacggttcagtggagggggtctccaagacgccagaagatggtaaaaccattagaaagcatgatttaagagaaattaacttttgttgtcttagccagtgatattttgggattatttgtgacagaaattagttcgtgctgactaacataactacatgctggacatcttgcctttgcctcttcaaatccactctgttctttaccctgctgtgtaccctaagaggctgacctgtgtagagggtatcattgggctcccctcctttctggctttcagctggcccatagggaatacaagcggaagattagggagaagaaagagagtaaggttaggaggtatatatttttggctccgtttctgcagggtcccagtgggctggctacatccatccatgcagtatggtttttgttgggtgaccctctccacacaacctactctgtgtctgctttctgctaactgcttcctgcactcactacttcaggtgtagtatcacactgtctcttaagagtttccttaaaacctgccttctcctttatacataatctctaatatctcagtttgaatttgccacctgtttcctgctagaaccttaattgctacaagctgtatgtacactgtatcatcttcctaaaatcaccaggcatggtgggatgtgagctatagtcccagcaactcaggaggctgatgtaggaggattgcttgagcccagaaattcaaggctacagtgagctatggataccctaacctgagcaacagagcaagaccttgtctctaaaaaacaaaaattaagttaaaaaattgtgtctttctttatatacttacattactttccgttgatctgtttttgaaatgtttccagaactgtcttccctcacgtattgattcttccaaaattcttaagaaaatggaaaaaagtaatttctgaaaatgatgagaatgatcataaatttcatatagcactttcttgagaatttcaaattgcagttttaatattttactttagaaacaggtc

SEQ ID NO: 85975 - DNA, 1050 bp, Homo sapiens
cggtggcaggcacctgtagtcccagctacttgggaggctgaggcaggagaatggcttgaacctgggaggcggagcttgcagtgagctgagatagcgccacagcactcaagcccgggtgacagagcgagattccatctcaaaaaaaaaaaaaaaaaagtatacaattttgcatattcagagttgtgtactcattaccactgtctaattttaaacattttcatcactccaaaaagaaacctcatagccatcaacagtcactctcccctttcctcctgccccccctcagcccctggcaaccactgatctactttctgtctctatggatttgcacagtttagatgtttcatataagtggaatcatacaatatgtgctcttttgtgactgccttcttttactttaatattttcaagattcatccatgttgtagcatgtatcagaactttatccctttttatagctgaataatattctattgtattcatacaatatataagcgtttgtgtggacgtatgcattcagtttttttagatacatatctaggagtggaattgagtcatatggtacctcagtgtttaactttagaggaactgccaaatgattttccaaagtagctgcattattttacattgctaccagcagtgaatgagagtttgaatttctgtacatcttcacccaacacttgatattgtctgtctttctagacaaattttgataaatccctccttttctaaaccatagccaagtctattactgtttaacaatgaccatcttggagtataaattttctgttcacactttgaactttaacttccgggtcttagatgtctttatctggatatacagagaatctaggttttgtatgtaattattcaatgatagtattaaaactaagtccggacgcagtggatcacgcctgtaatcccagcactttgggaggccgaggcgggcggatcacgaggtcaggagatcgagaccatcctggctaacacagtgaaatcccgtctctactaaaaatacaaaaacttagctggtcgtggtggcgggcacct

SEQ ID NO: 85976 - DNA, 1009 bp, Homo sapiens
tttagcttttacaaggtgtctctaagctcatacttaatgacctgcagctttttttgtagaatttaaagtcaaggcaagagactcataatactttatccaagtatattttgttaaagcaaaaaaaatgtcatgtgatcttgtggaaaagccataccatgaggaaattttagctcctataaataggtgaaactatttttaaacaattgtttgctttcttagattatttgtcattggtataaggaatacagatgagtatttaatgtctaaataatataactcataaatggatgtggttgtatgccagttactcttacactacataatatctcaaatgtgataatggttgctgaggctttggatggcaaattagggctttcccagtggttattgtggtgtatggcatccttgtcttcccttacttatgttttgtttttcttctttctcaatggaaagccattaagtcttagttaattttctgttgaggcaagcatttgacattcattcgaattccctcagccttccagaagcattcagtatgtttcaactgtgactatgagcaacaaaataatacaaagtgaaaaactgcgtttcctggtgtgagtatttcattagatttattgatccttggccttatggtatccatgtgaaatgttcagacatctaattttttactgctaaataatttttttaggggataaataacaaaccttgtaaattatttgaagcataactgaagatgtcagatatatgagaaattatttactattactgtttcagtcattttcacttctaatcttgttaactacccaagaatctcttgtacaaaggatagtaatcattaaaatggttatatagcacccacaaagtgctttaatatacatgttttaatctattccttaaaacaccttctggagtatatgttcttaaccatattttttatcagaggacacatttaatcacttgcccaaggtaaaaacacacaccgtaggtgataaactttatgtcatgc

SEQ ID NO: 85977 - DNA, 1009 bp, Homo sapiens
acagagtcttgctcttgtcacccaggctggagtgcagtggcatgatctcggcttactgcaacctccgcctcccgggttcaagcgatcctcctgcctcagtctcctgagtagctaggataataggtgcctgcccagctaatttttatatttttagtagcgatagggtttcaccattttggccaggctggtcttgaactcctgacctcaagtgatccacccaccttggcctcccaaattattgaggttacaggtgtgagccatggtgcctggcccagaactagtttcttatatgactagtagtagcctagccaaatcctccctcattcttaacttttctttgatctttcttttctcaggactttgaagctgtaactttgaaataaatgaaagaaacttagactctagaataagactcgcaggtttgacttggtctgtcctaagtaggtcattgttagccaactagtcacatctttgatctatgttaattcattcttttatttataaattcagataaaggtggtcaaaaaaacaaacttctaggggcaagtgaatgtctcagctgaaatcaaaaggatgagtagggtttgagagggcaagaagagggagagaggacatgcagcatctctgaaagcctggtggcacgaagcatggtgactaagggacagaggatattttgtttgtttgaactataaaatgttagagagctggaaaattttaagatgatactctaaagggaagcaaggccctgatcatgcagtaaaccatattaagagtttagattttattatgagatatgagaaattattgaaagggaagggttggtacacagttcatcttgtgtcttcttatttctcttgttttcttactcagtctagatgccctagacaaacatttcagtagttcttttcttagatctcttggctatttcaaggacaaggcaggtaataaaatatgcttggtctacagtgttagttagcattttggcatttttctttttgttactttttaa

SEQ ID NO: 85978 - DNA, 1076 bp, Homo sapiens
taatatcggccgggcacggtggctcacgcctgtaatcccagcactttgggaggccgaggcaagcagatcacctgaggtcaggagttcaagaccagcctggccaacatggtgaaacctgatctctactaaaaatacaaaaattagctgggcatggtggcacatacctgtagtcttaactactcaggaggctgaagcagaagaatcgcttgaacccaggaggtggaggatgcagtgagccaagatcgcaccactgcattctagcctgagtgacagagcaagactctgtatgaaataaataaataaataaataaataaataaataaataagttaatgtaactgtagtatttacttctttttctattcttgcttgtttctaagtgaacttaaggttccaaaacatttctcattggaatatttttcagaattgccttaatctgtaaactatactggaaataattgcaacgtaatagtatcccaccaaagtcctctgtaccttagtgtttgatatgttccaggtgctgactaaatatttgttgagtgaaagaatgaatgaatgaatggagagaccttagtttgtcatctgcatcaagtcttaatttatacttctcattaatatttttcagattttccccatttgatgctgcatatttcatgttaatgttacttcttgacattgtatatttttcccataattttctaattatttgttgccaatatctgttatttctgtttttttgttttggaatttcccaaatattgttaaaaaagattggcaatagtgggcatccttgtttcgattgtgattttaatagaaatatgttattcttcaccagcaagatgttgggtggtagtgtgtaatacattcttttatctagttcttaaaatatattttataaggaaaaattttatgaaagattttaggttaactcttgactgacatttttggtattaaaggaatttgctgttgtttgatagcatcattatggaagatattgaatagcacatatttgtgatcttttaagttagctatagaagccatcttctcattctgctgtggtaagtgaatgtctttctg

SEQ ID NO: 85979 - DNA, 1023 bp, Homo sapiens
tttgaaatttttctggagccaggaatatagtaatacttagtggcaaataatgagcctttttccattaataataagaatataatttctttggaaggaaatactatctaattatagtttccctcagtatatctgggggattggttagcagacccctgtgtataccaaaatttgcgcatattcaaatcccaaaatcggccctgtggaacgtgcttccttgtggaacctatttatacagtatgtgggtttcacatcccacaaatactgtgctttcaatctatgtataagtgtgcccatgccattcaaacccatgttgttcaagggtcaactttactttaaggctagataattcttctgtctaagaacttagagtctgagtagttgacgtatattgtacttgtaagtttaccaagtttgactctgcattttgcagacatgtctgtaggattgacataatccataggtgctcctaatgcagtagtctataatttgactttcttattacttttccccttaaaaattctaagacagcattgagtttttggtatcctcagaggaaaagacagttacctctaagatacctactttcagggcaggcgtggtggctcatgcctgtaatcctagcactttgggaggccaaagcaggcgaatcacctgaggtcaggagtttgagaccagcctggccaacatgatgaagccccgtctctactgaaaatacaaaaattagtcgagcgtggtggcaggcgcctgtaatcccagctacttgggaggctgaggtgagagaattgcttgaacctgggagggggagattgcagtcagccgagatcacgccattgcactccagcctgggggataagagcgagacttcgtctcaaaaaaaaaaaaaaaaaaaaaaaaaaaaaaaaagaaacctactttctgtgaaagtcggtgtatatgtttttttaaataagacacaagtatgtggtagagtagggattatctaagcaattagtccctatcatggatggtgaaggtactaatcag

SEQ ID NO: 85980 - DNA, 1045 bp, Homo sapiens
agcaaaaaaaagaacacattagagtgttgttacttttctctctctcaatagaaatgttcctaaaccagcaaaggaggctatctgaatttttaaaagtttttacgaaggaacataaaaattcctttctctatcttttcccacctctagaaatgcttgaaatgagattctgccttacgtctcacaaattaaataccacatttgtgtctcacccatctcagttatgctgtcttgcattttaatcaatcctgtttcaggacttcttttgctgccttgtggctgtttcttatgtttgtcactaattcataagttggctaacttttatatttgtagagaatttctcagtgattttcttctagttggagttccagtgtggtttgatttggagtgtcaagatctctgtcccatgcctagccttagtcctcagtctgttttactgggttcaccacctggttgtagtaccaaatgcccttttccctttccctctctccttcctcacttcctcagtactgcccaagttcgtcagacccaatgattttattcttaagctaatcttatttttaatttaggtaattctgatttctgatttgtaaaagataaattttcttctccttcatgtagtaggattttaattttgtaaatatttaaattctccattaatggtgtgttaaatctgcactaaaactgcttctttacatgtttttaaattttttcattatgtttttaacacttttcttacatgcaaaaaacacaaccgttaaacttttcttattaaaatgcaaagcctagtgtcttctagctttttgaagagcttttgtccattatataatctgtcaagtagccaagagttcctcagaagcaggacatcatttagatttaaaacaattatggcttgtctgtaaaataatgttgtagcataaccattcatgggatggcagctacgattttacttcagtaaaatatccttggatactaccgccattttatttaccttaaagattttaccaaggtaccctagaacaaaaatggtgaggtcattttgattctg

SEQ ID NO: 85981 - DNA, 1068 bp, Homo sapiens
tagcagtatcaatttaggtgatttcagagtgttgcacatttcatctttctgggaaagtagtttatagttttaaaattacatgaaatgatataaaaggaaaatttttcatcatgagttttataaagtgagatcagatttatgataaattttgctccactcttcagtggactgcttgtgtaaatctgttaaaacacaaatctgatttccagaatggcaagtttaaagaaagcaaataaagttacggtattttcgttaccaagtggcaccatttaaaaacgagtaatatttagcatgttatgtgtaaggaaagtctctttatgccttgttactaaatcgtttgtttttctctaaattatattagcattatttagattataccacaaatagaatttgttgtattaaaatttgaagtttattttcttacaagagaaactatactctaggagccaccttttgtataaaactaatgttcctcgaaaagtatctgcattttaagagtccgcaacatagaagtttattgttgattgggtgctttattgccactttactttgagggttcagttgaactctcaattggattcttactgtggatttaggaaaccagccatcaatcatagtgcttaaaataatgtgttaaaaatactacattcagcaatattgtggaaatagggaatgcattgacatttagagttctatttaagctcatatatacactgctgcacttctaaagatgtgactgagggtcaatttaccgaccacttaaatctcttaattttaggaaacctcattaagtcagtgtagaagtagagttatgcattttcattacacttaacagtacttttgtttgaaagaaaagacatgttacttcattaatggattcaaatgaatttgggtttaggctgtatcaagtttagtttctgttgtatataatagaaaattccagtgcaatagtagtggcaatgtttctcatttcaagtttgggacataccaaattgcttcatattattcaaagattattgtaaaattctcaaaaagaaaaagggagatcatttcaatatatttgaattc

SEQ ID NO: 85982 - DNA, 1035 bp, Homo sapiens
acatatgtaactaacctgcacgttgtgcacatgtaccctaaaacttaaagtataataaaaataaataaataaataaaagaaattctcatgaaataaaataatactgtattactgttactcaaaaaaaatattttttagaggcataagtatgtgttacaacttattttaaatattattcagactcattacattttctattaggctgtctaggtcagtaatgatagttaggcaacttttacattctagattaagcagtaaattaatttacgtattcttttgtgtcctaggatatattaccccaacattgtgaaaggtatcacaaagcatctgccaaggaatagctatcccacgctaatcagtggtttcagttttccattattataggtaacatttgctatgcttgagagtcagatattgtttatttttggtaatatggttggctatttagactgattttcctgctgaatacaactgagagtactcaataaagtactttaaaagcatgaaagaaataacaacatagaaattaccaagtcaaaatccaaatgaatcagtttctttgcccacctccctactcctttttttctttatgccactggcttgttgccaaaactcagtcaattatttcctaaaatgtctctcatcttggagttttctctttgactctttgggaagatttaatttgttcttctgtcccccatattttctataagtgattcctcatatcattgacataattgctcatttgcatcatctcacaataatttcaaaataataccagtattgattgctacaattagattatagactaccgaataaagtttaaaatttgtttgtagctctgcttgctttattttactaaaagtgtatagtaaattctgtgttctaatgcaatgtgaaataattcttttctgtgtatttttatatcaccaacttgatataaactttgtttcagttttcagcttttcaggatcacaagtcaaaattatatatataacaatgtatattcagataaatcttgcttctctgtctttt

SEQ ID NO: 85983 - DNA, 1039 bp, Homo sapiens
ctaattagtagtagttgattagtagttattattcctaatttagacttgatacactgtaggtttggtgtaacaactcttggatatactctaacccatcatacagcatttggacctcataagcagtgatctctcttcttttattaatacaagttctgtacttggctctgctgcccctctagcttcattatatttcagtacttcacttagtcatacttctcaaaacgcataggctctatatgctggatccatgtgttctctaccttttttcaccattttctactagaaatatattgattctcctgccttgaagaacaccagtgatcatctgttacctaatctaattgttctttatttcttctctcccctcccctccttgaccacattagacactactgttccttcactaatattcaagtagctttttgtaatcagtcttcctttcatgttactctcactagctctttttcttctgcctcctaaatatggttaattgatattctgtcctcacccttacctacttttctttgttcctgattctgtaagattttagttctcagctttatgccacaattcctaaacctgtacctccagcctacatcttctttgtcctaattctatttgtgtgacttcttggtggatttttccatattttatatatatagatagatagacatagatatagatataaatatctcccactatcagcaaattcaacatatttaaaatggagttcatctttaccctcacaactgacaactgactcttctcccaacttctctgtatctgttaatggtaccactaagtttcttaggcacagagtctattagtaatctttgaagcatccttagtgtctctgtagcgtggtagccttatgttaatattgcatatttttaaagaatttcattcaactcagagtcttaggcttaaaatcctagagtgatctctgaatctggtggagtaaattcaatccagttggtcaagtagtcctgctgctgctttcattcatctattggtaaatgccacatttgtgtggagctct

SEQ ID NO: 85984 - DNA, 1103 bp, Homo sapiens
ttaatttctgttaagataaaacttcctttttctttttttttttggagacagagtcgttctgtcacccaggctggagtgcagtggcatgatcttgtctcgctgcaacctctacatcctgggttcaagcgattcttgtgcctcatcctcccgagtagctgggactacagtaggcatacactaccacacctggctaatttttgtatttttagtagagacagggtttcaccatgttgtccagaccggtctcgaactcctgacctcaagtgatctgtccgcctcagcctcccaaaatgctgggattacaggcatgagccaccacgcctggcctgttaagataaaacttctaaattgagttttcttccttctggcttgagttaaccagtccagattcacgtatcatgactgaaacttcttatccagccaaatgcatccctttcccaccttgcatactttctaaacacacgatttttccctgctaaacagacacttctatgctgttttttacccttctcaagggtgttcttttttttttatttttcttccagacctagcctcttcccctttctggctgcatatctgaatctgtcctcatctttcagacctcagtttaaattccccttcttaacccaagttctctgtgactgactacagcccaaacagatcagtcatttactgaattccccctagctctcatttattgtttttatggttccttacataattcatgtatgtatctcactcacacttctattctcttaagtaattgtgtttacttttcacattttcctatacctacttccttgaacaagattataaagaaccttgaagaaggcagaaaggagaaagaaaaatacttatctagagcatattatgtgttgtactatcccagttttgcatactttatttcacagaaccttcaaatgactttataaggaaggtaaagggatcccttatttacagataaagagacagtgtcaaatgagttaagcagtttgcctgatgttataccactcgaagtgacagattgggagtttgtacccagggccacctgattccaaagcatacattctttctgctaccctttattgcctcatgtttttata

SEQ ID NO: 85985 - DNA, 1084 bp, Homo sapiens
ttttgataggctcctatcctctactgtcagtagtaagctggtggaaccctccatgtatgagattttcacttgtcagttaacggttatggcaatattaaaaccaaattccattttttgcctatcctaacactttctaccactcttcagttagctttttatcctcctaggatctgccacatcagagtactagaaactgtattagaattctatgatggcaattcagtgtagtccagagaaggagaagaaagatttaaaagaggaataaatagggaatatggtagtggaaaaaactgacttttttcccagcggtaatgaggccagcgttactaccagtgtggaaggttatttagcatacacattttaaaatatgtaagtggtgtgtacctgaagtaccaacattgtttctgtaggtaaagaacaatattgggcaggggaataaaaaggagatttagaataatataaaaggcaatgcaaagaaatacaaaataacacaaaagagaaaaaacaaaaactctaggaagcagcgaacagaaaagaggaaggtcaattgactagagaagatacagaaaagaagaaaagttaataaacaggtgaaaaaaaaagcagtggttatataattagcaagaaggcagtgtagatgattgaagtaggcaaaatgaagttgggggtggggggagatgattgaagtagatgaaagaagcaacggcaaaatgctgctctgttgtggctggcctgtgtttgtgagtgcagggagacagtaaagaggagcttgctttctaaaatggaggaccagaaggaaccatcctttcaaattcatttacctttcatttcaggctctcctgtctgctgtgagtatccttaccatcctctccctttttttttccctgacactatccagaagcatacctagcaattattccaaagaacccatgtacccgtgtacgttttatatagagttttccagaaatcccttagtctgctgctcaagcaaatttgtcagccctcatatgccggtttttactcattattataggctggcactttgaggtttaaatctgtgattttggttctttttctttgctga

SEQ ID NO: 85986 - DNA, 1033 bp, Homo sapiens
agctttatctgccatggctatagtttctttttaattctaaaactaaggttaacaaatatgattgtggctgggagcggtggctcactcctgtaatcccagcactttgggaggcggaggtaagcggatcacccaaggtcaggagtaggagaccagcctgggcaacatagtgaaaccccatctctactaaaaatacaaaaaaattagccaggcgtggtggtgggcgcctgtaatccgagctacttgagaggctgaagcaggagaattgcttgaacccaggaggtggaggttgcagtgagctgagatcgtgccactgcactccagcctgggagacagagcaagactctatctcaaaaaaaaaaaaaaatatgtgtgtgtgtgtgtgtgtgtgtgtgtgtgtgtgtgagattaaataaacttaaaaggtcttatacaaacctaggtgaaaatatttttctaaggcaagctgaactgagtattttttaattctatgcaacaaaaccacaaaaacctgttatagacatctttagactatcagagtttaagtttaaaacactaatgacagtttttaaaataaattttatataaagcaagatcaaaccaaattgtgtgaaaattttcttacctcagctgttaacttcttttgcagaatgctaaattcttgttctaactggacattttggtgatttggctaagaaaggaaaatgggtggttcaattcagatttaaaatgttcctctagcaaactgaaatagtttctgtagaaaaagaggaagtttatcaatagctggttccggaagtgcaataaaccacaaagtgactaagaaatatattactttaacagaacttattttgaaatacattttggagccctatgatttgagtgcttttaattatgtaaataaatatttgagatactctagtaatatgattatgtaaattaaatatttaggatggagtcccgaagagaaaattacatgttctaagaagaaaagctgccagttgggttatcacttacagtgagatttcttctcata

SEQ ID NO: 85987 - DNA, 1050 bp, Homo sapiens
tgctggtgcgctgcacccactactgtgtcatctagcattaggtatatctcccaatgctatccctcccccctcccccgaccccaccacagtccccagagtgtgatattccccttcctgtgtccatgtgatctcattgttcaattcccacctatgagtgagaatatgcggtgtttggttttttgttcttgcgatagtttactgagaatgatggtttccaatttcatccatgtccctacaaaggatatgaactcatcattttttatgttttttaaaaaagaatatttgtacaaaaaaagaaaaaagccaggcaccatggcacatgcctgtaatcccacctgctcaggaggatcgctaagcccaggagtttgagaccagcctggacaacatagtgaggcccccatctcaaaaagaatatttatattttaagaaattcactaataaaagccaattgaaagaatagtgagataatcagttatcagcttggcaaagattttttttttaagatccattcctggtggtctgtggaattgtgagtagaggcaatttttctagaaaggcatttggaagtggataacaagaccttaagactattcataccttttggcctcataattctgctttttagcatttatcctaaagaattaatgttaaaatgtttattatagcattatttttatgtagatttttaaattgaggtatatcttgtcatcagtaaagtgcaagatcttaagtcaacagcttgatgaacttctacatgcaaatacatcatgaaagtatctccagatctagacatagaacatttctagcatccagagggatattctcagtaccctcccttcaccaagagtaaacactattatgacctctattgcacagatttattttgcctactttagaacttcatatgacattatttataatagcaaaaaaatgaacaggccaaaagtcaaagaataaggaactgattaaattattggttctccatctgatggaataatatgaagccattgaaaaatggctttgttacagaatttcagtttggaagatgaa

SEQ ID NO: 85988 - DNA, 1102 bp, Homo sapiens
ggagttatatttcctttccttgcagagttgttagtcagggaagaagacctcagcagatgcttgttcaaaaaattaattcttacttgtttgtttgtttgtttgtttgttttttgtagggtacaggcatccttcacctgctattgttgcaagaacagtcagaattttacatacactactaactctggttaacaaacacagaaattgtgacaaatttgaagtgaatacacagagcgtggcctacttagcaggtaaaaacacaaaataaacaaaattaatcttgctacatctatatataaggatcacccaaaaagtacaaatacctataggttttttggcggttgcgtggcagagcagaaagttcacagtctagtcctttagtggtggttacaattttgagagttttgccagaacatttttctgtaggaaaaaatttaattcccattaaaatctgaaatgtgttcccttggtcatctttggttcaagacactacagtggctctctgttatctgtcataaaatctgaatgcttcagtctagcaccctgggtccttaaatagccctctcagttctgttatctttctctaaatttcatgagcctcattttttattaccactccaaatggatgagctattttaagctaatctacttgccatctcctacaagcaactgcctcttcaatattcattccttatgtcattttatctggagtatctgccctatccccaccattccattaaagcttcctatttgctcttatctgatttttgtttctctactcagcaacacttagcacttatgtacaatacaattcttgaacatagttgtttgatagaaagtgctgattctcagtttcacagacttgtatttgttcaacttttttgtttgaaccgtatcatcttgagcaaatcatttaacatctcagtattttttctcattcagcttaataatacctgccctgcctactttgtgtttgttaaagatcaaatgtatattaaagaacttggaaaataaaagatgcttattaaatctctctgtatatttcacatttatgtagtcttccaaaatatgtgcacatttaacaggtactatgctctttaggaga

SEQ ID NO: 85989 - DNA, 1034 bp, Homo sapiens
tatttttgaagcatctcccagtgtatctggtttttagtattttcaggcatgcatatctttttttcaaagcttaaaaaattaaaatcaaactctgctttcttcctaagcttggaaattactcatgtattaatgagtagttcttggcaccagcagcgtttcttaaactgaaaagactggtcagacatagttgacctttgctactgaataatgcctaccattgcatttattatcagttatcatatttgttgatttacctccagtgtagtttggtttacctccagtgtacagaatacaatctcagtttaatttgcaccagtaaggtgcaacctatcctgaaacagaaagctatgggaacaaaaccctttgagaagatggaaaataaaggaaagaaactgctccagggatgtattagagctttctttgagtcctcagtgaaagcttaaacactttatgtccaaacattttctttttagtgtattcccatttatagacactgtagttaatgaacttgcatattcttaacttttgtttataggaacaaggaaaagttttgatcacttgatatcagacacaaaggctcctaaaaggcaagaaatggaatcagggatcacaacaccccccaaaatgaggagagtagcagaaactgattatgaaatgggtgagaaacaaagtattgatctagatcattgaaaataaggtgggagagtacatgaaagtcatgtttattttccagccatttcttagaatctttagagtgaaatatagaaacgtttgccatttctcaaaagataaactctaccattcaagacagttatcttgaagcttgtgtaaaaattaatcatatatattatatacagcattgtaaataggtagccaaaacttttgtgtaggcgaatagtaattctctatgatgtttatgttagtattttaagtatctactaaagaaagctgttgaattttagaagtaacattgaaatagttaggtgaagtgattatccaggtgtttgatcacgttaattccctatcttgctgca

SEQ ID NO: 85990 - DNA, 1058 bp, Homo sapiens
attactttttgtccaaaaatggaaatttttctattctaagatttaaaatttcaatatataaagaagaataaagtacaaattagctgaaatcttgccatacagaggtaaaatatattttttagtcctttggcttctgacagagataaaatattttggcagatgtttacccagccctacgccctctccccacagtgtgtgggtgtttttttcctactccaaaaattgtggtcatctttttgtatcagtaaatatcaatcagtaatgtacattttgatacaaattactaaaacgttctgcagctgtttgctttcccgccaaaatttatgccagcagtaagtataatcagtctaattttgggggtaaattttattgatgtttaacagaaaagttcacaaattgcaagttttcagcttagtgaacttttaaaatgtaaacacacttgaaaatccatcatctacatcaagaaacagaacattaccagcatcccaagaagccatcctcatgcccccttaagtcactacttccgcaagggtgaccacagtcctgttacccaatttgtaatctttcctaatgtgatagataaaaataaaaatcttattttagtttctggttacttttctgaagttactgcttagattatttataatattaattggggtggggtgcagtggctcatgcttgtaatcccagaactttgagaggccaagatggaaggattgcttgagaccaggagttcaagaccagccttggcaacatagtgagactctatctctagacagaattttaaaattagctgggcatggtggcatgcacctgtagtcctagctgtttgggaggctgaggcgagaggatagcttgagcctggaagttcaaggttatagtgagctatgatcacaccactgcactgcagcctgtgcaacagggcaagaccctgtctctaaataaataatcaatcattgttaggcccaggttttggaggtttaatctcctcctcaagagaaataaatggcatctgtttaaggttgcagaatgtgaaatgacttggcatagctgaaaag

SEQ ID NO: 85991 - DNA, 1058 bp, Homo sapiens
agtgcgaccacatatatcttaacattactgaattaaaactatggcttctaagtccttatccaaactcagtcatccaaactagtttatttttttctccagttgattatcttttaatttttaattttgctaaaggtggtttttttgtgttttgttttttgtaaaccaaaactatactaagtatagtaattatatatatatatatattttttcccctccccctcttctttcctaactaattctgagcagggtaatcagtgaacaaagtgttgaaaattgttcccagaaggtaattttcatagatgtttgcattagctccatagcaaaatggaatggtacgtgacatttagggtagctgatatttttattttgttaaataatttccaagaatagagtatggtgtatattataaatttctttgataagatgtattttgaatgtcttttaatcttcctcctcctctccaaaaaaatcagaaacctctttaagaaaacatgtaggttatatatgctagaattgcatttaatcactgtgaaaagactggtcagcctgcattagtatgacagtaggggggctgttagaattgctgctatactggtggtatggattatcatggcattggaattttcatagtaatgcagatccaatttctttgtggtacctgcagtttacaaaataatttgacttcagtgagcatattggtatctggatgttccaatttagaactaaaccatatttattacaaaaagatattaatccctctactcccaggttccctttatatgttaagatataatggctttgaggggggaaaaaataaacctaggggagaggggagtttcctgtagtgctgtttcattagaggatttcagtaaattaaattccacagctaattcaataaataatggtacatttaagtgttctgattttaataatatatttcacatttatccacacagtaacaatgtaatatgttaatgtaaataaaattggttttgatactcagaaataacaagaatttaattttttaaatttgtttacagtcctgggaaaagtaagaa

SEQ ID NO: 85992 - DNA, 1072 bp, Homo sapiens
gcacatggataacaacaaaaatttgattattctcgtgttagtattgttaacttctttttgcgactgcgttacatcatttaaagaaaatgctgtgtattgtaaacttaaattgtatatgataacttactgtcctttccatccgggcctaaactttggcagttcctttgtctacaaccttgttaatactgtaaacagttgtacgccagcaggaaaaatactgcccaacagacaaaatcgatcattgtaggggaaaatcatagaaatccatttcagatctttattgttcctcaccccattttcctccttgtgtatgtacttcccccacccccctttttttaagtaaaatgtaaattcaatctgctctaagatatgaggagttatttaatttcttcagatgtatcgagctctgttttcttccccccgagtcctcccaatcttttgaaacattaaggccattttccttaaggatgtttttggctctcctactccccgtgagaaagatctttccatttccagaacttctccacactaaaagtgaaatatttttgtgaaatgcttttttagggcctgccaaactcaggtgagtctgttctctgggataagctggcttctcttaaaatgaagccagtcagaaatgtcagggcatcccaagattgaccagtcagagggcagttctctccaacttttcagctttcccgctatagaatcttctgtgacactacacgtgtatacaatgtaaaccacctcccctggctcagctgccccgtgttactattttacttacttgattatgtgggttgcctcccccaatcagtggagaaagaacacagcccagacccagtggacaggacagagctatcctcagaagggtaacagtgtctgatattgaacaaaggactaaaaaagaccaggtgatagatacctgcaggtctgaggcaagtacttgtctgtttatgggcaggcctggaaagcaggggtacctcacctggagagcttgctaatacactggtccccatcctaatcccccaaggtaaaggcaaactctccaaggatgggctgttgggagaaagag

SEQ ID NO: 85993 - DNA, 1031 bp, Homo sapiens
gctgttgagagagtttcctgacccagggaaatttgcttctggtcaaagggaatgttaggtgtgtcctgaaggactccccaggttccctgggtccatgcatggggtccctggaatcgccctgggagtccctctgagactgtcctgctcaggctgcccatcagcccccagtccatatgctataggggcccccgtggggagggggcatggagacacgtggagagcccgacactcgggtgctaaaggcaatgggatagttgctaggggcccgtggtcacccctcagcaggcagtaatgtgaaccctaatcctacaagtgctgtaaggccctgggccctgttcatccaccctatggtggatgaaatggagagggcatccagccacctgcccctcctgtgtagccaccacgccagcaaatggtgtcagtagcctccaacccagagagtcatcctcagcgcctcctcatgcagctgccttgagtcctctgttccccactcacccctgcctcccccttccatcacagccactgccacccactgaccgggcgtcctcctgtcctcagccttcctctctccacacccccatcccgctcctgggacccgtccttaccaagggatgaaaaccaacatcagctcctacccactactctagcctcatctctcaccatggtgcatctcacacctaaaactggcgataccaaaccgctccccgtttcctgagaaagccatgttctctcttgcctctgagtgttatctttctcctaggatgtcctccctcccgcttccttgtcaggagctaacgtctactcacctttttaagacttacttgccgggagtggtggctcatgcctgtaatcccagcactttgggaggctgaggtgggaggattacttgagcccaggagtttgagaccagcctggacaatatagtgagactgcttctcttaaaaaaaaaatttttacttaggtaccgcctcctccaggaagcctccctgactccttctgccccagcccaaaggagaaggacctgcactgag

SEQ ID NO: 85994 - DNA, 1784 bp, Homo sapiens
tcccccactggcctgtaagctccgtgggtccagggctttgccagtgtcattcactgctgcacagtgcctggcatagagaggctgttggtgcagatttgttgcacaagcagatggatgaatctcagatgtggaatgttgactctttgtcagggagggatgggctcccacctaggagtctccgaggaccagctcaaaggctgtaaaaatcatgccctgcctcagtgctctgggggattagaaagggggtgcctggattctctgagactctgcagctgggctctctcgctttcctgtgcgtgtcaatcactgatcttaagaaaatgcagattctggttcacaggcctgggtctgcgttcctagcctgctcatcagcaatggtggtgctgctgacctcagatctctctagcagcgcttttgtaacttgcaggtcctgtgccatctttccccctacatgccatgggaccacgcggaaagagccagaggggtcccttcattgcctcctctgcccctcctccctccatccagcagcaagtgttatttgtagcagtcactgtcacctccgcatgtggtgaggcctgctaggtttctgtctccacatttctgttactgtgacagacaagacggattctctgccaggaactgtgctcagccacttgcttctggcattgctgtttcctctctgtgcacctcttattcaggcagactcctgggggatgttgcccctgctggaagtcaggcccagttcattgccctagtgtgggatggggcagctgaccccgcggggaactgggaggcattaccgagaggtttccaagctttggtttcaggagtacaggtataggcctacctgactggccctgggggcaaaatgttcatttaaacttggggagaggctgggcacggtggctcacgcctgtaattccaacactttgggaggccaaggtggatggattgcttgagcccaggagttggagaccagcctaagcaacatagagagaccccatatctacaaaaaaattaaaaagtagccaggcatggtggcgtgtgcctgtagtcccagctactcaggaggctgaggtgggaggatcacttgagcctaggaggttgaggctgcagtgagctattatattatcacacgactgcactccagcctgtaccatagagagagaccctacctcaaaaaaaaaaaaaaaaaaaaaaaaacaaacctggggagagtttgggacctttggagtccaagagttctgagtttgaatcctgatgctgtcacatactacttgggccacgccgaacaaggaacttagcctccctgagcctcactttcttcacttgctagatggaggttgtaactcgtgtcttcctcccagggtcgttgtcaaaatgaaacatgaaagtgcatggaagtaggaggtcaaggcaggtgaattacatgaggtcaggagttcgagaccagcctggccaacatggtgaaatgctgtctctgctaaaaatacaaaaattagctgggcgtggtggtgcatgcctgtagtcccaactactagggaggctgaggcaggagaatcacttgagctgagatcgcaccactgcactccagcctgggcacaagactcgtctcaaaaaaaaaaaaaaaaaaaaagaaagaaaagaaaagaaagtgcatggaaggctctccgcactgtggaaaatactggcatttctcaactcacaatgcatagattgtgagacatatcatggtccattgaatatcttttgactcaggggtggtgaccaggtgctgatagcaa

SEQ ID NO: 85995 - DNA, 1028 bp, Homo sapiens
ggggggacaggggacaagctcagagagatgggggaccacccaatgctgtgacaacccagaatcccaggaggaggaggagaggggactgacagtacaagtgagactagaaatccacaggcacgagctgccttccattgctctgcccttctcagagcctccgcgtcgaggggatttgggcattgaggcatttctggaggacaggcttctgtggccactgctgccacagacttccctgccctcagcttgagttgggtcagacgagcctgtccatgtgaacgtggaaacatttcctgccagactatgctgttgccaccacacgaatcaaaccagcaaagggcacgccggcgatgtgcatacagctgtgtctctgacagctgcctgggcctgcctgctgttcccacgggtcagctcctgtcgggtagggacaggtcctgctctcaaggctcataaagcagccagcagcctgcccgtgttttccgtactctggcctgtgtcacccaggctgtctcctcatctcttgtctgatcctcaagggttccctggcctccctcttcactccctctgcctgtggcaggcagcagcacagttctatggggtcctaaggaccccagggagtcactcccacatttgagcagcaactttgggtttagtctgtccaggttagggccccagatcatatatatgtgtgtacacacacgtgtgtttgcgtgtcatgcggcattcggatggggcatcctgttcatccacccccctgctatggggtggctgaaggttggggtgccctctgagtttttggtgggtggggcttcagcagggtgtcttggctacctctcctggccagcacatgttatcctgggaggatttgtagctttgggcctgaccacggttccaagcaccatgatctggagcccacactgggtggcaggctgcagagaaggtgcccccagaagcctggactgcacccttatctgttttcatttggagctattttctcattatctcatgccaagtgtctgactacacatggc

SEQ ID NO: 85996 - DNA, 1094 bp, Homo sapiens
atgattatctgcacgattgcatcagttattagcaaagaaggattttatagcagcaggtgtgtgctcatgtgcttgtgtggagttgttgactgcccttcactgcacacacacagtctgcggaactgtgactgaatccctgttccctactcacacttacatggtattttctgggattctaaggcacattctttttttcctttcctttttttccatttaacatcttaaattggaatgtgtcgcacatttgcggattattataatttgacagcgcctttttcttggcatacttgaaataacggtgcattgtaaaatcagaggtgtctcagatttaatgaaatagaaactaggtaacctctggggaacttatataatttgtccagttcctccaaggatgcaggtggagccaccttgtagtggtggcagattatatgaggggaccctgatgtggttcaaggggacaaccttggattgggcttagattccagctttatggctcgccagctgtgtggccttggcaaagtagagcgacctctctgagcctcgggattttcctcccaccacatatgaatcgtggctccacagttgtcatggctgtgtgcaaggcaacattccctgtttctcttgctgggtatcatctaaggtctgccccgttccatctgggttaagagggaaaatgagggctgggagtgggtcactggccttcccaagggagcagagggaaactggtgttccaagggcttcttgactcagtttataatccttggacattactcttcttccctcgtccttctccccctttgcctgagttttcattttcacatgtgtttccttttagcaattttctttcaaatctctcctctccctttctgtaaagtcttcccacatgtagcctctttgaagctccctggggtgggaaaggggaggagggctctgcctgatggcctggatggcacagacctcagaagcccagtgtgctgtggtccctgcaagcttcagctcaagtccaagttctggtaccatcagcgttgctaactgccattcctgtggctgcagggtcagcctgagtccactccagtgcacagtgttgtccatgg

SEQ ID NO: 85997 - DNA, 1050 bp, Homo sapiens
cgattctcctgcctccgcctcccgagtagctgggattacaggcacgtgccaccgtgtccagctaatttttgtattttttagtagagatggggtttcaccatgttgaccaggatggtctcaatctcctgacctcgtgatccgcccgtctcggcctcccaaagtgctgggattacaggcatgagccaccgcacctggccacatttccccatctataaggaggaaaatgataattacttgcagggagtttaccacctctgtaaagcacagagcagactggccacatggtaggcgccctagtatgtcaactttgttctctttctctgagttgtggctccactagctatttgtagacaggagatctttgtggcttcaggtaggtgatgggggactgaaagctaagaggaaaagcctcccctgacctgcagcttctctttgagctggcatgcctggaattcttggggctggctgctgggtttgttttccagatgtggaagcaatttaagttctgttttcttaatccccaacagtttgcctccgaagtccacattctcatttgaaaatcaaggccgttggctctgtttgcagggcagagggtaggctagatagcctcttcaaaccctttttgtttaggaaatgggcttactggggcactcagatctgggacccagggcattcttgggacagtcacaccccatccaggacttggttaaaaggtgagttcactttctctgtgggttttccttggagatgattcactgagctaaattcagctgcaccttggttacaaaccagctctagaccgctgtggagtggcgggggtggggctcgggtttgggccatgtcacaggccagctggcgtccctctgagcagggtgcccacgtgtcccgggggcagtagcggccctccttcccacactgaccacaacagagggaggaaaatgctccagatgtcaggtagccagaaatactgtctggcacggagaaactggtaatatcttgttcagttactgagcgctgctggtcacagaggcagcctgacccaggataaaa

SEQ ID NO: 85998 - DNA, 1790 bp, Homo sapiens
cgtttagaaacacacctgtatttgattctcagccaggggagcactcgctgcactggtgggaggcggttgggaaagttgcaggaaaaccttagtcttccatccttctgacccatggtggaaattcacaccatggatttttaatggatctttgttctaggcagctgggaatagacatggtacttaccttagagttttccaatttatctcaattttatatggcttgtgattcattttcttaatccaaatatatataaacgtgtgtggtcttattcttccccctgcagtttcttgctttcttcagcacatcttatagtatgagaaggaaggtttgggcatgttgggaagggcggtggagggggagttgcagaaagagagggcagtgagggtgaggagaggggatctggggacttgggtgtgacacctgcttgacagaggcagggctgtggccaggaccaaccttcaattccattccaatcagcctttgcatttgttggatctcgtggcttctttttaatcttttgttggggattagtttcatgctgcacataatggggttgcactggtctgacccaggactttggagccacccacactgggaagactaggctaggcagtcggtcttctaggagtttctcagccccttaggacgcgggtctccttgggctcccccaagggttctgcgaagaggcagtggaagaaggcatgaggagagggtctcttgagaatttgccaataggaaggagtggccacggctgaaaggaacaagacagatcctgacatagctttggcctgggtgttaggtcagaaggagtactggtgcgtgggggccttaccccagggttgagtattttatctgtaaaatgttatctgccctttggctgcattggaatttcagagaaggctgcagaggcctgggttacacagcctgagtcacaacgtgggaaggaatctctgccacgggaaaggtgggcggaagcagctggcagcctggggcgtgcttcaggctcctccctctaaggggcgccatgggaacaggctccggagggagccggcgtctgaaaggcccccgggacctgctgcagtgccagaggggcctctggagcaggcctggcttttaaatggggggctgaattccagctcacacacacctcaagtccaaccttactttcttcagccagaatacatttcttgtaaaacctggcttgttgcttggcttttaaagatggtgtatgtttgtaaaaatattcttctgggctcaaaagctagcttgagggggcagatgccccaggtgtcccagctccacagcccctggcagatcccagaccccttggtggcaggtcccagagcctaggtggtaggagcttgatctttgtttctgcccttacccctcagtagtggggctgcgaggtagtagacaggatgcccagttaagtttgaatttcagatagaaaataattttagaataaatatgttctatctaatacatgggacagatgttatttttagagataggatcttgctctgttgcccaggctggagtgtagtggtatgatcatagctcaccacaaccttgaactcccaggctcaagcgatcctcccgccttaactgcctgagtagctgggactacaggcatgcaccaccacgcccagctaatttttcttattttttgtagagacagggtctcactgtgttgcctcactcgagctgctgacctcaagtgatcctcccacctcagcctgccaaagcactgggattacaggcatgagccaccatgcctggccaggacata

SEQ ID NO: 85999 - DNA, 1101 bp, Homo sapiens
tgctggctaggaagactgaggtctgctgcgccaaggggcctcaagttagaagggccatgccgttcagtggatgactttgagcgctgatcctagggacctgccaggtcctcacttcctgccctgggtgcacacatgaatggggcagccagcaggaagcgggagaggctggaaccaggagcctgccctacctgcatggcaggacaactctgaggcccttctgccatattctctgctacccaccagagaaaataggctgccttctagaaagatttgtttctaaaagcgtagaccctggggaagtataatgtcaccatgctcaccaggcgaggtttcccatatgacctccctgccccgacctcgtaggttgctcctttccccatctgtaaggtagagatgtctgccccggagctaccagctggggatggcatccaggccatgtctcctgcaggatccaagtgctgttgtccccagggtgaccctgcctcctgctggggcccatccgctttgctgtgctgcacaggctgttttcatctgcatggtttggggtctttgtccttgtgccttttcttccccatcgccactgtacaggattttccacattgcccactgcctccttttctacatcgtctcatctccctggcctttcccgagccctgtaaatgtgtactttttcaacgtgcctcccccaggtgaggccagctctcccgggcacattcgtccacaaggatcaggccccacttacccttggctcgctcagcctgtagacttggtaactttgtacagaatctttcattattgtcttaagcatggggggctaggacccacttagtccctcctccagcctgcagctaatttaggagccttgcattccagaaaagggcaactttgtgtaaagcagcttctcccacagagctttccctgcattgttagtgatgtcgggcaaagcatcactctttaacctggggcattggccccagcagggatatcatgggaccgcagccgctccgtgcactgtctctgcccccagaggaagccctgtccatggttcctggtgcacggccacaggcctgccttgaggccaccacatctggtgtctagaac

SEQ ID NO: 86000 - DNA, 1101 bp, Homo sapiens
ccatgttgaaattcttaataattttgaacaaaaggccccataaaatacgtagctggttctgagctcaccatttgctgggagaggcctgtgctttctgagaaatagtctctctccttggccagggctatgctcctgggagggcccttaggcaggtccggaagcagccatagaaagtaagagggaaaggctgtgaacctgagggttgacttggtgaatggacctcacattgggaggtcagactgggcttctccaagtccctcttacaaagaggaaactaaccttggtgaacctggggctgtgtcaaggagatgggattatccctacatttacagagaagcatcagggctgaaagatttgcccaaaggccactggttataaatggcaggtcctagattcaagtccaggcctgattcctgctccaccgtgcagcctccagatcagtgctgcgcatgaagcagcagacctgggtttgagttcttgccctgctcccaatttgctgtgtgtcctttagtgagggacttgccctctctggcccacttaccctagcagtcctttgagagagctgatcaactacaaaagtccctttcaaacagaatcactatgtaaccaaatcatagaggagaggaagtctcttttatagatggattccagctaataaatgctgaatgattgaaatataatgtcattctgaagtccttaatgaattaattgcttgaagcttccatggctgctaacatcaggaacaaataattggacattatgtgcctcctaatagaagaatttgatgccagctaaggacatggtcttatgtgtgtgtgtgtgtgtgtgtatctatctatctatctatctatctatctatctatctatctatctataacttgaatctgatcaagcctctacttccaactgccaacttttaggaaaaacagaggatagaggaacatgttgaactacaccacaggggagcaatccacaaaacccagatggaggaaaataccacaagacaaacaactcgtttcctccagtaaataaattgcaagcaaaaacaaaacaaaaaccttgctgggtgtggcagctcacacctgtaatcccagcactttg

SEQ ID NO: 86001 - DNA, 1042 bp, Homo sapiens
tggggacacagccaaactgtatcagggtgccatccaacctactatggcctttgtggatggcaaagtaggacaaaattgggactgtgatgacaccattgagcccctatcaaccaatccagaagactgactgcttcagggcttcacgttatataactcaataaatcctccttagtgctttaagccacttcaacacaatctgccacgcccccatcaccagctgctgaatgtgccctactgatacaccgtgcccacctggagtcctgcatgcaggcagtggggtgtgatggagattggaattcttcttggttgggctctattgtggacactccgtgtgaccgtgggaaaaccacagctttgctgaccatcagtttgaatatataaatgggcccttgtccctgcaaaaggctcttcaaaatggaagccactgtggtttctgttgtatggcttctgcattccaagaaagatgtaataggactggaaaagggccagacaatggagtgatgaagggcttttaccatgagggcaagctctgcaattagagttctccagccaggaaagatggaggctgagcagggagtgtaactaaatccttttctatggtacagcatatccacaaggtgggccagactcacccaattccagaatccttatcatatatatatatatatagtagccaaatatagcagcacagccactatatatacacacacacacacacaccatatatatatatatacacgcacatatacacacaccatatatatacacacacatatatatagtgtatatatatatacacacatatacatgtatatatgtatatatatacacacatatatggtgtgcgtgtgtgtgtgtgtataatctatataaagagaggcacttctgaaagtttgagaagttgttttagggcaaacaatagaaagcgccatgttccatggtggagctgagctcaaggcactcgggcagtttggtgtagtgcacctggaatccgggagagcttggctccacttctggcttcagctgtgtgatggtgagcaaa

SEQ ID NO: 86002 - DNA, 1708 bp, Homo sapiens
agcaggtcctctttggtttgtcactaaggccatcttctctttgtcaatttagcccgtggaacacagagcattcctaatgacagtcctgcccggggtgagggcacccattctgaagaggaaggctttgccatggatgaggaggactctgatggagaactgaatacctgggagctgtcagaagggacaaactgtccacccaaggaacagcctggcgatctttttaatgaggactgggactcggagttgaaagcagatcaagggaatccatatggtaggtgtggagtctctgggggtcctgaactaggccttctcagacacacctgtcagaccagccctgaaggcagtttggaacaggggtccacatctatgagcttaggctggtatctgttacaggtctccaatttctgtgacaccttctcttttatattgaaaaaatccaaattttgcatttgactccataatgtatcactgttttaaagtcaaaactgttactctctccaaaaatctctgctatgaattgagcagctgcagatagaagtgctgtgttatccagtttgcttcttcactgctaagaacccttgtctgagaagcatagcttctcagctgttccgaatgaacgcatttacaattcttcaggaaaggagaactgtgtgtgtttttaaacaaaataagtgcaaggatctgtcccctagacatacctttttggctgtccgtttttaccttccttccttccctccttccttcccttaatctgtcttttaaaactgcctgcagatgctgacgacatccaggagagcatttctcaagagcttaaaccttgggtgtgctgtgccccacaaggagacatgatctatgaccccagctggcaccatccgcctccactgataccctattattccaagatggtctttgaaacaggacagtttgacgatgctgaagattgagtgtggagctttctgccttgtaggtgggcgggcctccacgtcaagatctcttttcctgtcttggaggtgaaaagtcatatctgagaaaatgtttgcagtgacccctagtctggggtacacagaccagtgttccttattgacagtgttcaataaggccccgtcattctcgccagtctgttgttgttcttaatgggctcctccttgaaatgtgtgtgtgtttgtgtcaagaggagttgtgttctttgtaaataaaggttaaaaagagaaaccagtatgcttcgtctgcttttttcccatttatttatttatggagacagtctcactgtgtcacgcaggctggagtgcagcagcgcgaacttggctcgttggaacctccacctcctgggtttaagcgatttttgtgcctcagcctcctgagtagctgggactataggtgctcgccaccacacccggctaattttttgtatttttagtagagatggggtttcaccacgttggccaggctgttctcaaattcctggcctcaagtaatccacccgccttggcctcccaaagtgctgggattacaggtgtgagccaccgtgcccagccttcactacttcatttaaagtccctgaatgacattttaaagattcaaacgcttggaggcttaaaactactctgtgaaagaaaaaaaattttagttttgcttctgtagatctagcactgttgaccaaggattggaatccaggagacactggtgattttgtagctgattgttttcc

SEQ ID NO: 86003 - DNA, 1060 bp, Homo sapiens
cagttatctaattgtatgttttttttttaaaagatctttggatggattatatgaaagaagaattgaaccacccccttggtagacctgagaactgtggacagatctactggcgagcgatgaaaatgttgcagggagagtcagcagaggcatttgtagctaaacatgctatgcatcagactggccatttatgaagatgaagaatacagtcagctttgtgaaatagtattgcaagcaagccccgtgggcaaatttgtattgagtccatctgtaatttgctcagtgatggcagacaagatggctgtctggttttgagacacactttaattttatgttaacttgttaaatctttttaaaaattaaaaaatttttatgattgagactgggtcttgctctgttgccctggctggtcttgaactcctggactcaagtgaccttctcacctcagactcctgagtagctgggattataggtgcatgacactgctcagtttgatgtgctaatctgattccagtaaagagaattgctgatttaatgttgaggcccgatcttccacaggtcctaaatgtttcccaaaatacatggatagcatacgactgggtttttttaaaattatcccaggtcaagcatgagtatctctaatctcgacctaagagccagttaaaatgaaggagaaagtggccaggcatggtgactcaacgcctgtaatcccagcactttgggaaggctgaggcaggcggatcacctgaggtcaggagtttgagactagcctggccaacatggtgaaaccccgtctctactaaaaatacaaaaattagccaggtgtggtggtgggtgcctgtaatcccagctgcttgggaggctgaggcaggagaattgcttgaacctgggagacggaggttgcagtgagccgagatcatgccattgctactccatcctgggtaagaagagcgaaactccttctcaaggaaaaaaaaaaaggagaaagtacagttttgttggtttattctcattataaaagatacgtggtatgcatttgttctggaaaatatggaggaaatag

SEQ ID NO: 86004 - DNA, 1019 bp, Homo sapiens
cgcaaacaagacatgtaaaatctgacctgttttggtccaaatggagagtgaggccttaagccatgtgatcttgccaccactcttggagcctcagagaacacagttggaaggtcagtgatcttgttcaagctgcacactttacaagtgagggaactggcccggagagagagacatgatttaccagtggtcatatggcacaggtagtctaggattgttaattttcgtcctagtgcttttcctccttgtactacctgttaagttacgtttgatataacactctttaggagaatcctgattattctgaagaaatccttaagggcgagttggcatggatcatctacaaaaattctgtaagcataattaaaggtaggtatcttttgaacattatttttggtaggaaagtgaaacattcttttcttaatgaagatctttagctagttttgaaattttccattagaatgtgtataaaactctgtaggaatagtgtcctgtttctttcagaaaatacttatttttcctaggctataattgaacatttcagtaacttatttattttttgagatggagtcttgatctgttgcccaggctggagtgcattggcgtgatctcggctcaccacaacctctgcttcctgggttcaagtgattctcctgcctcagcctcccaagtagctgggactataggtgtgtgccaccctgcccagctaatttttgtatttttagtagagacgtagtttcactatgttggctaggctggtctcgtactcctgaccttgtgacctgcccgccttggcctcccaaagtgttgggattacaggcgtgagccaccatgcctggcataagtctctttttaaaatttatattctactcccatttttttcccttaaattttaataggtttgggccgggtatggtggctcatgcctgtaatcccagcactttgggaggccaaggcaggtggatcacctgaggtcaggagtttgcgaccagcctggcccacatggtgaaaccccatttcta

SEQ ID NO: 86005 - DNA, 2088 bp, Homo sapiens
tttgtaagtacactgaagacttagagctagaaaataaatggttatgtaggggcaatacctcagaaacttgatttttttttttttcttttttttttttttttgagataaggtctcactgtgttgcccagactagagtacagtagggtgatctcggttcactgtaacctctgcctcccaggctcaaatgattctcccacctcagcctccccagtagctgggatcacaggcgcatgccaccgtgcctggctaatttttgtatttttggtagacatagggtttcgtcatgttttttaggctggtctcgaactcctgggctcaagtgatctgcccacctcagcctcccaaagtgctgggattacgggagtgtttgggattgggtatattatatgagaagtattttggattcttggtaatgacaaattttatattgctaccccagattgagattctttaagaactgcattaaaccaactggatagataacaaagtttttttggagcattgtgagtgggagttgggggaaaggttgaattatcatagttaagagatcggaggcctttgtgaggaagagccagataggatgagaggtgactggattttctgaaatctgcttctttttttttttttttttttttggtgggggatggagttttgctctgttgcccaggctagagtgcagtggtgtgatcttggctcactgcaacctctgcctcccagattgaagcaattttcctgcctcagcctccccagtacctgggacttcaggcacgcaccaccgcgcctggctaatttttgtatttttagtagacagggtttcaccatcttggccaggctggtctcaaactcctgacctcaggtgatccacctgcctcagcctccaaaagtgctgggattacaggcctgagccattgtgcctggcttttttttttttttttttttgaggtggagtcttgctctgtcacccaggttagagtgcagtggcacacaatctcggcagctcactgcaaccttcgcctcctaggttcaagtgattcttctgcctcagcctccctagtagctgggattacaggcacataccaccacacctggctaattttttttgtttgtttttttgagttggagcttccctatgttgcccaggctggagtgcagtggcccgatctcggcctcccggcttcaagcgattctcctgtctcaacttcctgagtagctgggattacaggggtctgccaccaagtccggctaatttttttgtatttttagtagagacggggtttcaccatatttgacaggctggttttgaactcctgacctcaagtgatcaatccgccttggcctcccaataatctttgtaattttaggttaggtggggtttcaccatgttggccaggctggtttcaatctcctgacctcaagtgatccgcccgcttcggcttcacaaagtggtgggattacaggtgtgagccaccgcatccaacctgaaatttgcttgtttttagcaaaattaattaatgcaaaggtgtattatatgtaaaggtcaaatttgggcagcttactacattgcttttcttgcaggacgatgttcaactttggctctcctatgtggctttttgtaagaagtgggtgagtaaagccatgcatgtcttgcttcctctgaccgtctttttgttaatctgccctttaagcttcatgccagatgttttttcctgaagtgtagggttaacatgaaaaaagaacccaagaaggcggaacatcaatataacattggatatctgaatgactatggtttccaattcaattgaaaagaatataatttttacgtgtgtttgttcaatacagttgactttttaaaaagatatttaaagtgtttagtggtttaattgaggtagaaaattttgagggtctgtgttcgtttatatatccctagcaatagcatgtcatgctccattggattttacagttggtaaagttagggtacatattacttagagagtaagatcaatgatttatctgtgcaggaagtagaaatattttccttttttacaggctactaaaactcgacttagcaaggtattctctgccatgttg

SEQ ID NO: 86006 - DNA, 1166 bp, Homo sapiens
ggattacaggcatgagccaccgcgaccggctttcaaaaatgtttaattgtacaatatcctcctcctttgcttttttttttgttgttgttcttggtgttgggaagtcaggacgtgggatgggagacaatattctgaagaaaatgcatctcgtgtccctttcaggcttgagcagcccacctctctacacctggaggcgcttttcctgatggctgtccaagtctagcggcgcgcgcacttaacccctccctcccgtctagccccgcccctcaactcctgtccgctagagtcgtcctgcccaagaccagggcgggttctcgctgcaatcccacaatcggccacagggaggggacggtggctgtagaagccgaagggccttcccctaagtaggaggtggcggaagcggaaaaggcgggacctagggagcacgttacgtccggacgcgtcggtggtagggctgggtctccgaacctgaaaccgggagcttcctgctcgtgttcgctgttgagaagctacccgcggggttgtagacctcggacctcatggcagagataattcaggaacgcatagaagatcggctcccggaattggaacagctggagcgcattggactgttcagtcatgcggagattaagtgagagagggttggggagagggaagagctgaggcggcctgaggggaggttgggagtgtgtggcaggggctagatgtggggacgctcgacctgtgtttacttttcctaacgtggtggaagcccatttctcgttttcggtgatgtccagaattaatttttcattcgttgcaaggtaatccgtccgtctacttacccatcagacgttttgacagcccttcatggagccgggtcttagggctgtaaaggtgataaacccaggattcctgctcattaggagctaattgggcagagtgtggtgggggagacagacaaattaaatattttgataacagtgtactgtaagttgattgtagtaccttgtactgctgtagggatgggaacagagtgctgtgagagcccagggggagtggataaattcctaactagacttgaaggtggggaccattgaaatcagtttcatatgctactccagagcctaactacagcgcctggcacatggtagacattcagtagcgtgttaaaattatgtttaata

SEQ ID NO: 86007 - DNA, 1022 bp, Homo sapiens
caacaagagcgaaactcggtctcaaaaaataataaaaataaagaaaatacttttcccagttggtttgtgtaatatactatgattacatttccttttttgttgttgtggagacggagactcgctttgttccccaggctggagtgcagtggctggatctcggctcaccacctcccggattcaaacgattctcctgcctcagcctcccaagtagctgggattacaggggcccagcagcatactcggctaatttttgtatttttagtagagatgggttttcaccatgttggccaggctggtctcaaactcctgacctcaagtgatctgcccgcctcggcctcccaaagtgctgggattacaggtgtgagccatcgcccccagccatatttcctttcttatcagactttttttttttttttttttccttgtggttagtgattgtctcaatggttggtttgttaaggcttctatgtacccatcattaatttccaccccccaccccacaaatgctttgccagaattgcaaggctccattcattcaaactcatcaaataatacacctattttgttttttcttggaaatatccctcccatgccaatcttaactgttgctcactagacgaactgcacagctgttctgggaattcccttcttcaccatcctgggaattttctttacttctttgtgtgagtcccctttgtcctggattccatgtttgtttttctccctcactttggtagaatatgtcctccagtagctttctgacaaagggtgtggtgaaggggaaaattttttgagatgttgcgtgtctgaaaatatctttttttttttttaagggacgaagtattgctatgtagcccaggctggaatgcagtggctattcacaggcaccagcatagccactgcagcctcaaactcctggcctcaagccgtcctcctgtctcagcctcctgggtgaaagatatctttatttgatctcacttgattaatgtgataatttgtctggttacataattctaggttgg

SEQ ID NO: 86008 - DNA, 2397 bp, Homo sapiens
gatcctaaagaagagaagagtgtatgtaagtacttctcaaccagtttacctctctgaccactcttacggtgtttgggggcaacaaactaaggatctagactcgctaaaccgctcgctgggtccttctctccccacaatgcaccggggccagcaggaaggccgctccgacccctaattttcccgcgaattcagttcaaagaggcggccgggcccgcgatcggcagcgcgcacgggccaaccaagccgcgcctccgcgagaagcgcctccgcgtgactgacgggggaatccgcgggccaacgggctgggcggcccggcggtgcgcgctcccgccggccaatcagagcgccgggcgggggaagtgggcggagcgaggccagggtagggtgagcggcctccgaagcggagcggggctctgaggagacactttttttttcctccctccttccctcctctcctcctcccttcccttcccctctcctcccctctctcctccttcccccctcggtccgccggagcctgctggggcgagcggttggtattgcaggcgcttgctctccggggccgcccggcgggtagctggcggggggaggaggcaggaaccgcgatggcgcctcagaagcacggcggtgggggagggggcggctcggggcccagcgcggggtccgggggaggcggcttcgggggttcggcggcggtggcggcggcgacggcttcgggcggcaaatccggcggcgggagctgtggagggggtggcagttactcggcctcctcctcctcctccgcggcggcagcggcgggggctgcggtgttaccggtgaagaagccgaaaatggagcacgtccaggctgaccacgagcttttcctccaggcctttgagagtgagtgtgtgcgaggctttgagggcaggaagacccactctgccaacaccggggatgggacactctgctgggcccccttcctcctcgggagtccacttgtgtggtagtggagggaggaattgaggggatgtccccctttcggagattacgtctccaggggatccggagtccagggccttgggagagctggaaaagagggtccgggcgggttcttgactcccccaagattgacgcaagaggctcgggactggggccccacgttcagagcaggcggcttttagatgaggaggtagcagttgaactgagccgcagtcacatcccgagactggttcttgttttctttcatgcctttcggactctagaaatacaggggtttcggttgtagcttttgaggggcaaaatgaagcctgtgaagggatgagtgcagtggaaccgaagaaagtgtccttagtctgaaatgccttcgcgctaacttggtgctgcaggttcctatggcacctttggatgcttaaaacccttcaaatctatccacccattttgtggatatgtaaactgagccagagagtggtcaagcatcttctctggagacgaccccggaattctgctttttctacctggcttacagaacattttcttgcgtcaatttctgtttctaagttctgtctggaaggtgaaactgacttatttggaaaggagagcaaggtgtctggaaacaaacaatagaatttattaaaaacatcgtgactatgaataatcctgattgttctttaaggaatgttatatcctgattggttcccttttttgcttttgtgtgttataatttgggtgatctttaatagctaaataatcttacagaaacttgaataaacttggctctaccgcccagtgtccttatttacagtttcactgtggcatatgttaagggcatggtatcagctgtgcttagaaagacgtattacgttgtttaatacccttccttcattctctctcattagtgcttcatgaaattctaattggaacttaatagaaggaatttcagtttttatggaaacgaatattgaacctgcttcagagagattcacattattcacgtatttcttagtatactttgaaatatctagagaggctttaattggaaataggatgtagaactgaagggcagtggtgacaataatgatacttgtttgtaccccttctaaagtatctcatctccctttagttaatttaaaataaaaccaattgaagatttaggtggaaattttaaaagttctttctgaatgttaagacacatcctccaagaaagttttaactatttgcgttctgatgagtcgacctcagggaagtcaagtgtcattaagagctagatctggtcataaaacaactcgaagttgtttactggaaagtttaaatacttgaatgtaattattcacatagttatttctatttggtttattctgatactgctgtataatgacctaacgtgacactaataggtcattaatgtaactgatataatag

SEQ ID NO: 86009 - DNA, 1505 bp, Homo sapiens
ctgtattaggatgtattaggattctgttttggctgactacaattttttttttttttttgagacgaagtttcgctctttattgcccaggctggagtacaatgacgcgatctcggctcacggcagcctccgcctcccaggttcaagtgattctcctgcctcagcctcccaagtagctgggattacaggcatgcgccgcccctatgcctggctgtttttgtatatttggtggagacagggtttctccatgttggtcaggctggtctcgaactcccgaccttaggtgatctgcccaccttggcctcccaaagtgctgggaatacaggcatgagccactgcgcctggccggctgactacagattttttaagtgaccatttaaaaagtgaaattttcatcttgtttggcatcaatcaatagttcttttgttgactccagctgcctattacagctgctttttggaagaaaatcggtaataaatagtttaaattagctaagttaaatgagtacaactacttctcttgagttctgctcggtaacaataactatcttagaaaggcttaagaaaaatattgtagagaaccttcagtataaaaagcatagatgaactttgtgaatgtatgccattgattgaataccttttgatcttactgtgcatactttcttgatgtaaatatttagtgcgatataaatagtgcgtgatttccatagcagatgataagtttatattgattataacatggtctcggttgatatttttctgacaagtaagtttagatcatgtttggattttgtttcctattacctagagccaacacagatctatagatttcttcgaactcggaatctcatagcagtaagtagtcaacaaaattcatcaatattatttctctcttataactgcatctgtattcaattttaacatttttaaaactctttttgtagccaatatttttgcacagaactcttacttacatgtctcatcgaaactccagaacaaacatcaaaaggtacattttatgaatcttatttcaagctgatcaaaccatgttagttttattttaaagtactatttctcaaaattaaaaaaaaaaacgaacaaaaataagtactatttctaactaaagatttaagatgaaaactgaagtgagagagtgactggttgaattggttgcacagtggttttctatagtataatctttgtaagtctcaggttgttattagctttttttttttatcctctaatagaaatgaggctgggtgtggtggctcatacctataatcccagcactttgggaggccaagttgggcggatcacttgaggtcaggagttcgagaccagtttggccaacatgggaaaaccctgtatctactaaaacaaaaattagctgggcgtggtggtgtgtgcctgtaatcccagttacttgcgaggctgaggcaggagaattgcttgagcccgggaggtggaggttgcagtgagccgagattgcgccgttgcactccagcctgg

SEQ ID NO: 86010 - DNA, 1750 bp, Homo sapiens
attgtactccagcctgggcaacaagagtgacactcccatctcaaaaacaaaacaaacaaaaacaaacaaacacaaaactctctttgaggaatgagattattcgtaatttttggtgtctgcattcaagcattataaagtaataaattgatgtggagtacatttggcttttcaagtcctaaagaggaagggactatatgagtataaagagaaacattttttctaattaaattatatatgggtatagatttttagactcttatctctagaacatgtcatagaccaccttaagaactaagatgaggcttgtttttacaatccattcattctttaattgctttgagaagttatacttaagtttctattttttgggaaatagcttttttctcttaaacttgtcaagttaaaaggtagtagttttattacgatttgatggatcattccctaacttcaaaattttttcatgatgtcaacaactgtctctttaatatgacatatcattgagctttaggctttgctgataatctttgaggataccttgtgaacttcaaatatattttatagaatatttctttttttatgtgatggtgctagtacatatttgttgtgttgcttagtagacgtgttaagtgtttcagaatacacataatttatatttgtttggcttaattcaacagatacttgaatacctaccaagtataaggcactatgccagcactgcatagctttccttgaagaagagcaattactgcccttcaggaatatataatctagtaggagaaataaaatatttacatgagttttacgtgtaggaaactgaatgaaaagtaagtgtcaaaataaatataaaccaagtaccatgggtaaggagaaatcactggtttgggaataattgggtaaaaggtttaatgaaaacaagttagcgttttagatggggcttgaaggctcgtgtgctgtattatacaccgtctccatagtattcattgttatggctaatcatccataatttatcttactaaaaataatcaaaatctggtttccatcttgcctattagagtgacaataaagtataatttgtttctttttcccagttgagaagtgattattttgtttatctgtttcttccaggaaaacatttaaagttgatgatatgttatcaaaagtagagaaaatgaaaggagagcaagaatctcataggtaagataatctatcagtttacattaagtgatatactttaggaaagaggaaaaattacagtgatcattttcctagtgatcaccttgatataaggagttagaaggaatcttagaggtcagtttggtccaaactcacacacaagtcagaaattaatttctgtagcattcctggcagagaatacttaagctgtggcttgaatacctccagtgtagttgtatttattattgtttatctttattaccagtttcttccattttgagtgaaacctctgacttctgccgttggtcttaactctaccacctcatttaaagagggatactcacatttatagtatatgtgctaggtactgtggcagggacttcacaatatcacgtatcttgtaagttattctcaaatatgagaggggttctcttttttttccatctttttcttctcatttaaatctatcaggcaacatattcataacttttatttcatatttgaaatatgtttctcacatagtttcagaaacttgaacatttggacagaatctacttgttgtacattatcaaatata

SEQ ID NO: 86011 - DNA, 1008 bp, Homo sapiens
tatttttagtagagacagggtttcaccatgttggccaggctggtgtcaaactcctgacctcaagtgatccttccaccttggcctctcaaagtgttgcaattacaggctgagccactgcgcccagccttctttttctaagagacagggtcttgctctgttgcccaggctggagcacaagtggctgctcactgcagcctctaactcctggcctcaaaccatcctcccatcttagcctcctgaatagctaggactacaggtgcatgccaccatgcctggctaatttttaaatttttgtagaggcaggatcttgctatgttgcccaggctggtctcaaactcctggcctcaagtgatcctttcagattggcttcccaaagttccgggattacaggtgtgagccaccacgcctggcctttattttctttacagaaggtctgatataatgccttacatcctttccagctcttgtttctggtactccagttttgaatttttcatggattttgaccaggcactatggctgattagaataaatctcttgcctttgtgtagtggtatatgctagcaggattctagggattcttatgctgtcctaccaattttggaattatcttttttttgttgctgtttttttgagatggaatgtggctttgtcgctcaggctggagtgcagtagcgcgatctcggcttactgcaacctcctcttcctgggttcaggcagttctcatgcctcagcctcctgagtagctgggattacaggcatctgccaccacgcccagctactttttgcatttttagtagagacagggttttaccatgttggtcaggctggtcttgaactcctgacctcaagtgatccgccttccgtggccttccaaagtgctgggattacaggcgtgtggcaccgtgcctgtccccaatgttggaattctctggtaacaactcttgagtgctgagtgcatctccatggactaaaatgcatcatgaaaagatttttaaatctgagttg

SEQ ID NO: 86012 - DNA, 1077 bp, Homo sapiens
gacggggtttcaccatattggtcaggctggtttcgaactcctgacctcgtgttctgcccacctcggcctcccaaagcgctgggattgcaggcgtgagcctctgcgcccagccaactttgtttttgatgcaacctaagcttttgaattagtaaccttccttttctaaacctccccctttttaagcatttatttttacaataagaaggcctgcatctatattcttgggggcgcgtttcatttatgtagtgtgcaatgtcctaggcactatactaagccctcgggtatataagggtgaacaaaatggatgaaggccctgcctttatggagcttagtgttaggggagaaagacataatcatttaataaatatgaaataagtgctgggaaagaaaagcataagaaaactgtgagtgtataaaacaggagaaccagctttcatttgaggtgttagatttgggaataatgacgatcagggaaggcatctctgaagaaataagctgagatttgaaagaagtgtacagaagtaaaatggggtgggaggatgaacaaataggtggttctagttaaagggaatattacatataaagcatttgatgccagagtagctgtgtagaaagagcaagtctccttgagagtggtatgagaagaagctggagcagatggccagggccagacagtgcattgtcttcaaggtaatttaaggatgttggtcttaagaaagtcgtttgttcgttctttttgttgttgttgttctctaagaggtggggtcttgttctgtcacccacacgggagtgcagtgataggttcatagcttactgcatcctcgaacttccaggctctgttgtcttactttattttttattttactttttagagatgaggatttgccctgtcgctgaggtggcagtacagtggtgtgatcatggctcaactacagccatgaactcctgggctcaagtaaccctcctgccttagcctcctgagtagctgggactacaggcacatgctaccatgtcccacttattttattttattaaaaaaaggtttttttaggagacagggtctcacttcatcagcca

SEQ ID NO: 86013 - DNA, 1011 bp, Homo sapiens
ctggattacaggtgtgagccactgcacctggccctggctcaccttttgtcctttttttttttttttttttttttttgagacagagtcttgctctgtcgcccaggctggagttcagtggcgcaatctccgctcactgcaagttctgcctcccgggttcatgccattctcctgcctcagcctcccgagtagctgggactacaggcgcctgccatcacgcccggctaatttttttgtatttttagtagagatggggtttcaccgtgttagccaggatgtctcaatctcctgacctcatgatccgcccacctcagcctcccaaagtgccgggattgcaggcgtgagccaccgcgcccagccccttttgtactttttgtagagatgaggtttcaccgttttgcccagtgtgacctcgaactactgagttcaagtgatctgcccactttgtcctcctaaagtgttaggattacaggcgtgagccactgcatccgacctattaaattatttttaagagaactattgtattaatgatttttccctacttttctattttgtacatttagctgcagtttaaaatctttaggctggcccaggcatggtgactcacgcctgtatcccagcactttgggaggtcaaggcaggtggttcacttgaggtgaagagttcaagagcagcttgaccaacatggtaaaaaccccatctctactaaaaatccaaaaaattaggccaggtgcggtggctcacgcctgtaatcccagcactttgggaggtcaaggcaggcggatcatgaggtcaagagattgagactatcctggccaacatggtgaaaccccatctctagtaaaaatacaaaaattagctgggcgtggtggcatgtgcctgtatttctagctactcgggaggctgaggcaggagaattgcttaaacctgggaggcagaggttgcagtgagccgagattacaccgctgcactccatcctggctacagagtgaaactctgtctcaaaaataaata

SEQ ID NO: 86014 - DNA, 1063 bp, Homo sapiens
tcagaatattggacttgatgtagacacgagtttctcagctttacatatcataggatgaaatgtatataacaaaagttgaatagctaacatctaactatagaaaccaagtagattatcagacttgtcctgttttgaggtaatactgccatgcccttaaaatgaagccttattcctgctgctagcagattcatgtatataaattagaggcactaatcttggtctcctcttgtcataaaaattacttcctctgtgggatctggctgttcttaaaatgggaggctcttccttgaattagatttcaaagtgttagtctcttatgaattagcttagcatcattttctgtagactgtatcagaactgtcagatgtttgtgcttggaatgctgaaatttgcatctcaaaatttcaaattctttacctgatttcttgttatcatgtgtcttacttcctgagaagatgcagggagcacatgacatagatgaactaagtttcttatatcttattctggtcatgtaaactagatttttttgtggcctaaaaccaaatagtcctgaccaaccttacgtgtttcttttcctcccgttcatctggtccagcctaaccaattaagatgtggacaaagtagctgcaagagagggcagagggaagggagagaaaactttgcccttttccttggaacaaaccacctatggaagggatcattggtacactttattctagtacatatcagagtgtttactttttttttttgagacggggtctcgctctgttgcccaggttggagtgcagtgatgcaatctcggctcactgcaacctccgcctcccaggtttaagcgattctcctgcctcagcctcctgagtagctgggattacaggtgcctgccaccacggccagctaatttatgtgtttttagtagagatgaggtttcaccacgttggtcaggctggtctcgaactcctgaccttgtgatctgcccgcctcggcctcccaaagtgctgggattacaggcgtgagccactgcgcccagccagagtgtttacttttaggtgaggaaggggaaatc

SEQ ID NO: 86015 - DNA, 1719 bp, Homo sapiens
aaagaggagtcctggtcaaatttacagggcaacctcttcataatatgtccttatttccagtcattacttgttccttagtactctcttgccacaatgtctttctgtaactgttcccatctgactataaaaatgcctagattgtcaccatcatttaaaaaaaaaatatatatatatgccctttactagtccttagtgcccagcaactatttcattagtaaatgccttatgtaagggatcagtactgctttcctttccccaccatctgttctgtatagccctccataatctggtgtctgtacatgtcacactatggaaactatgctcaggagagttatgaatgtctcctgatcaacaactgtattgtgttttgcagtttaaaggtacttcaaaagcttattgatgcttctgtttattttatcccatgcttattgtttttttctattgttaatagatgtttgtgaaaatagaaggagcactagttctagttcatgcttgcttttgcttttccatagcttctaaaactaacagtgaaaatgatatattgaaacagtaaattatagatctataccagatttgtaattgtgtatttcattgctatttgaagtataaagtaatggttctgtatcatttattgggaaggttgaatttccatagcttcaaaatattcaaatttttttgcatggatttagctacgcttttcaaaatttccttttgatgaagtcattgactaaagcgtcattaaaacaaaacaaaaaaagaattccaaaaaccctccaaaattcctttttaaagataggaaggcatacctgctgtcattttataggtagaacactaaaacacagtaaattacctggcctccaacttggtagtctgatttttttctgccttggtctggtgtttttgtggttttgttcttactttttgtgagttgtgaggggttttttgttgtttattttttgttaggtgtatagacacacttttggatgtcatatttaacagggaaagcatagagtcatgggcctgaataacagttgagtacaaatatttataaattggttgaagtaactttgatttcaatgttatattttaaagtctaggttattttactacagagcattacaatgataaaatatttccttttttttttttttagcttgtcagctcatttgcagcttacgtttactggtttcttccacaaaaatggtatgtatttaaaagtaaataaagtggcattttaatagcaagatacctttgtgaatgtaaaaaaagtggggcttctgagtgtaaatttataaaattaagtttaatggaaaatatgttggttctgatgtttttgaactttaaggtatgaaggctaatgatgaaatttgtttttggtggatgggggtgcagagtgaaggctggagtgcaatgttatgatcttggctgactgcagcctccacctcccgggttcaagcgattctcctgcctcagcctcctgagtagctgggattacaggcacgtgccccatgcctggctaattttttgtatttttagtagagacagggtctcaccatgctggccaggctggtcttgaactcctgacctcgtgatccacccgccttggcctcccaagggggcgtgagccaccacgcctggctaatgatgaagattttaacaaattgtcttagaacttcaataggtaaagaatctcctcagtagaaccttttatgcataaac

SEQ ID NO: 86016 - DNA, 1306 bp, Homo sapiens
ttgtgagtggtttatttacactatatataaaggcttttaaagagtttgctgtaagtttggaactgatttgaggaaaaaagaatgagtgaacttttgagaagtcttactgtgggaaatctctgtttgaagttccctgacttgttagcaaaatgaataccttgttcatatattttttaaatatattttaaaatactgattttctatttagataagccatcaccaaactcagaaaatgaacaaaattctgttaccctggaagtcctgcttgtgaaagtttgccacaaaaaaagaaaggtaatgtcaacaaaatgatattggtagattaaatggaataatttgcttaattggacatctttatgcatatatattgtattttaaagcttagttttaaattttgaaagcttaagaaatgtgttgatggcctaattataaaactgataacctcttttgccaactcgcatatctgtgtagtttttctagtcttttaataagtgtctgtacaaaactttctcataggagtctggaaatggagaagctatgttttagcatctggcataaattcagttgctgttctaccatttcaatctgttagcgtatttcttagctgtttgtacccattgacattttaggtaagggctaagagagagttttttccacaagattatcctttgtaacactgctctcaggcaaagaaattttgttgtcagcgttattagccattcacttattagtacattgcttcaaatttttataaggtgaagttatttcaccatagaaacaagtgttaagatgtttcctggtcaaccgatcaaagccaacatatgtacctttagttgcctcaagtcctcgagtgtttcaagaggagtaggagctggtctgggtccagggtcccagtgctgatattcttccaagaccataggccataagggcctcaatcactgggagggagtagactaaggcaccatggaggcagcagtggaactttatttttgaaagtttatgtaaaggccggttgccgtagctcacacctataatcccagcactttgggaggcagaagtgggcagattgcttgaacccaggagttaagcatcctgggcaacatggtgaaaccctgtctctaccaaaaatacaaaaatgagctaggcatgatggcctgtgcctgtagtcccagctactcgggaggattgcttgagcccagtaagtcgaggctgcagtgagccatgattgcaccactgagctccagcctgtgcgacagagtgaaactgtctcaagaaaaaaaaaaaatgtatgtaaagttaggaaata

SEQ ID NO: 86017 - DNA, 2456 bp, Homo sapiens
aaatgtatcggggtaatcattttcctggaagaatatacacagccaactgctagtattagtcatctccggagcgtaagacctgggggggtgggtgagaattcatagttttcactttatagtcttataaaatagaaatttttttagactgtatgtattctatttatttaaaagaagtagctgctgtaagatactgtcataaaagtcttctgatccttccagtttttctagtatgcattttcagtgtaactaatcatacaataacagaatattactcagaatatgatcattggtagataaaaccagttttgtttttgtttttttaaggatgatgattctttctgttaaacaacatattttaactatatggatttactgtttcataatgtagttgttgaccatgggattattagtcatttttttttatttctaatggtcctattagtcactgtcatgttaaaatagaacatttaagagatttgataaaagtacatgagtttaacattttagcatggtttttttgttgttgctaaaaagccttaccagagagatttagcatgcttttagttctaaatttctaatatacaactgtttcagatcactgttagctaaatattaggtatactgtatcataatttcattatgttggagaaaacctcaattgctttaatatttggaatataggtatttcaaatgtttatttttgcttcacagtttgcagaactatggttagaattttaacattccatttggtgatcatggcctatctcccgtgtttcctatagctgtgattagaagttttattataattcttattgcttatatacaaataaatataaattaataatgtttacctttgcaggatgtaagttgtccaataaggcaagttcccacaggtaaaaagcaggtgcctttgaatcctgacctcaatcaaacaaaacccggaaatttcccgtcccttgcagtttccagtaatgaatttgaacctagtaacagccatatggtgaagtcttactcgttgctatttagagtgactcgtccaggaagaagagagtttaatggaatgattaatggagaaaccaatgaaaatattggtaatttttttttttactagattttatcactggagactaagatggtcattgaaaatgattgtaccagtgttccttcatgatagtcatggtgctgagtcttaaagcaaacagtgaattcacctccacctcaacattttgttgtgcaaattttcaaacataaaggacaatgagaagtattttatagtgaacacctatctacttacctcttagattcaacaatgaacattttattatacttgttgtgtatttatccccctgcccatccctcttttcttccaacaattgtgaattcatctttgaggtattcattcaacaaacacataggtgctggggatgatttaatttaatcgaagatgattaaaacattcagtcctatcctccaaagtctcacaacctagtgtagggaaatagacatgaaatatatcattgcagcaaaatgatgagtgccataatacaggtatatgtgaagttcagcagagaaacacgttggaaaaaataatctttgactcgaagtattgtttgaagtttttgggagttaccacgagtgagaaggagtttgcctagcaaagataattctaaacagaaacattagcatttgcaaagatgtggggttaatgttgtgattgttaaaaagaacatatagtaaaaatgcaaaattggaaacatgtggtctgtatattattgcaactttagtgtaattcgtacctcatttgggataaatgtagcatgttttatgttaagggaccatatatcataacacatttttgttctaatatttgatttatgagaaatgtttgttaaatttagatgtcaatgaagagcttccagccagaagaaaacgaaatcgtgaggatggggaaaagacatttgttgcacaaatgacagtatttgataaaaacaggtaatgttgatgaacaagtgaggctcccacaatgttctggaaatgttttcattctgaagcagaatataattatttatattgattatttcattgcctttgtttctttttattcttacggatgaaaaaacaaatttgcaaacactgaatttttgtctgttttatagaaaacaataattaaggaactattcggatagatagctcagttaaacttacttatttggcgaatattttctgagtgtctactctttgccagacactgttctagacattaagaaggcaacaaaatccctgccttcaccatggagcttaacttttagtggaggaaacagaccaccacccaaaaaatcaactaatgtcacttagtgatgagtgttgtgaagaaaaatagagaataaatggttactgttttagagagatatcctctgggaggaggtagtatttgagaagagacttaaatggactgg

SEQ ID NO: 86018 - DNA, 1065 bp, Homo sapiens
ttgtattttcagtagagacgggtttcaccgtgttagccagaatggtgtcggtctcctcatctcgtgatccgcctgccttggcctcccaaagtgctgggattacaggcgtgagccaccatgcctaggcgagaccccatcttttttaaaaaaagaaagaaggccgggcgcagtggctcacgcctgtaatcccagctctttgggaggctgcagtgggtggatcacgaggtcaggagttcgagaccagcctggccaagatggcgaaaccctgtctctactaaaaatacaaaaattagccaggcacggtggcgtgtgcctgtaatcccagctactcaggaggccgaggcaggggaatcgcttgaacctgggaggcagaggttgcagtgagccgagatcacaccactgcactccatcctgggtgacagagcaagactcttgtcttaaaaagaaaagaaaagaaaatcatgtataatgattgtgtacctctgtgcatttggtacaggatggcaagaaacacagacttattaaatatttctgcaatttctgtttggaaacgaaatattttagtgaaaatatcaccagtgaaagaatgtctgggaagcaaatccagcattttttctttttgggattggagaaagaaacctatgccgtcatttcttgtaccaggctgcgtgctggtagttaacagtttattgtcaggtataggacaaagaaccagggaaagtaactaggccattcctcctattgtttattttttatttatttatttgtttatttttgagacggactctcgctgtgtcacccaggctggagttcagtggcatgatctcagctcactgcaacctctgcctcctgggttcaagcgattcacctgcctcagcctcctgaatagctgggattacaggcacctgctaccatgcccagctaatttttgtatttttagtagagatgaggtttcaccatgttggccaggctggtctggagctcctgacctcacatcatccacctgcctcagcctcccaaagtgctgggattacaggtgagccaccgtgcccggccagtgtcttt

SEQ ID NO: 86019 - DNA, 1059 bp, Homo sapiens
caaaaaaaaaaaaagacatttgaactggttagcaacaacctaaatgggaaattttcccatgataactttgatttctgacctatttggaaaaatctgaaaatctgtctgtgttggacgagtgttttcacatggcaacaattcacctgttgctgatcagtggtcgcctcttttagacagcctgtgctctccagttcaagttctacagtgtctggtccatacttttactttgtttgcctagccgtctcagtcagcatttggattttcaagacaaatctattaaggcaaatccacattgacttataatgaattttttttaatttctacaatttatttgaattcattatctgagtctccagtctttgcatgttttttattttttagaggctgcctccattcgaaacattttctcagggacctacgttgcagttcactcttcgttggacaggagagaccaatgataaatctacggctcctattgccaaacctcttgccactagaaattcagagagtctccatcaggaaaacaagcctggttcagttaaacctactcaaactattggtaagaaaacattgcaatcaaaataataaaataatggtttgcagagttaggtcttgtgctttagattaattcatttgtgttttgctttatgtgattcttctttttttttttttgagatggagtcttgctctgttgcccaggcaggagtgcagtagcgtgatttcggctcactgcaacctctgccttgtgggttcagatgattctcctgactcagcctcccgagtagctgtgactacaggcgcatgccaccacacctggctaattttttgtagttttagtagagacagggttggccgagcgcagtggctcaacacctgtaatctcagcatttgggagaccgaggcgggcggatcacaaggtcaggagatggagatcatcctggctaacacggtgaaacaccgtccctactaaaaatacaaaaaaatttagccaggtgtggtggcgggcacctgtagtcccagctacttgggaggctgaggcatgagaatggcgtgaaccca

SEQ ID NO: 86020 - DNA, 3521 bp, Homo sapiens
ttgtcatccaggcggaagtgcagtggtgtggtcttggctcactgcaacctccgcctcccgggttcaagcaattctgcttccgcctcctgagtagctgggattgcaggtgcccgccaccacgccctgctaattttttatatttttaattagagatggggttttgccacgttgggcaggctggtctctaactcctgacatcgtaatcctcctgccttggcctcccaatgtgctgggattacaggcgtgagccaccgcgcccggccagaggtgctttttaaggaaaaaaataagtcctgccaatagaccttaacatcagattagggatgctgaattatgggtatttttcctgcgatcatcagttgagggagataacagaaatatatttaaataccacaagtagaattctgtgaaacctttaatatttaatagtttttgtgaggtatgttattttgcttttcaaaagcaatgtttttattgaatataaaagtgtatgttttcagctgttaaagaatcattgactacagatctacaaacaagaaaagaaaaggatactccaaatgaaaaccgacaaaaattaagaatattttatcaggtaaacatagctgacccttcttaaagtaattatgaaatgtatttgttttttgtatgtcaaacatgaaaattttttgttcatttttattttatttatttatttatttgagacaggatctcacttttttgcccaggctggagtgcagtggtgcagtcttggctcactgcaacctctgcctcctgggttcaacctgattctcacgcctcagcctcacgagtaactaattacaagcacatgccaccactcctggctaatttttgtagtttttgtggagacgaggttttaccatgttgcccaggcttgtcttgagctccaagcgatacatttgacagtgtctgccttggcctcccaaaatgctgggattaacaggcgtgagtgacctcgcgtcactgggcatatttaattaaagagaatatctctaatttgattttccgcttaaattttttaaactatttttagaagtgatatttaaacaaaatatcttgttatgcgtaaattggagatttgctttttttttttaattgtttttagtttctctataacaacaatacaaggcaacaaactgaagcaagagatgacctgcattgcccttggtgtactctgaactgccgcaaactttatagtttactcaagcatcttaaactctgccatagcagatttatcttcaactatgttgtgagtaatttttcatattttctcaatttgtgttaagaaatctcttgtaccccataaatatatacatctatgtacccacaaaaattttttaaattaaaaaagggaaaaaatatgcattaagtacaagatagcatgactttcaaaaattgtactttgtataaaaaacaaatttctgtatttgatagattgccgtatatatggattacagtgaatgattcagagttgacatatatttggaattataattaatgtttgtgtagtgtctctaattgactcacaaaatcctcaaccaactctttgaattaaatgataattttcttattcttgctcaaccaagaaataatttgtacaaagtcaccaagcaataaatgacatagttaagattttaacacattttgttgaccccaggtcttctgactgcctgtttaccatgctggtgtgcctggcctattttagttttctaaatattaagagcccacaaattctttaattaaattggagggatatttaggataggatacttaatatatttttttttttacatttttgttgcagtatcatccaaaaggtgctaggatagatgtttctatcaatgagtgttatgatggctcctatgcaggaaatcctcaggatattcatcgccaacctggatttgcttttagtcgcaacggaccagttaagagaacacctatcacacatattcttgtgtgcaggtaggtaaaaagggcatataagaaaagtttaagctctgatttttactgatgttggaggaacaaaggagccagatgaagctactagttcgttaggtggaaattattatttttcagtattaggtgtctatggggttgttaactactttataacacttgatagctcctatttctacagagaagttttctcacttttcctttgaactttatacttaagttttaatgatgttaatgtcactactgctgcagtggtttgggattaaagaattctgtcagaagtttctggataattggttgaacctgggaggtcgaggttgcagtgagccgaggttgtgccattgcactccggcctgggcaacaagagcaaaacttcgtctcaaataataataatagtaataaaaaaattacaaagagggaatttttaatcttagtaaaactgaaaaaatttttaaggcaggtgtatgcatatgtaaccagtgttaacggcttttctgctttgtgaatatacatgagttagaatacacagttttgacatgtaggattttatatgcatattcctatctgaatgtgccctaactagcacttcatttctttttcctcctttttaactgtaacttttcacacccagaaagacagtttgtgtttgaattaatatgtaataggtttgatttacattatgtaccaaaagaaaataactagtgggggtgtgcctctaatactattgttttatggttagttttataaaagggtgatgttgcagattatcacagatctcaactcctagtcgtgaggttagatggtatacatgtagaggccataaatcaacatttatttcttttcattaggccaaaacgaacaaaagcaagcatgtctgaatttcttgaatctgaagatggggaagtagaacagcaaagaacatatagtagtggccacaatcgtctgtatttccatagtgatacctgcttacctctccgtccacaagaaatggaagtagatagtgaagatgaaaaggatcctgaatggctaagagaaaaaaccattacagtaattattattatctttattggcaattatcttggaatattattttgttttgaaaattgcttactatgaactagacttttattgtaaaggaactttttttaaaaaaaaaaaaaggaatccggaaatgtacaggttttaaaattatgtcactttaaaagttaaccaagttaggctggtggcggtcgctcacacctgtaatcctagcactttgcgaggcaggcgcattgcctgagttcaggagttcaagaccagtctggacagcatggtgaaacccggtctctactaaaaatacaaaaaattagccaggcatggtggcatgcacttgtagtcccagctattcagttggctgaggcaggagagtcgcttaaccccaggagatggaggttgcagtgagccaagattgcaccactgcactccagcctgggtgacagagggagaccctgtatcaaaacaaacaaaaaagttaccaagttaaagggaatatggattttcttcaagta

SEQ ID NO: 86021 - DNA, 1076 bp, Homo sapiens
ggtaatcgtaatttaggctttccctttttaaatgacggcaggtgtgctggctcacacctgtaatcccaacactttggtagggcgagttgggctgatcacctgaggtcaggagtttgagaccagcctggccaacatggcaaaaccccatctctactaaaagaaaatacaagagttagctgggcatggtagagcgtgcttgtgatcccagctactcgggaggctgagacaggagaattgcttgaacccgggaggtcaaggtttcagtgaactgagatcgtgccactgtacttcagcctgggcgatagagcaagactctgtctctaactaaataaataaattaaattaaatgactacttaaatagaagttaattttaagaaatgttgccactttgctgtataaatatgttgtatttttagttccaaaacattctgtttttgacattctcacaagtttttcttaaaatatgtgtttaataggtgtttttctttctttttcccagcaaattgaagagttttctgatgttaatgaaggagagaaagaagtgatgaaactctggaatctccatgtcatgaagcatgggtagggtatttctaaattaatttaaatattttattattctttatggtcttttgctgtttcacattctagaaatcttacgtgtgttagaatcttatttaaaattccattaatgtatatttgtcccaaattttattctattccaatgttttttggtttggcaggttttttttaggtacaaagacgttccttttggtattatttataacaatgaattaatattatattcattagtattaataaaatcaaggcaaaaaccgggccttgcctttagaacttgttgcacagatgtgagtcatcgcagcattatttatcagggttgttgattctgtcagctttcaagaggaaacaggctgctgcaaccctggtgtccgtaggaaagggtgtcatcatcatagaacctcctcagaaatcactggtgcccatcctaactctcgtagtagtgtttctcccatgcttgcaaactctatcagggttgactcgttcacactcaaaacat

SEQ ID NO: 86022 - DNA, 3144 bp, Homo sapiens
caagctccacctcccaggttcacaccattctcctgcctcagcctccggagccgctgggaccacaggcacccgccaccacacccagctgattttttgcatttttagtagagacggggtttcacagtgttagccaggatggtcttgatctcctgatcttgcgatccacccacctcggcctcccaaagtgctagaattacaggcgtaattacctggcccaaatattttatgcttttaagactgcttatgtaattgaagaacagaaattatatctgctgttctaatggtacctgtttaagcttaagttagattaaatctcttgaaatttttaaaatggtaagctcattcagatgattgaatttcagtttctctatagttttactgcttctttaatcatcttttattttactggaattggatatagtcttattataatggttatcactgttgcatttgacaaaaatgctttgtattgctattcatattctgtttttattaaataggtttattgctgacaatcaaatgaatcatgcctgtatgctgtttgtagaaaattatggacagaaaataattaagaagaatttatgtcgaaacttcatgcttcatctagtcagcatgcatgactttaatcttattagcataatgtcaatagataaagctgttaccaagctccgtgaaatgcagcaaaaattagaaaagggggaatctgcttcccctgcaaacgaagaaataactgaagaacaaaatgggacagcaaatggatttagtgaaattaactcaaaagagaaagctttggaaacagatagtgtctcaggggtttcaaaacagagcaaaaaacaaaaactctgaaaagctctaaccccatgttatggacaaacactgaaattacattttagggaattcatcctctaagaattatgtttttgtttttaatcatatgttccaaacaggcactgttagatgaagtaaatgatttcaacaaggatatttgtatcagggttctacttcacttcattatgcagcattacatgtatatcacttttattgatgtcattaaaacattctgtactttaagcatgaaaagcaatatttcaaagtatttttaaactcaacaaatgtcatcaaatatgttgaattgatctagaaattatttcatatataaatcagaatttttttgcatttatgaacggctgtttttctactttgtaattgtgagacattttcttggggagggaaaattggaatggttcccttttttagaaattgaagtggtcttcatatgtcaactacagaaaaggaaaaaaatagaaattgaaggatttttatgaaattatattgcattactatttgcagtcaaactttgatccttgtttttgaaatcatttgtcaattcggaatgaaaaattataatgtaattttacattacataagttccttttacaattaaaaaatagcacttcttcatcttatgcctgtttgagaagatattaaattttcacattgttgacagtgaaatgctatgttggtttataagattacagaccatttgttttcatgtggataattttagtgcattgctcacccggtatgttttttttttttaacttgaacattttgcttgttttgtttttcttttttaattagataatcacacggaaaattaagctgttcatatctttaaattaggattgcaaaccaaggaaagaacgcatttgagattttaagatgtcacttataaggggagaagtgttcttaaaaagtcaaccagaaaactgttatgccttttatttgtttgcaaggatgtctttgtaatgtgtttcatgaatagaatatccaatagagataagctgacttgaatcattttgagcaattttgccctgtgttatatgtgtttcacgcacatatttgcagttggattttctccaacagaaagtggattcactactggcacattaacaagcaccaataggtttttattccaactccgagcactgtggttgagtaacatcacctcaattttttattatccttaaagatattgcattttcatattctttatttataaaggatcaatgctgctgtaaatacaggtatttttaattttaaaatttcattccaccaccatcagatgcagttccctattttgtttaatgaagggatatataagctttctaatggtgtcttcagaaatttataaaatgtaaatactgatttgactggtctttaagatgtgtttaactgtgaggctatttaacgaatagtgtggatgtgatttgtcatccagtattaagttcttagtcattgatttttgtgtttaaaaaaaaataggaaagagggaaactgcagctttcattacagattccttgattggtaagctctccaaatgatgagttctagtaaactctgatttttgcctctggatagtagatctcgagcgtttatctcgggctttaatttgctaaagctgtgcacatatgtaaaaaaaaaaaaaaaaagattattttaggggagatgtaggtgtagaattattgcttatgtcatttcttaagcagttatgctcttaatgcttaaaagaaggctagcattgtttgcacaaaaagttggtgattcccaccccaaatagtaataaaattacttctgttgagtaaactttttatgtcatcgtaaaagctgaaaaaatccctttgtttctatttataaaaaaagtgcttttctatatgtacccttgataacagattttgaagaaatcctgtaagatgataaagcatttgaatggtacagtagatgtaaaaaaaattcagtttaaaagaacatttgtttttacattaaatgtttatttgaaatcaaatgattttgtacataaagttcaataatataaaagctgtattctgttttggggtttttttgttattatgcattgttaacatgtacattaaaattttgatttagatagcatagtaagatttcagcctcaaatgagtcagagctaataagaaattaggaaaatcttaatgtgaaatcctgctttcagcagttacaactaatatgtcatttatggtattacataaatatttaaaaatttatagttcagagtaatgaaggagagagattcatttttcacagcatacctttttatactatttaaac

SEQ ID NO: 86023 - DNA, 1088 bp, Homo sapiens
agaaaaaaagtcacttagtttggttataaagaaaggagtcttgttcacacagcgtaaaaacgaatcttataatcgtattttataagcatcagaggcaaaagcaactagggtgacgggctttggggagtggaaagcgccggatcctgggagccagtcgccctactcgatcaagcattttctgacggccctatccaataacgtggggacgcagctgaaaaccatgcaagctgatcgctgccctcccggagtttatggtctggtgagaagatccctgctctgagtcactgccaagctctagctatgtgactttgaacagggaatttctgtccctatctataaaataaacggggttaaaccagggaatccgccattcaaattcctggcccaagtgtctccggggtcgcggtgcccaaaggagggtgggcgaggctccctgggcctgcgctgcggcggcctgacagcgggagcgctgttccggcgcagagcgcgttcgcgttccgaaagcgcgtgtccctcgccgcgtgccgtcgtccccgccgccgccgccgccgccgccgccgccgccgccgccgccgccgccgccacagcccgctgggccggaggaggcggagctggcgctgtcccggctctcttgcggggaagcaactgagggggcggcgcggcgggccccggcggccgaagaggctggcaggtggcgccgtggggtgggtgctcctggtgagaggagtccactccgtgcgtgcgggcggaggccggcccccgagagccgccgacatgaagaaagacgtgcggatcctgctggtgggagaacgtgagtccgcaccctctggccggcccctgagtccctgccctccctgcccctgcagcccctgtcgcccctgtcgcccctgcagccccaacctttgcagccccggcccttctcgcgcctcacagctccgctcgcctttctccgcgttcctaggccttccagccccttcactcttctcttttggctggccgccggcggccctcaccctgtcacctcacctgggccctccagagatctcctttccctgttccccagccgtcctcccaagccatgtccctat

SEQ ID NO: 86024 - DNA, 1056 bp, Homo sapiens
catataggaaattccaagggattctgatgctctgtgccagaagctggggacaaagaccagatgtattctatgttatatcattccctcctttatattatttgaaattttaacattttattttttaccaaaaacaaattgaacacagtaattttagcatatgtttatattttaactgcctcagtagcgacctgttattcccagttctccggttgctgttaagaaaatctttgaatgctagttccagaatctccaggaggtgggaccagtttcgttagtggtgatgtcgaaaataacagcagtaccactgtgcttgggccaggtgaaatcaaatcagatgattcagtctggttgatgtgctagaggcccttttcccattcatgtaaaattggaaaattttgttcactatccaagtgtttccaaatatttggttattgtgtcaatgtagattcatacatattaagtatgtatcttgggtataaatttaagttataatttaatataaattgtgtggcacaaaagtagttcaaaggaggaagtggaggaaataagagctataggtagaatttgaaccatccttgaaagataattattaataacatttgggaaagtagaggggaaagcaggaatgatgtttagatgagggaaactgtgaggtgggcaggatttatcatggcttgtttgcacttaaacaatgcagaatggccttatttgagcaaattgagtgggggatagtgggaaatgagattaggtaggtgagctagggatagattatttatgatattcaaaggccagtagaatgatttcattttggtgtggtagataattgagagtcaaagaaagcgtttgatcaggtgagtcagaaaatgaaaagagcatgtaagaaaaatggaccagcatttatattgttggtagattaatgaggagagagactggagaaagggataggaaatttgggactgggagatttttcaataaaagtaccataattagggaaataggggaacagtgagggaaggaatgaatgttaaaaatttcaaaggaaaatttgacagatct

SEQ ID NO: 86025 - DNA, 1883 bp, Homo sapiens
tgtcacccaggctgtagtgcaatggcgccatctcggctcactgcaacctccgctgcccgggttcaagcgattctcctgcctcagcctcccaagtagctaggactacaggcatgcgccacaacacccagctaatttttgtatttttagtagagacggggtttcaccatgttggccagggtggactcgatctcctcgtgatccgcctgcctcagcctcccaaagtgctgggattacaggcgtgagccactgcacccagcccatgttttacttaaataatacatttaaaaaagtggtgactattcctaatgtagaatatgtttctttggttgcaattcatggatttaatattgctttgtagattatcattttatattatttgtggttttaacgctggtttgtttttaaatatatttttatgttttttgctagaggatttgtttcaacactccattagctcctcaagctctggaggatgtcaagaatgtagtcagaaaacatataagtgatggtgtggctgacagtgggttgaccctgaaaggtgggtaaatggtatttttcccccttttgaaacttaatattttcaaaatttggcagaaggtgaaggtctttattgcattatttatactttaaggaaatgttaatatttactagtatgcctaaagtctgatttggatatttatgagttgggagggacaggccattgttggggattatcatctttactaccaatataaattagaggtagggaaattggttggatctcaaggatacagaggtccacctgatggaaggagatatctggaacaaaaaaaaagtatcttaaaattcttcctactcataaacagcctttaaatagtcattatttttagggaattttgtctatgagtcaaatttaccagtatagaatgttccctggagaatatattatagaggcacagtgaagttaatgagattgaaaaccagaattttccatgacaaaaataagctcaaagatctgtagaacactactctcatataactttgtgcatgtcagtatattccttgagatgcaatgttggccatttcctctagtgctctctcttgctgagctgggtgtatatgtgaaacaattctgaaatcagctctgtttcattgagatacttgtgaattttgttttgttttgagctttacaatgcaaagctagcatccgtatgttcatgaatctggttcttgccattatgttacatgcttttctcctatgtgactctgtacactttatttactaatttactttatttcaggttttctctttttacacacactttttatccagagagggagacacgaaactacttggactgtgcttcgacgatttggttatgatgatgacctggatttgacacctgaatatttgttccccctgtatgtacctttgttttttttgttgttgttgttgtttaattttttattgagacaggatctcactatgtttcccaggctggtcttgaactcctgagtcaagtgatcctcccaccttggcctcccaaattgctgtgattaaaggcattgagccatgcccagtcacctttggttttgtaatgattttacttgttaaatatttttaaggttgatttagcacacatggggaggtgggcttcaagctaattgggaatattttagaattatagcagagctttatagcaggatttctcaacctcagcactattggcattttggaccagaaaattttttgttgtggatgtcctgtgcagtataggatctttaccacatccgtagatgtcagtgacacttccagttgtgacaaccaaaactgttgagaaattgccgaatgtaccctctgaagtgaaattatccccagttgagaaccactgattccctcatgg

SEQ ID NO: 86026 - DNA, 2563 bp, Homo sapiens
taaaaacaataaatgtaaaattaaaaatagttttgaattctgaagaatatggaggacacagtattacatttttaagtggttatgtccagcatgactgcgactatacagacacacataaaaatgcatgtgctcaaggactagaggtgatattaaaaaatgaaagtagtttttataaaagaatttaggtggatttctttatatttcaaaatatgtgtgtttaatgtgtgtttttaattacatgttttttttaattgtaataaatctaaggaatcagtataggtctgttttgtcatcagcattggaaaagtgatctggatcttatttattatatgagatttacctagaccactgccaatctttgccttttggttcactttttcgctttgaaactactgttgctttgcccatctggaggaaatgcttggttcacatttaattaaatagtaatttttgaacttgttatcagattttgatttcattttttattccatagcaacactttatggacagcagaataccttgcttaatcgtagctgcaaagtcagacctgcatgaagttaaacaagaatacagtatttcacctactgatttctgcaggaaacacaaaatgcctccaccacaagccttcacttgcaatactgctgatgcccccagtaaggatatctttgttaaattgacaacaatggccatgtatccgtaagtacttgctgtcttcattttcatgttgcatggttcataacattgcatgccattattagccatgaagggaatatctttgtcacataggaattgttcagcaacagaaagatactttgtaatgagaaggtacaaatttgagtaaatgcaagtttggtttgaatgccataataaaatgatataaacagtgcttctgacaatatctgtatatttttgagcaggctgtaactatcttaatagaatagtacaataaaacacaaccccccacccagcattaaaaaatagttttactggaataaaatgggtttggcatcatgttgttttatgcttataaagcattttcatatgaacagaaagtttatatttttctgtttttgaccttaggtatatgaagttttctaaaatattttattaatttatgttgaaattgtgggtatgcttcagttaggatatgtcttttttaagtgctgtaaagagtagttgtaattggaatttctactgtataaatgttttacattaagtgttacgagccacaaatttcatgtacatttattatatatctatacatgcatatgcacaagcacataactgtggtcatctctgtagtttactaactgccttaaaattgcatggttcttaatggcattcgcctcaagtagtgtgtttgtataaattctgttttgtaacaaaatagtttttcaggcagtgcgtttctcaggactttatagcttattctacttattcttatgttagtctctaaattatttttcttcttatgaaaactacagtgtaacacagagtaataatcaaacattgctataaaccaagaatgacatttttcaaaaaggtgttgatttgtacagatttttaaagtcagttaactttactgctattttattacctaatactttttttagatgcaacaaacccttgaatttctatttgtattcgaagacaagtcattcctattattatagaataaccaaaaccttatttatgttttacctttgctttaaaactctcatgtatgttatctacagagaggatcattacagagacagactctcccgagacatgggccacactgatagaatagagaatttgagaaaaatctgggtctttctaaaaactgctttgtaagttactttttctttatgacttctgtgggattttgttgatattttcttagagaatgaccaaatctcctttcttgccataattaacatttagtaattatgtagaaacgcactgcttggtcaggcttcctgcctagctatatattacgttgtcttccttactacataaatgtacttctttaatcttgtgattacagtaactgcaagtgtgtttttacatctgcatttttaaaacattttactgtaattctgttgtgtgtgtgtgtgttatatgataaatgtacatacatggaccacttgtttatatggttaatcccaaactacttctcatgaagcatctccctgttgctaagcatactttgcatctctcctttttggtgggtggagccttgtgtatgttaaagaatcagatttgatttataaaataacagatggattccagtatgacagctggcagagacttagtagcagtgatttgttcatcatcacaagtcaaaaaaaatgaaaaaaaaatgaaaaaggaatgtcttgggcctatacaagtttttttttttaattcttgtttttcttcatattgggaattaggcattattggaatgctgctaatcgttacaaccatgccaccatgtgctgtggtctcatcagatctcataagctaagccaagtcagattgggccagtcttttgactgagaagcctataaaaaaatgttcaggtgttacaggaagtgat

SEQ ID NO: 86027 - DNA, 1030 bp, Homo sapiens
tacacttgtcttttgactcatttgtatatttatcattcttctccttcctggttttcaggcatgtgtgtatgctgagggaggaggaggaggagggaatcgttatttaaacgctagcaaactttgtccttttggtgggtgcttatggcttactcaggttttctttttattaatttagacgagggtgccatctattgctgtgcatatttattccacaaaaattcatgtaataataattccatcccccctccaaaaaaagcaaaagtatcagctaattttccctagattttctacagggagggaggaggaagctattactatttattatgtttttggtaaatgtggaattctgcacaactttagcatgccccatactgtccttttcctttctacaaagagtgttgcttatgcctaagtcttttttttttaagttggcacaccctgacttgtgccatatttgtaagtaagaactcaactcctgtccttctgtgtgttttcgcagccatgcccggttacgctgtatgtgcacctgcaacaggtgtacattttgcatctgtcagaacttcctcaactcagacttgctgcaatctgtaaagaacaaaatcttcactgcagttcttaacaggttcttaactttatttactgggtaccaggcattctgttaaaatacaaaagaaaaaagcggataactatttattatacagatactcactacaaagacaagctgactgatgcccaactaacttccactaaaattctcactgtgatgacaatgtttagttttggaagcatccttaataatgtttttaaattaataggtatatttagaggactataaaataagattttggatgtttttttcataaggaagataaattatctttcctattaaaagataatatgtatagggaaattaaaattttttggctgtgagttaatagattaggacttttgtagtaaagaaaagacacattaatcctaaatgaaagatattatactgtactcagcttacaatgaaataatatatctcatt

SEQ ID NO: 86028 - DNA, 1047 bp, Homo sapiens
tgaactcaccttggctccccgtaattgctgatcacaaaccacctattttattacctattctagaaactcttgattgtccataattacagattgattcattgtctgtgtccctggtgacaattttattcctagattggtttagttagctttcaaataaaattgatttagttagctttcaaatgaaataggacagatgtgcattaaatgaatactattgtgcatagtaaattatacaatggccctcaaagagaaatcagtacgtttcggtcatatctatttataaactggtagtaatttaatggtgatgtcagcacacatcctgacatctggtaatcaagaatggaaagaatgaaaacgacaagtagaggaaccagtatacttttcaaacactccttccttatccccgttagtatttcaatcatttatttaagagaagtacagtggaattttaggggctgcgtattggagtttcttctagtttatgaaaggtaagtaagataggtaggtgggggccaaaaactcagtgcccacaggtcccggatggatactgtaaaagaatgaaggtggccaagtataagaaacaaggagaggtggggactgtgacaggcactgtctaaaagaggcagccaccactcagctctggccgtttgttgttgtacaggtctggtgttgccaggttttctggttttacaagagactggaaatcaaggctttggtgtgaaatttccagattgttagagattagcaattaattaacaaatttttaagtactaatcagaacaaagcatgtttatagtccaccagcttgcaacctcagtcttaaggtatggcctagtcatgaaaatagaggccaaggaaaaggacacatagaatgaaaatgtctctggtcccatcaccaccaccaccactttactcctttcccatgaaaaatttgaaaaagttattgggtggtgggatgagaatggaaccacctttccctgttacttctcaggttttggcagctgttactggttggtcactattggtttcctgtgttagacatatcct

SEQ ID NO: 86029 - DNA, 1078 bp, Homo sapiens
tagaatacatttattttaaatatagaaaacatgagatccatcatatagggtggcaactcaatttatgtgtgggatgcataattgagagatgttattttgagtccctttttttgtgagctctgctgtgaactgcaaactgtgtgcatgtgtataaaaggttaagagcccggatagctgagtggggtgccatgctgttagcagacgatgagggcagtattactcaccaggtgcatgctgtcagctctgtagaagattccatcttcatggagtcatctcatggtccactttttcttgaagccaggtaacatttccaatgggttggcctcgttggagtttttccagcttgaaaaacctaagcattttcttctctgactttttttttaataaaatgctgcctgttggaaaaactaacttgcaagctggaatgaacctgtgatatcactttgctttgtaagaaataattatgtgaggagtgattttttttttttaaatagaaactggtgagggtgagaattggagtgttgtgtcttgctttgttgtgttaagcatggagcactctggcttgtgttgtagacttttgtttctagggatgtacagactattttgtgataactaatctgttctctttgactattactgaggcaaagtagttttgtgcagtttgaattcttggctcttaactcttttgcatatgtcagtgccttggtcttttaatgatatctgacttttgcttcaaatctgtttaacttagttataaaataacctaaactagacagtctctctaagctcttaattttgtaagttttcttttctttctttttttttttttttgcgatagagtctcactctgtcacccaggctggagtgcagtggcaccgtgtcggctcactgcaaactccgtcttctaggttcaagcaattctcctgcctcagcctcccaagtagctgggattacaggcacccaccaccatgcccggccactttttatatttttagtagagacggggtttcaccatgttggccaggccagtctcgaactcctgacctcaggtgatccacccgcctcagcctccgaagtg

SEQ ID NO: 86030 - DNA, 1722 bp, Homo sapiens
agcttgacaagtgtgctaatacttccctaaaagtagactgctaaataactggtatagggttttcatactaatcatgttttaaataataattatattttctgactgcaggcacgtgacacaagctgacctcaagagctccacgttttggcttcgagcaagttttggtgctactgtttttgcagttttgggctttgctatgtacaaagcattattgaaacagcgatgatataaaaagaaatactgtccctaccaaaaacaaatacttttatgtacattctgaatgctttaagttctgctagaattattgagatatttatacatgcagagttactttattaatatttgtaattcatgcataagagtattttaatgatagttataactgcagtattggctagcatatggaaagaaaacagctaacagccaaactaaaatggctaaattccagaggccaaaagggaatattttgtaaatatatgtacatattcaggcaagatatggtctcccaagctgagttctagaaatgatgtttctagacatttctaagtggtattgttagtgctcacttggctcactcttctaggtttaagttagcccagagattgtatttactcatggatcactttatttatttcacatttactcagaatgatcctttgggttctataaggacataaggtacaatttgccattgtctctccatttttaaaaacatacaagtcagtgtcagcttaccaacatgacattttttcagtcagttgtggtaggccagccttgaagccatcgcacagtctagaaacttgtgtagctgagtgtgcagctcacctttaagggtgaagttaggtaaaagcaattagcagaggcgttatctatgtgattatgttgcttccttgtcagtatgttgaattttatagccctttcaatgaaataaaaaaaaaatttgtatattaccaatgtttttagtttaaataaagagtcacccttactactgttgaatttcatcccaagtgtaaatcattctataatggctgtgtctgttatagtatattacagtaactgcatgtgtcaccaagtgttctatatcaggctaggataacctagaggcagtaattttttaaatgataaaataaatctaatgaatataaactctcatgataaacctattttttccatcatcagccttttcaagtatttaaataaataactgctgtgtactgtgatcttgagttcttttgtcatctaaagtaaatatttctgtacagatgtgagtgaagtcctctggtttctatctctcatattgaaaattattctgtataaaaggaatactcagccgggagtggtggctcaatcgtgtaatcccagcactttgggaggccgaggtgggtggatcacctgaggtcaggagtttgagaccagcctgaccaacatggtgaaaccctgtctctactaaataaaaaaaattagctgggcatggtggcgcatgcctgtaatcccagctacttgggaggctgaggcaggagaatcgtttgaacctgggaggaggtggagattgcagtgagccaagatcacgccattgcactccagcctgggcaacaagagtgaaagtatacctcaaaaaaaaaaaaaaaaaaaacttattaggaaaaaagtcaagtatgatttatatatgtaagaggaaatttatttaaaagttgtagagaaatctattctggtaaaaggcca

SEQ ID NO: 86031 - DNA, 1100 bp, Homo sapiens
ggggttggggggtagtttacgatcttctctctttggcgtctgcggttaaatctatcacttccttctggccctaaacccctggcagaatctgatgtagtcaccacttagactcagccttggaagagaatgggtgggcttcaccgcattcggcattcaccacccccccttccccgcaaaaaaacaaaaaacgaacaaacaaacaaaaaactgcaggcaaaatgttagtgtttatgcagaggtgagttctcctggggggggaggggggggctctagctcccagcaggtgagactcattgcgccggggtctgatggaattgcacctggccatgctctcccaggcctgggagtagctgtggacataagctttaggcagcagaaattattagaggcgcttggacatatttggacgcctttatttagtaattgttgagaatcacttgttctgccagttccagaaccagcaacacccaccttgccgcccccgcccccaccccatcccttactgtgagtttcctccctctgctcagtgtggactcattggggagctcctcccagacttcccctgctctcctgtggccagtccctgagcctggtcatgactcctgggcagccgctgggaggctatgtcagaaacatccgaggactacagagaccttggtgataagtgtgtctttctttctctcctcttcttcctctcctgcatggcctccctctctgccagcactggaaagtcctgtttgatcaggtatgtgagcagttaaccccccatttccttccagccctccctgaaatcggtctcagtctccctgcttgcgtgggcttccctagctccgcgctcctgagatggtgacgtggggtgggggtgtggctttgtgcatctctagggctgaacgacactgctctccaggtatcaggaggaagagatgggctcccctgagaggatctccctcctgcctcctccctactctgctgcaccagagccgggtttacaccatgtagaaattggacgttatatattgaatgcctgggaaatcctccatatgccaggggattgcagtagggggctggagaggtgggggaagggcttgggctgacaatcc

SEQ ID NO: 86032 - DNA, 1021 bp, Homo sapiens
cattacacagctctatatgatagtcttattttatctttttttttttttaatgaaatggggtctcactatgttgctcagactggtcttaaactcttggactcaagcaatcctcccaccttggcctcccaaactgagccactgcacccggcctctggtagtcttattttaaaaaaagtaagtctgggctgggtgtggtggctcatgcctgtaatcccagcactttgggaggcctaggcgggcagatcatgaggtcaggagatcgagaccatcctggctaacacggtgaaaccccgtctctactaaaagtacaaaaaattagccgggcgtggtggcaggcgtctgtagttccagctactcgggaggctgaggcaggagaatggcgtgaacccgggaggcggagcttgcagtgagtcgagatcacaccactgcactcaagcctgggcgacagagcgagactccgtctcaaaaaaaaaaaaaaagtctgacaaactctgtatcactactgtagacaaggaaaatggtgtcatggaactgaatatcttggtcatgagaagaaaccacagagttcatgactagaaacatgtactgtattcaaattttaataagctactatcttggcttttaaagttgtttttttttttgtttttgttttattttttaagacagaatctcgctctgtcacccaggctggagtgtggtggtgcaatcttggctcactgcaacctctgcctcccaggttcaagtgattctccttcctcagcctccccagtagctgggactacaggcatgtgccaccatgcatggctaattttttgtatttttagtagagacggggtttcaccgtgttagccaggatggtctcgatcttctcaccttgtgatccacccgccttggcctcccaaagtgccgggattacaggcgtgagccactgtgcccagccagcttttaaagttttaaaaaggatttgttcagacatggaatatatttgtgtatattacttgtgtgctgtacacacagagga

SEQ ID NO: 86033 - DNA, 2354 bp, Homo sapiens
attattatttcacttaacacatttttaactgggtaatcattttctaggccatacaagacacaaacaatttgaagagatttatccgacaggcagaaatgaatcattatgctttgtttaaatgttacatgttcctaaagaactgtggtagtggagatatacttttgaagattgttaaagtggaacatgaagaaatgcctgaagccaaaaatgtgatagctgtccttgaagaattcatgaaagaagctcttgaccaaagtttttgatcatatgttttgagataattgtatgatcaagttgtatatttaagtcttagtgtttgaaattgcagttataattgttcataggattgctatttaagatgatttgaaactcaatccagattttctttttgtattttaccaatttaacttaaataaaaatctgaagaacatcttcactgagtcctagatagataatgtatgtgagagttgtgaaattttagtgtctcactggccccataaattccacgcttcaggaagttgttgcttaaaaaatttcagagatgattttgtttgtggcttttctcaggaaaagcctgagtttgctgcagtatttagcaacttttcttctcagaaaaaccataatacttccttttcagtggactgtagcttcttaaaaaaaaaaatgtaattctagtcttagaacagattaataccactacaccagttcagagatagatctgtgcatcctgtgggtgcttgatacatttttttgtctagttgataacggcatggatgataaagtcagattttaagtcaatatgcaaatcctgagtatgtagaaaattaaatgagctttacaaatcgatgcactagcttcaagataaaatattatctttgagctgggcgcagtggctcaagcctgtaatcccagcactttgggaggctgaggcgggcagatcatgaggtcaggagatcgagaccatcctggctaacacagtgaaagcccgtctctactaaaatacaaaaaattagccgggcatggtggcgggcgcctgtagtcccagctactctggaggctgaggcaggagagtggcgtgaacccaggaggtggagcttgcagtgagccgagatcgcgccactgcactccagcctgggcgacagagcgagactctgtctcaaaaaaaaaaataattatctctgagagaaagctactgcagaaatcgccttcagtcaccatttcatttatttgttcacaggtatttatgaagagcctgtgttttcttttaggtgaaaatgctggagttttaaaacagtgttgagaaaagaaacaaagtacatacagtttacaagcaaactgtaacataaggaatgcaaacagtttcttcctattagagttactcattgattttagttttttgtacatttgttacaagcctcagattgttttactctgaatcaattgaaagtgccctcagctagccatttacaattcccatggaagcctatgtagctacatacatacaattgcaatttgctcgggatagctctttaataaattcatttgataatgatttttgcttagaagaacagaagtcttgtgttctcacttccctgaggatgctcagaggagcacaaacccataaaactgaggaatcctctcttaaatggatctaaattcacattaagtgctgagttttaactttcaaaatgactgacaatggccttctgctttctcctctacataagcctcgggacatgactcacatttcttttcttttaatgagaaatacaattcagaatcttcataaatgctttcatacggttttaaactttaataacttggaatgtaggcagtatagaaaaaaatctaagtagcatttttcatagtattaaagtgagagtggctgggcacgatggctcatgcctgtaatcccagcactttgagaggccgaggcaggtggatcacctgaggtcaggagttccagaccagcctgaccaatatggtgaaaccctgtctctactaaaattacaaaaattagctgggaactgtggcatgtgcctgtagtcccagctacttgggaggctgaggcaggagaatcgcttgaacccgggaggcagagattgcggtgagccgagatcgcgccactgcattccaacctgagtgacagagcgagactctgtctcaaaaaaataaagtcagggtgactaaggaaaaccagcaattttatgacactgtccttgaatctgactgtcttttcccaatgtagttggttccccacttggaaatcattttttaaagtaagctacattagcacatcaacgttttaagtctgaaaaaatacttcattttcaaattcatgtcattcaagagtc

SEQ ID NO: 86034 - DNA, 1021 bp, Homo sapiens
tttctgtcattatctccccacttctcccatttctgtcacacacacccccatccccaccctctggttttcctctgttcttgattcctctttttcctccttctgactttcctggaaccttcttggccttgtcaagtttggtttttaaaggagtttccttgaaccttctgggtatttagcctttcctccacccgttaagtggcctggagagagaaggggctcttgtcagcactgctgtatgggttttccttgtcatgaggataggcagtgcacttccaccttgcagcatttttagttgactccttgccttaccctgcttgccaggcccccatactcctcttggtttagagcccataattgatagcactattggttttgtggcttgtagattggcacagcaacgaggggacagtgaggacggaagcccaagtggcacaaatgcagaaactccctctggtgatgatttcaggtaaaaagagcttcagcataattcatgcatgtgctttcatcttccctgcatctctggcctgtacatgtcagtggatactctatttccactgagctttccctgagtcaaaccgtcaattcctcctatcccctaggaacctcatcctgatttcctcattggctggttcattcaaggctggggcaaacaaatccacatactgatagtgtgcttggtgattagccaaaaagaaatcctttttttttctttttccttttaaattgagacagggtcttgctctgctgcccaggctggagtgcagtggcatgactttggctcgctgcagcgtcaacctccccggcctcaggtgatcctctcacctcagcctccccagtagctgggactactgaccaccacgcctggctaatttttgtatttctggtagagatggggtttcaccatgttgcccaggctggtcttgaactcctggactcaagtgatccgcccacttctgcctcgcaaagtgttgggattacaggcatgagccaccttgcccagccctgaaaaattttttttttt

SEQ ID NO: 86035 - DNA, 2534 bp, Homo sapiens
cagagactaacttatttggtttagcatttaataggcacataatcaacatttactgttcaattgaaacaaaattaaaattgggcgctgtctctatctttatttgtgatcggccctaactgcactggcaatcttttccgtttttttgttttctgttttccattcgcatgccccttagcgtacctggggctccggctcctttacaaatgaaacccaaagtgctccgcaagcacagccagcgaaagcgaaaaactctgaaacggacaagatggctgccacctcttcgcgcctcttagtcccacccactcagggcggaggtctgcgtcatgtgaccctccccttcttggctccgcctcctaccgcagtgcttgacgggaggcggagcggggaacgaggccgtcggccattttgtgtctgcttcctgtgggacgtggtggtagccgttgggttgggaaagtgagggatttttggcctcgtttctcctgcttcttttctcctcccttttactttgccggtagaacacagttatgggtcgcaagaagaagaagcagctgaagccgtggtgctggtatcctttgtcggtttgaagtcgaggtcgcgttggggtgccggttgttggggcctgggactaggaggcctggatttggcttacggcgtggagcgtttgtatttaggcgtctgcgtgggtggcctggtggctgggattggacttgggaaggcttctaggaaaatggggttccgaggtcgacaggcttttgcagttgtgggtcgtgtgactctgtgactcaggaggatcttgttcggtgcgaattttggactccgggaggcggcctggacccctccgccagggacagtgtcccctagggactattcagccaccttccgttgttttggtgacgattcaacaagggacttttcttcgagtgcgataggcttattactttcatggagggttggggacagcttcacagtctgtcacccactttttctgtttttatttactttatgtgtgttttgtgtttattttttcgaattggcggtttagtaaagaaccaagttagtcaaccctggtttcgaacctttttttttttttttttcttttcggggcgggaggagaactagcttccgtgtctcacccagaggcgccttaatcttcaggaagcgttctcacagggcggagtttctgttacccaactttgtaggactaaaaagtgcctatcttattaggaaaactcttactacagtgtggtattaatgctttttctggaagcgttaatattctttacattaaaattgattttatttactgttttgtacgtaaaggcggcttgttacagtactgcgtttatgtaacagttttaaaaatagcttaaatacggttacgaattttgtaatgtgattttaggaaaatctgagtagtgaggtaagaattctgttttattgatgtaagaattctgctttattgattttattgatctgtgaatttaaatacattgcttggcaacataaattcatacggaattggaaacaactttatggattgttcattcgaaattatgtgattattgttcaccatatagttactcttagattctaaatattgctaaattcctaatccagttattgctatcgtcttcatatctagtgaagtaattgtcttgacagaaccttagggatttcttaactgaactctttcctgtcctcagtgtgcatttgtaaatgttgaaatatttataacaaaagtttcaccgacatctctgttaaacacaggaatttgacaaagtatattgctgattattgagatgtgttttttggggtggtgaagagagctggccttctaggaaattgaaaatactgaaataacatggcaagtgtagtccctaattgtgtaataaatataaaaagcagagtttctatacagtaccattttggttttagctgttcccatattgtaatgttatccatatgtttttattataggcagtgtcatcattaggctgtctttgtgccttaacagtattgatcaggtattgtaatagagattttgatgatgagaagatccttattcagcaccaaaaagcaaagcattttaaatgccatatatgtcacaagaaattgtatacaggacctggcttagctattcattgcatgcaggtaaggatttttcttctgtatttattgtccgcttgtgatttggaaacaacttgaaagaataatcttttttatttttttgagtttcggtcttgtcgcccaagctggagtgcagtggtgcaatctcggcccactgcaacctctgcctctcgggttcaagctattcttctgcctcagcctccggagtagttgggactacaggcagccgccaccatgcccggctaattttttgtatttttagtagagactggggtttcaccatgttggccaggctggtctcgaactcctgacctcaggtgatccacccacctgggcctcccagagtgctgggattacaggcgtgagccaccgcgcctggccgaaagaataatcatttatttctctga

SEQ ID NO: 86036 - DNA, 2056 bp, Homo sapiens
ggactcctataatttcagtgctttaggtagctgaggccgtaggatcacttgaggccaaaagttcaagacctcacctttaccccccccccaaaaaaaaaaaaaaaaagcccagtgtggtggcatgtgtctgcagtcccagctacttgggagactgtggcgggaggatcgcttcagcccaggagtttgagagtgcagtgagctgcagtcgtgccactgctgtacagcctgcatcgcagagcaagactttactaaaaatttaaaagaaaaaatactgatttaggataatcattttacctttcataggacagggaaagaacgttaatcttgtttaatatagggcgaaaacacatttgaagaacatagagcagtattaattgaatttttggggaagaaaaatctcatgaagtaattttacccatatatgtatttttaaatattgaatgttgtaaataaactttcttagtttttactctatggaaataattttttttttttaacagaaagtcaaaaaaagaagcaacaagatgattctgatgaatatgatgatgacgactctgcagcctcaacttcatttcagccacagcctgttcaacctcagcaaggttatattcctccaatggcacagccaggactgccaccagtaccaggagcaccaggaatgcctccaggtagcacataggattgcttaaaatctaacatttttaggacattattgatattgtatcgaagtattactttcttccctctaactctttaatatttgttattattttgattgaaattcttgcttgtaggcatacctccattaatgccaggtgttcctcctctgatgccaggaatgccaccagttatgccaggcatgccacctgggtaagaaaattcttttaattgccctgtaggcttgtgcctagtaatgatctttttcaatttggatgttatatgaatgaaatgttactttccattttttgcttctagaaggtatgggctctatatatcttgtctaataaagggatcaaccagtaaatttaaggaatataaatttgcctctgagtaatagatttttgggttttagggtatatgtaagcaaccatctacttcaattgcatttactgtgattaaagtagttggttatttatagatttgcgtttctgagattcagaattatctgtgacactttgtagttgtgacaagaagcagagaaactctgtaaatgatttatttgtcaaagcatcaaaactaaaatgaatatgaggtgcttgtgcccatcacttttacttaaatattgttggatgtgagaggtatacaatacactttcccactgtattttgaaaatcacagttagattttgattttgtcatacattttcacagattgcatcatcagagaaaatacacccagtcattttgcggtgaaaacatgtaagcatctcattcataatgtaattcaggaggtataatcatactgtcatttttttatgtgtgtgtttaatggtatctattcagttgacttcagaaattttctaaccttcctcactaaaacttgcaagctaattaacacaggtctcttaaagaaggaaaataaaacatcttttaggaaacggtaatagacccatataaacatacttcaaatgtgcagtgattttctccaaactattgaaagtaatgggacctgttaataagggttagtatttaagaaagactatattctatgaaattacatgctttattattataggatgtaatggaattttctaatctattaatagaagttaatcttctgataaaaattttaaatcaagaactgaatttacccacaaaaatttaaaaaatttgaaagaaaattgaccaatttatcattttttaagtgaattggacactgatatttgaaggtgagctcttttaggggaaaaaataagtgggttgtgtttttaagtcatggtttagtggtaggtagttattgtaaataggccatctggttttacttttgagtgtctttaattttggtggtagtatttcctttctctaaaaaaaaaaagtgtgtgtgtgtgtgtgtgtgt

SEQ ID NO: 86037 - DNA, 1170 bp, Homo sapiens
cctttcttttatgctacagatggggacacctgtcacaagctcaagtacagcttcatccaattcagaaagtctgtctgcatcttctaaagctctgtttcctagcacagcacaagtacgcaggaagttgcagtttaaaattgttaaaatggctttataacttaaccctttggaccctacttaaaaaatgaatatttttccaaaaatatactgtgtttacttttttaaagcaaaattaatgctatataagtcaaatggtatttaaaaatttgaattcatactaaacaaaactaccccgaactcctgtggttctaaagggttaaaagcatgtaagcagtaaatgcattatagtggccaatggttagcctgatgcatgattaagctattttgatttaatgctgtttaatgcatcacatttaatgtaagaaaatttaatactgctttggttctaaagttggcctagtctacatgttttagatgtgtggtattatgaaaagtaacatatttgttactgataacttgctactttaaaagatcctgctaaattaactcctttgtccatgataattatccagccattgttaatttggaggggattatatatatatatatatatatatatatatatatatatatatatataaagaatactactaaaggatgtatttttattgtgtcaccatttacactgttcatgttatagttagtaacgagtttaaactcatattctgtagttttttttttagctgtttgatagattaataactaattaatagaacattaaaaatagaacacatgctattctaagatactgtatttcagcaatctggaataaatacaaagcattgtaaatttaatttttggtgaggaggtagaagacatctaacaagttaaatatgcagtcttatttccactgctgtgttgtgggtgtgactttaacctagcatcttttgatatttttatgggttatcttgaattttgtggaatgtttatcacattaactttgtattaatttcatttaaagtttggtcctttatttaatgttgatgccttgttttaagttaaactgttgtagatatagttaatttaaggttttgaagtttcgttgatgaagtattgtattttacaggctcaggcagctgtccaaggacctgttggtacagatttcaaacc

SEQ ID NO: 86038 - DNA, 3122 bp, Homo sapiens
ttgagccaagattgcaccactgcactccagcctgggcaacagagcaagactccatctcaaaaaaaaaaaaagaaaaaaatggaatgttggccgggcgcgcagtggctcacaccggtaatcccagcactttgggaggccgaggcgggtggatcacctgagggtcgggagttcgagaccagcctgaccattgtggagaaaccccatctctcctaaaaatacagaattagccgggcgtggcggtgcatgcctgtaatcccagctactccggaggctgaggcaggagaatttcttgaacccgggaggcggaggttgtggtgagctgagaccaggccattgcactccagcctggacaatgagtgaaaccccgtctcaaaaaaaaaaagaatgttaataacaatacttcattagatagtttcttgttgaagcaatttgtaattcccggaaagttgttagccatgcttcaagtttacaaataggtgaagttttaaggtatctagagtttaagtagttggattggtttgtctggcaaaagtaaatagttgggatgtaagggtaaatttttgaaaattactcttaacgttgtaagattttagatgcatgcctttatgcttggtgagcctctgcattcgagtatttagccctgcgcttatttttattcccaggaagagagaagggcacagttacctaagtatcaacgtaatcttcctcggccaggacaggcccccatcggtaatccaccagttggaccaattggaggtatgatgccaccacagccaggcatcccacagcaacaaggaatgagacccccaatgccacctcatggtattcctctttttatgtttttcatatttagtggattttctaagttcacgcataaaatattaaatttatctgcagcatacgttgcacttaaaagtacaatgcgttaacaatctatttttttgtgtttgaaattcttgattttaggtcagtatggtggtcatcatcaaggcatgccaggataccttcctggtgctatgcccccgtatgggcagggaccgccaatggtgcccccttaccagggtgggcctcctcgacctccgatgggaatgagacctcctgtaatgtcgcaaggtggccgttactgatcttacttcatccagtctaataggtttggagattaaaccttttctcaacttgtgctgtttatatagccaagcttccgtcaataaggcttcattgtgactttaacaaacattatcttcccacataccaggaactattggacatttattttacatgggaaaaattatttggaataataaagcaggaacttttcctgaagttgcaatttatactgtatggcttctttttcatgtttcatctaggtttttagaagtgaagtatagtaaatttggttcgttaaattgtgaaggcgctggaattacatgaacataccaccctagtaaaggcaagttctgtaagcttacattgctatttgtaaagtttgccttcacagcatttcagatgctgttggacttcatgtccccaacctagcttggtgagggctgtaactgtttccaagtacttgtacattggaagtctgaatgtgtaacaatatttaatgtatttagagttcctcatgttgcagggtttaagaaatctgacccaccaaggtcatgtgacttttctgtactgttaaacttcattgtaataaaatgagagaaaaatttatgcctttttattcataacccagctgtggaccactgcctgaaaggtttgtacagatgcatgccacagtagatgtccacataataaaattcatagttaccaatgcagttttgatatatcattggattctgtctttgagttgtaggttatttcttagctgcatgttttaaactgaatttgcatagagttgtatgttaatgtttcagttaagagaaaaacttaagatacatgagtcattacataatgggtatgaaatctttataatcacccttccaccctctatggtgtcagtacacatcacgtgtcatagatacttaaaatgtaaatgttaacacttttccttcctgctgagatgtttagagcctagtgccagacccattcatttccttttgattatttttgagactcagtactgcatggacctcagaagcttttcaggtgcaaacttctagaagcttaggtgcatgcagtaatagcttcttgtgctgttaatgggttattatatattattctaagtgtaatgctgagaatctaaatgtgtctctgttgggatggttaacagatgaattggcaatttttattatgttcctggaagattacattattcatttgagtaccttctgttattaagcctaggtagccttactgtgcaactttttatttatccttggaaattttgaatgttgtgttcttacagagagcttttctgtagagatgactgctattcaatattttgtgttgcaacctcttaaaataatagctcttgttgacctttttgggatctgtttttctgatcttttgcagggtagttttatgattttttaggcatcaaataacctatgcaaagtattaatataatgaactcaagttgagtttttctcattataaagttaagacttctaagaaaatggtaacatttctttataactttcctgtgaaggtatagataaaacacatgaagtctgaagttgtatggaaaaaagggctttaactttgaaggaaaatatattgaaaagtgatttagccatcacaaaagagttcgtatttatgtgacagatgaaagtcatacctttaagcaaaacattgcaagtattataaagctgaatgctattttaactcacattggctgggtgcagtggctcacgcctgtaatcccagccctctggaaggctgagatgggaggattgcttgagtccaggagtttgagaccagcctggccaacatggcaaaaccccatctgtacaaaacatttaaaaattagccaggcgcgttagtgtgtgtctgtggtcccagctgctcaagaggctgaggaaggaggttcttcctccttccgaggctgcggtgagctatgttcactccagcctgggcaacagagcgagactctgtcaaaaaataaattaaaatatctgatt

SEQ ID NO: 86039 - DNA, 8969 bp, Homo sapiens
tgaacctctgcttacctaaatggtttcaaaattaatacatgctgctttgatttggcagcacacttaatatactgctgaaggaaaacttgtgttgaaagtctttaagataaaaatggtgtgataggccgggcgcagtggctcacgcctgtaatcccagcactttgggaggcccaggcgggtggatcatgaggtcaggagatggagaccatcctggctaacacggtgaaaccccgtttctactaaaaatacaaaaaattagctgggcgtagttgcggatgcctgtagtcccaactactctggagaccgaggcaggagaatggcgtgaacccgggaggcatagcttgcagtgagcggagatcacaccactgcactctagcctggacgacagattgagactccgtctcaaaaaaaaaaaatgctgtgattaaatttagaataattaagtaaggggtgctctcccaaattctcaggaatttcatgtatacggttattgacaaactgcaatagggttagtagacctgtttcagaaattatgtgaagctttatttgcattttatgcaaagaaggttgatactttgtagcaaggttttttgctctctgtataggtctgatgggcaaaaatggaacttttaaatatgggatagaattctaattaaaaattaattgaaagtgttaggcattggcagataaaacttaagctcatgagttcctgagtttgtagctataggctcagaggtggtgtacccatttaatatatttgaagtgtaatttttgcatgcatccaaacgtaattaagcttctagaaaataccttttttctaaatgcttctggggtccatagtgtggttgaattatgagtggagcaaattatattcatataattaactctgactcaaccttccttaagtagtagatgaagttgagtcaaagtggatgccaactgccctcacagaagacaacttttgggacttgataattcaggcaggcattgtgattgtcataattaaggaagctgtaaggttagtagggctggcaactttggctctaccttacatccaccccttttagaaaaacaagaaaacattttgtctggcactagtttctgttgtataagttttcatactgtttaacaagaccacagcaggtaaggattaatttttgagtggctgctggaattacttgatttgaatacttagtattttagtagtgtctcacacatttgccattaggtatgaataaaatattcctactgtactcctattccactaagttacattttgaacttagactcaccttaattaaacttaattaattggggagggggattccccaacaaaaagaagtacgggctcagagtggaattgtagtggacaatagttaaaaacaaagctgctccttttgcttgcttgatcattgggatttttaaaaaaaaaaattttaatgcatgtcttttaaattaattgggaactgtttttctaaaattaaaattttcttcttcctatagccctgccataggacaggctgaggctgagtctcagtgttgccctgttcagtctgaggcaagtgggatttattttattccttataggggctttcacagctttatggctgttggatatttatgtccccaaacttgcagcaagtttggtgaaggcccctaaatttaattaaacttaggatttttatactcttttggcagagaaggctctatattaatattcacgtttgactgtggtgttaataaacataagtatttcatatgcaattttatgtaatttgctgtgtgttacataattaacagcttcagtaaagcttgtgttcctatattgaacttcaataaattgacaaaatttgatatttttgattggaggcaagaaatgtttcattcaagttttttactttcacttctaggaaaatcttactggttttattttctccataaactattaaatttaacctcaaggataagtttaatcattggaaatgccactggatactgaaatgtgccttctcttttttgagacggagtttcactcttatcacccaggatggagtgcagtggtgcgatctcggttcactgcaacctctgcctcccggattcaagtgattctcctgcctcagcctcccgagtagctgggattataggctcccgccaccacatctggctattttttcaatatttttcagtagggatggggttttgccgtgttggccaggctggtctcaaactcctgacctcaggtgatccacccatctcagcctcccagagtgctggagtagcaggtgtgagccaccgcgcctggccaaaatctgcattctttttttttttttttttttttttttgagactgtctcgctgtgtcacccaggccagagtgcagtagcacgatctcagctcactacaacctccacctcctggattcaagcgattctcctgtctcagcctcccgagtagctgggactacaggtgcttgccaccacacccggctaattttttgtatttttagtagagacggggtttcaccgtgttagccaggatggtctcgatctcctgactttgcgatccccctgcctcggcctcccaaagtgctgggattacaggcgtgggccaccgcgcttggccaaaatctgcattcttaatcacaaacttacgcattgaatgttaaggctaaaaggtcatctggaaatgcttaattttaaaatattttcaagcctcaccacattagagcaaatgttaatgtagagccctgtaaaggtgggaaggtggtgtctatgtgtgtgcttgtgtatgtgggggtatagaccatatagttgatataacaacagaatttgggtgttacagacctttcagcatggatggattactaattttcaggtatcgaaactgaaatttgatacctgatcctgtggtaaagtatgttaaactatggttttggagtgattattttgaggttcattttcagcctcactgaacagtgttttacgcacatgtgaaaagtatccacatttgtttccaactaaaatttgcttttatttggtgagaaaagttgtgtgcgtgtgtttgttgtagggaataattagggaattggaagagaggccaaaaacaaacctgaattacttttgtttcttgtgtttgagccacgattctatccagatagcagtttactctgagcagtaacaatgaacaagcagtatagcatttagcaaacctggaattgtttgtatatggttttcattcttggaagcataaagaaaaaatatgcattaaatgaattgtaaattttgacttgttaaataacatgtttttcactataactaataggattttaatatttaaagaattttgttgcttccatgacaaaatatcccattggactattttataacctcagtaatcaacatttaagagtccttaattggagatctgttttctctattacctaccatcctgcaatatgctgaaatctttctaagttgcttatcttaattctaatggtgataattgaaaaaagtgtgctggaaatacaggctcttatctggttgagtactgggggtgggaaggatttagtaatgtcataatctgttgaaggtaatatctatagataactaagatagttcctttttttttgtagttctgtgactcagacaaataagattttgagaattatgtagtttttaggtgtctgtaacatccactagtaaaacttggcaaatgaaagaaaattgtgaagtcaccactttaactgagtcaaaattttgtttgaataagctgatgaaaatagacatgtaccctagaagtagatactctaaaattatacagacatgaatgtcttttttaaaaggttgtcattattgacctaatattgagtaatctttctgcgttattccaaattgaaatttgtttgctcttcattgtaacttttatgtaaaagtcctttaaaaggggattcaattataaggctatttgactatagggcagatttttataagtaaacattcccccaattccacttatgctaactgtctcatgacagtaaagtttactcctttttagaaaccctttctcagtattttaatttctgtcattgaatcatttaaataataaccttttgtttttatagcaaagaaatcatctgacttttctgtgtgatgtttcttggcaaaataagcacttgatgtatggtcatgtacataatggatattcattaattttgtgattagtgctgagttttctaaactactatcttaagctcttaggcaccctattatggatctaattcaaaccaatatgtaggaaatggagaaagtaggacttcagtttgcgcttcccaataactttaaatatatccaccttttccaagtgtttaagccctaaaacatctatctttatttttttacctggcatttttgttagaaaatagattacgttttaaagtaacattaaaaaaattcttcagtaagataattgcttttaataagtatatttttcttgctcttggctctatacatttttgcataatattttagtcttgaaaagcttttcattttcttaactctggaaaataatagtttggaactaaattagtttgagaaatctgaatcatctctctttaaatctgttcagttagtctcatgtattctcaggggaaaatgtctttattttactaagcggaagtagtagtcatattgaggcagaaatttgtagcccaaacaaggtaggtcttcgctgaaactaatttgaactattcctatttgaagcaaattgaacactattataaatctagactggctaattagatggaaactttgatggttaggttctttaagaggcatacaatccgttatgagaatgtttatgtttatgttttaatttttatcaaaataacctcagaggaggtacatgtgagtaaactgtcttaatggttgattacttggaacccacccattaattctaaatgatgtaatggtctataaggtagtaatctggcacagcttcagtaatgtgtgctgtgtttgtaaaaaggtgaagtactttattggcattttctaagccctctgacattgttagtgtctgggttggttggtttgcattttactattatggtggaatctgtgttccttcaccattggttaagtctgaggaactaacagtgaaattcattgatggccaacttggataaaaatgaagaatgatattttcccagtttactacacatggaccaatagtgattatttgggagagaacactgggtagtattgtttgacttaagaaccttaaatatattgaaaagtaatggcattcttgctcatgatttgcatttgttagtgaggtctcaccatagtattttaatgtagcttcttattaaaattttattcataaatagtttagcagtcacagaggtgaaaaaaaaaagatttgcaccatcatatccgagtctttactaataaaatgaggctgcttaagtacccaagtggagcaagggaagagttactacagttactgtaagtctgagttagaaaaaatacagagcatctagttattgagcaaagcccccttttacctgttcgcttattcaaagagaaacaatagaatttgcttctcagtacatgtttttaaaattgagaatctctgatgtgacaaaatcaatttttacaaaagttgaattaaaaacttttaaaaattgcttgtctttgggggtatgtctacatattcgtttaaatttagaaattcccacatgtttaagatatatgcccatcccctttttagagtaatcaaaatttctatcacagttcacatactggaatacatagtaaaattgagatgtgtccaagagattttcaatgttaattagctcattctaaatagccaatataaggtaacttctgtttaaaaaaaaaaaaaactagggaaaagttttaaatgtattagtatcaggctctgaggaaatttaatgcacattgactttttaaactatggattgaactcctcagtttaatacaatttgtgtttttgttaactagcagcagaatttcagcatttgctacttactggtagagaagaaaaatcccacagccctgccagtacaggttagtttaatctgtaagtacctgatgttcctatttttttcaaacatatccatataactcacacaaggaagaaagctgtgcggttacttaaatgttagtataactaataatagatccattggacactttaaacactcagtacttgggccaaagtagatctaggtttgctaaccccagttgtaataaaggtgtaatactgctcctttgttatctccttgtggttcaacctaagtagatacattgtacataaaaggaaaagacagtttcagttggctatgcccttgttgatagatgatatggagtccagggctttgggtccagggtcttttacttaagctatttcatggtggttctctcattcaccttttaactttttacattatgaatcaacctaagaaaaaaggcaagtttcctcacatctagaaatgataaatggtgtacagtcataagctagaatatgtttttataatgcttttttgttcttttagcaacacttgtaaatacaagtactcctctatttttgttctttttttgtaaactataacgtatcccgttggtgtaccagtgagttcattttactgtaaactaagaataacatacctttttaatactgaaagttgactactcatcaagaaatgtagctagattctttatgtaacacttttgaggggcagtggggacataatgggttgtggaaaatgtgttttaacatttttattttttttttattctacccgagttcattgttgtttgaaccatcctctaaagatttcctttaacctctaaatgttgtgcttttaggttgataacaaatgtaaagcactgaggagggaggaataaagcatacaagttaatttctaattttcgcaagcctgaaccatcctaatctgatagtaggatgtatggcttcttccttttcaccttgtgtgatgtttaatttgagacgatctagccataaaactagtaatcttgaattcctcttgagctggatggtgattagccattgtgaaaacagattatatggaaattgtgcatattgctaaattttaaaacatggatttatcaactgataataaaatatatcttacaagataaccacttgttttttaatgtaaaattgcacaagggcttaagtttcattgcctttcacagtttaatctgtatatgaaatggtgtagatacagtggaaatggttttccttaaaaccatctctttaaagctgcctttctggtgagtactgttttatacttttatatattataattttatcttctaaaattaactgaaataggacactttgattaaagaggtgagcactctgaatttctacatctttggatattacttgaatcaagaatattagaaaattattttaccacctggcatttcccttttaatttgctagttcacttttttctgaccttcacttaacagactataaatacaaaaactttgaacacataaattatttcattttggtgagatggaataaatgtttaaaattagtatttaagaaagttcttaaacattttttttagttggcagccaaaagatttttcttagtgctttggagacattgcataggtgtaaaattaagataccagaacttcattctgttcttgttgaagctgttgttgtggtgattcatgagcagtaagctggagttagagtggaagaagggtttaccaaaattcttcctgcagactagttgcttacagggtttctttgagaggcttaaaaatttcaaaagtattatttaagccactctaaccctgcatgaaaaattggagttagaaatactgatttctgagaccacgtataccagtgaaaattagcttctgagtaaatttctaatttatgccctgctttatttagcctcgctatatgtaacacatggattattttttccctctagtttttaactatatcctagattaaaaccagcatatgctaagaatgtttttacattctgtttcctcctgtgatctttctgaaccaataataaacagtcaactgtgatgctttttagtatgaacaatgatagttttctaaaatctgaaaatcaatacctgagtatgtgatgtggcaatgcattcttctagataagcactaaacaaagtatggaccctcaatttatgtctttaagatttaaagtgaagtaaatttctaaggaactgtgtcctttcctagcaggaataaacagtgaaaatttggtaagtatttaacttgaagtgcatgtaatagtgatgagagtaagtagccaaatttccgtaatataaggtaatgtttaaaagtgagcaataattattgcatctcttttgcgacttcatgtagatgtgattaacattttttacaaatttgcctgcataaagattaaattggaacataccttactcctttgtctggtttttttattttgtatggtgctttaaatactaattttatatttcaagctttttgcagggtagaaataagtggctgttaaagaaaatatcttcaagaaggattatttcagtgtccctttttaaaactcgatgatggctttcagtttatttaagtcttctgtttttcagctccagttaaaactgacaataggcagctatcaaaaatggaaaaaatcttgtgctctttctggaatattagaggaatcagttaataatagtaaagtggtattaacccaatacttgatttgcagtttttaaagcagtttttaaattgagagaaaaggggctgggcccagctgaggcgggtggatctcctgaggtcaggagtttgagaccagcctggccaacatagtgaaaccccgtctctactaaaaatacaaaaatcagccgggtgtggtgggacgtgcctgtaaccccagctactctggaggctgaggcag

SEQ ID NO: 86040 - DNA, 1411 bp, Homo sapiens
ggtcccctcgccggctgctgactcacggggggctcagcgtagggtgggagagtgggccgagccgggcccccggggatccctccctagccatgtccccggctctggcccgcacgagctggtctgggacccggagcagtgccggccggcgtgcttgtcacggactggtcctagagtctctacttgaaaggccttggcgaaaccagctctggacaggcatttcccgccgttgtaatcagcacagcctgctccgggtgggagcgcgagcgcttgctcttctctgggagtttccttccacgggacgctgggagctgctactcctcagccccacggcagaaagctccactaagaggagggtctctttcagaatgtgggaaattcaggggtgacacacacctcagattggcatttggtttgtggaggtggccgagacgctcatctgctctgtgtagggtgtaagagtgaggtgttggagcgggaccgcctggctagaggaggtgactaatctttccagactgcctgtaggggttggaagtgagttaagggagttagttgtcagccgcggagttcagggaattctttggaacgggtcggctgcatgttgccggaaaaattaaaatttcttaacgctgtaataacgatggtcttacacctacacacaacaggaaaactgaaatgggaatcccagccagtcgcttccggcagctttctgttgggattcaagtgtgaacagaaatttattacgacagaagaagacgttaatgttcactcataaaggattcaattagggcttggactagctcttcactgcacatgtaatggcatctttgtagtgtagtttgggaagatctgaattggctcaacaagtagtatgagaatgcacctgtatgtgggacttgcaagatgttggcatttgacttagtgtgttgaattttggtattccagacctgcacggagaaaggacaatgacaagatcttgatactttatcattggggatactagagaaggagaggaagtgggcgtcaaggtgtatctttgaatgatattggtaaaaggtgtttcattttaaaagttctgatcttaggtcagttacttctacggaaccagagtcatctcaatcaccgttacatggatattttattctgagtacacactattatttagaactaatgtgaggagcatgaattttaatagtctgtgtctagtgtctaatattttttctttcataaagtagaaattacgtcaaatattacaattagagtatttcctgttggcccactattctaggggagagttccctgaaagcttcactgttagagcaagcttgagtcatggtggttgacggccttactttttctggactccatcatggtttttgtcaagtcatgatgctttgtaagagtagtagtaact

SEQ ID NO: 86041 - DNA, 1029 bp, Homo sapiens
ataaatgaagcagagacatgagcttttcctgcaacttcatagtaatccagtggctgagtagggaacagaatgcaaatttggtatatgatgttaacttatttttgctattctgctatttgctaggaatgctttaaactcctagtaagtttcacttagactgattccagtgatgtaagtaccgatttttatgacgttgggtcagtttcttaagtgggtattttgtctcaaatgttgatgtttactcctctttttgaattgcctttcctacagagcttggaggactcctgaagtatgtacgacccttcttgaattccatcagcaaggctaaagcagctcgcctggtccgatctcttcttgatctgtttcttgatatggaagcagctacagggcaggaggtaagtgatattaatgacagaaagtagacaatatggagaaaagtttgtttccaagaaagaaatgcctacctgcactttagtactaatgtggaagggaaaactgggaggacagcgcaggacttatcatgtcagtttctctttgttacagggcatttgatactttgggtctgttccatgctttgctttgtaagtggagattgtcagtggtccctggaatcctcattacatcagggtcacaaactgattcttgtctttgaggtattgtattgccacacctttgtaatgttttctgtgtctgtggtacctttcatcttgtgtcacaaagctccttctgagcactaattaagtcttgtggtattccttcttagcatgttttgtactgcatatatgcctttattgaggggtgagcatccatccatttgtgtctcattgtgcagaagtgactctggtgttcctgtatgtgtcccacaagttcagactagaccctgagctgtattaaagagtgcttctcagtaatcactgaatcttccaaccttctcaaagataactgtattttctgcaattcaggaagagacgcataccaaaattaaacatcattctgtaaaaagtggcagattgaagcagggtatattgt

SEQ ID NO: 86042 - DNA, 1093 bp, Homo sapiens
tctctctttttttttttttccccgagatggagtcttgctctgtcacccaggctggagtgcagtgttgcgatcttggctcactgcaacctctgcctcctgggttcaagcaattctcctgcctcagcctcccaagtagctgggattacaggtgcccgccactgcacctggctaatttttgtatttttagtagagacggagtttcaccatgttggccaggctggtctcgaactcctgaccttgtgatctgccggcctcagcctcccagagtactgggattataggcgtgagctactgcgcccagctgtggtctctctttacaactaccatctagtttggttcttaatttttttttacttggactactgtaaaagcctcattccatcattgtcagagataccttaccaaatagccctctgataattttattcctctccctcttctcccacaactcaaaccttcagtggctttccattgcctgcagaattagataattaatggttttctataatacaacctactgcaacctactgcagtagtctaatctcccaggactctactaagcatatcaaatatgtcagccatgttggatccctggctgtttgctgaacaagcctgtataaccctcatgctgtacctttctcttccatagtcttatctcaagttctacctcctctgaactctttccttcctgactttaatgtggttttaactctttcagtgactcacattgtattttgtacatgctctgagtattctgccttgtatgacagtggctttacacttgccttgtctcctttactgtaatacaatctcactcaggtgaagcactatgtgccttgcagtaccacagagccttcctcattcccagtacagttcaaattccttaaccatggctacctctgaccacatccactatactagtctccttttactttctttacagctgtaattactggccttattgccttatgcttcaaactgtctggggttgggacattcatatacatatggattgctgtcagcttgatcttaacaggattttttttctttacactgtttcaagtctttgctcacatcttacctcctcagagac

SEQ ID NO: 86043 - DNA, 1431 bp, Homo sapiens
ctctggactcggcctcccaaagtgctgggattacagatgtgagacaccatgcccagccaggaaatactttgttgaattaagatctgagtttattgaattgaaatgtaagcatggggtgttgttactacattcgtttaggtaactcaaggtctctgacttggggaaataggatataatttttattcttagttcttttttctttttgagatggagtcttactctgtctcccaggctggagtgcagtggtgtgatcttggctcactacaacttctgcctcccgggttcaagtgattctcctgccttagcctcctgagtagctgggattatagtagagatgggcttttgccatgttggccagggtggtcttgaacttctgacctcaggtgatccgcctgtcttggcctcccaaagtgcctggtttataggtgtgagccaccacacccggccttgttcttagttcttttaaaattttttgactgggtgttgggaaagaatagacaagcaagtcataggtgggaaagaatagacaagcaagacataccatggctatcatggtagtattgaggcctgaggcaaaatgggaagttttatttatttgaaatgggggtcttggtctgtggcccacgttggggtgcagggtgcaatcgtagttcactgtaaccttgaacatctgggctcaagcatttctcctgcctcagcctcccaagttgctgggactgcagatgtgcaccactacacctggctaattaaaacaatttttttgtagagatagggtcttgctatgttgcccaggctggtctcaaactcctggcctcaagtgatctgcttgcctcagcctcccaaagtgcctggattacggatgtgagtcactgtgcctggtttaaataagacgttttagaatactgttaagacagctagaattttgtgttaaggagtttggtactgagaatatgagggaggggatttcccttgcttttttctatttgaggactaactataagacagatatatctggtcaggcatggtggctcacgcctgtggtcccagcactttgggaggccgagtgggcggattgtgaggttaggagatcgagactatcctggctaacacggtgaaaccttgtctctactaaaaatacaaaaaattagccaggtgtggtggcgggcgcctgaagtcccagctactggggaggctgaggcaggagaatggcgtgaacccgggaggcggagcttgcagtgagcgccactgcactccagcctgggtgagacactgtctcaaaaaaaaaaaaaaagacagatatatctagagaaccatcttcagcttgctattcccaaagttggtatgattcaggttatgatctgttcatttaaatgcaaggtttggagcctagaaagtgagggcatgtgagtcggggagtgagagagtgaggat

SEQ ID NO: 86044 - DNA, 7392 bp, Homo sapiens
tttattgaaataaaacttacagaggaatatttctaagtcctaggtattcatttttgtgtcctttgaaaaaactccctgggtaaaactgtggggggcacttcttaccctttgaagtcatgtagaactaaacacttatatttcctttgctaagactattcagagaaatattttcagttccatttatattagaaatcttactttgaatttagcttttcagaatataactcaaaactctgcaattgtgataaagcttgcttttattttagtttttggttctgtcttatttttaggtaatttttatgaggtcagttgagtttagagttggagattaggtagccaccagggggctccagtgaggagttgtaaaggttttgttggttctcttcctggtgaatcctctgaatactgtgtaatgttatctattaatttatttacagagctagaatttaggatctaaaagtagaagatcctgtcaatttggattatgtccctatagtttttccttcttacagcatttcttttcttttcttttttttgagacggagtttcactcttgttgcccaggctggagtgcaatggtgcgatctcggctcaccgcaacctccacctcccaggttcaagggattattctacctcagcctcccgagtagctgggattacgatcatgagccaccatacctggctaatttcttctatttttagtaaagacaggatttctccatgttggtcaggctggtcttgaactcccgacctcaggtgatccacctgccttggcctcccagattgctgggattacaggcatgagccactgcgcctggccagcatttcttaagagaactttggatttatataaaaacctgttgtattagcaattagttctctggagagctcagtttctcatttcatttcttttgctcttatgctctagttagcaaccttaatataaaacttgcagtaaccaaagtgatagaagatcttcagtacttaatatttactttgtcaaagctagcatgtcagggatacctgatggcgtgctagactgtctagcattgagtgctgctttaagtcagttactttgcaccttacctcactacttaggtggcagatagtagtaggggttcagagtgcctttaaataaagcttaaaagcgcttttacgtgttaggctaattctaatttcttttttttttaattaaaaaaattttttttaagactagtcaaagtgcagtagtgagaagcagggaaagagtagatcaggagctcaatctgtaactgactgtgaacaatcgagattactcattaccttcagaccagcttttatcccctttaatgcaagctaggttactgtacctgtttgctttaagagtgatgatgaattgattagttgcactgcttagaatctgaaagggaaaaagccagctggaccttttgagtcttaaaagcaactgctaggaatgaggcattagtgcttaggatgagaatttctcccctttattacctgtgtattatacattaccattactatttctaaccagggagaaatctgtgctttaaaaattcctaatctgtcatagaaatctacattccaggtctatacatgttgtttggaagttcttggtctctcctcagtaggtaggagtcttgaagatagagctcttttcctaaaaaacataatctaagcacaaaaatattttatgtgtaaaaagccaagttgatgctccattatgatataactattacacattgagatactgtggatcagacactaaatagagcaacatggataatatgtaaggagggaatttaagctgttctccaaagcatggtttgtgggaagaatttgaggacataatgttgcatgtactgtctctccttattgcaggtcgagctgtgtttagagtgcatcgaatgggccaagtcagagaaaagaactttcttacgccaagctttggaggtaggttttacattagtactcatttcaggtctctaagcatgagacagagggtgaatgtaagcagtaccatccttatcaaaagtatcttcagcaactttgtaattacctagataccgaaagattattgatggtagccccacttatgataattgctctgattgaagttttgagacagatttgctacttggctcagagtagtaagcaacaacatggtaaagttaacagtcatttgctggctataataggagacaatacattggctagatcgtctcttatgctgaatttgatgctatcatcagaaattgcatatttaacagtaacagttctgtgactgtcaatctttgatttctttctgtggctttttccccccccttcaatcaatgccttttctctttcctaggcaagactggtgtctttgtactttgataccaagaggtaccaggaagcattgcatttgggtaagtaagctggtaataagtcatctcagctagctaaatgaatgtattctaaaccacctggctactcttactaattacctgttaataatttatattctactgacttctaagaaggatttaaagtagcttacagttctgcatttgtcatgggaaaatgtcatttgaaagtttaaaaaactagctagagttaatctgtcaaatttagaggacaaatgggtagttttaagtttacttgaatttggagcagtaaaatcaattccattttaataactgaaatttaaaaaaagtgtatctatattttgcatatagtactctgttaaatttcagatttaggtttttaaaggcaaatgtttggcttactgtcctatttactatatctgcttatatacttaaaatctattttaaaaatcaagaaattaattgggtacaaatatatttggaagctggagtggctaactgaagcctttttcctgtgtggcctttaaacaccttgaaatcttctctgctttttttttttaatctatctatctatctatttattattattattattattttttgagacagagtcttactctgttgcccaggctggagtgcagcagtgtgatctcagctcgctgcaacctctgcctttcaggttcaagcgattctcctgctttagcctcctgagtagctgggactgcaggcatgtgcctggctaatttttgtatttttagtagagatggggttttgctgtgttggccatgctggtctcaaactactgacctcaagtgatctgcctgccttagcctcccaaagtgctaggattacaggcatgagccaccgtgtccggccactgcttgctttttatgagtgggtagatctggactattttttccgaacaaaagaacatggctcttatgatctattaggttgaagagtttccaatattcaatttttggactgcaaaagtggcaatttcatatggttcaaataggagcatttaaaaaataactttaataagatatggttcacttaccataaaattcacttttaaagtgtataatccagtggttttcagtgtattcactaagttgtacaaccatcaccactacttaatttcagaaagttttcagctgggcgtggtggctcatgcctgtaatcccagcactttggaaggccaaggcaggcagattgcctgagctcaggagttggagaccagcctaggcaacatggtgaaaccccgtctctactaaaaatacaaaaaatttgcaggacatggtggtgcacacctgtaatcccagctacttgttaggctgaggcagaagaatcatttgaacccgggaggtggaggttgcagtgagccaagattatgccactgtactccagcctgggcaacagagcgagactctgtctccaaaaaaagaaaaaaatttcagaacttttttttttctttgagatggagtctcactctgtcgtccaggctggagtgcaggggtgtgatgttggctcactgcaacctccgtctcctgtgttcaagcgattctcctgtctcggcctcccgaatagcagagattacaggcacctgtcaccatgcctggctaatttttgtatcttttagtagagatggggtttcaccattttggtcaggctggtctcaaactcctgacctcaaatgatctgcctgccttggcctcccaaagtactgggattacaggtgtgagctaccgtgcctggcctcagaacatttttatcaccccagaaagaaacttcctattcattagcagccctgggcgattactaagctatttgtatctttgtagatttgtctgttctgggtatttcttaaaaatgaaatgatacaatatttgtttctctgtgattgtcttctttcacgtagcattatgttttcagggtttatgttgtagcatgtgtcagtacttcattcctttttattgctgaataatagtcaattgtaaggatatatcacatgtgtttatccattcatcagttgatggacacttgtgttgtttctacattttagctcttaagaatactgctatgaacaggttttatgtggacatgttcttctgggtatatacctagaagtggaattatactgtgtcatgtggtaactgattagctgtttaaggagctgctaagtaagctgttttccaaagtggctgcaccattttacattctctttaacattgtatgagggttccaatttttccatatccttaccaacacttgttattttttaattttagccatcctaaatagcatttcattatgtttttgttttgcatctccctaatgactgatgatgctgagcatattttcatgtgctttttgctccttcgtatgtcttgtttttttgtttgtttgtttgtttgttttttcttttgagacagtctttctttgttacccaggctggagtgcagtggcgtgatcttggctcactgcaacctccacctcctgggttcaagcaattctcctgcctcagcctcccaagtacctgggattatgggcacgcaccaccatgctcggctaatttttgtattcttagtagagacgggttttcaccatgttggccagcctggtctcgaactcttgacttagtgatctgcccgccttggcctcccaaagttctaggattacaggcgtgagccaccatgcccggccttttttttttttttttttttcttgagacactcttgctctgtctcccaggctggagtgcggtggcacgatctcggctcactgcaacctccacctcccgggttcaagtgattctcctgcctcagcctcccgagtagctgagattataggcgtgcaccaccatgtccagctagtttgtatatttttaatagagacggggtttcaccatgttagccaggctggtgtcgaactcctaacctcaggtgatgtgcccgccttggcctcccaaagtgctgggattacaggcttgagccactgcgcccggcctcctttatatgtatgtcttcagataaatattcagatcctttgcttattttttaattggttatttgtgtttttattttttagaaacagggtctcactctgtcacccaacctggatggagtacagtggtgcagtcatagctcactgcagcctggaaatcctgggctccagcaatcctcctgcctcagtctcctgagtagctaggactataggcgtgtgccaccacacccagctcttgtttttattttttattctgaagttcttttcttttttttaagtttgttttaatgtcgggtacatgtgcaggtttgttacataggtaaacttgcgtcatgcagtttgttgttcagattttttggtgctcaggtgttaagcctggtacctattagttatttttcttgatccttttcctcctcccaccctctgataggccttagtgtgtggtgttcccctccgcgttcaggtattctcatcatttagctcccacttacaagtgagaacatgtggtatttggttttctcttcctattttagtttgctaaggataatagcctccagctccattcatgttcctgcagaggacgtgatctcgttcttttttatggctgcatagtattctgtggtgtatatgtacattttctttattcagtctgccgttgatgggcatttaggtttattttttattctgtatacaagtcccttaccagatacatgatttgcaatttttttttctttgttctgtgggttgtttttttccttcgatgacgtcctttgaagtacattttaattttgatgaagttctgttacctgttttttgttgttgcttatgcttttggtgttacatctaagaaaccattgccaaatccaaagccacagggatttatttctgttttcttctagaagttttataggtttcactcttaaatttatgtctttgatccattttgagtcaatttatgtatatggtgtaagtctgtttgaatttgatattctagtttgagatgggggagtcagggaagaaggtatatttggagaacattggtatatctagaactctttacttccttcatcaacctagtgccccagtgtttcttatatagccttgtgattgctagacaagaagagagcgagattgtgtctttctgaactggataactagatttagcattttataggtagagattcccactgtatttaaatcttaggagtaagctcataggactgttggctctaatattgtccttaggaagcagaaaacttcaaagaggtgtgtttttctcttggaagatagcacattagtggaaaatttaattattgcatggggtctagaggtaaccttttttgagttcaggaatttttttttttttttaatcctgagtgttatgagggtgggagagtgagctattattaggtattaagctgatggctataaaggagaatgtcttttcctttttcaggttctcagctgctgcgggagttgaaaaagatggacgacaaagctcttttggtggaagtacagcttttagaaagcaaaacataccatgccctgagcaacctgccgaaagcccgagctgccttaacttctgctcgaaccacagcaaatgccatctactgcccccctaaattgcaggccaccttggacatgcagtcgggtaacagacgtagctattcctgggatgtgttttcttaaagctcatcttattttataggtggaaggaatgggggttggggctggagaataaaattggctgatttggctctagcttcttcagagaaccagttagaaagctacctttctaactagctgctcccctcctgttaactgcctaaaatgtattaagaacatacctatctgtggttgaccaggcaatctgacttttagaaccaaacttagaaaggtcgcacgtagaagactcccttagctcttagccacttactcagaatagtagcattttcctttgggattggcctaccccaagtctgttgactcttggagatctttgtaaagttggttgact

SEQ ID NO: 86045 - DNA, 1470 bp, Homo sapiens
aaggcttcagttagccactccagcttccaaatatatttgtacccaattaatttcttgatttttaaaatagattttaagtatataagcagatatagtaaataggacagtaagccaaacatttgcctttaaaaacctaaatctgaaatttaacagagtactatatgcaaaatatagatacactttttttaaatttcagttattaaaatggaattgattttactgctccaaattcaagtaaacttaaaactacccatttgtcctctaaatttgacagattaactctagctagttttttaaactttcaaatgacattttcccatgacaaatgcagaactgtaagctactttaaatccttcttagaagtcagtagaatataaattattaacaggtaattagtaagagtagccaggtggtttagaatacattcatttagctagctgagatgacttattaccagcttacttacccaaatgcaatgcttcctggtacctcttggtatcaaagtacaaagacaccagtcttgcctaggaaagagaaaaggcattgattgaaggggggggaaaaagccacagaaagaaatcaaagattgacagtcacagaactgttactgttaaatatgcaatttctgatgatagcatcaaattcagcataagagacgatctagccaatgtattgtctcctattatagccagcaaatgactgttaactttaccatgttgttgcttactactctgagccaagtagcaaatctgtctcaaaacttcaatcagagcaattatcataagtggggctaccatcaataatctttcggtatctaggtaattacaaagttgctgaagatacttttgataaggatggtactgcttacattcaccctctgtctcatgcttagagacctgaaatgagtactaatgtaaaacctacctccaaagcttggcgtaagaaagttcttttctctgacttggcccattcgatgcactctaaacacagctcgacctgcaataaggagagacagtacatgcaacattatgtcctcaaattcttcccacaaaccatgctttggagaacagcttaaattccctccttacatattatccatgttgctctatttagtgtctgatccacagtatctcaatgtgtaatagttatatcataatggagcatcaacttggctttttacacataaaatatttttgtgcttagattatgttttttaggaaaagagctctatcttcaagactcctacctactgaggagagaccaagaacttccaaacaacatgtatagacctggaatgtagatttctatgacagattaggaatttttaaagcacagatttctccctggttagaaatagtaatggtaatgtataatacacaggtaataaaggggagaaattctcatcctaagcactaatgcctcattcctagcagttgcttttaagactcaaaaggtccagctggctttttc

SEQ ID NO: 86046 - DNA, 1079 bp, Homo sapiens
ggttggcagtagtagcaggttcaatcaaagttaagctcattgggagcaactcaacttctaagcaataggggattggttaggtcaactatggtatatcagtctgaagaaatactgcttagccatgtataattaagttcatggatttggcattatgtgaaagctgtacactgagtgcatttaggcaaaagcacatccacaaatgataaatatttgaaatgaaaatataagatgttggattccctctcccatgccccatgacagttgcataaatataaaactatcaggcttagaaaagctatcttaaagtagttaatattattagaacaggtcattcaggcagtctagagatgtttaggtcaactccctgacctgtgaatgtgatgtcatggagggtaaacatggccttttcctgtggctccaaaagatagcaggactggaatggtggtgagaagcatggaagaaagatggtacagtatgtgtttttcaggtcccttttaagttgagtctctaactcctttgggaacttatattggcaatatgacattgagctgggaggtcagagacttggattctcatcttctaatctcagctgtcaaattgctgactatggtgactttgggcaggtttttttttttttagacggtctcactttttcacccatgctgcagtgcatttttgctatcacagctcccatcgctatcatcagcctcccaggctcacgtgatcctcctacctcagtctcatgagtaagtagctggggctacaggcatgtgccaccacgcctggctaattttttgtagagatggggtttcaccctgttgcctaggctggtcttgagctcctaggttcaggtgatccacctgccttggcctcccaaagtgttgagattacagatgtgagccactgtgcctggcagagcaggttctttatcctttcctgacctcatcagtaggttggtggagttgacgtagagtttttttttttttttgagacagtgtcttgctctgttgcccaggctggagtgcagtgacgtgacctcggctcactgcaacctctacctcctggattcaagtgattct

SEQ ID NO: 86047 - DNA, 3116 bp, Homo sapiens
tagaccttgttcagtgccttgttccaaacctagcagaatgaatcttgataaagcacagatataatagggtctaagggcaagaaggagtttgggtggatgtggcgataacaagccttggaggaagggagaagaaatcacagttctcttgtcatttttccttttagcttgtcatctctagagaatgctatattagggtcggtctgtttggaaaatttctgtttcctagtattattaagtcatttcaggtttcaaagggaaacaggttggcatatagtggtattcagtacttgcggctcttcttcccgggcgtctgaagaagaacgatggtggggcgggttcttccttttggcagaagttgtgtggacacagcatactgcttatgagacttgggtaaatgttagtgtgcagaataaatcgctttcatggtttgtctctttattctcagacagaagcattaaaatgcgtggctcaggctagcaagaacagatcactggcagattttgaaaaggtgagtatgatattgggttggtatggaatgtgagtggaagagagggacgtttaagtacttcaaaacacacttttaaaaataattatagtttcaaaagaagttgcaaatgattccatgtatccttcacctaggacagtattaaaaccaggaaatagttaagcactttgtacaatgaaacttactgagttgatataaaatatatattatttatacataatacctttctatttcaaaagttctttctgtccttttttcactttgatttttcacaacacacctatttattatctgcattttatggttaagggaactgggattcaggaggacactcaaagtcacacagcatagggtcagagtttgactctaggcctagtgcttgttccacatgacacagttgtaggcattccttcagctccagaaatgccaggtctgctcctctgtggacagaagggaagtcttgatgtgcgtacttggacccaaagaaacgtcctcagggtgatgatctaggctttctttaaccctggtgcattttgctcattgtttgggagttttgaaaagggagaaaagcctgtctgggcattagggtgagaattatatagtctttcctgaacctctctccttttagtctgagtataatgatcaacttaataaaaacaaaacctagatccagagagaaaaacttagtgtggatggagactagaccatgtggctttgactgtccctgagattcaccatcttcctggagggctcttgccaattcctattgcgtcttacttggcatgattcgcctgcttcccttaacaccttgtagcacagctgacatgaggctgggatgttgagaccattactgatggtccagtaaatcacacacatgaatacttggtctagatcattttatcccaatgtctgagatgtttgatgggacacttttattccaaatagttccttggaagaaggattctgtgattagatatttgggaaatactagggctaaacaaaatactagggctaataataattaaaacacctaattttgcttaatcattgcagagccatgttatgctgatggtcctcataaaactcccaagagctagttgtggaattcagcatttcctattctttaacctcaatgttctttttttcccccccatggagaccctatttattctgtagaatacatgctgagaaatgcttgtgtagctaatttggttcatgagctgagttgctcttggggcttacatggtttgagctgttcacctgaagcctgcagacagaaagatggtccctagggtgactccacctttttgttctattttgtattttttttttctcttagagactaccataaaatagcatttttaaaaatttatttttagagatggaggctctctgtgttgcccaagctggacttgaactcttgggctccagcagtcctcccacatgagcctcccgagtgactgggactccaggtgcgtgccaccaagccaaacttccctttcagttcttgacattccttttctgctttgtatcatgcatctccccagatctcccctaacttcattcaaccatgtagttttataagggccagcagactatctaggaagcaggagtagcatgactttaaagtgattctctgtgccaatctctgcaactggttcctttggcaggctctgacagattaccgggcagagctccgggatgacccaatcatcagcacacacttggccaagttgtatgataacttactagaacagaatctgatccgagtcattgagcctttttccagagtacaggtgagaaccctctggggactccatttctggccaggcattctcactgtagccacctcccttccacacctgtccagaatgggaactcacttctaggggtgtgcctggtgggcaagaggccaccaagagcttgggcctctgttgataaaatgaacaaaaatcgaggagagagatgctgtgggtagaggcatgtgggttgcccctgcatgtgttctgagcagtttcctcctcgcttttagtcactgcatgtgttgtacctgttttctgtattgggtgtgtgggataagagtctgtttattgtgtgtagcagtgaagggcaggcagatgggcagagaacaagagacttaagcacggccaaggagggtcttacattagaattttgagaaatacagcagttctccccctgttccctcccttctcttattggaggcaaaagtaaaactttcagtgttggtgtctctctgcctttccttttagattgaacacatatctagtctcatcaaactctccaaggtaaggagtcttaaggccatctgcagggaggaatgggacggggtggcgaggaggggtggcacatgcacctgattggcctcattggaaagctccccagcttctcagtggggaatgggcagtgtggactagagtaggagttgcattgttgctattttgttttcagtccatttggcctaagacccctccaacaaagctactgtgtcagggtgatctctgactagtggatactggtccctttaatcatgtgctttgattttaggccgacgtggaaaggaaattatcacagatgattcttgacaagaaat

SEQ ID NO: 86048 - DNA, 2443 bp, Homo sapiens
tttattttcaaagaagatgttctatttgtttcccccgatggttcaccctggggtcctggcccctcttccctgtgatgagaatgtgtaataagcatgtgtacatggaatagggagatgaattctatttcccttcttttctggacacagtgagtcaactagggagtgggctgcttcacaaacacttttgtgtctaacctcatcttttacctgggttgcccttgtgtttcttgcagggattttggaccagggggagggtgtcctgattattttcgatgaacccccagtagataaaacttacgaagctgctctggaaacaattcagaacatgagcaaagtagtggattccctctacaacaaagccaagaaactgacataggtgagtgctggcttcaggaccccagggctgggcagctctgtcttctgcgtgtcgagactgaaaacctcctcctggtgtcctcatggcttcctgattgacactgctctgtcttctcttgcagagttggatctgtagcggtcctttggagagtgtgtgtggcgggagagtgaaaccttgggggaaaatgctaggagattcttttttctttttgttctacttttcgctcggaaagtttttaaatcctcatttggtgcatctgtattccagccaataggtgtgccagttttcatgtaatctttactggcccaacttgggagtggggaaattgcttaaaaaaaaagaaaaagaaaaaaaaaaagattattctaaataaaaggaaaaaggcttacactacctaaagctgtgctctctgcctcctgggagagggccgcaaagccaggcaccccgccaaccactgggggtcctaatccacctgctgggcatcacctctcctcctcctcagaattgggtgtttgctgaccatcaaaagcaatgactttttattctgtttgtactgaaccaaaacaaacaactgtgtatagactgctgttttcttttttatttgaaatgaggcattttggtgttctttcccctaccatacggcctgtctgcccttccctccccacattggctccagcagagtagccgaaggtcctgccgccgccgccaccaccaccaccactgcagcaacaacagcagcagcagcagcagcgcctgcatagctccactctgacctgtgaaggaatggggatgaggccaggagctagtgtctaccacggccacacagggagcagtgtgggcccttagcccccaaggggcctgctatgcatgtggctttttttttttttttaaacacagtaaactagattagtcgtcagtgttttaattgcccctcttctcctctcctgcattcctctcctctcttctttcctctctgtcccttctctttcccctctcaaccaggagaccatcatgtctctctgccttcctcctctcccctccaggggagtcaggctgtctgtgaaagccatgagcttctctccctctcccactcctcctctcctactttcagatggatttattccttttttaaacaatgaacatcggaaatgagactgtggggtgtggtttctctctctcttttttttttaattttctttgttgggtttttgagcaacctcatgtccccttcccagggagctttttaatttacctcttagaactcaagtggatgggaagtagagcactatgtgtcagtatgctttgttttctgacacgattacacagcgaggctttaatgccatttgggtaggtgagcttctgcacttctgttgtgctgaactgtattttcttctctcatctcctctttgtctttttctcttttcctctccttcctgccttcttctgctggcctccttttctctttctttaccttccttggattatccttccaggttttcataataaatttatattttgtaaaaggattttgttgtaccaggttttgcatcctcactgaatctgactggcttttattttcctctccaaaatcaggtttttgttctcaacatctttccccatcatgtctagtcactgttttggttttggcaccatcagtatcaaatgtacaaacggttcttgctaaccaacaccaggtatatctgatgttcagatgagttccaataaaaataatttttttttttttcaaaaggtgtctttttcttgagtgctggagggcttccaagcaagtccagacagctctgtgtggccccacactagtctagctctcatctggccaaagctgttatctcatttgtgtaatgggagtccttaaggtaaatttggggtccaaacttggagggctttgggggcaagaaagttggtgtgtgagttctgaggttggaaatgagttcaggtgtcttcttccagggcagcatggtccagtgagcacatgtaagtttgggcagtagatcctctgagcctactttctcttctactcagtgaggatgctgcttccttggcaggtga

SEQ ID NO: 86049 - DNA, 1063 bp, Homo sapiens
acaggcaattggtgagggtgaggcatcgtgagactctgaggctggaaggaacttagagattccagccaattcagcacagtggtcagacttaaacagaactcatccctaattgctcagttactgctctgtttgtaaagaccagcagaggaatatattccacagttcccttggtgatttatttaatgatcttaaacatcctgctcaggaaacttggtcctatttctaaccaaaactgcatctgctgtggtttcttctagttctcagagactgtgggaagcagctgtccccatctagtgacttgccctgtgataccttcacacactcatcctctgaccttttatctctcctttattcccggatcttattttctggctctttaatatattcaagttatacgtgctaaagatcagcaacagttcaaaagctctcggagcaggatgactactgtgttgcatttactttctcagtctgtaaagcaactggaaattcagatttaactagagaggagagttaccaatcattgctcatctctccaagactaatgctttgggagagaaaaggcattatggaggcagggaattcacactcctgggcgtctcccattgctcatccagtgggaggtgacggttcccagtctcagtctggggcacttcctttcacttcccctgggtgttcaccattgtgaggaacaggttagatggggaagagctgcacaagaatttcacacagtgtcttttctgtggcagatactattgcagaattggtcatgcaggtctgagaacaccacatgtaagttaaagtacaagaggcctgtgtgtccttgggcccagtgcacctgcaaacacttcctcgattagtcagcgcttagctgacttagtgtcttggcctagagcaatactatccccaattaacaatggaagtgaaatatgcccattgctgtcttcacccagagaaaatagattgctcatatattacttcttccatacactcacatggaaatcagctgaagtttctatgacaccaggacagtcagcagctctgccataaaacattttagtcataa

SEQ ID NO: 86050 - DNA, 1016 bp, Homo sapiens
ctgtagtcccagcactttgggagaccaaggcaggaggatcacttgagtccagcagtttgagatcagcctgagcaacatggtgagaccctgtctctacaaaaaaatttaaaaattacctgggtatagtggcacacacctgtagtcccagctactcaggctgaggcagggaaggattgcttcagcccaggaggctgaggctgtagtgagctgtgaccattccaccgcactctcgcctgggtgacagagcaagaccctatctcaaaaaaagaaaaagggaaaagaaaataaaaaataaaaaacattgccactgttctgaaaacagtgagtagtccagagtggcaagatcagagattgtgttgagaggagtggcaagaactaccagaaaggtatgtagatatgaccagattgtcaaggaacttgaagggaatgtaaatgagtctgaagttacgccaaagcaggaggaagtcatcaaggaaacatgtagagtgaaaaggggccaggatggacccctaggcaattcctacatgtaataaatgggaggtcaaaaggcaggaggagacttaggggaagtactctcccagaaagaagacaacaaggtcaaatgcctccgcattaaaggagacctagccctagagcagtccctttgatttggtgacctttgaaagcaccttttgtaaaagcattgagggtaaaagccaaattgcatgctaaaattaataaaaagattaaatggaagtatagtctgatctttagagtattatctctttctattacaaattctgttatttcaaactcaaaagctaatttttcatactgcacaagttcaggaaacccagttccgaggatctgttctgtaggtgagaacctgaaaatctaactgtgggtatgtcctaaactcggccagctagtgctgattcccagatgagcagggttctgaagttattattctatcaggtgaaagtagtaaccttgtaaatgtgggtgtttgatcctgagaagatggggtatagtttcct

SEQ ID NO: 86051 - DNA, 1149 bp, Homo sapiens
ttagtgtaaatctgctcagtctggttaatttctttctcatgcctcagtggcatcagttagaataaggaatagagaatttcatttttgagaaataactttacagtatgttactgttcagggatacggcagacctgggatagagaactgaacccttgtgggaagggacgggcagcaggtagtataaggttagttcattcttggggaggcaggtcctgatgacagagaggggagggtacctgacgaaaactttgctcaattaaaaattgtgtctctggtttatctttgggtctagaagagagagagaatttttttttcttcttttattttatgctcaattacagaacttccaagacacagcacccagtgtgtgtggtgaatactgtggccctaacatttgggtttaagggacattactgaggagccaggtgcaatgacccatgcctgtggtcccagctactggggaggctgaggcaggaggattgctcaagcctatgggtttgacactatggtcacgcctgtgaatagccactgcactccagcctaggcaatatagtgataccttgtctgtaaaaaaatgaaaaataaaaagagagaccctagagagccagactatgactctaatcatggttttcaacattcttattgaaatagaatggtctggttttggaaagtagatcattttttaagtgaagggttccagtaagtgacttcagttgatggagaagggaatcaagaacatctgctagttcctcttgatattttgtccaccttccaggctcctcattgtcctagcctcattcctgaagatatcccagtttgtattccaggcacagctgcccacatgggactagttacaattatcccagcatgggattgcctttattttcccacatttctgctccttgatacacaatatagaaatggatttcactttaatgagattaaagcattaactctagtaaagctattctgctttaataaaaagattgtttactcctgaacataggtttttcagaaaaagccacaggccagttcagagttctaaaagaacctcctggaatagatggataaacacaccaaggaacaaacacagctttccttttattcctcctctcctcatatctctcacagttatattgttaagtcttg

SEQ ID NO: 86052 - DNA, 1755 bp, Homo sapiens
cgaagaggtgacatctcaatgaagacctggagaaaggtggaattttctattgatttaaagaatagttcaagaaaacaacatcaggaggctgagacagaaggattgcttgagcccaggagttcaaagctgccgtgagctatgatcacaccactgtactccagcctgtgtaatagagcacgaccctgtctcttagaagaaaaagaagaaagaaaacagagagagacagagacacaaagagagagagagagacagagacagataaagaggaaggaagggaaggaaggagagaaaagaaaaaaagaaaggaaaagaaagagaagataaaagccttataaagcttaggtgattatttgtcaagtaattatagaaattgttctggaagttcagaagagagagagataccttaggttgactccaaaacaccttatagaggaagagaggagttgagctgagttccaaaggatgggtaggatttgtaaaggtggactcgtggctggagagcattccaggtggattaagcagcatgagcaggggttggcggcatgaaagctgactctgggtgacagtgaataagttaagttgtttggaagggaaggggttggtgttgtggagaggtgggaggaatcaccagctctccatatggccattggctaaggcccaggtttttaggtctacctttatacccaatctccacatcattcaaaatcctgggtgtacagatgtatatgtatttgtatgtatctcatctgtgtgtccttgatgactctgagaactggctgtggttctcattgtacagatcagtgattgttcatgacttacttatacattaaaatagttggttccctgtagccataaacacagtgccagcaaagggtagcacccttaccctcctctgaaactataaattctgacccagacagaaaacagtcctctctttcctttcactttgcagaaggtgaccagaaacccaccactgcgtaatccaggtgctgttctgtgatgttgaagtgtttttgtctcctggaatattggtggttgggcacatatttctggttgtatatagctgaaattgagcgtgtttggtccattggtatatatggatgtgtgagtgaaattcccatgtgtgcttgtacctcatgactcctgccctcccaagctgtagttcctgctcttactccccagtctggaatgtcctgtcctcccttcccacctggctcttctgcaaggcctgcttccttcctttaagtcatgtaatagtcaagcactcaaggctgcaggtgcttcatgggtctgtgttttctcaacagcagcacctagcataatgctgggtacagagtacattccttcatgacaacatttttttgtagagagggaaaaatgcttgttacttttttttttaaaagcttatgtggcattgtccttttagaattatcttcttgttttgctattaatctggccttctttttccctcttggagctaaagcttgatttttagacaactgccacaattgatgcaactttctcctaccatttttacttttaaaaattgacctaggccgggcgcggtggctcacgcctgtaatcccagcactttgggaggccgaggcaggtggatcatgaggtcaggagatccagaccatcctggctaacaaggtgaaaccctgtctctactaaaaatacaaaaaattagccgggcgcggtggcgggcgcctgtagtcccagctactcgggaggctgaggcaggagaatggcgtg

SEQ ID NO: 86053 - DNA, 1080 bp, Homo sapiens
gaggcaggcttcagttaaccatgtttaacccagccatctccaaatttatttgagcatggagccaactttaaattgcatacctaccaacatcctagggaagggtgtgcagtttggggaatactagtcaaaaagtctatctatttgggcttttgtgcaaagtccctcatttcctaggaaacctgaccctattttctttttttccctaggacgactgccctgctcctgtctgtcagtcacctggtgctggtgacaaggaatgcctgccatctgacgggaggcctggactggattgaccagtctctgtcggctgctgaggagcatttggaagtccttcgagaagcagccctagcttctgagccagataaaggcctcccaggccctgaaggcttcctgcaggagcagtctgcaatttagtgcctacaggccagcagctagccatgaaggcccctgccgccatccctggatggctcagcttagccttctactttttcctatagagttagttgttctccacggctggagagttcagctgtgtgtgcatagtaaagcaggagatccccgtcagtttatgcctcttttgcagttgcaaactgtggctggtgagtggcagtctaatactacagttaggggagatgccattcactctctgcaagaggagtattgaaaactggtggactgtcagctttatttagctcacctagtgttttcaagaaaattgagccaccgtctaagaaatcaagaggtttcacattaaaattagaatttctggcctctctcgatcggtcagaatgtgtggcaattctgatctgcattttcagaagaggacaatcaattgaaactaagtaggggtttcttcttttggcaagacttgtactctctcacctggcctgtttcatttatttgtattatctgcctggtccctgaggcgtctgggtctctcctctcccttgcaggtttgggtttgaagctgaggaactacaaagttgatgatttcttttttatctttatgcctgcaattttacctagctaccactaggtggatagtaaatttatacttatgtttccctcaagtgtgtagtt

SEQ ID NO: 86054 - DNA, 1078 bp, Homo sapiens
caagtgatgcaagcagaaaagggaatatccaagggtatgcaaggtagaaaccaaatggtgcaaccaggaaaatatatccttgaggacaaaggagggcatgaggatggcaggggcaaagttcaaggctaaggatttgagagtcaagaagagtgagaacaaggattatccagtaaagacatgcagatggacaggcagcctgggtgagctgagagcctgagctactagcctaggtgagctcctcagtactgtcaaaagtaaacaaagctggacatgggttgacatggtgagggcagattttaatcaattatttacttttgcagtagggaagagggtgcagcatgaactgaactcaaccccaattcatagagagggcctgggtgtttcaaagagagaatgagggagtgggcagaggcaacagcaagggcttgagcagcagagtcagagaagtaaaaaaatcataaaaaacaggaaggggcttgggtgctggtccctgtgaaaagcatctgggtttgctaactggtgcttattgaagttagttaggctcctaccctcccacagagacggggagacaggggccctatattcaggtgttggctggagcaaagagtaaattctcttggcagcctcgagttttctcaggcaggcactttaagaggggatagaggtattctagggatatgaccttgggctgttagaaactatgatagtgtttgttcaagtcttcataggccaactaagggtgaggcttagaagagaagagggctcagaagagcctggctagagtctggtcaaggagagaaaatcggtcagcactcccttctgttgtatgagtaaacccacatcccttcaaagaaccaggaacaggttagactcatcaatatgtgtataaattctgtgactttctaaaagtaaattgttaattagttgtccatggcaaatctgactttgtggcttgttgaatgtacctacccctactatgatgaattacttacttgtgttgacatctctttgctatctacattgttattagcagcagaataagtgaacaacattccttggaatccagtgtgtaacttct

SEQ ID NO: 86055 - DNA, 1031 bp, Homo sapiens
tgagccctattgtgtgccagcaatgtactaagcatgagtaagcagacgtagtcactgagcccctggagtctaccttccagtggatgctgctggactcaggcgggaagcagcacagtgaaaggcaggaggaataggtggagggcattgcaaaagactgggtgtggcaggtctgaattctagcctaaagagcgtagggatctctaatgggttttcagcacaggattaatgtgatagggtttgcattccagaatgactcacagttaccttagaggatgggctggagaaggtcatctggaatcctgaagtccagctaggaaaccagagtgatgcagtcaaaaaacgcttgggtcctaaatttcagcagtaaggaagacaaaaggctaaattcaggacagatgtagagaggttattgataggctctgctgcctgattggtcctctgggtcaggagtgggcagcaactctgagggcctgacttgaaccccttggcagatggcgatgctgttccctgggacagaagtgcaagagaattgtccaatggggtggggaagctaaggaagatcagttccctctggacaagctgagtgcccagggtctgcttgaagcacatctcaaaggtatgcttataagacaatgagtgaaactagtgtgtctggaggccagaagagagcccagggctggaggtgtggactgaagggtcaggagtttacagatgacatttaatgcctggaagtgaacaggacctcccagaggtagtgctcagaggaagaagagaccagatcctactgcaacaaaccccaaagggcatccagatttgctctttgatgccaaaatttcacttggtacaagtcaggcccacagccaggatgaaaaaccactggttcctgagagcggtgatggtgatgggctgtggggactctgacctgctgtcagatttctggggtctcgccaatctctggacccccgtctgaagttacccatgtgcttctctctctctctctcttctctccttcaggtgtttacaaaatatgg

SEQ ID NO: 86056 - DNA, 1044 bp, Homo sapiens
taggaatgcagagctgaataggagacaaccttgattgtcatggagcttccaggccaatgaaaatgaaggagcaatgactcagatcggattcatccactacttgtctgatttccatagtatcttcaggagagtgagttttctggaagggtaggggtctaggtacatgtcctaaagtcatgatagatacccatatagtgggtgtcccagctccccaaccctcatgagctctgggctcagtgcacaccacaccttctcctctggttatgtcaagtttctcccccaggctgcttcttgtgggcccagaggttttccaccttggaattatgcatcggtcaccctaggcagccctacattttcttcctaaaaacacagggtattaaacccctactatttaaattaggactctctcacttacacataagagaaatctaattctaactggcttgggtaaagggaggagtttattggaagaatgctagggtatctcacagggttcaagtgctgttgagctcttggaagacttggaagcaggatggagtgctgtagggactccacttttgcttttactgctcacaagcacccaactccttcccatccccttctcttccctatcccacccgctctctctctttctcccccactcttgttctttccctctctcaccatgggccccctcttctgccctcattgcacagggacaagacagggccagccatattcctgatattactgtacattccatgttcccaaaaagaaactgagcagtctctaaacctgtttttttgtttttgtttttgtttttcgtttttttttttgtttgtttgttttttaattccagaaaagtaactgattggcccagcttggatgaggtgcccaccccggaccaatcacatggctcaggaaagtagggtcttataatatgactattgcccagggggagttggttcccagaaaatggaagcctttcctagaaagagaagggttgggcatcaagtgggaccatattataccagaccatgtttactacactgaatgatgcaccac

SEQ ID NO: 86057 - DNA, 1014 bp, Homo sapiens
gcctaccacgcagggatgttttgaagatttgatgacatgacacatatgaaaaccctgtgcaaatgaattgtgggtatagactttagatgttattatcatcattcagcaagtgactttacttgccacagccttagcttcttctatctgtcaaatgagaataagaatatttgttctgcttacttcagacagccatcaatgctttaaatgaaacaaagaatgagaaagcgctaggataaagcgccgttcaccacttccgtccgtcctcttcgcactaaatgaatcgcttaaggacggggatattgtgggattctcctttataagcccttctcctcagactgagtagggtgcctggcatatagttaatgctcagtaaatcctggttgcatttaatcaaaacccacatccattgtcattgtgaaatggtcagggcgggaattattaaacacaattgacagatgaggaaacaaagcctcagaaaaagggcaggggagtgatgctgctagaaagggacagagccagaaggaggatcctatggctccccatcccgtgagctctccactaccaccttggaatgaccattgtggggacactcaaaaatcgaacaaaaatattgatgtttcctaggggcaaaccagcctgctgatcttctggcaattctgatctccagtaactcatccaggatcagtttaaaaacagcttctccaatctagaggtgtctgggtaaccctggaacttcaccctgtagccactttatttgtatcccctcagagcctcccttccccaatcagagaccagggccatggaaggatactctgccttggtttggacacacagctgagtgcttgtctggggatagaaagcggaagacagccccatccaagcagagtcacgggacaccaccaaccacatctgagaggcctatactcataattcatcagtaagaaatcccttcttgggcatggctttgggcttggcttgaccttgggttgaccttggttcaaatcccagtgcctc

SEQ ID NO: 86058 - DNA, 1042 bp, Homo sapiens
tttcacaaagtacactaattaatttggttgataacctcaaatgtttggatgcttgttgacttttcctttaaaaataactaatctgctcttaagggacatacattagaaaaggggggccgggcatggtggctcacgcctgtaatcccagcactttgggaggctgaggtgggcagatcatttggggtcaggagtttgagaccagcctggccaacatggtgaaacccccgtccctactaaaaatacaaaattagccaggcatagttgcacacatctgtaatcccagctactcaggaggctgaggcaggagaatcacttgaaccctggaggcggaggttgcagtgagccgagatcacgccactgtactccagcctagtgacagagagagactccttctaaaaaagaaaaaagaaaaagaaaagaaagaaagaaaaaaaaagaaaagggggaaggagatggttgtctgtgttttggttcagttctgtgagaacaggttggcatctaaaatagggttaattaggccttttagtacatcaaagcgtttttctgaacatggctctctggtgagaatctgatttcctagtatgaacccggctccctgatgtgaacctgactccctagtgagaacaaggctacctggtaagaaactgggcttctggttagaattgttttcccttgtgtgatcctggattcctgatgtgaactggctatctagtatagactaggtggtcaggaaaagtttgttgtaggaatgaatgaatggctgattgatgaactgattgattgagtactgctagactgtagtttcattgaatagtattttgcacaagatgctctcttttaagaaacatataaatatattgactagattacaaatccccatgctacaaacattcctgtttatttatgtgaacagcaggccagcattaagccaggggagtggagaaagctcttgttggagcagaggcaagagacaaatatcctctcaattgctctgcttaattctctttttaaggaagctttattgagatataatttgcatgcc

SEQ ID NO: 86059 - DNA, 1021 bp, Homo sapiens
ctgtcccgcctaaagaaaaccaagagtacagaagcagcacttggtaagcgtgtgcaccggaggtttctcttgacaatctgcttcataaaataaaataagtgtgtgtatctgtgtgtgtgtctgtttatgtgtctgtgtgtgtgttttctgtagaacgagggattctttttaaagagctagcacctcaagtcatctgacattggaatttgagaccttctaatcattattgtgaaagcaacgtcagcctacacagcatgtgtggcctacatccacccagcctgatgccgttcagaaaaaaaaaaaccagttgaaaggcagatgtggagacttttgtgtacagaatacctgaatggctgcttatgccatgtgtgtgtgtgtgtgtgtgtgtgtgtgtgtgtgtgtgtgtgtgaatttccaattccgtaacctcaagtgtcatttcagtttttaaattctggaaagagttcgtgtgtatgtgaattgtgtcagatagtagaattcaactcaggagagagtgacacacacggtggtgtagtgtgtgagttttctgctgctagagggaaaacctcctagcgcatgagggcactgtcgcacagccaggcagtgtgggggttgggaaaagaggatttgggatttaggtggagcctcaacataggctttggctcaagatgtcaaatcctagtatgttagaagggagctttgggaatcatctagtgtagctgtcttcaactgatgaagttgatggcttacccagaccgctgagggtatatgaggaatttccaaggggtgcacaggcacagaaagtggtaaaagaatccattcccagactgtcagtttccacgtggtctccagggcacgtagctggagtctgccaggacaggccttctcaggtctcccttccaaagcccccttcccccacttcacaagtgaaagacaggcctcactccctctaggggacattgccctgaggggtgggcatctcttggtgcccaccaaaggggccatacaagaatgcatcgct

SEQ ID NO: 86060 - DNA, 1027 bp, Homo sapiens
tctgtgaaatctgggtttgatgtactagttacacttattctaataatcattatgaaatgcatagttattaagaaaacattgtgtccatcaatgtacaacttcatcctctaagaaactctgtcatcagctgctggtttcctgggaagagccctgcatggtatctctgcctcaaatgcaggggtgtgtgagtgtggaagatgtgtgcacacacatgtgggttttcatcagtggatcatgtccatctggccacggcaacagaaatggcatgtgcttctgatttctgccaggtgctccagtgagctgggctggtgtgcaggagtgagggtgtggcttgcaggtaaaccaagcaggcagtccagcaatcacctctcgatccagatctcttactccctgcccaccttccctgcacaacaacccccacaaaataagcaaagtgccctggaaagaaccttaaccaccattgatggaaacagaaataggtgaagtgtaaggaggactgagaaggtatgggcctcagcaagaaaaataggtgttttatggaggcgattatacactaaagtggaatttgtaaattgaaaactcccggacgtctcgggattactctcatgaatgtcaagggcttaaggctcttatgtttatcgagaggcagcgaggagtgctaggatgtacttggctgtggaaccacacagactgggtttaaatcctatttaagtcatcctgagaagttgtttaagtccttggagcctcattttctttatctgtgaaatggggataataatatcctctatccagggttgcattgaagattaactaggaaagaactggtcatagtgctgggctataaaacacaggcagttgtgattttcctaaatttctgaaagatcatggaagactttctgattcattgaagagagaataaatctttttttttttttttttgacggagtctcgctctgtccccaggctgaagtgcagtggcgagatctcggctcactgcaagctccgcctcccaggttcatgccattct

SEQ ID NO: 86061 - DNA, 1045 bp, Homo sapiens
ggtgagtggatcatttgaggtcaggggtttgagaccagcctggccaacatggtgaaaccctgctagtactaaaaatacaaaaattagccaagtgtggtggtgcatacctgtagtcccagctactcgggaggctgaggcaggagaatcgcttgaatccaagaggtggaggtttcagtgagccgagatcgtgccactgcactccagcctgggcaacaaacagagcgaggctctgtcccaaaaaaaaaaaaaaaaaaaaaaaaagatttctttctaaatagcattttgtctaattattaattagataatcatataaaatgtacataatttgtaaacataaaagaagaaaataaaaattccatagaactccccaaccagtggtaaccactattagcatgctggtgtattttctttggctctgtttgctgtgcacccatgcacgtgtctgtgtggggattagttaacaaaaatgaggatatttagcatgttttcttccatcctgctttcttgacttactattacaatgtaagcattattcctgtggatcaaatatccttttaaaatatgaagtttgaaggtaattttaaaaattttaagttaggttaggttttacatgcctacaaagtgggagagacaatcagggaagacttcatgaaggaggtgataccttctgaaggatgaatagaggtcaactagatggagaagaggggaaataggtctaccaggctatgggcaaaaactgtatgggcaaaaacctgggggtaagaggaagctgggtgcatccaaagcctgcatgaggcttgacggtgctagcctattggtttggggtagcagaggtatatagttattggaaaggcttcagccagattaaagaacttcacttttgtcccaactgaagtatttcatccaagaagggaagccaagatggtatgatcatgtccgagatatacattttaagatgatcacattggtgacagtatgaggacagggacaggggaggcacaactggaggtagagagaggattataggtttgatagaaagtcctgg

SEQ ID NO: 86062 - DNA, 1069 bp, Homo sapiens
gacttctggcttcctccctgacccacgtctgggctctactccctcttgctcatggttgcagccactaagacctcctctgtgttccacaaacattctaggcaacaaactcacctctactaccacctcagggccgctgtacttttccttccttctgccaggaatactcctcctgtgttcatctgcctcctcgctccctcacttcatttagatctctgctccagtgcacttcctgggagcagccttcccttacctcatggcaccaaattactcactcaactccctacccatcctccttctctgtcccttaccctgtgttattttgctccacagcatggatcactcctgactcttgattaactgatggattaatgtctgtgtccacccagccctcagtagaatgtaagcttcataaaggcagaaatgtaagctttctgcattcttgaccccatatccccaacgtcaagggcagcacccagtgtaactagatactcctaaagatccgttgaattaatgatgctgtgaacgagtagattaatgaattcacgtaatgaatgctgtgaatcccatgaattaatgaatgcacgtgaatgacacctacctgattacagttgggaagactaagataaagcatgcaaaatactcagcatggttcctgtcacataaaaaatcatataacttgtttatcaagcacttacaacgtgccaggcatgatttaagcaccttgcacacactaatgtagttaatgctgaaaacaatcctatcaggtagaagctaatattataatgtaatctccacctagcaagcaaggaaacataagaacagagagacaaataacttacctaaggttacccagctaggaagtactaaagccacagttctaagctacactctcagcctctagcctatcctgcctcttgggacatgagtgctgtgaaggaagatgtggttgtcattgctgttgtacctgtgttctctgaatgtcacaggaccttgataccacacacctgccttgctcaggagatggtacctgagaaggaagggctaggttgtgtgcatggagagcccagcc

SEQ ID NO: 86063 - DNA, 1410 bp, Homo sapiens
gactttgaccaagctctaacatcctggatccttagcttcctcctctgcgtagcattattgtgcagtttatccaagatgttgtctttaaagtgcttagcactgggcctggcatagagtaggtgctcaataaacagaagctgtttgtattcttcctgaaactgttcaagtgagtagagtcatcgtcagtaagacacactacagaagggctcaggttaggaagggaagatttcatttgggcaatccagcctttgtcagggttagaaatgaagttgtctttaaggttcagacaggtgatataagaaacagacaggtagaagtggataggagcagtaacaccactggccggctggaccacacacacccagcctagaggcatcctaggttaaaatgtttaaagctccatgcaggctagatgaaacccattctcaggcccagaacagctcacatgcatttgggactccatttagatgatggtagaccagagaagaattttaaacagggtgtatggattgacagtatcaaatttgcatttcagaaagaccactctggcagcaaggcagggagaggatagaagggggtgcaggtctagtccaaggcaaggagagaagccagggaactctgtgctcaggtgagaggggactgggatgaggaaatgggctgattataacataattagctctataatcagtatggaggcttatcatttcaaaatgtaaagatgattatatgattaaaggcttttttccttttaatggaaataacttgccaacctgggggtttactaggtgggtggtcggagaaaaaggtaagctattaatttttaaccaattgactttgcaatgaattagtttattgattcaaaaaaatcgctcattgtagacagtaaaagttataaatgagattagtgtctagttagagtgaatgctaagtgaaggggcccaggaggcttccctcattcaactgaagagaagtcttgcatggatggagcagagaggcatctgggctggcccacagagcctgctgggaccaagcacatggctggaggcagtgggctcagatacggaactattcctctgctctccctaaagaagtgattgaactttaagcaatgaggtgatctaagctgaccaaacacagaaactagttttactaccattcctagtgtttttaaatgcacaaactagaaaaaggaaagaaggaaggaaggaaggaaggaaagaaggaaggaaggaaggagggagggaggaagggaggaaaggcaggcaggcaggcaggcaggcaggagggagggagggaaggaaggaaggaaggaaggaaggaaggaaggaaggaaggaaggaaggaaggaaggaagggaaggagcccttaggttccagaaacaatgaaagaccttaaaaaccatggtgttca

SEQ ID NO: 86064 - DNA, 1054 bp, Homo sapiens
ctaaactcaccttaagcttttattttttcccccttagcagtcataaaatttggccatggattacaatttaaaagctatctcttctcctacattgccagaatgaaaatgtacaaactcggggcaatttcttaactaagtgttggtgaaacaggagtgagtcctggactctgtttgcatcacctgtctccaggtggaaaaggaggctggcgtggagagaggcagttcagtcaaaagaaaaagatactttgcaagggtatcgtggagctgaatgatctcaggcaagtgtctctcctcccagggctcagttttctcatttgtaaaaagttgttgaaaaatagtgacaaacctccctcactgggatgttctgagaaaccaaagagataatctataaaaaattgttttgttcaatgtaaagcatcataagcatgttggagattattgctactactgacaatgatgatgatggtgatgatggtggatgatgatagtgatgacaatgttggtgatagtgatgacaatgttggtgatggtgatgatgctcacgatgacgatgatggaggaatggtgatgatgatgatgatgacaatacagccatgtgcagggcagggctcatgggtttatgtgataagaggattttcctcagagccttgtatatctctatgtacaaaaaataggtgctcagtaaagaactgttcacctaaaatctacttcagaattcagtttacctctcagaggtttaggtcatttattcagtaagagttaattgagtgcctactgtgtgctagctcctgttagcattggactacagcaaacaaacaacacagacacagtccttgccttcatgaggcttatagtttagaagacaatgggatggaatgggatggtaaaggtagatggtaaacatataaacaaatgccataatttcagatgataatgagtgctctgaagacaacaaaataggatgataggatagacagaaatggaaatggatgtttgtaagatgctttagctcattagctcatgtagtcaggaagccctgcatgaacaggtggca

SEQ ID NO: 86065 - DNA, 1699 bp, Homo sapiens
tggatttatgagttcatggcccaaagtcacaaagctaagtcactggtgagctgcttatctctattccaaagaattttccagcttccatgtccttacttcctttcccctggatgccctgattcaccatctctgcctctgatgccctgtctattctagacaactgggtgcttagatatgcccagaatatgcctggaaggatgcctgagatctgatagcaggctgtctctgaggagaggcctggaagatggggtgcagaaagagagagggagccctgcttctcactcttcacccttatctatgacccgaatatttttagccacgtgtgtataacttacaacaaatcaacgcataagacaaaagaaaaatactgtttctaaaaatctcatctcttctatggttatctcaggccactcttccatataaatcatctgtaggcaaagggatgctttccaccctttcaaccacgcaaaactcactttgtttatgcccctctgatgaccctttcctttctcggtcttttattgcaatcccgtgcattgagtcaggttccccttcctcagctgtcatctccttgagggcaagggccatgtctggctttatcctgtagctgtcccagcacctaacgctgtgccttgtaagtgacaagttccctgtctgaatattgaattgtcgaaacaggaaaaaggatagttccaccaaaaaaaaaaatatatgtggactcattcattcgttcattcattcattcaataaagagttatggcaaacgatcataggccagggatcccgggaaatatgggatacagagggaaatggagctgaccctcccctcacagagctctcatccagatctgtgctttccaagtctccccaaagatcagaacgatgggaagggctgatttaaaaaatccctcactccaaaccagaactattgaatcagaatttataggggagaagcccatcaattttttttttttttctgatacagggtctgtctctgtcacccaggctggagtacaggggcatgatctcagctcaggtgatcctcctgcctcagcctctcaagtagctgggactacagagacgcaccaccatgcctaactgattttacgtcagtctatttttaacagacacccccaggtgattaaggattttagaaaaacattgtatgttggggggtaaaggagcagataatatgtaagttaacaaataaatgaacaagactccttccaatatgaataaatgctgtgaaggcaaaaaaaaaaaaaatgaataagggcatctgatagggaacagcaggggctgcctgaagccagggagcaggggaggatcgattctctgaggaagtgacatcttcactgagatcaggaagatgagagggggaaactatgcagggatccgaaaaaggattccaaacagggtaacagccaaccaaaggccccgagttggggaaggatctgtcttcttccttcccacactggaaaacccaattccagtcactcattcgcttgttctttgtactgtgggtacatctggctccttccaagatgtggctgcctctctcgcccacacagtatgaaagaacagcctgattctagcagctctggaaatattgacctccggaatgctaatgtaacatagctttaggtccttaggccgaactttccttcaaaaaataactccaagtgaatgggaaaaaact

SEQ ID NO: 86066 - DNA, 1073 bp, Homo sapiens
aaaatcagagagggagattgagttgctcaaggtcacaccgcaggtcactgggaagcttgaaatagactgtaaggagattcattcttaagcctacagatgacacttttgtatcacagcaatatcagtttgttcctctgtaaactctctcttcttccaaaatatgtattctggccatccccatctgattctgatggcatatctgatctgaaagttgttgatactctgatcttagaaagtgaagggtttaatcttctcttggaacccctcccagtgaaaattattttgccactttgaaatggcacgggcatccactgtgaactcacatccataaatctaagtctactgctcaggaaagcagatgaggtttgattctgcttctcagcacagtctcacagagaaaattatggaaagaatttgatttatagaaccacctcaaaggctctggagtgagacgcatgttgattcactttattaccatttattttacactatctctttacgctccctgcacatggatttgaaagatgatttggataaatgcttatgacctgtcagattgcatagccctgttgaggcacatggctgccaacatctcgggttgggggatcctcataccagttttgggggtcaggcccagcctctaacaaacagatgtggaggttctagcccagagttcttgtctgaactttcccagctctatgtttgtatggtacttggtgtggatctccagctgcaactgcaggatgtatacaggcaggcttgatttaagattcaaatatctcagaacagctggggatatttaacatcactataattacattacatttttgatggtgcatggagtgagagccttttttgttgttgttgaatattctatgagcatcaaatattttaaccagccggggaaacatgactgcatttttcacatccaagtagttttgtttttataattccggccggggatgagtgtttcgggctttcatcttttgccatgtctttggaacagcaagagcaatgtctcctacgctcttaggtgggctatgatgctggggaaagacgaaaatggggcagga

SEQ ID NO: 86067 - DNA, 2120 bp, Homo sapiens
cagctgtgatgtgccagactctggctgggcatgtttcatgtcatctcaattctgtgcaataaccctggaagactgtgtgaaaatctacattttataaatgggtgaactgcagtgctgggagcatctgtaatccacctaaagtcacagactcagcaggtgacaaagcttgggtttgaacccaagtcctcctgactgcaaaggtacatgcacgttctgcagctgcatgaggaaggagtccatcagtaggaggcagggtgtgtcctgggaagtccagcccaacctcagctttgccctggctagttgagtgactttggtttcaggattctcctgtttaatatgagggcatgagccaaatgatcaacgggatttagctgaaaagttctgtattcaagtgggcagtcaggggaatggagagctcaaatagtgcagatggcgtgagtttttcagccaaccatttcttttctttgcagagctgaaacagtaattaaggggggaaatgtacaagttattgaagtgctagagacaggatggtgattaaatagacatttatacaaggaacatgaaaagacctccaccagttatttgacttcggggaaattagtttagggaatcaaatgtaaactccactcaggtctgcagatatccaaaatgaccaacatcaggatgattctgatagtggctattttggggccactttggccagtcacgaaggcatcaatcaaatgtctgcccaatggagaagggctggagaaatagccaggacatttgcttcgcgggtcggttgccttcattctcctaagtgatttgcttggatgaactactcagaaattgagtaaatttcattgactcaattggatgtcaattggagtcaatgcacattaagcacctactgtgtgccaggcactgagtcaccaagatgaccataagtctgatctgtttctggtaaataggcttgcaacagtcaatgtgcctcatcggagtgactgagtctaaaaggagcttcctgatatacagggagtggggctggaatgaaacagcctaggatttgtattgggtacctgttacataaacagtcacattcaattttaacagcatgaatgagtgtcatggaaccctgcttacagatgagaaagccgaggctcaaggaggtacaaagccatgcatctgggaagtagtagagtcacgattcaacgaaagatcagtccagcttcaaagcccatgttctttcctatggctccattctgccaacactcagagatgctgataagaacaaatcctttcatagagggtaccactcacaatcttccaagccttgaagtttttttcactgcaagttgctgtaggctttggagagtcatcctgggttccaagacctgcaaccctgagaaggaaagacggttcgtaagaggacaagatcagtaatgaatttgcatcctcctctgccctcagacaaacagaagagaagtagatctatggaggagaatctgcctaggagttgtgaaaaaaagttttaattgtgccacaacctcaactaaatcactattttcattctttcaaggacactggtaacttgaagtcctgcatgaggaaatggtgccaaactgagttccagctcgggcctgtgctaacaaatagatgactcactcataattggaacatgaattgttggtaaaacaaatagaggctgctaacgtactcaggaagtttgttctgagcatgtcaaatatctcccctgacaccattgtttatactattaatttgccttgtaaattgtttcctccgattccacacacgtttattgagctccttctttctgccagacacttttacattcattattttatttcagctaacaacagagcagacaaaaacgtattcttttgtccctgataccaaaaagaaaactgaggcactgtgtggttccgtaccttggtcaaggtcacagaagccctgacttagggttccaaagtcaacgcactgcatcacaattgttcccacaaaaagatcttggtgcagctttggccagacaaacctgcatttgtaatcagcagaagcttaatttattatacctggataggatgtgataatgtacgttgctatctctgcagcaatggaggatg

SEQ ID NO: 86068 - DNA, 1071 bp, Homo sapiens
gtcccttcaggagccacctgacttcaacctctgcagcaggcatggccatgagttgtgtgggtcaattgttagggagttgaagacagtaaggtccttcccactggggcacacccttctcttacctccctgtactctgagtccctgcgtttgaagagtttgcaggcacacacacatccaagcaaaagtattacctccattccccaaaggtatgtgttcctggagactcaggtgacccctagtggcttcctatcatggcccagtcctgggagtatccagccccttaaagttgcatgctgtaggtttttccaaggacctcagaattaaaggcttcacccctctgtctgtagaagccagaagctatttcagggagccccaaatatacagcaggcctgtcaggaatattttcctctaaccacactgccttgtctctagcctttgtcatctttgatggagtggcaccaaagtgtagtggctgagaacatgaactctcaagctgcactgactgggctcaaattctgagtctaccacttaccatgtgcccttgggcaagtgacttaatctctctattcttgagtttcctaaatcatctaatggagataacaatactgtatacaccatattagttgtgtgtgtgtgtgtgtgtgtgtgtgtgtgtgtgtgtgtgtgtgtcagagagagctctgaaaactctgctgagctcctatagaaatgcttcctttcaatcacatcagcctcctaactggtcttttggcctcaagctctgtcccagccaacaccctgcatcccattgtctgctttacagccagagtagtctctaaagcactgctcaaagcacatggtttcccttcttcaaacctttcagtggttcagctgtcctcagattaagacctgagctcctcagaccctccacctggtcctgctttatttcttgccacaccctccctcataccatatactcaaggtctacagaacagctcccaacagctgaatccctgctcctcaagcccctctgcttggtttggtttccgctgctgctgtaactcccctttcatgctgctttgtctgcctggg

SEQ ID NO: 86069 - DNA, 1036 bp, Homo sapiens
gatgtcgggccgcggcggcgccgccctgctctgcctctcagcgctactcgcccacggtaagtgtcgcggcgcggactgggggtgaggatgcggcaggcgccactggagggggtacggggaagactggggagaggagcacccacaccccctggactcgcagccgccactccgggtttggcgtctctggctgcagctcgagttaccgccagcccccgagccctccggcgagctcagctgaggggaccgagcccggcgccagaaaagggtggggggagggtgtcgctccagtcctctcctggttataaagaagggttcgaacccgaaggtctggggtcgtgtccgcccacggaaatctagagggatccgagggatcctccggatcgcgtccaggccgccccccgcccccgtctctccctgcagccggccgggctgggggctgttgggatccgccgggatcgcgtctttcctcgccccgggcgcgcaggccggtgcggggccgcgccgcccgtcgcctcgcttcctgcggcggtcctcgggaagggaagtggactgactccgggccggggagccgccgcggctcgcacgcccgcggtcctgtgagctgcatctaaatggccggcttaggcgagcccggagggcgggggtctgggcacccgcacaggccggggcggtgggccgcgggccgcgcgcggagggagcgggctccgcgctctcgcattctgcaatctgttgcgtctgctccccaggctcgccccgggctccgcggtaaagggggtgggagaaggagggattgaggttggcgcgctttggcggtgggacagcgggcatacgggtggggggcagcgggtttttgaacagcccccaagaatgggaaatcagaccagagggaaggaggctgcagcgggccttccgcaagctggagacgctccaggaggcgaggggagcagaccgaggtgggagggagagagctccgaaaggagagtggagaagcggggccctctgctccctcctaacgtgaaaccagccgacctgggat

SEQ ID NO: 86070 - DNA, 1081 bp, Homo sapiens
ttattagacaattaaaaacccaaaacaatacaatacagtaacaatacagtcttctgcattagatatcttctctctgagaaattagtattaatgttctccataatcaagctatggtgacatatatgtaatttcagactctctcttgcttgtggtggaatggccgtgaattcttttgaagatctcactgtagattgcttgggacatgctggtcttgtgtatgagtatacattagtgagtatttctatgaacagtggttataaagtgaatactaagcccccttttttaaagaaaaatactacttgaccttttatttcatgttttgtgttttgagatctaattcacagaacagattttacagtttatttacctaaatgtttgttaagagttcagatataacttaactcccttagttatgcttgataagaaaaattcaaatgaagattgtattctagtataaattgttgattttataatgacatcaaatattaaagttatatatttttgtgccaccctttagggtgaagaaaagttcacttttattgaggagtgtgttaacccttgctctgttaccttgttggttaaaggaccaaataagcatactctcacacaagtcaaggatgccataagagatggacttcgtgctatcaaaaatgccattgaagatggtaagctctttcttgtgattgatatgaacctcatgtatatgtgtgtatatatgtatatatatatacacacacacctatgtatgtatatatgtatatttttagacagagtcttcctctgttgcccaggctttagtgcagtggtgcgatctcagcccactgcaacctctgcctcccaggttcaagtgattcttctgcctcagcctcccaagtagctgggattacaggcacacaccaccacacttggctaattttttgtatttttagtagagatggggtttcgccatgttggccaggctggtctcgaactcctgggctcaagcgatctgcccttgttggcctcccaaagagctgaaattacacgtgtgagccaccatgcctggcctttaagtctttttaaattttatttttattattaa

SEQ ID NO: 86071 - DNA, 1050 bp, Homo sapiens
agattcaagagatatttaggtagtagaattgatagaacttggtgatctaataaatgcagggatgagggaaactaagttgagtgactgaatgaatgaaaacattcaccaaaattaaaacctgcaggaaatttgcgaatttgtgctttgtagacttccaagtattctttgaccaaaccacagttcgtaactcatcaagtgcttttatctttaaacctgtaaatagtccatttggaatgaaatctccataatctgtccatctggggagaaatgattctgtgagctgcaaatggtggtaattaccatggcatattcccatggtacagtggaagttttccgagcccagttccctctattaaggataatggagtggcaagcactgggaatgtcttcctaccacatgaagttaatatcattcttctctgaacaggcttgtttctggtgcaggtgacatcaaactcaccaaagatggcaatgtgctgctcgatgagatggtgagctgatgctgctgactttaataaaccttaataagccttaattagaagcatagtagaacttgtgtatctttaagccaaggctgtgagctaaatactgcagtcttgagatatgctgaagactgttgaattagacctcaataaaaaaatttttttggccgggtgtggtagctcactcctgtaatcccaacactttgggaggctgaggtggccaaattgcttgagcccaggagttcaagaccaggctgggcaacatggtgaaaaccgtctctacaaaaaaaaaaaaaaaaaaaaattttgctcagtgtggtgacatacgcctatagtcccagctactctggaggctgaggtgagaggatcacttgagcccaggaggccaaggctgcagtgaatgagattgtgccattgcactccagcctgagtggcagagtgaaaccctgtctcaaaaaaaaaaaaaaaaaaagtttttttttttggctgtttccaagtctttgtatacttatacatactttgtatacttaggcatacttataaatcaataatatcttttaagggcact

SEQ ID NO: 86072 - DNA, 1059 bp, Homo sapiens
gttcgtccgccagttcagcgcctcattccgtcaagaggaaagcgccggacgcagacgaccaagatgtcaagagagcgaaggccaccttggtgcctcaggtacagccctccacatctgcgtggaccaccaactttgacaaaataggaaaggagttcattagagcgactcccagtaagccttcaggactcagtttactccccgattatgaagatgaggaggaggaggaagaggaggaggaaggagatggagaaagaaaaaggggggacgccagcaagccgctctccgacgcacagggcaaggagcactcagtttcctcttcacgggaggtaacaagtagtgtgctgccaaacgatttctttagtactaatcctcccaaggcccccataattcctcattcagggtcaattgagaaagcagaaatacatgaaaaagtggtggaaaggagagaaaacaccgcggaagcgttaccggaaggtttttttgacgaccctgaggtagatgcaagagtacgaaaggttgatgctccaaaagatcagatggacaaagagtgggacgaattccaaaaagccatgaggcaggtcaacactatttccgaagccatagttgccgaagaggatgaggagggacggttggaccgccagattggggagatcgatgagcagatagagtgttaccgacgggtggaaaagctacggaatcgccaggatgaaataaaaaataaacttaaagaaatcctgaccataaaagaactgcagaaaaaggaagaagagaatgctgacagcgatgatgagggggaactacaggatttgttgtctcaggattggagggtgaaaggggcattgttatagggttttaaagacccaaggtttctaacagcctctgctgttgtataaaaagtgctgtctctcagtagtatagcggttacttcatgcctcaagatttgggtacctggattgctaaactggattgttgagataaaatgagccagtgagctacagcactttggaaaatttgtgtaacatgtttttgaggtaaagttgtttttgaaatttctgaagt

SEQ ID NO: 86073 - DNA, 1082 bp, Homo sapiens
atgaaggaaaaaatattatcttttatttatttcatccagccttaaattttgttatttggtggtaaattagggttccttgtttgcaggtcctatctattgtagaaagaatatttaagttgtctttccagcagtaacaattggctcttgctggtcattgatagtttaaatcactccttcctttagagattgaggtactcaaataggaaaagggaattagcagtgttctggagttgaaatgcatacagcatattcaaataaaagtgagcaataataataatagctaagacctatatatttcttagtatgggccaggcatggttctaagtgctttacatatattaactcaatctagtttccctaaagtctttttttatggagaggagtaccaagagacaaggtttgaaaagccttgaatgctaagtgaaaatttttgatgaagttcatatgaaaatggaggttttgagcaaagaattacatctgcaaagaagtatcatgggacattattaacagtatatagaatggaatgaacacggagggtagaaggaagctaggagctatttgaaaactatattttcaaaagcaaggtgacaagactgattagctgaggattgggagaaaaggaatagaagtgaaagcatgtcataggaatagctaaattcttttgttgtttgttttttttgtttgtttgttttgagacggagtctcggtctgtcgcccagtctggagtgcagtggcggaaactcggctcactgcaagctccacctcccaggttcacgccgttctcctgcttcagcctcgcgagtagccgggactacaggcacccgccaccacgccaagctaattttttgtattttttagtagagacggggtttcaccgtgttagccaggatggtctcaatctcccgacctcgtgatctgcccacctcggcctcccaaagtgctgggattacaggcgtgagccaccacgcccggccagaatagctaaattttagtgactagaagtggaagaagaaaaacaggagggataagtatgggattcaagattttgtttgtatttagtgtcactgcctaaaaggagttat

SEQ ID NO: 86074 - DNA, 1052 bp, Homo sapiens
aattgagacgaggcactaaacagcagatagatataaaatgtaaaggagtgatggaggagaaactccttgattgtatatcattcaaagtgtattatctcaaatctgaagccagctctttgagagttgggatggcgatttttacaaatgtagcagcctgagggtaagtgacctcttcagagtctaggaagagcaaacaactgggccttgttaggtaagcaaagaacaggttcccgagagaattctgtgctgtgtgatgaagagtgtcgtctttactctgtagaggacggagagccatgaagagtcttagggaatactgctgaagctgggtggggagagactgaggcaagggaacaaatcagaaggctctcatagtgacccatgtgggagatgattcagctagttagggtggagagtaaagtgcgtttttgaagatcatttagaatttaaatgatcttctagataaagtgctcgtttatggataaaataataataatttgagtgagcagaaacataatggtaccatcaactgaaatagaaaatagagaggaagaggaggtgttagggttagaaagatgagttttgtattggatacattaagtttgtttgactaagtttaactgcgattctactgtttggaggggagtaaagcctgcttttaatgcgcagcagaatgaaccagggctttggttcaaccaggcaattggaaggtcgctggagactcacgtcctagctatgataattgagtgatcttgagcacgtctctacaactacatttgctacatttttttaagtttcctcaaccgtatctgtctttttccaatgctgtaatcactagccacacgtgactattgagcacttgaatgttgcatggaattgagatgtgctataagtgaagaaaatacacaccaaaaaattcatactaaaaaaagtaaaatatctcattaataatatgtaccacataatgacatttaggccaacaatggaccaaatatatgagggtggtcccataagattataatggagctgaaaaatccctatcatatagtgacagc

SEQ ID NO: 86075 - DNA, 1096 bp, Homo sapiens
tcaggatcttgtaatacttaaaggtcatcatccattatgagtatcatatgttgctgatggcctaaaaagagcttttatgttatttggattttcttcattgtgatgtactagatgtacatgtgtgcattagataattgaacatcctgctgcgagctggcttttcctgtatcagaactctttcatgctgtagagtagactatgaatgtaatactttggaaagtgtttgattagtcatcatggactatataagacgctggcctttggaaaattggaagcctatctccttgtttatatcttttttttttttttttggcctcctactctttcgtacagctatatgtctttggctttcaagatcttctttccacaaaccctccgtgcactcagccgaaaagaactgtgcctattccgaaaacatcactggcgtgatgtaagacaattcagccagtggtcagaaacagatctgcttcatggacatcccctcttcctgagaagaaagcctgttctatcattccagggaagccatctaagatcacgtgccacctaccttgttttcttgccagggttgcatgtgggactctgcagtggcccctgtgagatggctgagcaacggttctgtgtggactatgccaagcgtggcacagctggctgcaaaaaatgcaaggaaaagattgtgaagggcgtatgccgaattggcaaagtggtgcccaatcccttctcagagtctgggggtgatatgaaagagtggtaccacattaaatgcatgtttgagaaactagagcgggcccgggccaccacaaaaaaaatcgaggacctcacagagctggaaggctgggaagagctggaagataatgagaaggaacagataacccagcacattgcaggtaaggtagagaacactgctttctcatcttactggtgctgagagaaaaagggataaggagttcaactgctttctttctcttttttttaactttgctcttttagagatggggtctcactctgttgcctaggccagtgtttaatgttgcattcgtagctcactgcagctttgcactgctggactcaggtcatcctgactcagcctcccaagtag

SEQ ID NO: 86076 - DNA, 1897 bp, Homo sapiens
gcaagtttccatccccttctaggaattgtggatgggctagtgtctctaagaagtgggctagatatgttgagttgggataggagctatgattgaaatttcttgattcatcttcagtcctgggtcttgggggatacacttggccaccctagggttgcagcagtggcattttggtttttggagacagggtgacgtgtcagagacaatcagagtcttctttgagcagagcaagtctttccccccagctgccaagagcctccttaccatccaggaagtggatgagttccttctgcggctgtccaagctcaccaaggaggatgagcagcaacaggccctacaggacattgcctccaggtgggggagctgcctccgtcaaaccatgcccatagagagatgaactctcttgggaagggaaggttcccttggggttccagagctcttcaagaccaagttaaatgtgcttcatccccctaggtgtacagccaatgaccttaaatgcatcatcaggttgatcaaacatgatctgaagatgaactcaggtgcaaaacatgtgtaagtagcagctccgctgacagcctgagctgtcatttgttagctttgtttgttcccaactggtgtcaggacttttgagtcccagtcaggatttgaatcccccttccaccttcttactttctgtgagaccctgatctgtcacttgacctgtctctgcctccattttttcccatataaaatggagataacagtacctttctcacagagttcttacagttgaagtgtggcatacgttcagtgagtatagtatgagtctcttgcctactccagccccctcctcgctaaggcggcatccacataggcacagtatctcaaaagagctgaattttccaagagctttctctcctcttgtgaaagtctttagacaatagaacacaaccccttccctacagatgaggatttcttctgtgaggacagattgctgtccaaagccatggagtcaaacaaaggcagtggttttgtttccttgttcctgtaccccttggcaggttagacgcccttgaccccaatgcctatgaagccttcaaagcctcgcgcaacctgcaggatgtggtggagcgggtccttcacaacgcgcaggaggtggagaaggagccgggccagagacgagctctgagcgtccaggcctcgctgatgacacctgtgcagcccatgttggtgaggagtgctcccctgcctctgctttccagcctctccaagctccacatcctttgggctgagatcagatagggtatgagtgttgagagcacttgcaaattgactggagaagtttagggaaggaagagggaggtgcaagggggtatttctctgtaggaggcgaaggcaaaggagaagacagaggatctagtggaaagacctgagttgtaggcccagctacgccaccaagatgctgtagaatcttagatgagtgacttgcctctcttgtccttcagtctcctgtgtggatgacgtctgagactgcctgaggcatccccctagaatgatttatctgttatcttacctgaagacggatgtattaagtaacccctgagattctgtgacctactgcaaagtagatctgagagttggtagcagagccaggcttcctgtgacagggtgacttgggaagagggaggacacataaggaatgaaggctgactctgacagacatcatcttaggcctctgctcatttcgtaagaaatggggtttcctttccagtgttggttttcctgtgtgacagggcccaccacatatggtgccatgcctactgtgagattctttggatttttgagtgatgtacagtgctttttttgaaactgtcttgtttgtcatactaaaaccttggtttagggttttatgtttgagata

SEQ ID NO: 86077 - DNA, 4548 bp, Homo sapiens
gggctttgccctccatggcatggtttgaggtccctgctgccatgtcatccctcaccaaagctccccttctgctttcaggtggcccactttaaggactacattccccaggcttttcctgggggccacagcatgatcttggattctgaagtgcttctgattgacaacaagacaggcaaaccactgccctttgggactctgggagtacacaaggtactagctcagggccatatgtgcaagaatgaatgagtgtgagtgagtatgtacatgtgggtgcacgctgcggtctgaaaagggaggaaatatcccttagtgtggcccttattcttcgcttctgacctgtttctggtttggatttttgtcttttgtttttctcctaaaaaggggctggtattgggaaccagtttataactgggttggtttccatttagcactatctgctcagtgcccttatggcccaggggcttcagagcagaaatagtactttttcatccggtgcctcagggggcctccagaagtggactggtactccttattttttcacactgacttttgtcctatgtgtacctactacctcattttcccttacagaaagcagccttccaggatgctaatgtctgcctgtttgtttttgattgtatctactttaatgatgtcagcttgatggacaggtgagttggctagcatctttaaacccagaaactgccaggaatctgttttcatttcctgggtgaggaagatgggggcttcaggttggaaaggagggtacagggaaccagctggcacatacgtttgtgctcaggagcttgccaaaggcaatggcaagagggagctgagaggaagcacaattgctacatgatcagttccccattcagtgtaagaaagagcccatgtgttgactccatctcttctctgagagcttaagtcacagaagaaacccaaacccccaaagaagtttctctactaaagcaaaatggactattgcagagaaatagactgtgagcatatggggtttcagtttatttctccaatggcacccctaggggctccagtggcacccctgggggcataaggcagatggttttcagctcagaggttttgatttcagaagagactgacaacaggaagctccggattataggggaggccatgggtgggaccatcttggagagaattagcagtcttgacttagctgcatccatatgcttgtgcctgagaaaccagtatcagccctttcctcacttagaaatgtatctctacccctgttcctcctgcaacagccacatccttgattggggaaggagaaggaagtagagagggaaggaattggtgggggtaggatttggggtttgggtcccaaggcctgtctcagcctgcctaccccggggttggccttgggatcggggcaaagcagggtgcaggggataaaaaatgagagttggagtcgtatttcaagtgggaccagaatttatacaatctgggctacaggccagttctcccttggctcgcttgatgaagtagaactaggaactacaactatgaactggctctatgccacagctcacaattttccatcttcggtcacgatggagcccttgtagcccttgacagcagaactgttacacatgaggtctttgatccatggcaaaccctttcttgaagtagcagttttatcattgtggcccttccttcctcagaattcctaataagggagggaggatcccggcctaacctcagctctcctgttctcctcagacctctgtgtgagcggcggaagtttcttcatgacaacatggttgaaattccaaaccggatcatgttctcagaaatgaagcgagtcacagtaagtgaagaccctatgctaggcagtgtcctagaagtttgaaagcagggcagagaactccttgggtcaactgcgactggaagaataaatcttaatgtcttatggagcctcctgataatgttggcctttgactattgcatatgttgcctgctagtcttcacccagaagggtagggcatggaaatccttcctaggtaagcctcctgtgtttcaaagccacagcagccctctgtttgggatgagaagcaacctgctttctaaccctttgtcccttatatttcaagtaagggtgtttccagtggacacttaactagtgtgtgaaaaggaacaacccccactcactcaccaccttctccactctcacaccaacttcagcatctctcttgtccctcagaaagctttggacttggctgacatgataacccgggtgatccaggagggattggaggggctggtgctgaaggatgtgaaggtaaagtggcctcgcttggcttctcctgtcgactcactcgcagccctctcccctgagcctttccagccctgaccaggagatggcggtggcagcctgcagtggttggggtggctgctggggaagtgtgggcagatgtgtcctggatctggaggactgctttgtgtgtctcctatagtgcctggagcctgagggctcttaccctgagggaggggcactgggctagatctggtgtgtagcagtgaaggggtgaacccatcctcatggagttgcctttctattctgtggtctctcttttgcttcccttcagggtacatatgagcctgggaagcggcactggctgaaagtgaagaaagactatttgaacgagggggccatggccgacacagctgacctggtggtccttggagccttctatgggcaagggagcaaaggtcagggtggcctctgccccctggggtggtactgttttagaaggtaccgcttgaggtacaggctggccttgttactggcttgatctgccagcatggccagttatgacttccgaagtcctaggatctagggccccaagctggcctgagtcacctcaggcagagctgcttactcggttagggagaagtcagaatagagtaccctatgctagcctagcagaaggacgcttaccaccaattatttcgtcagggcctgacagctttctcctcaggcaaaatctctttcctgactggaaaggaagctggagtctgaggaactaatacttttaagcaatctatcatgtgtccaacacagttcaatgccccagagcccaacaggttgggtgtgattatccctcatttacagaagaggaaattggggcttataaaggttaaaattacacagttagtaagaggtagctccaagaggtaaactctggcactctgacggccaggacccaaggtcctctccctggccctgggctcttgggactggcagagatggctcctccaacccacactcatctcacactcccctcccaggcggcatgatgtcaatcttcctcatgggctgctacgaccctggcagccagaagtggtgcacagtcaccaagtgtgcaggaggccatgatgatgccacgcttgcccgcctgcagaatgaactagacatggtgaagatcagcaaggtgaggaagggacctggttggccatggcctctggactggccgccatcactgagacagaggctgtgctttggggactacaggtatttctgtctccccagaaagaagggttgcagcttgctcaggggagcaggattaggccttataatctctgaatgccttcttgtggaaaatggcttgcatgcctctaggtcatacccactctgggctgggaggatcacatggctcaaacatcagctgtttaagtggcttcttataatctcattaccaagagaagggatttaagccttgttccaggttgggaacagcccaaagtagcatcttttctcctctaggaccccagcaaaatacccagctggttgaaggtcaacaagatctactatcctgacttcatcgtcccagacccaaaggtatcaacccagtggcttgggggcctccagctcatagaattagcttgcaggttctctagtgccatagagaatccatctcacctcgctgaaagtccacccagggataggggtctggatttccagctgagtgataggcacagggacaaccagacaactctgaggaattttgaatagaattctttctgcaatacaattgctttaaaaaaagagagagaagaagagagtacctatcccctcagcacaaagggtgtgttctagaagtaatctggcccaatcccttcttgtaccgaccaagaaagagatctagagaacaaacaggacttccctaaggttattcagcaacagcagcagcagaactaggacccaagtttcccagctgttagccaaagcttttttggtttttgttttgttttgtttttgagacggagtttcactcttgttgcccaggctggagtgcaatagcgggatctcagctcaccacaacctccgcctcccgggttcaagtgattctcctgcttcagcctcccaggtagctgggattacaggcatgtgccaccgtggccagctaattttgtatttttagtagagatgtggtttctccatgttggtcaggctggtcttgaactcttgacctcaggtgacctgcccgcctcagtctcccagggtgctgggattac

SEQ ID NO: 86078 - DNA, 1050 bp, Homo sapiens
aggctggtctcaaactcctgacctcaggtgatccacctgccttggcctcccaaagtgctgggattacagatgcaagccaccgcgcctggccaatacttgcttctccctttttttgagacagtctcgttctggagagcagtggcatgatctcagctcactgcaacctctgcctcctgggttcaagcgattctcatacctcagccttctgagtagctgggactacaggcgtgcaccaccgtgcctggctaatttttgttattttttgtagagacggggttgcgtcatgttggccaggctggtctcaaactcctgacctcaagtaatctgcccacctcagccttcctaagtgctgggattacaggcttgagccaccacgcccggccactgatactatcttcttaaccagtgatgacctgctggcttactcctgacagaaagctgccgtgtgggagatcacaggggctgaattctccaaatcggaggctcatacagctgacgggatctccatccgattccctcgctgcacccgaatccgagatgataaggactggaaatctgccactaaccttccccaactcaaggtagcagctcttaggctgtatatgtattctccaccccactgtccaggccttggagccttgggcatctagaccattcacatgtcctctgtcttctcctttcccccattctcctgaggcagagcaaggagggcaattagagagggagacaaactgctgctgggccaggggcacagcactagacctccttctccctccatctctgagtagagaaccttgcatttgcaaggccccactgagcagcctttagtctggggaataagagtttgctcctgttgccccagcaaagcctgctttgctgtacagagaacaatgatttgtaccctgattactcaggctatagggccatactttggaatggtgccaagggagccaactccttttccttgctctttatctttctcacatctttgttcccatatgcgcctaaaatacaccacacacaccacctctgaggccagactgggaaggc

SEQ ID NO: 86079 - DNA, 2568 bp, Homo sapiens
cataaatctgcagtatccaaccaaactagccacagacagctgctgagcaattgaaatgaagctggcacaactaaggaactgaagttcttattttaattcaacttcaaatggtcacatgtcactagtgactaccacactggacagtgcaggtgtagacggagttcagatcagactcctgaaacttaatggctctaaccttaggcaagttacgttaacatctaagcctcaatccctccaagtagaatgggtgcacctaaatcatagggttgtcctgttgtcctgagcaacattatgtaaagcacttagcccagagcctagcacatagttatctagagttgggaacgtcactcctggtgtgcatgtccagaccctacccgggagaagggcctaacctatgactttagaaccctcagttgcaggtgtgcatgttccagccaacactccactctgagtgcaggctcatcaggacaccatatggttgtaaactggctgccatgtcccaatccttccagctcttgagggtcagttctcaccttatgaacaaattaacaggctctggacctataagatcaaggaccactgcgccccctggccaccccaccgcccccccccaactttgatctgattgactttggcttccacctactgtttaaaatgtgtatgttgggggagtagggacagcacgggggaggggtttactttcctgactctagcccaggacatttggtgtttttgaataggcaccattcagccttgcttcagtattaggaataagatactttttattccatcctctatggagacaaaaagctgctcctcctttgagtactgacctacatagatttccatttctctcttcagcctcaggccaaacaaacaaccggacagggcagcagaacaaggctgtctcctcaggatcctgccaaaggcactgtcctctccaacctggacccagccccacttgcccttattggttgcttacacccagagtgcacactcacaggaaagggcctctgctggctgcaggtgatcatcttgtcccttctctgccttagtgtgtgttattgccatttcaatgtcagtggttttttatgtattttcttccagtctttgctgctgagatctgactgtatatactattttgtatcctttcatgtatttctttcatgtatttcaatgcagccctcaacatcatcatcataaatctctccagcagaatgctggaggcctccctcttctgaacctctacatgctgctggctggcatcaagcagaggtcatcactgggtgctgaacaggtcagctccctagggcaatgtgagcaaagtgttgtggctcatcctcgatcctttatgcccttttggcaagattcctttctcttctcagtcacagcagatggacacataatcttgttctcccaggggctgcattctcagtagtcttttccctgctccttgggcgcctggtcagggaggtttgtacaagcctgcgcacacacagcagtctgtcacgaggctgggccaaccttttttttttttttaaacagactcttgctctgtcattcaggctggagtgcagtggtgcaatctcagctcactgcaacctctgcttcccgggttcacaagcaattctcatgcctcagcctcccaagtggctaagacttaacaaacaggcacacaccatcactcgcagctaagtttttgtatttttagtagagaccacgtttcgccatgttgtccagactggtctcaaactcctggcctcgagtcatccacgcacctcagcctcccaaagtgctgggattacaggcgtgagccatggcgcccagcctgggccaaccttttctgagccatagtccagctgtactacagctgtatccaaaaggtaccatgtatctcccagggtaacctgaagacctaactgggcatactaactgtcctcagatttcagttctttaaggcccatctcttctagatcagtgtaaatatctgaactcacttggtgcttcaacccaattggtcttgggattcatcctttacctacccagctctcattctcttctaggttgttccatggcctcttccatatattacatttgtggtcttgagcaagttagttagttacaacaacactgagcatcttgaccaaggtcacttggcccaaccacaggctaatcccaggccatgtgcacatcccaggattagcttgtggtttatcagttgtcaatttttttttttttttaatacagggtctcactctgtcaccctggctggagtgcggtggcgatcagagctcactgcagcttcaatctcctggctcaagtgatcctcccacctcagccttccaagtagttgggactacccacatgcaccaccatgcacggctaattttttggtttttttgggttttttgtttgtgtttttttttgttttgttttttgagacagagtctcgctctttcgcccaggccggactgcagtggcgcaatcttggctcactgcaagctccgcctcccgggttcacaccattctcctgcctcagcctcccgagtagctgggactacaggcacc

SEQ ID NO: 86080 - DNA, 1990 bp, Homo sapiens
atcattaaaaccaaggatccatgaggggcagaagggaggattcaaagatttaaaaaaaatcaaattttagaccttggttaaatattaactggaatgggatcttggaactcccaactttaatttggtgtaataaaaatgatgcaaaaaaaaaaaaaatcagggttgtttgacaccttttttcctaaagggaaaccttcaccaaaaggggataaaagatttaaaggcaaaatgagtaaacaacctcagttttaattcttactgaggttactaaccagctatcagtatattattttcgatttgtgtctaggagggaaactgaagaggaggtaaggcttcagcagagaaagcaggttgtaagtagagagccagcttctgcccttaagttactgctagatcttagctgaattgcacatacatagacctgttttacagaggaactgagtagctgaatgaatgatcctttgctaattggtaggcattgtaaactatagtatttactgcccatgacaaaagtggaaagggatgtcttcatgagcaaatctgattcccccaactcctgcaaaggctgtggttcagaatcaaatcatccaggactttgtataacattgaggtaagtggcccagtgttcagttgactagtttatgcagttatttcattcctccaaaggggtttagtggttggtgatggaagaaagcataaatatgtctgtaccaatgtaataagtccctttagaggtttccctctgccatccagagtcatgattggttctagtctcagatttttcagctgcatgggaggggtaaggggtgggaggtgtctgccaaggcgtttagggtttgcatagttcatccattggtaatgggaaaacactctgctttcctgatcatgtgttttgtgcttggccacgcttctgcagcaaactcttaagtcctccagctcctctaggggtgtaaagactgtgagggctcaaatacatcacctactcattgcatggtccttcctaaagagcctagaaaatggtttctcctgctgggtgtggtggctcacgcctgtaatcccagcactttgggaagctgaggcgggcggatcataaggtcaagagttcaagaccagcctggtgaacatggtaaaaccccgtctctactaaaaatacaaaaattagcctggtgtggtggtgggcgcctataatcccagctactctggaggctaaggcaggagaatagcttgaacctgggaggtggaggttgcagtaagccaagactgtaccactgcactccagcctgggcaacagagtgagactcaaaaaaaaaaaaaaaatgctttctccctgacctgcccccaaaaatcagtgggctaggaaagggaatgaaagtagggtctcctcactccccaccaacctgggaaataaagacttgaactgtcggcttacaacagaatccagtctcattcagtacctcctgaaagctcttaagtgctctgtcttaacatttgctctccaggaacttcaacagcagtctggccagagaagagcacaggctctttgcctaaatctatttcttcaatgaaaccaaatttaaaactaccatggataagggagggatttcattttcagcgaaaagtggcttaagacttctagttgggaaaaggatcagaagccaagccaaaattaaggagaaggccactgcctccacccattgcttcccctttccgcataaactaaggatggtgcaaatcaggtcccaagagaagcagcagcagggattatgcacgcactatcccttgcagacagaaacaaatttcccagcagtttgggagcctgatgttttgttggctcccagagtcaggtcaggagaccaacagcttccaatcccagcatttaatgaagtggcttttaacaactttgaaatttttctatagcatttgtatttcatttctcaccaaagataagtttactggtctaaaatctgtcctaaggaccactatcggtctg

SEQ ID NO: 86081 - DNA, 1065 bp, Homo sapiens
ttcattttatagatgaggccaactggggcaaaaaagttaagtggcttgcccaagggcacaaagctgctaagtcgaggagccaggattcaaacccaggcaggctggccccacagctcctgctctagaatggccttctgcctaactgccctaagagtagaaactatccagacagtatcaactgctgagtgcacagggttctcaataaatgctaactggcttgtgtcactagcagaatatagtgggcatgaccagtatcctagtagagctgacccaaacagaaaaaataatgttcaaaagcccagccatctccaatatgtcttaaattgtagcctgaagtaggtacccataaaaaggaactgatctcacagaagtcacctctaccatctgggggttggccaacccatagaggaattctcccttattgcatctatactttctcttttctggactattaaaaagtcaagaaatacttccccctaggaggtaggctgggtgtgaaagggagtgaaacccatttgcctcttttgaggtgctgttggtcctaacagaggtttggagactatacaaatacctaagatgaatgggaataatttataattttcagttactcattctctcagaagtaacaacaaacacattaactcagttgtcagcattctcccagggaatcagaaaaagaaaggaagcaccaagtagatcagcctgatcttggtaccggtgatgctggggggttggagggtggaggtgggtctagaactccaaatggttttggggaattgagaaaagctcaactgttttttatgtctgattagaagtaatcagacataaaattgcccattctgagcaaaaggccattttactaaataaatttgggaaatcttctgaaataagttttaaaatgctgcaggctagtccaacactactcttagaacgttctctcttggaagggagttcacaaccatatacccttgaggcttttgaaaacacatagcatattttagaatgtccccacagatggtcaggagttctgcagtgtgttctgggagtacctgagggcccagtggt

SEQ ID NO: 86082 - DNA, 2565 bp, Homo sapiens
ctgcattctgatcttgcatccagcaagccacacacatttgaagaaagaatagagagttgtttggatctggctgattgagcaacgcaggctttataattgtgtcaagctaggtcttgtcagactgcatcgacttaagtaatattccatgtcaggcccacaggtttatggcattgaagcctctttgtttcagtctcagtcatcctaaacagacttcatttcccaatagaaaagctttagatgtgaatgaaccccaaatacctgaaaacatccattttctgcctgcatggctactggtcccagaaccgttacaatgctagtgcagccatgcatccttttaagtccatctctgaacagtattgtttggttataactgtatggagaattagggagcttgatatatgtccctttgcaatgccttctaagtcttaatagccaaaactgggtggtaaatattatttccttttccctttactatgtgaatgatacttagacaaaacttatataactatcttaactatgcagacatttacttcagcccagagtgtctgtgatcttgactatgagaatcttgtctcttgagctttcttttttagcttgaatatctttctatatttcgaaaagatggaccagaaatatttaagttactacttaagtcaacacaggatgaaaagtttttaacttctttaaaggattaatgagggtgccctccaggccaatcccagtgtgctcaggaattacctctcttgttggggatgtgacatgctcttggccagaacagagctcagccggatgtcactgtgctcactcagcctgtggggtgagaggccgaggattgcttcctgtgggctgagtaagccttcctgtgttgtcagcgactgccagactagctgctgccaggcagtaccagcttgcccatcaggcgctcttgttgcctaactgagacactctgtgctttcaggaacgagagtaccctgatgtccagacagcctcccgttgctgtctaaatatttgtcttggatatgcttgtaagcaccactgggttcccagcactctgagtgggccttcctggagtggggagcctgtgtcgatggagcagtgggtggggaatttggagatggaagccaggcccttgactcagaactgctctgtacttgaatggaactgagctatgcagtatggcctggtggaaagaatgtgatcatgggcattagcctccaacagaccttgagtgtgaatacccgctctcctgtttattgcctgaccttgaatacaacagttgatctccctaagcctcggttgctttgtctgtgaatcagggaagaacactaatacctactttgcaatgtcgctttgagaattaaatgacaagctagcatatagaagcacctcaataaattaatattaattgtaacaaccaccaccaccataaccttcatgcagaaataattacagtttaggatttgaatcctggctgtcaccgttaggtaatatttcctagctataataaaacagcttacacttgttgaggactcattttgtgttagatatgctaaatgggttctctcttaatcttcacaacaaccccatgaggtagatactgttatcacccccattttacagatgtggaaactgagcaccagagaggctaaattacacacccaaggtgatactgcaagaaataagggagggaggcttaataaaaatgcagagctttttgattcttatgctggtagtcttaattaatacctcaggtgcttcaggagtaaataaagtaagcctcaaattaaataataaatgtgaagtgtcctgtacatggatatacacaatacatagtggaggtcttccacccgagtggcttttaatctaaaatctgaaagtggcttgcacccttagatatatgagagagcttagtaaaagtaagagtgactggaggagatcctgctgggcttggcagctctgaagctcccatcgcactctctgtcttgttctctcaatctgacatggtttcctgtgtcttttgctctaagcagcagacctgcttggactgtaagaaaaatttttgcatgacctgttcgagccaagtagggaatgggccccgcctctgccttctctgccaacggtttcgagctacagcctttcagcgagaggagctcatgaagatgaaggtgaaggacttgagggactatctcagcctccatgacatctctaccgaaatgtgccgggagaaagaagagctggtgctcttggtccttggccagcagcctgtaatctcccaggaggacaggactcgtgcctccaccttgtccccagactttcctgagcagcaggccttcctgacccagcctcactccagcatggttccacctacctcacccaacctcccctcttcatctgcacaagccacctctgttcccccagcccaggttcaggagaatcagcaggtaagggcccatttgtagtctctgccagtctgtgccagtttgagggctcattttcattttcctctcctgcctttgttgtgagaatggggtataaggctaagtgtcttgattatgtgaagccttt

SEQ ID NO: 86083 - DNA, 1033 bp, Homo sapiens
agttgttatttagggttagggctttccagtttggcaggagagtacttctaactgaccacattaggacatgtttcttttttggtatttaaatatctgtcagagtggccgggcatggtgctcatgcctgtaattccagcactttgggaggctgaggcaggtgtatcacctgaggtcaggagttcaagaccagtctggccaacatggtgaaaccccgtctctactaaaaatacaaaattagccaggtgtagtgatgcacacctgtagtcccagctacgcaggaggctgaggcaggagaatcgcttgaaccctggagatggaggttgcagtgagctgagatcttgccgttgcactctagcctgggtgacaagagtgaatctccatctcaaaaaagaaaaaatttatatatatatacatatatatatggagtaaaatatatatatagatataaatatctatagatatagatacagatataggtatataaagagtaaaagcctagtcggctgactttggcaaacctgttctgttagactgagcaggtctaaggtatgttaacactggagaatcttgccactacctgatctttcctgtaataacccccttccccacatatgtatattcctagcataagacttcattctccacctaaacttggagactgtggggtggcagaatggcaattttttttttttttttgagatggagtctcgctctgttgcccaggctggagtgcagtggtgcaatttcagctcactgcaacctccacctcttgggttcaagtgattctcctgcctcagcctcctgagtagctgggactacaggcatgtgccaccatgcccggctaatttttgtatttttagtagagacggggtttcaccatgttagccaggattggtctcactctcctgaccttgtgatccacccacctcagcctcacaaagtgctgggattacaggcctgagccaccgcgcccagccagccttctttttaaaagtagccagatgacttgaataggctgatagctcttctttca

SEQ ID NO: 86084 - DNA, 1030 bp, Homo sapiens
gtaatcttagcagacaaagaaattctcttcagtctttcgttcaaggtattgctgtggttatgtgtgtttaaaatccttaatttactgatcatcccggaatcataattgtgcagtttctgtcctttttttttttttttttgagacagagtctcactctgtcagccagggtggagtgcagtgtgcaatcttggctcaccgcaacctccgcctcccaggttcaagcgatactcctgcctcagcctcccgagtagctgggactatgggcatatacaccaccacgcccagctaatttttttatttgtagtacagatggggttttgccatgttggccaggctggtctcaaactcctgacctcaggtgatccgccggcttcagcctcccaaagtgctgcgattacaggcgtgagccactgtgcctcgccaattgtgcaattttaagcatgaatttctgtcctttttttttaaaaagcgctctattgctgttatcattagttaataattcaacaaatatgtgttgattacctggcattaaggctgagaataaagctgtgaaatagacctactcttgtttcctgtttcactttccacaccctaaatatggaagaaaaatactttaaaaagaattatataggccgggcatggtggctcatgcctgtaatcctagaactttgggaggctgaggcgggcaaatcacttgaggtcaggagttcaagaccagcctggccaacatagtaaaaccccatctctactaaaaatacaaaaaattagccaggcatggtggcacgtgcctgtaatcccagctactcaggaggctgaagcatgagaattgcttgaacctgggaggtggaggttgcagtgatctgagatcatgctactgcactctagcctggacgacagagtgagactctgtctcaaaaaaagaaaaaaaaaagaattatacaaactgttagccagttgattagatacagtactgctagaatgctctttcccccagaatgtaatcattatgagattcaaggaccttgcctgt

SEQ ID NO: 86085 - DNA, 1045 bp, Homo sapiens
taccacactgaccttagagatttttcatgaaagaataatcaatatatgtttattaaatgggtagtttgggcatatgatttacaaatttggctgcatatagagtcatctgggagctttttacaagcataagctcctaggtaccagaccagtgactcagtgtctcctgggggtgttgtgttggcacataagagacactctatgtcctttctttcaggtaactatcagtaaaatgagtatggtggggggggatagatagatataatatgtaaggcaagatgatatgtacattgagatagatctcatctctcctgcttctaggacttgattgaatcctatctagcatgctcttctttccagtctgcctagtgtaaattatatttcattaaatcagcccatcatcagaacagtgtttcttgatgcctctcatttttttctcatgttttctggcatttttccttcattactttttttttagttcataattcaatatttatatgattgtttgatgtataatagacaaaaatacatctgctttgctttcgagtatctaacatagtgtctgcctcataaaaggcactcagtaagtacttgttgaatgaataagtggttgattgaatgcatgattgaatgaagtgatatttgaatttagctttaaaggtgattggaattttggacaggtagagcaaatgaatgggaaatttattgttctgaagtggaaactggatcatattgctcatgtaatttcagaaaactggagaaactggtttgggaaaatggaagagttggttttatatctagtatgctaagtttgaggtatggaaatttagcaggcatttagaaatgaagcactgatctgaagggtgagattgattccagatattcacttttgggagttacctgactggagaatgtgaaatctgttcctttcacaaatacctggtaagctcctactgtgtgccagacagctatgttatagggaaggtgaactgcagtctgagaaggagccagtcttgtgaaaagagctagggagaatgtttcagccaga

SEQ ID NO: 86086 - DNA, 1001 bp, Homo sapiens
attttcatagtcttctgtattccctatgcatccagtaggtgtgatggtaaatgatttggctttagcatagagaatgtggcagctgattaaaaaaaaaaaattccagtgcatctatcttaatgagagaacttgagttgtctgaagaaatagagaggtcagaggaggcctagtgggaaaaaagaacaatgagcctggttagaactgacaaaaattcaccctaatgatttgactggctaatgatgactgggcaagttccctgagtccactgacccagatgttctaatttgtaaatgcaaagtgacttatttatcagcctcctggggaaatcttcagagctgtgaacctgctatgttcagtaatcttgctggccccagccccagcctgttctcagatgaaattttagaaactggccactggaactttttgggtaagggctctggaggtggccaagttaccagtagtgggggaatgaggtttacctgcccccagtaatcagcacttgatttaaaacaatcagtgagctgcctcttctttcctaggttgcagttgactgcggttggttcaggctgagttgtttgggaagtacaaattttgcccagcgtgagtcagcactgccctgggtaaactccctgctgtgttgcaatcttgcttaccaaagatacatccccaggcggcaccattcacttcacatgaaagccgctgctcttggttcctgagatgatctcatctgaacatggctccagcgacctcagccacaggaactagagacagcttgctttctgtcgtggcaatgttttgaaactggcaaaatcaggtaacctcaaactgttttcttaagtttcattagctagatgaagctgcattagaaactgggaaaatcctgtcttcagaagtgagtcaggttttttttttttttttttttttttttttttttgagacggagtttcactcttgttgcccaagctggagtgcaatggtgtgatctcggctcactgcaacct

SEQ ID NO: 86087 - DNA, 1109 bp, Homo sapiens
gggtggtcaaggctgcagtgagctgtgatcacaccaccgcactccagcctcggtgacagagtgagaactgtctcagaaaaacaaaacaaaacccagctaaaatagcataaagtagaagttagacccccatccctactaggaataactgctattaaatggttttagtatatgtgtgcgtgctcgctcgctcttttgcacgtgcgcgtgctctccctctctcggtgtgtatgtatatatatgtatgtgtgtatctatcatatataattaaatatatattcccccctgctgttcacagtgctttttttcaaatgggtaatgtattatggagcattttttaatgtgaattttttaaagcatttaggacctgggatggagctttgggttcctttctccaacccttgtctgttctgttataaaagggatgagagaggtacctttgaaagacctaaagaaaatacgttttcttccttgttacatgggtttcagttgaaataaggttttagctttatttgtgagtaaatcagtagaatactggatgttaggatgcatctctccactttattataaataatgcaaggctgattttatgatgtgatctcttgcagaactttgggggaagtgagaactgtgagcacaataatcttcagagaatgcacagtcctttgggtatttgtctactcatcagctgcttagtcagatggagtgttttcctaagtactactgaagtacacagttcagtctttattttgaaatctctccttctgccttctctccctcttccattactttgattaccttgatgggacattcaagctgtgcagtcgtatccttttatttctatagcctgcagaaaccaggttgaagattaactgtaggtgaacaggtaatcttatctacttggctagaaatcacccttcaagatgaaacacgtgttgacaaaggccccctagacttggggacatgaacaaaggtaagttaatcttggggcattattagtggaaaccagggtagacgtttaggaagtttgacttattggaggcagggcatgtgtgtcagggagacagagcatgtgagtgtgtgtattaggagaagagacgaattcagaggta

SEQ ID NO: 86088 - DNA, 1027 bp, Homo sapiens
tgtattttgagtagagacggagtttctccatgttggtcaggctggtctcgaactctccacctcaggtgatccacctgcctcggcctcccaaagtgctgggattacaggcgtgagccaccacgcccgaccacttttttttttttatactttatttttaggtaattatagattcacaggaagttgcaaaaacactacacagttcccatgtacccgtcacccgtttttctcccattggttatgtctcatttaaccatagtacaatatcaacaccaggaaactgacatggtgctctgtgtgtgtgtgcatgtgtgtgtgtgtgtgtgtagttttctgctgttttatcacatgtatggatttgtgtaactgttctaccaccacaaagatcccccttgtgctactcctttattatcatgcatatccgttttccctactgtcctaatctctggaaaccagtaatctgttcggtgtctctataattttgtcatttcagaaatattatggaaatggaatcataacagtatgtgacccaatatgtgaccttttaagactgggttttttgttttttacttttatatgcatagaacaattggaactttttttttttttttttgagacagtgtctggctctgttgcccaggctggagtgcagtggcgcaatctcagcttactgcaacctctgcctctctagctcaagccatcctcccacttcagcctcctgagtaactgagactacaggtgtgcaccaccacacccagctaatttttgtattttttttatagacagggtttcaccatgttgcccaggctggtcttgaactcctgagctcaagcgatttgtccgcctcagcctcccaaaatgctggtattacaggtgtgagccactacacccagcctcgaatgtattttttgtagagataggtctcactgtgtttcccaggctggtcttgaacccggcatttttcacttagtgtcacaccatccatccaagttattgtgtggcagcaatagtttgttccttttatctctga

SEQ ID NO: 86089 - DNA, 1048 bp, Homo sapiens
ctgtagtcccagctattcgagaggctgaggcaggagaatcccttgaacatgggaggtggagattgcagtgagccaagatcatgccactgccctccagcctgggagacagagcaagactccgtctcaaaaaaaaaaaaaaaaaaaaaaaaagaataaattgatagaatttgcattgggtgcttgtattgggaggcatattcccctctttttgactaaatactggaaaggagtttctaacttcttggcctgtaacttaactcacagttaagatgcttaaagatgggagacagaaaataaaatttaggggtgtgcaatttcttcgagacgcttttgtgtttgctttttagaagccttttgtgaatagtctacgaggatgcattattagtttttgtggttataatgtcaaaattagtgttgatttggagcaggcagggaaatctctccatgcatgcttttcatcctggtttaattgcttagttggatgaaatgtcaaacttgatagattattggagctgttattttggtagttaaacaataatgaaactgtttgaatgtttttggagaacactgcttcctgtgtctggactttgcactggagaaagtttcaattgttcacaagcaatactggttagaaaatgcagcttctgtggctcctaacacagctgtctaaattactagctatatgggggcctttggacaagcactgcttaacacttttggaaacaatttgtttctgattccaaaaatgtcgatggtcattccctgaatacttgagaaaactagaaatgggaaaaaggtattgcatgtgtctaggttatgccagtcaagtgttttttctttaagcatctctagaacaaatttacctttttagctaaggataagaggtttatggaaatgttgtagcagccccctgggcctttctttcctccttgatgactgttcagcagggtagcatgttgtcagcttgtgtgccagcttacagagggcttgcgttattataaccttgattaggaaagagggatggggaacaggagtgagaggacagatg

SEQ ID NO: 86090 - DNA, 1042 bp, Homo sapiens
acactgaatagttttccaggcatgatataggcactcaatctcatattatgaataagcttatgatgcatgggggatactgatgacagctttcttctgtccaggcaggcccagctacatggtggtatgaccagtgcagtcacacagccccatgcttagcagggctctgcacttagtttaatgctctgctgttgccatcttgaagttcttaatttttaaacaagcatcccatattttgcactgtttcttgcaaacagtgtagccagttctgtctccaggaatggatccagcactagtactggcccttctctttgggaaacatccttccattgatttcttagggagtaaatcccttgaagagtaacctcccatagaaaaattagggttagcaccctgtgtatgtttatctctaactgttccattctcagtaacctacacatcctctctcattaaaaaaacaaaacaaaacaaaaaacactttatattttacagaagctattagatccagagaggttggtaggggtgctggtgaaatggaatggtgatttgggattttggaatcaggaaaaagatctaagttcaaaaccctgctagtccctttctggccgagttacttggacaaggtaatgtctctgtcctactggtaaagtgtatgttgcaggggaattacattctttgttggtaaaatatatgcctcaggggaattaaacagataatttatgtaaagtgcctttcacagagagtctggcacatagtaggtggtcggtcactattaattcttccagctcttgccagaaataactaaaatcagggcactaggacttccaagccgtgctgctactaataaaagaaataatatgatttattttttcacaactgtttggggaaaggcctgtgcttcataaatatgcgttggaaagtacttagcaaatgagtagaaataataaaaatatgtccaagtaaacagctcctataaatatgtcacttggtagacaaattagtgttttatcactactaaatactattgctcgctgaaaaggatttc

SEQ ID NO: 86091 - DNA, 1823 bp, Homo sapiens
tgggcattccctccttaccagaagaaaacaccaggagaagcctcctggccagtgatgttcaaagacagaaccagtgcttgaaagaaatgtcttacttttcttcttggtaccttttcccctgtcttcctcctaacctcttgtgttgattttcttctcttctgccatcagtcttgataaactgcttgatgctggtctctatactggagaagtgactgaaattgtaggaggcccaggtagcggcaaaactcaggtacatgtgaggccagcagtcaggaggatttaggggtgagggtggtagatgcatagcccagggtccctgggggagcttcagcgtactaatgggttcagagcccaacagagagaagatgggtaataaggaatggggtcgggactcagcccatttgtgttgctggaatctgggcaaggtttggtggggagctcccatctggaccctctctgaagtgtcaagttcatccaatgcccccacccccaggtatgtctctgtatggcagcaaatgtggcccatggcctgcagcaaaacgtcctatatgtagattccaatggagggctgacagcttcccgcctcctccagctgcttcaggctaaaacccaggatgaggaggaacaggtaagggcaggatgctgggttccattgagattctgacacaggaaaaccccattatcccttaacattgtaagaatttgggttgaatagtcattccttgccttcaaacttgctgttctattaatacatctcgtattccttaagccacccctgttgatgccatcatcccatttgggatgctactcacactgattcttccaggaaaccctcccaactctttgcatgccctaaaccagggctggcaaacaccaagctttgtgtttccagtccatttctcacctgtgagagacatcactaatcagtcatatccctctttcctgctgagttctgagtactttacagctcagcacccaggcagccaccactgtgacaactgaccattagacaaagctcatttgccaccctggacctgagtccttgcatccaggtgcctcttccttctcagccttaccttgacccccctactccctcttatccaaagtccttgcttttcttttccaccgcttcaggcagaagctctccggaggatccaggtggtgcatgcatttgacatcttccagatgctggatgtgctgcaggagctccgaggcactgtggcccagcaggtgagcctgctgttctgcccctccttgcttaattcagctttctaggtgctatctctgtgggcaggtgtcctactacagactgtttggaaatgcagatgtgcaatctggtgactccaactatgcttgctactcccaggatggaattcccgagcacctaaatcacatacctcattgtttacatgttcatcttccctgctgaacagtaaagccccctgagtggaaggatcatgtcatatttatgtctgcattccccactaggtgagtgaggaatacttttagctgcaagtaatagaggttgtctgacagagacttgaagcttgaggacatttaattatgtcacatgagttgggaggttggcaggtccatgctatcagggcaatagatttgtgtgtctgattttcttgttcttcccctcatggttgcaaagaggctgccaaagctccaagcatcttgtcttcacacatccacatccatattcaaggcagtaaaagatagatggttcttttctgtacctcctcccttttatcagggatgaagaatctttctccagagcccactaatagacgtccctcttccccttacatctagttggc

SEQ ID NO: 86092 - DNA, 1054 bp, Homo sapiens
ggcaggcagatcacctgagttcaggagttcgagactagcctggccaacatggcaaaaccctgtctctactaaaaatacaaaaattagccaggcatagtggcacgtgcctataatcccagttaccccggaggctgaggcaggagaatcatttgaacttgggaggcaaaggttgcagtgagtcgagttcacaccactgtactccagcctgggcaacagagtgatactgtgtctcaaaaaaaaaaaaatgctagtttatgtcttaggagagaagtgatcttagagctagctgctgaagaggtagggctgtagccctggagaaggtgaagtggtggtaggtaggcttgtggtacaattgttacttggccctcctcaaagtgtgggccacagaccagcggcatcagcatcacctgggagcttgatagaaatgcagagtcctggccccaactcagaccttgtggatctgattcttcattttaacaaagttaccaggtgactctgctacccactcaagtatgggaacccttggtgtgatgaggcacagtgctcttggggttaatcggattagaggagaggcaaaggcacaggcaagggggagaaaaagagccagggaaaccttgttagggctgaaggggggacctctgcgttagtgacgtcactgtgttttcacacagcaaccctttaagataggtaattgggttcctttttaaaataaggaaaatgagtctcagagaggcctgatggtttgtccaaagagaaacagctagactgtgttgacgtgaaagttcagtgggcccactgttactccatgccacctgtcagcaggcacttgctgtttggggggatgacaggcagatgggctaagcagatggccacgttggagtctaaggcatgcaaagttgtgcaggtatggagggcaagcaagaggcatgctagaagctactcatttggagaagttttacaaattgtaatgactggtaatgattaaaaatggtctgggatggggaccaggcagtgtgattttgtaaaggttcccaggtatttctaacagacagcc

SEQ ID NO: 86093 - DNA, 1008 bp, Homo sapiens
gggggagaattgctcagaacttggaaagcgactggtctctcaggatagagaccgcgacgcaaagaagtgacggaaaagatgcgtccgccatcccttttgctccacccctgacgttggcctcggccttcgattggctgctcctcccaccagccccgcctcaggggcgcccacgtgacccgatggccgccgtgggattggttgttcggcgagagccgcgctaggctgtaagacctgagccgggcggagaagcaaaggagagggaagctggaagcacctttggcccgggacagaaatctggagagcttggctacctccatcctcctcaggccggagcaggcttcctgagagagtccaggtcgtaggagttttacgacttagaaaagcgggctgcagattccttcctgggtgtttggttcaagccttggctccagcctcactctcagtcttcccgggagttcgtgggatttggaccttagattattagtattattttgagggcctcctgtgtgtaagcactggttgtgcgcagatggctgtgcagagggccatgaggtagaggctggggaaatgagggcttggaggtgcttgaggtatggtctttacctacgtgaaatgttggaggtaagtcggatttataacttgtgttgatgcttttataatctaggagcttagggtttagtaggaagagtcgctcattcaatgaattaaacgctcattcctatgtactaggcaccattccgagtgcagtggctacaaagactagtagaacatagtcctggttctttaggaactctgtgattgggcaagtgggagagagggcggaaaacgtgaactggtgagtagttggcgtgtgatgcgtgccgtagtggaagaaagtgctgtgagagttagaagagggggatgattgaaggaattaaggacatttaacagaaagtgatatttgagtaaagtttatttttgttttgttttttttttttttttgagacgggagtctcgctctgcctccca

SEQ ID NO: 86094 - DNA, 1083 bp, Homo sapiens
ttgtctcaaaataaaaatatatatatatattaattgaaaacaggccaggcatggtggctcacgcctgtaatccgcgcactttgggaggctggagaaggtggattgcttgagtccaggagtttgagaacagcctggacaacatggtaaaaccctgtctctacaaaaagtacaaaaattagccagatatggtggcctgtgactgtagtcccagctacttgggaggctgaggtgggatgatcgtctgagcctggggaggttgagactgcagtgagccatgatcaggccattgcactccagcctgggtgacagagtaagaccctgtcttaaaaaaaaaaagaaagaaagaaatattaattagaaacccatggttgaaacttacctgaatagaaggctttattttttttcataggtaagcctatgttttcttggatgtgaaactagggcactgggttgctcttaggtaatacaaggagatgaaatgcagcgatgcgatgatgagtgaagtagagcctgacctggtattgccattgcttcactgttggctttgaccagggtatgatctcttaatcttctctctgagctgattctgattgtggtttttccacacaggtgtgttgtatcctgtttggacactggttttattatgtttaagatgtttcttttattttcttttgaattactgatattctcatgttttcctccttaggttgagatgaaaactcttgctttgaattcttcatggaggactacatcatttcaatcctgaatctggctcaattctattattcacttattactgtattaaaaacgtttaattggccaggcacagtggttcacgcctgtaatcccagcactttgggaggccaaggcaggcggatcacttgaggtcaggagttcgacaccagcctggccaacatggcaaaaccccgcctctactaaaaatacaaaaattagccaggcgtggtggcacgcacctgtaatcacagctacttaggaggctgaggtggcagaattgtttgaacccaggaggtggaggttgcagtgagccgagatcacaccactgcactcaagccttggcatcag

SEQ ID NO: 86095 - DNA, 1180 bp, Homo sapiens
tacacaggaatcttcagactactctctgtaacactcaacccctattccttttttaaccagtttctcaagaaggatatggagagctcataaaggaatatcctcaaatatcctaaatatccaacttttaaaataccttttttatccttaaaagctgataaacaatagatgtcacttaacaaatgtctcacagtatatggaaggagcttttttcccccccagagtgtttctaagcatttctatcaagagcaagtctgcatttcttatcgtttgcaaactgatgaaatttccaccttacagacaggcaggtaaatgctttcttttctaaaaagaagtcttgctaccacctcactgttcactttattttttatgcggtctaacctgggtttttcgtaagagctcctttatttcttatattttaaggaaagggataggcaaaaacttgtgtactcattattctgtttaatctctacactggccctcatatcccctgccagtcctgatccttctactttaagcagcttggtcaactgtaagtagggttctagagagcaggctaaaaggttaggatcaaatgggcatatccttttaaagaaatccatataatcatttaaagttcatatagttatgaattgaggctgagaagtgtcaactcaataccatgctgaaaccagctctgtgacattacagcgcaatacttttgttgtgaggataagacatgattccctttcagttctcaggggagtagagtttaatcagatgttgtacttctgttggataacctgtgatgggacaagcttggtgactcctcacataatgaaacacacagcggtaacaaaacacatagccagaggtggcaagaacagtatcattcacccgggttttacgacacagtgggcacacagtcttcattttgggtaagaggggagaatcagagttatagtctaggtgtacaggtggtggtggagtaggcagggcagtcaatgacttgatggtttcttgattttcagatgagtaccaccagtcaaggaactgcaagaagaatacacccacagaaaggccagtagacagggataaggcaacacccccaacagctttcttcagagctgagtttatcttctcactaacactgttgggagaaaagaacaaggaggcaaagagagaaactttatttaggtatcat

SEQ ID NO: 86096 - DNA, 1050 bp, Homo sapiens
atattagtgtgtggccagggctgagaacctttgcattcaagagtcaggagacacagtgctaagcccaactttgtcactgactctgtgaactttgagcctcatttcttaatctgtaaagccgagcgtgggtaaatgaggtaatacgcgcctgctccctacctacgtttatgttctcctccagactttaacattctgatggaagatcatccttcatatactgttctctccccattgtagctagatataatgagatttggtttttcccactcttgtggttcttgaagatctggattgcaccttcctctctggccataatttaaaagatttttaaaacttactgatggcttccttgtcagtgagtcaggtaatattctagggctttgaattttatatattctataattttaaaatcttattttagttgctgccctgctatcctggtattggttattacatagtgtagtattctgctctaagtctgtggtactggaaccttaccagtttgctctcatctcttgcaggagaaatatttgaactaaaagctgaactcaacaatgaaaagaaagaaaagagaaaggaggctgtgaagaaagtgattgctgctatgaccgtggggaaggatgttaggtaagagtaatcacccttgccattgatcacttcagaggtccataccccatcttatggcctttactgcttttcctttaaaagtatcataatcatagaacctctaagaatgggtttgtcccactaaaaacatcattaggaagtgcagttgcctttgtattaatgctctactttttgtttgtttgtttgttatggggtgtgtgtgtgtttgtgttagaacagtgaaacgagtttgatttcattgcattcagatctagcataacacctcctgagagctggcacagttacaaatctttttgctgaggtcgttttagaagatgataaaaatacactgagaagcataagttcacatgatctttaactggctcaagccactgccctcaactttacaactgtacattcaattgctggattcaagatgaaaat

SEQ ID NO: 86097 - DNA, 1050 bp, Homo sapiens
tttccttttttttttagacacaggagtctcgctcttgttgcccaggctggagtgcaatggtgtgatctcagctcaccgcaaactctgcctcccaggttcaaacgattctcctgtctcagcctcctgagtagctgggattacagacatgcaccaccatgcctggctaattttttgtatttttagtagagacggggtttctccatgttggtcaggctagtctcaaactcccgacctcaggtgatccgcctgccttggcctcccagagtgctgggattataggcgtgagccaccgtgcccagccagtttctttagtaattcatttctgtgacagttaccactgtggggacatttgttcttgcatcaaatcactgttagttaaggctattcatgttctgtccaacagcttggcaccaacacctgcttactttccttttctcttttaccctctcttctcagttctctctttccagacgtagtgaactgtatgcagactgacaatctggaactaaagaagcttgtgtatctctacttgatgaactacgccaagagtcagccagacatggccatcatggctgtaaacagctttgtgaaggtaacttttcccaaggcctcaataacagagtttgaattgcaaataagtaacctctgttcacaaggaaggagtgtagggaagtgttggcaatgactaggaatgttcatgttttaagcattctgtataccagtgtgtgtcatccagggaaattcaaaccatgtgctgagctttctgttagtggggcttggtgcatccttgccagatgggtagaagaaaacctggtgaaaccccactgttttaccttctgaggctgacaaaggtgggcatatcattgtactatcagtaattgggggctttacctattttatctttgtagaaattatacttatgagtcagcagtagtggagactgccggagtttctactttcatttcatttaatacgtcttacatcatttgattaatttttttttttttttgatacagagtctcactctgtcaccgaggctggagtgcagtg

SEQ ID NO: 86098 - DNA, 1047 bp, Homo sapiens
aagcttgggcttaagaggtagccaacacacatagatacatacctactttttattttgaatttatacttttcatctcaactgtattccctacttattaccttagagtattacaactgtcattagaacacttaaatttaagtgccttctatgccatgcacagtggtagatgcttttacttacaatgtttcacttagttctcacatttctccttaaagcagaggttattccatgttacaggtcaagaaatgtttactcagactgaagaactcttcctaaaatcatgcagctagtagtaatgtagctaggatcccaacctagttctgagtcccagactccattgctggttactaccttcatggatgaatgtataccagagaatttaggccaggtgtggtggctcacgcctgtcatcccagcagtttgggaggctgaggagggtggatcacctgaggtcatttaaatgtgtatgtgcgcacacacacacacacacacacacacacagaactgcttcattttctcaaagtgtttacgtttgaatacataaagactgagttatctgaacactgcttcattatagaaatctcaaaaaagaaaaaaaaaatgaaagatacaaaaaaaaaagaaatatcaatcctcttattccagtgatggatatgagtccttattttactgctcttgaggagtgattttgttccactttttcagaggctactccacatggtggcagcactgcaccagcacatattagattctcttagaaaagaaaagaatgaatgcttccaggggttgtgccttagtagttttcttgtagctcacttcagaagggcatcctagatttgaaagcactagaatatctgcagaaatgactttgaaatcttctaatatgagagataaatgttggtcgagggctgaaaattcttggtgttatattgacctcaagtctggttcctagtgacactgtgccttgctgcaggtaacaaagctttaccatagttttgtttcctgtgttttgcagagaatcacatacatcttactttcctgcagttg

SEQ ID NO: 86099 - DNA, 1033 bp, Homo sapiens
caagactgggcatgtgttggcaacaataaatcaaaacaggcatttggccttctgatatgatattttgattctttagactataataaggtcaactaagtatgttgtgcaagggaaataaaatatcttgcatgtgaagcacatggaagggattattatttctctctttatggcttttctcatgcttgatgatagagttagcaaacaaaaattaagtcagaaaagagcctcatacatgttaccatccagtaggtgggctagataagttttcctgatttgtcttaacaagtataaaatagtatatctgtaaccatatttaccaagtgagtctctgatttttcatcttagcatctttgttctgatcaccaaagtatagcttgagatgattgcatttgtggcatcattatcctttacataataatggacatttttgtaagtatattatttgttaaataaatcacattctctagacatttatcttctagataaaatcatatgctgggataatctgaagattacacagatgatgtgaatactaaaatcaatagctagattgtagtcattatgtttcttcccttgctaacaaaatgataatcatacaaatcttaatttctctagtttttattaagggacttcagtaagaactaacaatggttttacatttttgagaatatttccaatatatataattgctgaagcttgtctcctatcacatctcatttatacttggagaatatttatttatttatttttgagacggagtctcactctgtcgcccaagctggagtgcagtggcgtgatcttggctcactgcaaccttcacctcccgggttcaagcagttctcctgcctcagcctcctgagtagctgggattacaggcacacaccaccatgcccggctaattttttatatttttagtagagacagggtttcaccatgttggccaggctggtctcgaactcctgacctaagtgatccgcccatctcagcctcccaaagtgttgggtttacaggcgtgagccaccacgcccagcca

SEQ ID NO: 86100 - DNA, 1041 bp, Homo sapiens
gggtttcgctatgttggccaggctggtctcaaactcctgatctcaagcgatccgtccaccttggcctcccaaagtgctgggattacaggcatgagccactgcgcctggctggccctgatgattttttatattttttgtagaggcaaggttttgccacgttgcccaggctgatctcaaactcttgggtccaagtgatccgcctgtttcagcctcccaaggtgttgggattacaggcatgagctatgagctaccacatccagcctgaagtatcttcttaatacccagtctgcataaatcactacaacattggttgatgataaatccagcagtttgggtttctgtatggagaacagtttcatctccacctccttgcctttgccttttctttaggattctgataatcctgaccttcgagaccggggctatatttattggcgccttctctcaactgaccctgttacagctaaagaagtagtcttgtctgagaagccactgatctctgaggagacggaccttattgagccaactctgctggatgagctaatctgccacattggttctttggcctctgtgtatcataagcctcccaatgcttttgtggaaggaagtcatggaattcatcgtaaacacttgccaattcatcatgggaggtaagaaggtgtgaactgtctctgagtgagaaatgactcttgtttagacagcgttgctcttctttatgcttttatagtctggaaaagaactgctgtacatttttgcttctttatgcttttatagtctggaaaagaactgctgtacatttttggacacctactactatacaaccccagggagctccatctgaataccagtgaccacacataaaatcggtgaaagactcctctgtgttccaatctaggagtacattatggctttagaaaattgtggtgaagaccttctaaattgataaagtctgaaagttgcttaagtctgcagtaagaagagactagaaataaccccatagttgaaaacttggaaaaaagcctgtgtatacatttagccatc

SEQ ID NO: 86101 - DNA, 1071 bp, Homo sapiens
agttgactggaagttgaatttgaccaatttagatatggtcgctcagtcccagggtcctttttatccttgcttacttgccataattggagaccgaaaattgagggcattttatattttggattgtctaaccattttctattcttctatcttaaaacttgatattcatgagaagatatttttattcttcctttttcatagcctggtgatcttcccttagatcttgttctgtttcatcttcttttactgtcacactcataaaattcggccagcgttaagatgtagtgagttgtgaccttttcttattaggttggagcaaaagtaattgcgatttttgccattaacagtatttacttttgctccaacctagtagaactgtcacagtcaggaaatacttatcaatttattatttatttgttgatatttctagtcaggaatgttttgccacaacattcctgaaagctgtggccttcctccatcaatagtagtgactctcaacattggtgattctttaaagaggagtagggtgggccattgctgtgatataaagaaagtaaacatactgtagctccccaggtgattgattcttgtatgcttttttaaagaaagcagacatctttgaatggaatgcctcttcatctcaagacttggataaaaatggatttctacctattctttttagtctccttactgaaacatccttatttttttatcgcatttcagcatattctcttttgcttgtactctacaggtagtttattccatctgtcagtacaaactgaactatcgctttgatgtggagtaaattcaagtaatgtagtttatgcagttgatctgctctacatgtagagcatgacagtttactagttaggtataggcttgcttgcaaagtagttatttgggctttttttgtttcctttggaagccatgtatgtggagttttttgggtttgggtttgtttttttttttttttttttatgactctggtacttaatctaagaaactgctcgttctgagtagtgtgatttttctcaccgtgcagatccttctggtttggtgtagtgtgggaggtga

SEQ ID NO: 86102 - DNA, 1086 bp, Homo sapiens
aagcttctaaagaatgtgtgttctcatcaatgacgaaaaaataactgtcatgattaaaaagatgaagaatatactaatttgactcctaagaatattgtaattatggtgttttcttattgatttatcaaaactactaagatatatagcaatattttaaggactgttaatctgttcttcccaatctcccctctcccttttttttttctcctgcaggtgggacaatccttcatcccatcatcggtgcctgcaacctttgctccttcacctacacctgctgtggtcagcagtggactgaatgacctgtttgaactctccacagggataggcatggcacctggtggatatgtggctcctaaggctgtaagtaaagagttaacatagcaatactttcttaatggacaggacccaaactgtttcactttcaacatttgtgttacttctactggtaataaatcaaaggtttgggcccttgttctggaggacttagaggaagatgaaaggtggcttcaaacttagcagtaggaagcaccattagcatccttgttaaacatttttataattagacttaaaatttgacatattaattatttgagttttgttctcatgtttagaaatattgtctagtttgtcaacattgaagtcaatctagtgaaaatctagtggtatgtagtgcagcagcaggagaaaaaaatgcagagaagtcatttctcttattcctctttccccattggtattacgtatggattctagaatgccactgctcagatgtggttttcatggattttagtgtacctttttagagttccaatttaggtttgtgtcactggggctcttcttgtcttgtcttaaccttacttgatgtcactcacattgaagttcaagaggggaaactcccggttaatgaagctcatttaagcccttgggaaaagcaccatccaggctaggccaggcttcatacagtcttacctttctgaggaccaatttggctgaattctctgctttctaatctgactccttatgggggatccctgctatagagatgtagaccagttgtccattccaggagttgtaactgtgataactgag

SEQ ID NO: 86103 - DNA, 1050 bp, Homo sapiens
actctgtcgcccaggctggagtgcagtggcgtgatcttggctcactgcaagctctgcctcagcctccccagtagctgggactacaggcgcccgccaccactcctagctaatttctttttgtatttttagtagaggcggggtttcactatgttagccaggatggtctccatctcctgatctcgtgatctgccctcctcagcctcccaaagtgctgggattgcaggcgtgagccaccacgcctggccttaaatttttttatctttatttttttaatagtataggccaggtataccacaggttccaggaccaaggggcgtgttatgaattatttaggtagataaaaagaataggcattcagattatatgagcaatatctgagtatttactatttaccacaaactatagcaagagttaaaaacgtatataagacatagtcgatgcctttaagggaattaccaataatggctttggttggaaatgatgaaaaaaaatcttcaaagattacagccatgctgttttcattagtagatgcagtttcttccctttaaaccattttaccaaaactaacagaaaaacacattatgctcattggaatttttcttttcctcttggtagcagtacttaaaagtagtaaaataaccaagctgaacagaaggtagagcagaagccagggtcgtttaaagactggttttttaaaattattattatttggttcttaaataattgagaacgatctcaaaattcagaaaataagactctatccggagtcttttgcactggcttgatatttatagtataaaaattactataattgcctaaggaagtgaatttgttcacttaattgttaatcttaatttgttttttatttgttaaaaaatgcatagcatcaagataaatcttgtctgattctattgagctttatactgtgtttcaggtctggctacctgcagtaaaggctaaaggcttggagatttccggaacatttactcaccgccaagggcacatctatatggaaatgaacttcaccaataaagctctgcagcacatgac

SEQ ID NO: 86104 - DNA, 1013 bp, Homo sapiens
tacttactgtgattgctacttccagtttgacatattcttcatgtcccatcaggactataaacatattatttaatctcatctgagaaattcaatatattatgtattagatattccttttttgctagattgtccttagtgagaacactcctttatctttttttatcaagataatcgagagtctactaagcagtatcttttgtctttctgtaaccagcactcaactactggtttctgggatcttttagcagtatatctattaataataactgtcttctttgaatggccacacataagcaatcggcaagagttccatattctgataagcaaaggtgtctgatggatcagaaatctgtcctcaaagtcaggagacagttaaacacccaaacttgggtcacattacccaagtaatagaaatctatgctgatatcctgagaaaggataatgaatttcacacagtagttctaaaatagtaataaaagtgatttgtgggcttttatttgttaaattcacaggcatctttttatcatgattataagctaggagttaatgatggataatggcattagttttatgtttctaatttaataaatgattagaaatagatttaaccttgtggtctttagatttagcttgtagtgcagtagaggactttgaattctggacgtaaaatagctacctctttctcgtcccagctgataaaaacctatattataggttgaaattacagagaactcactcagttttttcctcagctggattgaatttgagagccataccctgctctcattcatgtttactctcttatattttgctatagcatgatgtttaatgagatggggaagaaagtacattattcatactttttaatgaaggggttatgcataggctttgtagtattaaggcccatacatatttgaataaaactgcaggaaagctttgagccatgtgaccatgtacacataaggaatgtaaaatctcatagttggaagggatggtctttaattttgtctgtt

SEQ ID NO: 86105 - DNA, 1009 bp, Homo sapiens
gagtctcactctgttgttgcccaggctggagtacaatggtgtgatctcagctcactacaacctctgcctctcaggttcaagtgatcctcctccctcagcctcctaagtagctgggattgcaggtgcctgccaccacgctcagctaattttttggatttttagtagagatgaggttttttcaccatgttggccaggatggtctcaaactcttgacctcaagtaatccgcccacctcgacctcccagagtgctggaattacaggcgttagccaccacacctagttgtttatatgaaataaaatgtcttcctttaggttctatctgtagatcctagttctacattttgagatttttataaattaagtttctgaatcaaggcacccagggcctgaaagtcaatcaggtgggcctgtaatgaaaacatactccgtctgaatttattttcttttttttttctacttaaggaaagcctaagtttatggaaaggcatttatataatgtcagttttattgttctaattttagaagaaaatccatttagaaggagggaccctggtaaatgtagttggaatcagttatagtttggagactgaaggaaaatattatctaatcacttttgaaaagtgtgtgaatgaaagatgatccttgacttggtagcagtcttcctttccaggaacccctgaaggagttgaagggcaagtactcagaacaggaaagcacagaacttctcgattccatagctcccactgtgctcctgacagtaatatgtatatgtatatgaccttcttccccagtggaactacccagagacagcatctgtgttcagtggcctgcccatctgtccagtcatcttgacagtcacgtgtcctccttttgtccacgtaaggttgtactgtccaccaggcagaacataggcataacagtgaactcatttgatttttatcttgcagctaactaatctgaggatgtatgcttaatatctagaacctagatttgattctagatcagttt

SEQ ID NO: 86106 - DNA, 1373 bp, Homo sapiens
gaaataaaaggggaaaagctaagtaataactaagtgtggtaaaaatgtctcatgaaaggagtcttagtgcctcctctcctgagctgtcagtggtttgaatgtgcgagaaagacatcagggtgagagctacctgcaaaactagttcacgtctatgtctatggtattatgtaaatattggcatctccaacacctatcagagcagatattgatgaaaggtacctgttgtattgcagataacgtgggaaacacagtgatgaaaaactccaggatccctttgttcagagagcttaccatttagaagggtagaaagaccatccatcatggcaaccttttcccagagagcacaatagaatatgacagatttttatgtggggagaatttagttcttgaagtaggcatgagtaatttgaatgctgtcttcagaaatgaatataataaacagtcaacaaagaagcagtgcttgtcatctctattcttaaagtttctctttctctgatacagcaacatctcataaagagagaaataacctttaattctggaacgttatgtcctttttgaaactgtagtcatgaggaagagccaaaacaccaacccattcttaccctgagttggtgactatgaaaacttctgtcatagtttctgtcatagctgggatcttaggatctagcagcagtcacctttgcacagcttcagtctttctcaaaatctgtggttgagacagtttgtttcgttattattttcgaggcatagtattccctaaaggcttaagaaatcatttctgcctgctttgaaaaaaaaaaaatcttaaacatctaggttaataaatttgatttgcagttgacttctgtagctctgggcccttcctgatcctggcagttgaggcccgaatggctcacaatgaagtagtagtgacttgggaagtagcactatggatgtggtcatcagtctgtgtgtccccattgatctggaaccagcatccagaaacagataccaacatgacagtcactatggcatacccacacacttatttctgtctttgtcctcttcagagtcttctttacctgtctagcacctaatttgagattgccagctccttaggcccaccaatatcataatctccaaaggtaactcgcactaaaccataggtgtaccttattctgttttcagtcctggaatgtgataggcagacaagtcatgaacctgttcttcactttttgctattgtgtgggagaatggcttctgaagtgtacacatgtccatgtgacagtacttgtcagggaactgaacacacatggctcataaggatgtgagaagagagtgtacatttgtttgagattttaactgaaggtgttggattttgaatctgtatttct

SEQ ID NO: 86107 - DNA, 2127 bp, Homo sapiens
gaagttgggactgagatatagccatcctcttgtcagactgagaaactgaggcaggcagctgaaaggaccatcaacaagttaagggctttggcccttcccttttcatttaataataatccctataactcttagaaaagcattagagcagctgttgctctgcagtcagtggctttgatgtttttagtatggattatttcctaatcttatagacccacatggaatggaggtagaagcacagcacaacttgatattgattaaattgaaatgctaaaacccacagcacttattaacataatctctttgtttagctactccagtgatagaagtttctctcccactgtgtcaaaagttttcttgaactgagtgcttggatacctttagagctaatgccaacctctgtgctaatcttccatctcctttttctcctaacagctgtcactgaagtgtagagctcctgaagtctctcaatacatctatcaggtctacgacagcattttgaaaaactaacaagactggtccagtacccttcaaccatgctgtgatcggtgcaagtcaagaactcttaactggaagaaattgtattgctgcgtagaatctgaacacactgaggccacctagcaaggtagtaactagtctaacctgtgctaacattagggcacaacctgttggatagttttagcttcctgtgaacatttgtaaccactgcttcagtcacctcccacctcttgccacctgctgctgctatctgtccttacttgtgggcttctccatgctgtgccaatggctggctttttctacaccctcttttgagtgtagtttggtattttgtaattgagagctcatttcaaaagcagaaaaagacaacaaatattaaagcaaggaaaagtgtaactgaaacactgcactttactgttttatacttttgtacatatgagaaatcaagggattagtgcaaccagtagaaagcattgaaatgactgtcattaaccacacagtcctggaggcagagatgcagttacctaccctagcttttgatgggttctcttacctgtagtagccttatccctggtcatttggattttcagtttgcttttttctttttttcccctccaaactccttttccttggccaagccttcatgcttccccctttccatattataatctcatttgattgctctgcagttgggaacggtgatcttcttgaatgatgtttcagtgtgcaaaaactatagagcctgtcagcaccaaagctgacagaagttataccttactcctttcctttcccctgaacaaacctgctaatcccactaattcaggaatttgagtagagatggggaacaagaacccagatgctgtcccctcaccccctctcctgtatttctcaggtccagttcaaatctaaaattctacttttagagttgaaacagagtaataacttatctaaccctcttttcctacaaaggagaaagataaaaggcacaaaggttaccgccaaggcccgtcagctgtgtagtggcaaagccgagaccgagtctcctaagtccccgtcagtgtggttttcaccacaggactgtctcttgtcgttttcccctaatgccttctcctgccttttctgtgcctagtttttggctcttcacatattccatattgattttgacgctctgtatattggcatcaggtggcagctgaatatcttttgaattactcgaaggtaaagccagatgccagaatgaaggtgtagccagtgtttcccatatgcccctggagccccacttattgaggccagcagaataggtgcagagatgaagtgagcttagagatgttgcaaatgctctttatcccttcagctctctgatctgctctttcttcatgatacttagtctgcagggcatattaagatcatcccagaggttcaggcagttcctgtcatctctgaaaagactgggggatatgaaatcttccccctaccccacttaatgcgttggatatgatttttcaaagaatgcttcatgcccaaaataccagcctgtttagcagtgttacactgtttgatctgcgggcacttgttgcattgcctggcacccaatattcagggtccatgactaagactggtcttctcagatgc

SEQ ID NO: 86108 - DNA, 1033 bp, Homo sapiens
aaccatcatgagagttagataccagttttctgctggaaatacagaacatttcctgaaaccgtgtggttgaggtgaaacaggcattttgcagtcttatattttgagtaaggccaaacctgcctagtgttataaaactagacaaaaaacccaggtacccggtcttgcaggatagaaatgtgtgactaaaatgaagcatcgatctgagaagactacaaattagcgggaacctttggacaggagcatgctatacattacttagattaatgttgatatttaaggagccaggatattgatttgtttttgaggggtgcccatctacttcatataagaggctataaactgcacttctttcagtttctgcttaatccttgctcaaacaagaaataatttcttattccaaagtagacattggtacatctttttctaggtacgtaatttgggatgaagtctgataaagctccttagaagttcttatagtacaccctcacaagagtgtatcatctacccgtggtttaaacagaaattaaaattctaccctcgtggagaaatttaccaagttttaatggtttcagtcctcattaaaaacttttagcctgtcttgatctttaacataattattgatataaaacaatggcttctgtggaaagtcgaagttttagtggtttgctatttgtaaaatacaggctttttcatgtatcatataagcatataagctggcttaatcattagtattgatcttcaagttactaagacaccagatatttgttattttgtagttcgagtattttttaaaatacgaaattggcttttcggtgtgtgaaaagggctacttactagacgcttgtttttaaattaacattcaattaattaaagctagactctttatattcttaggcttggtatactatttatatgttttgtaataagtgtataaaaataatacctttgactttgtgtaaaaataatgcttttgacttgttctttgatgaatgtttattaaaatcccccaaaacaactaatgccattaataatt

SEQ ID NO: 86109 - DNA, 1032 bp, Homo sapiens
gtttaggctccaggaaactttaagacaaattaacgtaaaaatggtttctgggctggtaatacccttggtgtttctgttaaaaacatgaagaacggctgggcgtggtggctcacgtctgtaatcccagcactttgggaggccgaggcgggtggatcacctaaggtcgagagttcgagaccagcttgaccaacctggagaaaccccatctctacttaaaaaattaaggcatcctacatgcctgtaatcccagctactcagaaggctgaggcaggagaatcgcttgaacctgggaggcggaggttgtggtgagccgagattgcgccattgcactccagcctggggaacaagagaaactctatctcaaaaaaaaaaaaaaaaaaaaaaacctgaaaaacattttctggaggaaatttcatggtttagatcacaaggaatttcagataaagcaagccttgcaaaagatatgttcatagtaaattgcagagctttaggaaacatttcactgaaatgagagtcaatgacaaataggattagagcctctaacagattatctgagagaatatttttatgtttaaaattgttaaaataaacctaaaggaaggaatcaaccctaagatcaaggttggccgggtgcggtggctcatgcctgtaatcccagccctttgggatcctgaagcaggtggatcacctgaggtcagaagttcgagaccagcctggccaccatggcgaaaccccatctctactaaaagtataaaaattgccaggtgaggtggcgggaacctgtaatcccagatccttgtgaggctgaggcaccagaattggttgaagctaggaggcagaggttgcagtttgagacactgcactccagcttgggtgacagagcaagactctgtctcaaaaaaaaaaaaaaaaaaaaaagatcaaggtgttaataaaacaagccacatagatttgaaaaagaatcaagtaaaacgtttagaattaattaggaaaagtgaataagttggaatagcagacctagcagaagaaaga

SEQ ID NO: 86110 - DNA, 1029 bp, Homo sapiens
aggagtttgaaaacagcctgggcaacgtgatgaaactcccatctctacaaaatacaaaaaagatcagctgaatgtggcggtatgcatgtgtaatcccagctactcgggaggttgaagtgggaggattgcttgagcccaggaaatcgaggctacagtgagctgtgattgtcctacagcacttcagccttggcaacagagcgagaccctgtccccccccccccgcaaaaaaagattaagaaacatgggaaatagattaaaaactcctgtcatacatctaataagagattgagaaggagaaaatggaggaagaatcaatagttgatttccaaagtaaatgaacattttgaattgaacactagatttaaacatgaaacattcatacctagatacattgatgtaaaaatgcaggttatgaagtaccagtaacctactagagaaaataggaagcagtggtatgattaataacagactaattaaatatttgaagaagctggaaaataatgaaattatccattagagtttagagagaaagtaaccattgactttgaattttcttttttctgttttttttgttgttgttgttgttgtttttgttttttttaagagtagcggggactgacaacaggtgcacactgccttacctggctaatttttaaaattttttgtagagataggatctttctgtgttgcccaggctggtcttgaactcctcagctcaagcaatttgcaaacaccaaccaaaaggtgattttttttttttgagatggagtctcgctctgtcgcccaggctggagtgcagtggcgcaatctcggctcactgcaagctccgcctcctgggttcacgccattctcctgcctcagcctcccgagtaactgggactacaggtgcccaccaccaccacgtccggctaattttctgtatttttagtagagacgggatttcaccatgttagccaggatggtctcgatctcctgaccttgtgatctgcccacctcagcctcccaaagtgctgggattacaggcgtgag

SEQ ID NO: 86111 - DNA, 1132 bp, Homo sapiens
atgttatagactgatagaattcacttgaaatttagaaaatacataattattttcaggcacacagggaacatgtgccaagggggaaaagcaaaacaggaaatctgagcaaataccaagaataataaaataacttttctggctgcagtggaatattaggaaaaaacacaaagagaatcaaaactatacacttggaaattcaaaagcactttaaatttaaattcgtaggtccagacacaaagcacaattgtcaaataatcacaatgaacagttgtttaggatgccttaatctataaactgattttctctgatgaatgtaaaacacctgcactttatcactcaaggatttataccaagggacagatttactagtcagtacgcttatttctatatcatctgggagtttttaagctagccagctaaagaagttagatttataatttcagagggctgaaatgactgggttaagattaagggccttactgttagatttgagatagggttacaggacctatgtgctgtaccctactaaaattttgcctgaacctaaagaaaatatgctgcgattatgtattttgtcactgggagaacctacatccatgcttcaggatatagtttaacctaaagcttcatgcatccacaaataccttgttttactcattgttttccccctcataacccttttcatcctttgatttgggataatctgatttcctgtcatttcatagaggcatctaatctcttaatggtctaattagattgtgtattcttttccgatttttcttaattggttgttagctacaactctagctatcttctcatgggcctggcagtgatgtgtaattttttctttttcatttcagctagttttatgccctccatattcatagaagtagtagtttgtgtcaagatttcatttaatactttttttctcttttgagacagggtctcattctgtcgctaaagctggagtgcagtggtgcaatcatgacccactgcagcctcgacctcctgggctcaagcagtactcctgtcctggccacccaaaatgctgggattacagggatgagccactacacctggccttcatttactattcttaagcattaaacaaaatcttgttcggtctaattgg

SEQ ID NO: 86112 - DNA, 1521 bp, Homo sapiens
tttcataaaatctgctcttatgcgtcacatacttggtcattcatttgactctgagtaaagcctgaaggatagataaatagaacctcttcagtaatttttgatatgattgacattttgaagtattgagaaaagctcatagttcaaattctttattttttatgttaccacccccaccccacccccacttttttttttttttttttttttttttttgagaagtgtcattcagtcgtgcaggctggagtgcagtggcacaatcacagctcactgcagccttgaccgcccctggatcaggtgatccacctcagcctctcgagtagctgggactacaggcacatgccaccatgcccagctagtttttgtgttttttgtagagatggggtttcgccatgttggctgggctgatttcaagccatctgcctgcctcagcttcccatagtgctgggattgtgtgagccaccatgcccggtcccttggtcatttttttgattgctaaattgaagctacaagcaggtattgctgacttgctgtgccaattggctgaatccctgaaagcttggtaaaatcagaatagagcaactaacttagctgctttttttttttttttagcaagtctttggaaatatttttgttggtgctgacagccaaagcagtccaatacagaggaatggtgtatatcttggggtggtaaggatgttcaagtagatgtaatcctggggatgtcatagtgcatgtctttcccctttttggacctgattagttttaacagatgtctttttgtatataataatattgcttaaggtcttgagtctgtttaaagaatggattttcactgtttacatttgttcactgggttcttgtgaccctagcacacatgtagaatagtagtttgcaaatacgtagttattgtaaaaagtaaatactatttgtacaaatttcttgtttcatagtatttaacttgagttagtttttctttctgcagttctttacattttcttaccacatttcttctgtatgagctaaagtcagcctttgaaggaaccataattttaaataagatttaaaattctttttatgtgttctagattctggaagttacggtcagtctgggggtgagcagcaaaggtaaagtatacatacattttaataatatgaaagggtagaactgaggtgaattttgtcaagcttcttctcttgagacttgatgctggatgtcataagttaaatattagcttgtcacagagtgaagagagtcagtgtaaataggtgctgtaagacatttattccctttctgtttttctttatgttttgagacagagtcttgctgttttgctcaggctggagtgcagtggcaaatcatagtgtactacagccttaaattcctgggcttaagcgatcctcctgcctcagtctcccaagtaactgtaatctccactacagacatgtgccactctactgggcttcttccttttcttttttttttgagactgagtctcgctctttcgcccaggctggagtgca

SEQ ID NO: 86113 - DNA, 2234 bp, Homo sapiens
ggacttctagtgcctccctgtgcatcttttaggaagttaaagccatttaactaaggcaaatggtgggaaaaaattaatctgtcaagatgtgattaaattgagtaaggtgttcattttttgtgtagtcatcatttttgtgcttcaggtatttattataagtcttgctatgtagtttttattccccccacacccaagcataattctcttggaattttctagctcttaccaagttttgtttatttctgcaagattgtgaaaacaaaactttgggtatttgtttcccattcaggagatctgggagtgacttcatgtatttctttaacagtctttgatcgtcacctttcaatttagactctagagacagggagattgatgatttctcagcaaagaagcttgtatttgagttgaaagttgaaaatgaaggcaaggtcttcatttaaactttaaaatttctacacatttctttcaagtattaaatttttcttttgcagttattctacctatggaaatccaggcagccaaggctatggacaagcatcacaagtaggttgaaatataaattgtattcttcataagtagttatttttatcttaagtaggtgatgaaacttgagtatttacctaaatttcagagctattctggctatgggcaaacgactgattcctcttatggacagaactacagcggttactccagttatggacaaagtcagtcaggttggactagtttgttaaatttgttgtttcagagattgaaaaatcagagccttcactaaatgatatactcatctaatctttaggttattcacagtcctatggtggttatgagaatcaaaagcagagctcatatagccagcaaccatataataaccagggacagcagcaaaacatggaatcatcaggaaggtaaggaaatagtaaaatactgagattgttttgggcagtggaaataacactgatattaaacagatttaaccaacaaaatcctagctttaaactttttttttttttaaaggaaattttaatggagtgtggattttacaactgtatattatggagaatgtggaaatagcattgtcatttgattcttatgatgtatttgtgaaatcattgtttagctataaattgatgtccttaaaaatgttagaaaattttggacctctgctttatccctgagattaaataaaaacctgtctttagaattaagacttctcaacatctatttttaaatttccattttatttttgaaccatttgaatatattaacttttcagggacaaaaatattttttaaaagggtcaaaacttacgcatatatcagataccctaaaatgtgttttctttgatatatgtaggtgaatatttactgataaatttcaggttttataaagtttttttacctttcagatttaaagagctggtacttaattttatgctatttacttaatagcaagttactttttaaaaattgtgctttacattctgtgaaatgcttttgcattctctaatgtgattgatcttcagataccactatgaaatagtgtcagtgattcccattttacagagggtaaagaaattatttggcctatcaagtgacgtggctaaaaactgaggtctctagtgttttctttctacagtgaagacatttattctaagtgaaaattaaataaaagcattgaggaaagattggtgaggtcaaattatcacccttacagatgtgagagtgttttgaaaagtagaaagtagagtacaaatgtagggaataatatccagaaggcatactacattaagagaaataactcttcaagccttgttggttagttttaaatttaaggagaatcgttttataaatgatgtatttttggaagcatgacctataaatatagtctgaaaagaaatgttaagtttgatttgacagccattttaaagtgctagggtttggactgtggttgtgttgtgctttcgacagggagttagggaacatactgatcttttattagattgttctgatcctctggtgaagaataaaatgtaaactattaagttatgagatcttttttgtccccccccagcccatttttataataagtaaacctactggaactcaaatccaattaaatgttgccttttaacattcccaccctgagagcatgtaattaatacagtaatattgttctgaagatacttagaattttcctttcaaatcgctagaataagcagtctcattacctgatag

SEQ ID NO: 86114 - DNA, 5055 bp, Homo sapiens
tggcgggcacctgtagtcccagctactcgggaggctgaggcaggagaatggcgtgaacctgggaggcagagcttgcagtgagccgagattgcatcagtgcactccagcctgggctacagagcgagactcttgtctccaaaaaaaaaaaaaaaaaaaaaagattggggtcgtgcttttcatctaagttactaaggttcttgtagctaagattgtattttaactcatactgttccacattactgttttgccatgtcactttagcagaatggaatttgacacagatacattactgttttgccatgtcagtttagcagaatggaatttgacacagataaaattctcaaaaacatgtaattccagatgattttatgatgacttgcatttgagttgtgtgcacatgtgccattttctataaggatatgtgtggcctaaagagccatttaacattgttatttgaagctttagaaatgagagtggttatttgtgtgtaatattttcttttttgtagatgaccgtcgtgatgtgagtaggtatggagaagataatagaggatatggcgggtcacagggaggaggtagagggcgtgggggatatgacaaggatggaagaggtcctatgacaggatcaaggtaagtatgtagataaagatgcgtacatttcttcttcttcctcttttttttttttttaaggtgttacttggctggatcaattccagcatctaatttagttaagagactttaaaaagggattatatattggagaaaaaggcagaaattaaaagtgtattttcagtcttaatatctcacataaatgaccttagaattggctatgttagtagttagtttatgtggtacatgttaaacaccagtagagaaacaactatggttgtgattaaatcacttgactttcctgccagagctagaatcttaactcctttaaaagacgactctgggaaatccagtgtttgtatgtaaaaataaaaggtaagttaattctagattgaggggcagaggctatttcttaatctccaatctccttgggaagggaaagtattaggaggcagtaatggagtagaaaggtggggatggcaaataagagaaagatttaatgtaacaaaactgttttgtccctcttcttaagtaaataattattggaataattagtgtaacatcacatagtaatgtgtattttgtcttgactaagttgtgtaaaggaatgtctttttaattcagcttttcttttctccatgctagtgttatcaggttttggtatttatttacttacagcatatgttatgaagctggtttgaaaattggttttagatatatctgcaagtttactactttgactgtaaaaaaaaaaaaatgaaaaagtagttgacatctgtcctcagaagaagtttgcaggttgcatatttgtgtgtaaatacacaggctaaaaggtaatttatgttccttgggaattgaaatggtcagtggcccgttacagaaacttatcagtcatatatcagcaccagttcattcttttgcaccttagggaccatctgtcccctgaggtgacctgagaaacaaccagttgcccacagactgttatttcttcaagtgagccaggatttgatttcactgccttatattctatttttagtgtacagtgctttgattttttggaaaaactaaattttaaacatatttgaaaaatgttataagacttggacattaagtctgttgatagccaaagtcagtttaccaaagtaaaacaaataaattctatgcttcttcattgtcaaagagcagtctgccatcatgtggatataaatggactatgtaaagtgacatggtgcttactctctacctaataatagcctccctcctgttccaaacaagataaccaacaggtatatttaatttaccagttaatatgttttggataattggctgccttgaaatgctatatgttttatagtacatcatagctttagttttcttcataaggaaattacagttacatcctaatcgattattaaactatcactgtgtctaagaatggtggaagaagatagggaataggtagggaagtcattataaatatattttcactggccaggcatggtgacccatgcctgtaatcccagcactttgggaggccgaggcgggcggatcacgaggtcaggagatggagaccatcctggccaacacagtgaaaccccgtctctactaaaaatacaaaaaattagccagacgtggtggcaggcgcctgtagtcgtagtccgaactactcaggaggctgaggcaggagaatgttgtgaacccgggaggcggagcatgcagtgagccgagatcgtgccactgcactccagcctgggcgacagagcaagacttcgtctcaaaaaaaaaaacattaaaaaaaaatgtattttcatttgtgactcatcttgtaactagaggatcgaaaggactttgaatgatcctcctgacaaaggagggaagcagtaccttaatcaaccctggggtccaattaagtacttttataaaccccttgcaacatacttcatataatttgtggcctagatactgacttataaactaaattttttattttcctttaataccccttaatacaaaatcatatgcagaagtccaatatctagttggtccaaatgatgtgctgatctggtttcagtgggggaaaggtcgggtgaggaagggatctgcaatcttgccttatactctgttatttgttgagatgttcatgaaaggccttttttagaaatccgtatggatgccgattactctttatattgagttggcaagctgtgtgaaaggccagatagtaaatgttctgggtttggtgaaccatatggtttctattgtaactattcatctctgcccttggagcaccagagcagccgtaattaatatgtaaatgaataaacagagttgtgttccagtaaagcttcatttatggatactgaaatttaaagttcatataatttttttttttttttttgagatggagtctcgctctgttgcccaggctggagtgcagtggcaccatctcagtttactgcaacctccacctcccaggttcaaacagttctcctgcctcagcctcctgagtagctgggactacaggcgtgtgccagcacacccggctaattttttttttttttttttttttaagtagtgatggggtttcaccgtgttagctaggatggtctcgatctcctgacctcgtgatctgcccgccttggcctcccaagattacaggtgtgagccaccacgcctggctgaagttcatattatttttatgtgtcataacacataaaattatttttatgtgtcataacatctttttaaagatgtgctttttagcttatttattgggataaaatgttttgaatttgaatatagatgccctgttttaagatttttttttcccacacagttttgcatttaagtaccagaatacccaaacatttttcattagtcttcatcaacactcccgtttgtgttctcagtcaaattaaaaatagcaattcttggccgggtgcggtggctcacacctgtaatcccagcgctttgggaggccgaggcatttccactaaaactacaaaaaaattagccgggtgtggtggcgggctcctgtagtcccagctaccctggaggctgagggaggagaatggtgtgaacccaggaggcggagcttgcagtgagctgagatcgcaccactgcactccaacctgggcaacagagcaagactccgtcgcaaaaaaaaaaaaaaaaatagttcttttgggggctgtttgaagaatatctggcattagttgggtttatattaaaagaagaaggggcatgggccaggtatggtggctcacgcctgtaattccagcactttggagggcacagcgggtggatcacctgagatcaggagttcgagatcagcctgaccaatagggtgaaaccccgtctctactaaaaatacaaaaaattagctggacacgatggtgggtgcctataatcccagctactcgggaggctgagacaggagaatcagttgacctgggagttggtggttgcagtgagctgagatcacaccattgcattccagcctgggcaacaagagtgaaactccatcgcaaaaaaaaaaaagaaggggcataatttgtggatgaggattggatataaggtaaaggatgggacattcttggacttacagatggtgtgattgcctggctagaagaagaattcccggtcaaaaagaaaccatcagctttccaagtgtgaaagagagataaatctgtgaagattatagggactacaggaaacttaatctttttctttgaaaaagcaattgtagcaaaaaaaaagaaaatttcttactgtcatctaaaattgacatggacatcttagtggactagaagttaagggcataaattctcccagtgatttttaattttagcattgtgattaacaccttctaaaattgccagaacttaataaataattgcttttcattattagtatgccatcaaatttagtagctgtttcaggctttaatgtgtcaagcctaaaatccagatttttgaggatcttctccctcttaaaagagtattcagttaactgccgtagaaatacacatgtatacaagggcactgtatacatcagtctaaaaaataaaaatatgtatacgttctggtgagtctagcacagcattgcccaatagaaatacaatggaggtcacaaatgtgacccatatagttaattgtaaattttctaatagccacattaaaaagaaaacagcacaaataaacaaatgagaaaatctatttaactcaatatattcaaaatatttcatcatgcaatcaatataaaaaatttctttttgttggtcatgatggcctgcgcctgtaatcctagctacttgtgaggctgaggcaagaggattgcttgaggctaggagtttgtgactagatgggcaatatagtaagatgtcatcttttaaaaatgaaaaaattagctggccactgtggcacacgcctgtagtcccagctacttg

SEQ ID NO: 86115 - DNA, 1576 bp, Homo sapiens
ttgggggaactgtctgtgtttgggtcaagaatatgcaactggctgggcacattggctcacgcctgtaatcccagcaatttgggaggctgaggcaggtggatcacctgaggtcagggcttcaagaccagactggccaacatggtgaaaccccgtctctactgaaaatacaaaaattagctgggcatggtggcaggtgcctgtaatcccagctactcgggaggctgacgtgagagaatcgcttgaacccgggagttggaggttgcagtgagccgagattgcaccattgcactccagcttgggcaacaagagtgaaactcttgtctcagaaaaaaaaaaaaaagtatgcaactagctgggggctgtgacgcgtacctgtagtcccagctacttaggaggctgaggtgggaggatcactgatgctcaggagttcgtgaccagactaggcaaaatagcaagacaccatctcaaaaaacaaacaaaaaaaccagctagttttcttatgcagggggtactctgccaataaagttgagtatgcttatattgtgtttctgttaaatatctctgctacttcaggaattctttatgtgtaaatgttttctgctttttctgggaattaaagcaaatttgttgtgtcaacatcttgactcagatgttcaagtacctttgtgtcttgatttgccttagcatgtagaaaagggacttgtaacattaatgcagatttgaaagaaagattgttaacctcaggcacatcttctgttaatatctaatagtactacttgaaggttattttctgtatttaataaattccttaaaaaggataattttctaataagaagagagaaaatgattgaaacgtttgaacttgaaagaaggctttgcataaaattacagatcatctagatcaatgcctaaaccaaatgtctagacattttagacttaaatgtgcatatgaattacttgggggatcttattaaatgcaggttcttattcagtaggtctagggtggggcctgagatcctgcttttctcagaaccttccaggctatgcttacgcttatattccatcatgttttgattagtaaggggacagacccttattttgttaaggagattgaagcttatggagaaccactgacatgtccagattttcaagattgattagttatagttaagactgtaccctgagtttcttgaagactagttctttttccagtgtactatggtatttccaaatttatggccatgtgttgaaatcttcagctgctttattttcaaaggaaatgcacagtaaagatgacgttcaaggccgggcgcagtgactcatgcctgtaatcccagtgctttgggaggccgagacgggcggatcatgaagtcaggagattgagaccatcctggctaacacggtgaaaccccgtctctactaaaaatacaaaaacaaaaattagccgggcatggtggcgggcgcctgtagtcccagctactcgggaggctgaggcaggagaatggcgggaacccaggaggcggagcttgcagtgagccgagatcgcgccactgcactccagcctgggcgacagagc

SEQ ID NO: 86116 - DNA, 3038 bp, Homo sapiens
cgggcgtggtggcgcctgcagtcccagctactcgggaggctgaggcaggagaatggcatgaacccgggaggcggagcttgcggtgagccaagattgcgccactgcacttcagcctgggcaacagagcaagactccgtctgggaaaaaacaaacaaaaaaaaacctctgagataccttggtttctattaataatattttcagcagtttaatctcaactctgttggcttccctttcttaaagagttaggcagtgatatacatgtcatttagaagtaaagggagggctttagtactgcctgttctgaagtaggagtcttagaaattcagtggcaaactgtataggaagggcctgagtttcatattgtctatattgccttgaaatagccttagtctcctgcttaaaaaggcatcctggaaatcatataaaaagtaacaacaaattaaaatgcatgtgtctgtacctaaggcagctgtaagtggaaatatttttacctcatagtgaaatagaatggatgtattaagaagggagaattttttttcagagtgttttatctcagtgtggctcagaaaagccatttatagggtagggtaatcactagagttgagggttcctccccccaccccccataagattggtatccataaagcagagatttctaagcagtgagagacttcagtattttagattagattcttgggttataatagaataagatcattagtagtagaacatctggtatcagaaaacttgagtgtttttattgccatgttagcatatgaatcttaaaggattacagaattcagttaagagaaacaagcttttattggatgggtatttaaagagtttcttgataagagagaccttagatttcttacgtaaagccatgttcacaaggaccactgtccttgtgattctaatttgccagataaaagtctatgtcctggcgcagtggctcgtgcctgtaatcctggcattttgggaggctgaggtgggcggattatttgaggccaggagctggagatcaacttagccaacatggtgaaatctcatctctactaaaaacacagaagttacctgggtgtggcgacacgcatctgtaatcccagctactagggaggctaaggcaggaaaatcacttgaacctgggaggtggaggttgcagtgagccaagatcccaccactgcacttcagcctgggtgacagagcgagactctgtctcaaaaaaaaaaaaaagttgtcctgtttggaatatgttgcctgctgtctgtaatgtgcactactgatagtgtacagagcatgtggcagcatgaacctccgtagctctgatgtgaagagatgtagtatagtgggtatagagtaggagggcggtttttaagtgatgctcttttagtcttttataagggttttgaatgatttgaaattttaagactgcttttattcagtctcaacttttgtgtatatttgtatttcacttttaaaattcatctcataaaatccactatttggtatcatagcagatcctaatactcaagtttttattctctcccgttctaccatcaaaatcttaaccttgctttgtattcttctagtcttttttctttttctcatatttagaaaataaccgtttggaaaaaatacttactctagtttagtatttttcatgctgtgcctccagctttatgttatggtttaatagtatccctttggcttggggttgggaagatttagaaataagagtatattagatatgtaataagcttgaaaagacatcttgtggaaatagatccttgggaaaacacttagatggaaacaacatttagaactctgtgaaatggaatttactgaaaacttagaggtgctactgttttcctaagcactctacttgtgacagttaagtgtagattgagcccagggctcagcacattagagacttaaggaagaaatcatttcttcaatttttcctctgcagtggtggtgaccgcggtggcttcaaaaattttggtggtaagtgctgagtatcccaaaatgtttcagtggaaatgctatataaatctaaaagccaccaatatcccgcagatgtagtcaaaagtcctttcttactctgttgaggctggtgtgtgttgtgtgctttaaaaaaaattttatatatatatatatacacatatatatatcaaagtaaacattaaaaagccaaagttgatctcaaaacagtccaatgggttttctacacagtgaatttgcatgaaagagtctgtggtgaccaatgaatgacaccttcactggattttgacaatttgttcttataaaggtagctgacatggtgtttttaaattattagggttgtccaatcagcctttacaaccagagcttaacaaaagtgatactagcataatgctaaagtggcaggtgctgtctaggacaagttaaaggaaatgttgacattcatcttgatttcctaaactttaaataaaacataatttatatatttactttgtaaatctgtgatggttgactttcaaggattttggaagtattgacttttcatgccttggtttattactattttttttgttaatgattttaaataaattgccttaaatagctcttttttcttttcttttcccttaggtcacagggattatggacccagaacagatgctggtaaggtttatggtggtttgtcactttgccattaagaaaatgttagttttttttttgatgggaaaagtgtgtgtttggaggggcttagtacaggaggaagatttaatttgatagtgctgccagaactggggagctttatttcttttttttttttttttttttttgagatggagtttcgctcttgttgcccaggctggagtgcagtggcacagtcttggctcactgcagcccccacctgccgggttcaagcagttctcctgcgtctgcctcccaagtaggtgggactacaggtgcgcgccaccatgccctgctaatttttgtatttttagtagaggcagggtttcaccatgctggccaggctggtcttgaactcctga

SEQ ID NO: 86117 - DNA, 2031 bp, Homo sapiens
aatacttgaatttttactgctagttagcattaattatttaaaattattgcaaatcagattaatgaaagaatttatatcattgtggaattagaagtagaaaaactatttaagaaagaaaatcctacgttggattggtagtctgcttaagtgtgctgacttagtgaattcaagaaacctaaattcatacatgagagaattgtcttattttgggtagaggtcactaattttctgtggctttttatttaaatgaaattcaaggctacagatttacctgtggagcctgttgaaagttataatttagaggttaaaaatctatttgagctaaaaatttgaaatcagaacttttgtttttattaagatgccaaagtattctatgtggatggcaatttctgaattatcccttcatggactgaattcttatacatctttctttctttgttgtactaatccaaaagtgtgcatgtcaggtaacatgtacaaggtgcctccgcactctggtatatacaaagcttattgcaatgaatgggaaaccagcagttctgctttgtggcttgcttggaagttcaaagtatcagatttggagaattttgtactagagaatcttaaaaatgtttaaccgtaaagaattagagttctccagagaaagaaatgctaaactaactccatctcttcatgacgtttagccctatgtctgaatctgaagagtgaggtttgtaagatcatccttaattggtatataggtatttcacatagtgtggacttgatccactttacttgaaatttagttgtaagaattgatcaaccaaataattactgtgaatactttgcatgtttatataaggttgttcttatattggtcctttccttttggtcatagaaacaattgaatattggacaataaattattgtctttgattactgaacagaatgtcataaccaaggaatatgtaaaattaaccatcactttttttctcttagattcagaatctgataattcagataacaacacaatctttgtgcaaggacttggggagggtgtgtctacagatcaagttggggagttctttaaacaaataggaattatcaaggtgagtaaaaatattatatgttgaaaatctcataattaatgttctgattacaatacatagactatgtagtaagcctacatacttcagtacgccttgtctcttaaaattttgtgatgcacatgctcgtttatgtctgtagacgtttgctaaatttgttgaatatatgaagattttattccttgcttgtgtttacctttccacagtctacctgtgctttagcttccatcttaggactctaaaattagtctctgcttagttcttataactgtgagaaataaaggagttgctgagaacattttatagactgaaatatatgcaagttcaagttgttagagctcttgggaggggttatttaatgtttatgctagagataatacgttatcttgtaattgctcattgttcactaaagcgtcttttgcactattttcatgcatatgtttttcatctcttcaactagaaagcagccttagtaatgtttagatagtaacagtttcttgaaatcagtttacatctgcccttgttttggtgtctgtggaattactcttttttttttttgagacagaatctcactgtttcaccaggctggagtgcagtggcgcgatgtcggctcactgcagcctctgccttccgggttcaagtgattctcctgcctcagcctcttgagtagctgggactacaggcgctaccacgcccagctaatttttgtatttttagtagagatggggtttcactgtgttggccaggatggtcttgatctcttgacctcaagtgatccgcccacctcggcctcccaaagtcccaggattacagtaggaatgagccaccgtgcccggcctactcacttttttctttctttgggagttataatttgttaaggaattaattacacacaaaatatgtaattttgttgttgtcgttgttgtcttgagacagggtcttgctt

SEQ ID NO: 86118 - DNA, 1050 bp, Homo sapiens
cacttaatcacagcactttgggaggctgaggcaggaggatcgcttgaggccaagggtttgagaccagcctgagccatatagcaagaccccatctctacaacaacaaaaaagccgggcgtggtggcacttgcttgtagtcccagctactcgggaggctgaggtgggaggatcacttaagtccaggaatttgaggctacattgagtatgatcgtgccactgcattccaacctgggtgacagagtgaaaccctgtctcaattaaaaaaaattatacatagataaaacagtatactatatcatttttatagcttggttttcacttagtgtagcttagagagttatgcttgtctaaacctacaggtaacttattaggtgcatagtattttatagtatgaatgtgtgaattccttgtaaaaaaaataaatctttgattatctaaatgatacatgattacttattttaaaaatgctaacaccaagtgtttctgtttttcctcagacaaataagaagaccggaaaaccaatgataaatctttatacagacaaggacacaggaaagccaaagggggaggcaacagtgtcatttgatgaccctccttcagctaaggcagccattgactggtttgatggtatgcctcattcgtatagttttcagcatgaagttggataaatgttttctagtctgaaagtgagaatatgctctgggtgacagtgattatattcatgtttacttttgcagatattaagaatacaggtcagaatttttatgtacctttagaaatgagatgagctctatcgttgttggtctagcatatttcgttatatcatgccttgtgcatgaggctaccctgatacagatgtagagagttggcctggttgacagtatgttattttttctttttaaaaaaataaatttaaaaggtacagagatggcattttgttacatggatatattgcatagtggtaaagtctggggttttcctgtatctatcacttgaataatgtacattttacccattaagtgatttctcatcccctgactttatagtttg

SEQ ID NO: 86119 - DNA, 1030 bp, Homo sapiens
agtaatcctcctgcctcagccttctgagtagctaggactacaggcgcatgccaccatgcctagctaattaaaaaaattttttcagagaaagggtctcattacgttcctcaggcttgtctcaaactcttggcctcaagtgaggcttctatctcagcctccaaaagtgctgagattacagatataagccactgcacctggcctttttctccacccctgacaccatctccttccccaggctggtctcgtgctcctggactcaagtgatctcccacctcagcctcctgagtagctgggagctggtgctacagacacataccactccaccttgttttttgtttttgttttttttttaagcttagtaagaagtgactgtctcccagtgacagatatgctcttttcagtagataatgtcacttttagcactgttatcttgactctttgcatttgaatttctgtgaggacatgtcagttactcctctgaaactaaagatttccaagactttttcatttttgttgacaggtggaggtatagagtagcattgcttcaaagctgatttcttttttcttaggaaaagaattccatggcaacatcattaaagtgtcctttgccactagaagacctgaattcatgagaggaggtggaagtggaggtgggcggcgaggtaagatccttgctgcgtacagtcctggatactatccaagggtttaagtttgagttcatactctgtttctatttgtgtgaacttgctactgctttttctctcgctaggtctttttccctctatcttaaaatgagttcaggtactgaatatattaggtaaatgagatatcgtaatagctaagaaagtagtgggaaatggttgtagaaatccctttggaaagctttattgtgatttgctgttcacttggaaatcaggaggcaattttttttttttggtttttgtgtttcttttgagatggtgtctcactctgttgctcaggctggagtggagtggcgtgatctcggctcaccacaacctccgcctcccgg

SEQ ID NO: 86120 - DNA, 1044 bp, Homo sapiens
ggatacagaaaggggttctgagtccattagaaactatataggagcattatattttcctcctttcttaggtcatgcggaaatatgaactttgctcgaaggaattcctgcaatcagtgcaatgagcctagaccagaggactctcgtccctcaggaggaggtgggtcagccttttaatagcatctgcatcgtgcttatcttctgactagcattaagggggctttacgttgtttctgctggcctcattgtttgcatttctaccttgcagatttccgggggagaggctacggtggagagaggggctacagaggtcgtgggggcagaggtggagaccgaggcggctatggtggagacagaagtgggggtggctatggtggagacagaagcagcggtggtggctacagcggagatagaagtgggggcggctatggtggagacagaagtgggggtggctatggtggggacagaggcggcggctatggtggggacagaggaggcggctatggaggagaccgaggaggtggctatggaggagatcgaggtggctatggaggagaccgaggtggaggctatggtggagaccgaggaggctatggaggagatcgaggaggttacggaggagatcgaggaggttatggaggagatcgaggaggctatggaggagacagaagccgggggggctatggaggagaccgtggtggtggcagtggctacggtggagaccgaagtggaggctatggaggagacaggagtggtggcggctatggaggagaccgaggtgggggctacggaggagaccgaggtggctatggaggcaaaatgggaggaaggtgagtattagaatgtgtttattaacctttttacctcactgcacctagattgggggatttgaaccacattttaacaattttttggaacttgaatttcccattgccagttctctcaggatggagaagatgatttagtttcctgcttagcaatttctaaaattttgttttggaactttttattttttaactttaatttttattttttagagacaataaa

SEQ ID NO: 86121 - DNA, 1106 bp, Homo sapiens
tgaacactgcttactgtatggccaatactgtaaagtgttcttatattctttagttctagtccttctgtcattcctatgaagtaggtatacttcccattttacagagtcagtcatttagtgtaacttttccaaggtcacatagtaagtggcagatccagaattcatacatgtaagtgcttgctcattccactatgccactctcctatttagagtgctggaactgggacagtttctgatcttctgaaatatttgtggtttggagttttaagtggaaaatttttaagagagtgaagcaaagcttcttctaggaactttgtgaatcttaaagctggtaaattagacatttaagtatcttctaggagtacagaaataaatgaggcatggtgtcattctttagaaattgtctagctgatgccaatcactagtaccctgaagaagtgtctaatgctcccccttcgtagaaaattagaatttagtccggctctttatttttcattcctagaaacgactacagaaatgatcagcgcaaccgaccatactgatgactgttttgaatgttcctttgtctctgacatgatccatagtgaaattgccagagttttgcctgctgctttcctcgtggcctcttcttgggtagtgaaattaagtgacatttggatttttatttgggtgggagggctgggacagtttttcttctagaaatgtctgttgagatttccccctttagtttccaaccttctccccaacccttggagctaaatgcgttgtaaaatattgccaaaatgaaaagtgttttgtaatactgcaataaaggctgcttgtttttgtggacttttgtacatactagtgcattgttctgtcacactcaggactcagttacattagactctaatcctaaagaattaggaaatgaattatatacttcagtaaattaaaatgttactttaaacaatatttattgagctcctactgtgtttagtggttcccaggaatgacaagtcagaatcacctgaagtttgttaaaattagattcctaggttgttaaatttagattcctagattcccagccctctaggtctgctggatcagagctcaatgaggtatgg

SEQ ID NO: 86122 - DNA, 1043 bp, Homo sapiens
ctgtttttgaactcctggcctcaagtttcaccacattgaccaggctgttcttgagcccctggcctccacctgcctcagcctccccaggtgctgggattacaggcatgggccaccaggtccagccaaccaaacctttttcgatgagtgattccagcccttgatgcataggagggtagggtctgtaggagtgtagccttaactgatcaatttgaaatctctgggtgatgtgagacatgtgccaggttcttggctcttatctcccttctagtacctcaggaacttccctactagatggaggtagtaaaaatgggccctgccaggatgtacctataacagagccattcaaccatacgcttgtgccatctgcccttagtcatgaaggttttgagctaagaatcgtggatgcttttttattttttaaacatatagcaattatcattcaaataggcaccttaaatccatttgttttggttggatttaggaccattatcattccttatgaaaaggaagacagcccagaagcttgctattcagaaggctttgtcagatgcattccagaaactgttgattgttgttctaggtaagactgtcttgatcatccttgaagtacttcagtttcagtaagcaaataaactcattttgaaaagttaattgaataaaaatattgatatctaaagcactctatagtatgctttcatttgctaaattatttcacaccaacaggctcaaatttgttctgtgtgacatttgtgaaaaaaaatgacagcaaatattgtccccagtttacagatgtgaaaagacttgcctcagttcccacagaaaatgtttaagccaggtcttctttaattgcttacctatcatacagaatagtgattataagttttggacgcatggatttgagtcctaactctgtctcttagatttttaatgcaattaggccgggcgcggtggctcacgcctgtaatcccagcactttgggaggccgagatgggcggatcacgaggtcaggagatggagaccatcctggctaacacgatgaaacc

SEQ ID NO: 86123 - DNA, 1048 bp, Homo sapiens
ttttttgagacagtctcactctgtcacctagggtggagtgcatggcaccatctcggctcactgcaacctctgcctcccaggttcaagcgattcccctgcctcagcctcccgagtagctgggactgcaggcacgtgccaccatgcctggctaatttttagtatttttcgtagagacggggtttcactatgttagccaggatggtctcgatatcctgactttgtgatccacctgcctcagcctcccaaagtgctgggattacaagggtgagccactgcacctggtgttatttcatcttttaacgggttagtaacttggggagggggatgggtggtgggttcatcttatctatattcaggtcatattctcaagcaggaactactgaatgggaagacagtaacaatttttcattgcacacttggtattgacaaatctcagatctatccaaaataaaatctctagcggttgtgatatttatgggtctatctcctatgattttaggttcgtcttggcaccagacataaggcagttcaacatcaagcccttgccctgaacagttccaaatgccaagaactggcgaattactactttggtttcaatgggtgttccaaaaggatcatcaaggtaaaccttgtagattttttttcacttaccacactctcctttcaacattgaaatcctagattttagacagaagtattgaactggattgtagggaggagatgtgagaggcctctaccattgaggataaattgacatgtctgaattggcctgctacctagaattaataatctcagtcaattggatggtggtatccgtaattttctccactgtttttgtggcatataataaaaaatggttgtctctatctagcaattcatttgcaaatctaacttgattttgaagccataggacacctcaactgttagcttgaatgactggagtgtagttgttttttgggttttcttttttttattgggtttttgttttgttttgttttgtttttgagacagaggctcgctgtgtcatcaggctggagtgcagtggcgc

SEQ ID NO: 86124 - DNA, 1015 bp, Homo sapiens
ccgattctggttcgcccaatgtctggacttgtcctttgccaagaataagcagatgagatgggcggatgaaccccaatgtccctgcaagattcaggaagtcccagccagaaagtaaaggacgtttagttccatgtattgttttcttttttacatgcggggcaacacacctggacagtgtcgatggcttgctccaagccacacggccgcatagggacagggactgggctacataacaagttcttcgacgctgtgatctaatcaaggaaaacctgggacgcagctaatagatgcgcatcgagtgtatcgacgctctaagtacgagggctggaacagtgagcaggatcagtccattgcttttgcctacctgctgagcgctgattggtccccgtttaggaaacggaaaaaggggcgtgcacgcgggcgcggctgcgtgagaggcgcgcggcggcgcagtaaacagtctccttccacaaaaccatggcgtcgctcaaatgtagcaccgtcgtctgcgtgatctgcttggagaagcccaaataccgctgtccagcctgccgcgtgccctagtgagcggggaggtcgcggggtccaggggcgcgggtgtccggccatggcgggagggcgggaggccgggaggccgggcgggagcgggcgggctgctggaggggccggggaccctcggggctgacgcggcctgtggcctctgttgttacagctgctcggtagtctgcttccggaagcacaaaggtgagccccgtccccgccagccctcgtaccactgcgcacggggcagcccccacgtccagcctccgtcttgggggcgtggacccttgggctgcgcttcctttcccgcctcgggtctccgcgggttctgcaggaaccttgcttcctctgacttggtccctggtgtctctgtgtgtcggacagttccctctgttgtccctgcctgtaatcgctctcagggttttggtcagtagcctttcttctaccccgcttctccttctgcgtgttactcttt

SEQ ID NO: 86125 - DNA, 1019 bp, Homo sapiens
ggggtttcgccatgttggccaggctggtcttgaactcctgacctcaggtgatacacccgcctcgacttcccaaagtactgggattataggcgtgagccaccgctccaggccctaagctaaactttcatcacctcctgctcctgactcatctaaagccttggttctcacagtgtggttcatggagcatcagaatcagctgggagcttgctagaaacgcagcattgcatttggaaatgggactagaagatttagagatgctgaaataattagaagcagtttttaaaaagataaagggctctggaagattcccagttataacaaaataaataatccaaacctgcagctgatggggacatgcagccctctggtttacccagtagggttagggatggatcttgtcccagcctcagtctcattcccgctgtgaacttgtaggctttgctcctgctgttctcaggaacaaagctgtcatggccatcacacacaacgtacctgaggcagcgctcggatggacgtgacaccagcctggtcttgtgctgtctggacagtgtagctactggggctgcccctggggagctggaggcaagcccagaccactaatttcctctgaaagctgcctacacccatagccgtattggccaggaccagtcccaggggccagaggcggattattgcctccaggagcctggtctgcagcggcgaggtgctcagggaacagggagcttgagagaagtgtttttcttccacaccatccagctctttagcagcaaggcaggccattctgatcttaaaaagcaaatatccctttatagctttagatttatctagccctcttagcagaaaatggaaatcaaaactatctttaacaaatcatcttaacaaggtgaactgaaggcacctggttgcaaacagctggctgccctgaaccaaactggttccatatgccacaagtctatacaccccaggcaactgtgcttaggccttacatatgctacttgaaaacaagataagagtccatc

SEQ ID NO: 86126 - DNA, 1042 bp, Homo sapiens
agtaagacccaagaagtcggggtgggcagtggatcaattttggggaccagatggacccgagtgggaatgctggctctgccactgcaatgcaggtggccttgggcaggttgtttagcctctctgagcctcatattcctcatgtatgcagtgggcacagtaacacctaccctgcagggtggttatgtaggtgaagagtggtataagcaactctgggaatataccaaactctgggatgtacactttagaagactgggttttatggcatatcagttatatcttgatggactcttatcttgttttcaagtagcatatgtaaggcctaagcacagttgcctggggtgtatagacttgtggcatatggaaccagtttggttcagggcagccagctgtttgcaaccaggtgccttcagttcaccttgttaagatgatttgttaaagatagttttgatttccattttctgctaagagggctagataaatctaaagctataaagggatatttgctttttaagatcagaatggcctgccttgctgctaaagagctggatggtgtggaagaaaaacacttctctcaagctccctgttccctgagcacctcgccgctgcagaccaggctcctggaggcaataatccgcctctggcccctgggactggtcctggccaatacggctatgggtgtaggcagctttcagaggaaattagtggtctgggcttgcctccagctccccaggggcagccccagtagctacactgtccagacagcacaagaccaggctggtgtcacgtccatccgagcgctgcctcaggtacgttgtgtgtgatggccatgacagctttgttcctgagaacagcaggagcaaagcctacaagttcacagcgggaatgagactgaggctgggacaagatccatccctaaccctactgggtaaaccagagggctgcatgtccccatcagctgcaggtttggattatttattttgttataactgggaatcttccagagccctttatctttttaaaaactgcttctaattatttcagc

SEQ ID NO: 86127 - DNA, 1057 bp, Homo sapiens
cattttttcttaaagtaattgctctgcaacttttttcccttcagtaaataaactggctctttttgcaacaggggctgtgcaaatgtcctgtggtcagaagctcactctatctgtgttcatcacactttatctgctcatcttggagtgacttgtaggcaaaggctttaaaagcctttgacctcaaattgtgacctgaaattagcttgaggcagtggtaactagtctcttgctgaaatggatttagtctggcctcagctgccctggaccattttcaactcggacgatctggttcccccagcagagcttctcaggctattggctctttgtggagtttatgaaagcaggggaccctctccccagaaaggtgcccaaggtctcatgtgcacatgcacacacatacactcattctggctcatctcagaggattctgggcccctgaagcccttacaaggcctgctgaagaatctcagaactcaaggtgagagatcatccttaaccacatggccagagggtggaggtacccacgtaatctaccagaaaaggccaggaccccaccttcaccactgtgctacatgctgtgggctgagcctctggctttaccacaatctatcaaactcctaggtgatgtacaaaggcacagggagacagagaggcccattcagccaaggatctgaagcaggaactgcgaaggctctagatcacctttggggcctgccttgccagcagacagctgagcaggttctcttcaccttgctgaggctaaagcagcctcctgaactttaataatgagctgaattctggccaggaatgtagcaactttcccactcagaaagaggccacagacgctgcttggtgaaacctgggagctgtgccctgatgtgtccaggggtttgaggagcagggagaggaaccagtctgtcttatctcccaccctgggcctgtgcctattgcctgatgttgtctggcccaaccccggacaggaagagcacttgtcggggtcctccccaacaaggggccagagtaactgctcaccgcgcatagatcagtttggccaggc

SEQ ID NO: 86128 - DNA, 3572 bp, Homo sapiens
ggaagtggagggatgatacatcaagaatgggcaaaggaagatagggtgactcatgcctctagtcccaattactcaggaagctgaggcagaaggatcacttgagctcaggagttggaggctgcagtgagatatgatcatgccactgcactgcagcctgggtagcagagcaagactccatctcttaaaaaagaaaggaaaaaaaaaagataggcaagggaggagaaaggacctgttcccttggtgcttattcttgacctcagacagccgtctgagccaggctttctctcaagcagactcgggccaagggaaccaattcattagccagcctaaatttaagccacaaaaggcaggtgatgaagacatggggctacctctctcagaaggtacagctgttttacatcaaaagctgaactgtctcttcccaaaaaggcctaacccatggttcttttcctttgcaacattcctatagccttatttctaataaggctagtagcctggaagtgctacttgcaagtggccggagctcttggcagaagagatagcatttgttgagtacatgctgtatgccgggcactgactaaatgctttgtatatctcttcttttcttcccaataaccttgtcagttgagtttattttcctttatttacgaataaacaaactgtgactcaaagagggtaacttacccaggctcacagggctactaagaggcagaactgaaatttgaacccaaccagactatgataccagagtctccttctactatacaggttcccacccttctgtagctgccagctgttttgagtaccagctgtcgcggccttcatgttttttggttttttttttttttgagacagagtcttgctctgtcgcccaggctggagtgcagtagcacaatgttggctcactgcaagctccgcctcccgggttcacgccattctcctgcctcagccttccgagtagctgggactacaggtgcccgccaccatgcctggctaattttttgaattttttttagtagagacggggtttcaccgtgttaaccaggatggtctcgatctcctcactttgtgtcctgcccgccttggcctcccagagtgctgggattataggcatgagccactgtgcctggcctcaccttcacgttatctcttccaggtcaatggccacaatccggggtctgatggccaagccagggagtacctcagagaagacctgcaggagttcctgggtggggaggtcctgctgtacaaactggatgacctcaccagggtgaatcctgtgacactagagacaggtatgggcctcccattcctcaggagtatcatctccaggaggttggaggtgtaatgagagtagtcagcacagcttctccaggtcagacggaggtcggcaggactcctgatctggagccaggtgggctgctccagacctccgcctgagggagcatgacagctgcacctgggctccccagggcatgctttgcttcagatttggagctcatcttaattagatcttgtatcttttcttcagggagctgctgggatttaatgattcttggctaattgcagaaagagggctgttacttaagtagatgtgtgtctgtgtgtgtggtttgactatatttgagcccgagtttgctaaaggcatctctgcctcagtcctgaggtgcctgcaggcccggtacatggcagacacattctacaccaatgctggctgcaccctggtagccttgaaccccttcaagcctgttcctcagctctactcgcccgagctaatgagagagtaccatgctgcgcctcagccccaggtaaggctctgccgctgcctgtggcctcagggctcctctacctcccgctaaacctctttgcagttacccctgtccttattcatctattcaccagcaatgtggtcattcagagtctgctagtgccacggcctgcccaataggagctggcagaattttgaaccatgaagaactgactacaggacagaaggtgcaaagtggggaataaataaatatttgtttaactgagtttggaacctaaaataagagacataagagaaaggatttttttttcttgtttgcggttttattaacaggaaaggatttataaaggtattatatatttgtttatttaacaaactacctttttattttttattattatttatttatttatttatttattttgagatggagtttcagtcttattgcccagactggagtgcaatggcatgatctgggctcagcgcaacctccacctcctgagttcaagcaattctcctgcttcagcctcctgagtagctgggattacaggcatatgccaccacacctggctaattttgtatttttagtaggcatattggtcaggctggtctcaaactcctgacatcaggtgatctacccaccttggcctcccaaagcgctggaattacaggtgtgagccactgtacccggccctatttattttgagactgagtctctccctgtcacccaggctggagcgcagtagtgcgatcttgactcaccgcaacctccgcctccagggttcaagtgattcttgtgcctcagcctcccgagtagctgggactacaggtgcccaccaccatgcccggctaatttttgtatttttagtagagatggggtttcaccatgttggccaggctggtctcgaactcctgacctcaagtgatccacctgccgtagcctcccaaagtgctgagattataggcatgagccactgagtccagcaaaactacctttttaggaaagaatgaaattatacacgataaggattgccctggaaaattcagcatatgtttatctctgctgaggaaagtaacttattcttttactgagaaaaggataagttatttggggtggggtggtggaggtacagacagataatgagcttgttggtgtaaaagtgcatgatgcattcagggagaggtgagagaaaacttgctggcaggagggaggtcttgggggcaagagggagtagatgagagcaggaagacgagaaagccagggttgtttgtgaagagtctgaagcaccatagcaggcagagagaatctgcagagcatcttcatccaggtagaggtgggactgggaacagaacccactagacgaataattactgtgggagttgggttcaagaaggtgaggcaggaggcagagacaacagttggaggctttgtatccctccaggtgataggtggctggggcaagggcaggtgtagagaggagtggctctgacgccatatggaacagttgccttctccctcagcaagctgtgggtaagtgatcactgctggctgggttagctaggcattgtggagatggcgtggccctccagaagttcatgcgtgatgaggtatccagttggaatccaggggcagtctgtcctgagagccctgtctgctgtctgccctgcctccggaaaagtaaaagccaagtcgtagtcccctatgtttcctcagcatccagcttgattgatgcctagtacattgaagacagttaatagttgttgaagaaaaggggaacagtggctttggaatttaaatcacatg

SEQ ID NO: 86129 - DNA, 1004 bp, Homo sapiens
gagagatgactccagcctctcctcaccaacgactgaaataggatatttctgtctaatgtagaggatagggcacaaggcttctctgtctccccagtgtcttactcctcctccatggcacactgacccagagggtttgcagccccaccccaacgcaaaccctaaccctgtaataaaactggcccagggagcctctgaggctctcataaaagtttccctgtctcctaattggcaagggaaaggacaggcccactctccgcccaggcctgccttgcatctcattttggttgcttctgctaggtgggaaggagtgagtgagtcactccagaaaagccctcacctgtgtgtggtccttgtcttctctctcatgccacaggcgctggagtgacttgtctgagattcctccagaactgagccctttgttggaaccataccccagcccatggtcccatgactaggtggatagtactccttgtacctcctgcaacccagaaccctggctgaccactttgaaggaggatgctccagcaggtaaaacctcaaccttagataacccaggccctcaagcacctgcagcatctgttgctagccctaacctggaaggaagggaaagcccccttaaaggtctcttttctctcctcaaattgtctctccagtgccttttactcatcatcaagaaactcttcctgatacctaatttgaatctgtcttgtggtttttagctcctttctttgggataggtaaggtgggatgggtaagggaatccttagggcactttggggattctgcagaggaagtcctgagagatgtccctgccacctgaattgttgaggcatagtagaagcctggggcttccaagaggatgtgttccttgaagctaagccttaaagaactagaaagaattagccacttggagaaggaaaataagcactccaggcaaagaggtcagcctgtgcagaaatgtaggagactatgaggaaatatagaaggattctaatgagtggatc

SEQ ID NO: 86130 - DNA, 1022 bp, Homo sapiens
tctgtcttgtacagggaatagctgaagctttgtaaccaataatttcatattattagtatgacatttctatctgaacacattagtgttaagcttcttcccacaatccttggaaggggaatcacaaatcctaggtgaactcattagggcccaaagttctgctctgaaatctagtaataagagtaaaattaagccaggtatgctaattacacaagaatgctgcttttcacaaatccattcctttgctcttgttttcacaggaagaaaaatgtctgaaaagcagatgaaggaagcttttgtcagtaacctcaatggaaccaccgtgctggaaatcacccagggattgtgctttcctgcattctgtatcctgtgcagagggttcctgatcattttctcacagtacttgtgttctttttcacctacctggaaaactagattcctcactgactttgttgtcctaatagttcccatggtagccactttgaccatttgggcttcatttatcctccttgagcttctcggtgtaattatctttggggcagggctgttgtatcaaatataccgaaggaggacctgctatgccagactgcctttcctaaaaatccttgaaaaattcttgaacatcagtctagaatcagaatacaatccagccatctcctgtttccgtgtaattaccagtgcgtttactgctattgctattttggctgtggacttcccactttttcccagaagatttgccaaaactgagctctatgggacaggagcaatggattttggagtaggtggctttgtttttgggtctgcaatggtttgtctagaggtcaggaggagaaaatatatggaagggtccaaattgcattactttacaaactcattgtactctgtttggccattagtcttcctaggaatcggacgattagccattataaaatcaataggctatcaggaacatttaacagagtatggagttcactggaactttttctttaccataatagttgtgaaattgataacaccactgctgt

SEQ ID NO: 86131 - DNA, 1051 bp, Homo sapiens
cacgcccagctaatttttttgtatttttagaagagatgggggtttccctatgttggccaggctggtcttgaactcctgacctcaggtcatctgtccgcctcggcctcccaaagtgctgggattacaggtgtgagccaccacacccggccaaaatatatattccttctaaaatcttgaaaaataactacaaaacaaattacccttagtcatacttctcagggataagcacatttggtgtaatttcagtcctagacacacagatacagttaatatattctgtaactttttgtccttatttatttcactaaatgtaattttgaaaacattttttcttgtcattcttaaacatttttaatggctgtgtaatattccgttgtatgacattctgtaattatttttccactgttggacatggaggttgttctagtttttgctatgaataaactgtaagaacataaataatgcaaaaatctttgcattaaaatgttttctcaggcttttggaagtggaattactggttggatcaaaggataagaaccttttgtaaagttccaggtacatattgtcagattgctatgatatttctttttttttttttcgagatggagtctcactgtgtcacctaggctggagtgcagtggtgtgatcttggctcactgcaacctccgccttccaggttcaggtgattcttgggcctcaacctcctgagtagctgggattacaggcgcccgccaccatgcccggctagtttttgtatttttagtagagacgaggcgtcaccattttggccaggctggtctcgaactcctgacctcaagtgatctgcctgcctcggcctcccaaagtggtgggattacaggcgtgagccaatgcgcccggccagattgttacatttctgcattgcagtttactctcctaatttaaaccaatctaaatagactactctgataagagtttggggttttgttttttttttctttttgttcttgtttgcatgtacagcattaatctggtaagagttcttaatgtcttacactttaaaaaaatgata

SEQ ID NO: 86132 - DNA, 1049 bp, Homo sapiens
gtctcgaactcccaacctcaggtgatccgccgccccccaccccactggcctcccaaagtgctgggattataggtgtgagccaccgcaccaggccatgtacttggatttaacaaaattttttgaggggctagggatgggtgcaaatctggctttcacgggtctatttctggagtttgtaggctgtatcctgttctcagaggggtaaagtaattgatttccgttctgtttgcattttaagatggtgatggaatttcctgataatgtgttaaatctcgatggacatcagaataatggtgcacagctaaagcagttcattcaggtaatagttttttcaatcagtgtttttaatggtgtatgtgtattttaaagactcatttaaaatttagctgtattaattttatataggattctctaggtcttaatattgcactggaattgctctttcaccattgctatagtaagcatgcatagttatttacatgatttatgtaactgccatgtgaaaaagaattggtggtggtgtgttaatattttacatgtccataagactttaattttaaaaccaggccatctttcctagtttttaaaagataaggtatataatttttcattaaaaacttgttggttttctgctgtactaattgttttgttcagacaaagtaatcctatattatgaattttctgatgtttgtttaattcctgagaaatatagtgctttataaatacacttaaatgcaatgtatagtggtccctcagtatccgtgggggatagttcaaggatccctaggcaaaccaaaatccacaatgcttatacaaaatgatatagtaagggctaggcatggtggctcatgcctgtaatcccagcactttgggaggccagggcaggtggatcgcttgagttcagtagttggagaccagcctgggcaacatggcaaaaccctgtttctacagaaaatgcaaaaaagttgggcagacatggcagcatgtgcctggggtcccagctcctccgtaggttcaggtgacaggatctcttgagcccaggaggcaga

SEQ ID NO: 86133 - DNA, 1049 bp, Homo sapiens
acagctgtattgtgcttttttttttttttttttttttttttttgtgagaggactggcctaatactcactgaaccagccctacatttccagatgcagtactgctttttggcatcctaagcagagttgtttatataccctagattctagagcaagggggtttgtggaggaaattccgtacagcatggacaaagctgactactttgcctttctgactcagttgcaggtagagctggtaaaccctggccaggttgtactttactgcacaaggataggaaccagtagtagtgaaagtgtaattttacgtctttttaaaggacactctttcattttctttccctctttcagcgacatggtatgcttaagcaacaggatctaagtattgccatggtggtgacatcacgcgaagtcctgagtgcactttctcagcttgtcccatgtgttggttgtcgtcgcagtgtggagcgtctcttttcccagcttgtagagtctggaaatcctgctcttgaacccctaacagtagggcccaagggagtcctgtctgtaactagaagctgcatgactgatgcaaagaagctttatacattattttatgtacatgggtaagtataatcaattaggagaaaatgggtttgttaaaatttaaaacagcttggtgacagtggcagcttattttcttgatggaaagattgagtctgatttaataattttattgagtaagttgtatgtaccagtggatgtaaagtttcaactctccacgtggggagaggcagacagaaagcaaatattcaatttgtcagggatgataagttagaaaaatcagtaagggaggtagagaatggagtgggggtagaattattgtggaggatggtcagggaaggcctccctgataaaatgacattgaatatagatttgaatgaagtgagcaagcaaatcttgtagaaaactggggggaaggcagagaagggacagctagtgtaaaggttctgaggttggggttttattggcatgtttgaggaatagtaaggaagcccttgtggctggagccagat

SEQ ID NO: 86134 - DNA, 1612 bp, Homo sapiens
tctgttgatgactcctcttcaaggatgtattgtgtttacataatgttttgtgaggtttttatatattttttaaagacatgggatctcactatgttgccctggctggtctcaaacccttgggcttaagtgatcctttcacctcggcctcccaaatagccgggactacaggtgtgtgcttctgcaactggtgtatttacataatggctgggcaagggaagatggctgagagtcaggtagcagtcagtgttgaaataacgtgagtgccaggcacactgctagatacagtggggatagagaaaagtggtttttttgtgttttgttttgagacttctctctaaaagacagtaaatagagattttaaaatttgaaagtaaaatgaattaaacccttaatatgttttatttttaattaggtccaaactaaatgacatgatagatgctattccaaaaagtaagaagaataagagatgtcagttgcactccttagatacgcacaagccaaaacctttggggtaagtagaattgaataccaagaggctttgtcattgttaagattatatatttgatcatatttagtaaaagaaataaacccactgtttgctttaattcattaattggttatactctatgacataggtcaaaataaatagatcctcttgttatgttggccattttgccttgatatatataaagtctcaatgtagatctgatttaaaaaaatttttttatgttaaatatgttttagaggagggaggttgaagtctttttttttttctttttttgagacggagtctccctttatttcccaggctggagtgcagtggcacaatctcagctcactgcaacctccacctccctggttcaaatgattctcctgcctcagcttcctgagtagctgggactacaggtgcgtgccaccacacctggctaatttttgtatttttagtagatatggggtttcaccctattggccaggctggtctcggactcctgacctcaggtgatcgcccacctcagcctccaaagtgctgggattacaggtgtgaggcaccacactcggccggttgaagtctttatggaaatgtatgcagctaatatgaacgttttcaaagtagtggtaatcattatttgatctacagaatagtcataatgtataaattatttatctttcttgtctctagctgtaatttaccaaggttttaaaaaaagtagttatgacgatattatgacaatatgtatttatgtaactaatttgtagttttctatatttattattattttttgagatggagtctcctctgtcgcccaggctggagtgcagtggcgtcatctcggctcactgcaacctctgcctcctgggttcaagctgttctcctgccccagcctcccgagtagttgggactacaggtgcgtgccaccaagcccggctaattttttgtatttttggtagagacagggtttcaccgtgttagccaggatggtctcgatctcctgacctcatgatccgcccacctcggcctcccaaagtgctgagattacaggcgtgagccaccgcgcccggcctattttattttttaagcaaatattgcctgataataatttgtagttttctt

SEQ ID NO: 86135 - DNA, 1057 bp, Homo sapiens
tgtctctactaaaaatacaaaaattagccaggcgtggtggcaggtgcttgtaatcttagctacttgggaggctgaggcaggagaatcgcttgaatccaggaggcagaggttgcattgagccaagatcgcaccattgcactccagcctgggcgacaagagtgagactttgtctcgaaataaataaataaataaataaaataaattttattagtaaaattgtcaaacatagaaaagtaaaaaatacaatgattgaacctcccatgcacttttaccaagatttagtagtaatcaagagttgccacacttgcttcatttatccacctttttctttgtattttaaagcaagtcccaggcttcgtgttactctattgcatccttccacatgcatctctaaatatatggacattttttttcacacattgccatcataacacctaacaaaattaagtgtaacaatcgaatacccagttcatacttagattttacctgtttctggttttttttttttttttgaatgttggtttgtatgaatcaggatccaaacaagaaccacacattatgttcttgtagcctgaagaaaagaagttttcttaaggatagttgttattttgctgcttgatttgtcagtatcttttttttttctttctttcaaattctttttttttttttgagatggaatttcccctgtcacccgggctagagtgcagtggcgcgatctcggctcactgcaacctctgccgcctgggttcaagtgattctcctgcctcagcctcccaagtagctgggattacaggcacctgctaccatgcccggctaatttttgtatttttagtagacacagggtttcaccaggttggccaggctggtctcgaactcctgacctcaggtgatcaacccgccttggcctcccaaagtgttgggattaacaggcgtgagccacggcgcctggcccaatttgtcagtatcttttaaaaattttttattttttattttttcatcagctcattcttccttctcagatttgtcagtagcttcagagaatttctgactctaaatg

SEQ ID NO: 86136 - DNA, 1372 bp, Homo sapiens
ctatctttcagcttaagaaacaaaacaaacctccacagattttacatccccttctagctacagttccactacatgggaagtcatatgttttagaaggctgtttgctgagtatggaatcagtgtgaatggacttaattgatcttaagtggtgtctgtctcttgattaaggtagcttcagttattcccacaggccacatagaatagcaggctaagcagtacagtatgcttagccaaggctccctctcccttggatggtcaccactattaaatgctactatgattctccattttatgtatttccactccccctcctgctgctacatccccaccccccatagcttttttaatttgtttagtctatttccagagaaagtataatacagttgattaggttttagcctaataaatagaaatctaggtcagcctttctgagagtattctctcatctatgcaagtaaacccaggttattgtctgtctgggagtaagtttgagatctggaagaaagatctaggctggagttgtaggcctgtagtttatcttagagaatgttatgtaagatcacctaaagggaaagagagtaaaagaattctgaggaatttaatggtagaaaagaaattagtaaagaaacctgagaaagagtagccagataggtagaaggaagccaaggtgtaaaagcgttccaaggaagtctgatcaactatattaaatgcggccaagttatcaaggacccaaaagtggacattggatttagtaacaatgagataattggtgatcttgaagagctgagctagtgattgagtggaagcagaatccaggttgcaatgattgaaaagtgaatgcaatgtaaggttgtcatggattaagctgtgaatggagagtatgggagcagaatcagaaagtggaaaggttatttttttggaaagtttgatcttaaaagaataatagaaggcataaggtctagaatgtttataaataaaatcctgatttgagatacagattttttttatagagcttttttttaaaaaaaaaatgccttcacattctaatgatataataatcattctttagctgatttctctttatgaacctttccctcaattatgagagcttgagtttgagagtttttcagttctgggaaattatgcattatactgatcaagtatagttaataaaaggggctgggcggggtggctcacactggtaatcccagcactttgggaggccgatgcaggcagatcacgaggtcaggagttcgcgaccagcctggccaatatggcgaaaccccgtctctactaaaaatacaaaaattagccaggtgtggtagcacacgcctgtagtcccagctacttgggaggctgaggcaggagaatc

SEQ ID NO: 86137 - DNA, 1190 bp, Homo sapiens
tctctacaaaataaaagtaaaaaaaaaattacttgatgatgatctcattaagtagatcaaaacttcttagaattttcaatttgtggaagattggtctgtgtttaaaagggaaaatacttgataattttttcggtcattttgactttagaacattccaactatatttgctcatagaatacttagtttattaaccagttgctctcttgataactacagatgttgttaaattgtatcagataaacttgatagtcaagcagaagtttttatataaagatatgagcacacatttaaatgaacgttatattaatataaagtgagtatgtaatcatataatttgtaaacatgttctaatatcttaatcattaaagtgttcatgattttaatttagactatagaaattatttcttcagattatctcagtgtcactaagctttgtactatactacggtgaagggagcagtagcagtgtcagttcagagaagttaagtacagatgagaaatagtgaaggccacaggaaggacggcaagtataggatcattttccattatggacgtttccagggaacagccaggtaaaaacaagcaatactttaatctgttttttgtttttttaaggttttacccttctgtattctcccttttcactaatatttgttctttctacagaggttgttggatggatgtatgggaactaatgtcgcaggaatgcagggatgaagtagttttaattgactcgagttgtcttttagaaacactagaaacatatctgcgaaaacacaggtaagtctgatggttgttccagtataatgtggaaggtgccttatgtgtcagtcacctagagtggcctgtcactgaactcctttgtataatagcattctagccttccctttaatacttggcactaggcggagcttaatattagagtaggcagttcctttttttttttttgagatggagtctagctctgtcgccaggctggagtacagtggcgcgatctcggctcactgcaacctctgcctcccaggttcaagagattctcctgcctcagcgtctcgagtagctgggattacaggcatacgccgccacacccagctaatttttgtatttctagtagagatggggtttcaccatgttggccaggatggtttagatctgctgaccttgtgatccaccaacctcggcctcccaaa

SEQ ID NO: 86138 - DNA, 1296 bp, Homo sapiens
ccccgtgtctactaaaaataaaaaaattagccaggcatggtggcacgcacgtgtagtcccagctacttgggagactgaggcaggtgaattgcttgaaaccaggaggtagaggttgcagtgagccaggatcgtgccactgcactccaacggagcaagactccgtctcaaaaaaagaaaaagcaactggtaaggtaacagcatctagagatggtgttcttggggcagttctactgtttaaatttgttacaagttgcgtttgtggttgtatgtcctttgactttgaggcagatatacacaattattttgggagtgcctctaaaaatcaagtgaatgataaaaactggtgtcattactttatgtggcagtaagctaatgacttcgcccgcataccaagtttattggtgtttttcttttttcaattaaaaactttctttctttgcctttttggtggattatgcccaagagagtagagaatgtgtcacttacttggagttttacagggactatacagacacaaaacatatatccttcctctttaaatatgaattgatcctcccaaaagatagtttttgcaggtgataaatgacaagttattagagcacatgttttggagtttcttataatggttttgtagattttcctatgtttagggttagtgttttaacatttttagatggattttagtccattttacagatatcttaacggttgtgagaaagtatggttgagagtaataataattaaggcagtgagtgatgaatttagggagattgtattgcatctggattctactaattgtaactgtacaagttagttgactttctgtgcctcaatttttgtcttctttaaaacaaacataggctgggcatggtggctcacaactgtagttccagcactttgggaggccaagtcaggtagatggtttgagctcaggagttttagaccagcctagacaacatggtaaaaccccgtctctacaaaaaagcagaaaaattagctgccatggtggcacaaacctgtagtcctagctactggggagggtgaggtgagagtatcacttgagcccaggaggttgaaggtgcaccatgatcacagtggccgtgattgtaccactgcactccagcttgagcaacagagtgaaacgccatctcaaaaataataaaaattaaaataaaattagcagctgggtgcagtggctcatgcctgtaatcccagcactttgggaggccaaggcgggtggatcacctgaggtcagaagttcaagaccagcctggtcaacatggggaaaccccatct

SEQ ID NO: 86139 - DNA, 1323 bp, Homo sapiens
tgctaggaagagtggaaacaggaaagtcagttaagaagctttaaaaaaaaaaaaaagtgggctgggtgcggtagctcaagcctgtaatctcatcactttgggaggccgaggcgggcagatcacctgaggtcaagagttcaagaccagcctggccaacttggcgaaaccctgtctctactaaaaaatacaaaaaatttgctgggtgtagtggtgggcgcctgtaatcccagcgactcgggagactgaggcaggagaatcgcttgaacccaggaggcagaggttacagtgagcctcgatggcgccactgcactccagcctgggcaacagagagagactctgtctcaaaaaaaaaaaaaaaaaaaaaaaaaaaaaatatatatatatatatgtgtgtgtgtgtgtgtgtgtgtgtgtgtgtgtgtgtatatgtatatatgtatatgtatatatatgtatatatatgtgtatatatatatatatagcataggcaacttaaaccatgccagagggaattgaaaatagggacctacaggagaaacaagaaagaatgaatactagttggctctactcaataggaagacccagggagaagttggaattaactcagatttccagcctgggtgactctgaatggctgtgaatggcagtgttcttattaacagggattgagaaggcacataggaatagaacagcattacccttggacagtgaatttaaggtgttgcctattggacatctgccatgtcttgtcacttttcgatatgggtctggccctcaggcaatagcagagatttgaatggagctgtagagtcacaagtcatctttatagacatgttagttgaagccatacgcatagatgagctcatctgggagatgaatttaaatcaaagagatcaaaatttccttgtttcacttaactaatcttcttagccatttactcttattgtgagcctggcttttccacctgaccaagttcttcttgttccaggaattcaaagataaagaaaccaggctctattatttctttctgattgattgatatttggtttctaaaagaaattttcttccttctctacattcacaaactcttctattcttttgccacattttatacacttaagtttaaaccagtttccatgtatattttgtctatattatgtttgttattgagaaataggcatttttgggaagaaagaatttggcattttggaaataatcagaaaattaaaaaatgcacacaccactttcccattcttctccccaccccaacccctacccctatcctcaaatgcttagctagtgaaatattaaaatgttgtaata

SEQ ID NO: 86140 - DNA, 1030 bp, Homo sapiens
gtctggctacttaaaatatggtaactagttgtaacatctttaattagttattttttcaaggccaaggtatggtggtagtttgctaggctcataggcttctaggagaaattatagattcaaggtttcaactcaaggagttggattttattctcactactttcttaggcagaatgacatgatgcttattctgcaaacactccaattaaaggctttatgtgactgatgtgaaactaaaaagttagactggtttaatttttagctgtcctcctccattacataacattttgcattcttaagtcatagtcttaactactgctttaatttgcaggatgagtctgaatgtacttcagatgaggaaatctttatctcacaagatgaaatacagtcatttatggctaataaccagtctttctacagcaatagagaacaataccgacagcatctgaaggagaaatttaataaatactgccggttaaatgatcacaagaggcccatttgtagtggctggttgacaacggctggagcaaattaaataaataaaatagctctgtctttcaatgaaacactcacgatgactactgcgccttctctttcgaaaaactcttaatttagtgacttatggcaaaattttatcttaaatcaatgtgattctttcttgttttgggagacggtggaggtatcctcattagttctttcttcaggcttgtgtctttagttgcgtggctgcgcaggcctgccatatgatttaagccatctcttttcattaaatgtttctcttcctgtgagacttactaaagcaacttagtggcaaaaagtaatgttgtacttataattctgtacagaaatgacaatgagctgaatatatggttttacaaagtagacatccacttgcaaaatgtttggatgtaatgttaaagcgcaatgtgcaaaatttaaaataaagaatatttattaatacgcacagtaaaatttgctgtacatgtttctacttaatatgtggcagtactttagtatttgccacttgtggact

SEQ ID NO: 86141 - DNA, 1086 bp, Homo sapiens
tcttttttaatgatcaccatgaaatccactgggccaggccctggtgttctgctgccatagtcagagtcagagtggagggatgaccccaggaggggacaagaagccaagactgggctggggagccgagaaggagatagataagggggagagggtgcagtggggcaggcagaggaggaagtctggagccctggataacaacacagatataaggtgaaggcctccctctgccaccccagccctgagccacagacgttgaggtgcaagaagatggggattttggccacaactcctttcccatgtcaaagggaagacactgagagcagacaaaggccaagtgcccaggggcacaagaacaagttaacaagtaaaacaattagggacaccacctcctttccccagcccatttttcacatttacaactgaagcaatttgacaagatgatataaaaatctcaaacaaattttctagcccctggtcggggtgtggacaggaagtggtatcccgtgatccagaaatcaacacctaaaatccagaggcaggaggcaagccatgaagggtggggagggaaggaggagctcccacagtcactaggtcacctgctccgtgggcctcatctggatgtctccaatctgtggaaggtacaaggcatgaggcagctgtgacactctcccctggccctgcagggctccctgctcccctcctctggggctggttgggttcctccagtgagtagacagtcagggccagactcacctggatgtgtgcgggggtgctgaggacgtagataacagcctcggccacatcctcgggtttgagacactgagagcaccaggggaatgggttgagacaaggacagaatggactcaaattccctcccaccactgagcttctctgtggcatccacacatccaccccaaccctccaggaggagccacaaaggctggaagagtggagtctgaaggccgagcttccctctgccttcatttagggagtcagtggcttcaccaggctcagagggaggccccaccttcatttgctcataggtggcagctgccttctcagggtccttgtcgtggagtttgaagg

SEQ ID NO: 86142 - DNA, 1169 bp, Homo sapiens
gccattacctgtgggacgggggcgttagtgagcttgtcagcaggaacacgacaggctcagagtcacttaggaagagaatcagcggcccgggataggaagtgactgttggggtcctgctggctggtgatgggctagtgagaagttctgggaaaaatcaccagcgccgggatgtggggagggaggcaacaagactgaattggttgaccaggaaggccaacccatctccttaaagggcccttcactggtgcgtgggtgaatgcggtccccggcctcctgggacctcgaggaacacaggacgcagccggtagtacggccagctcagctcgccgctcctctagccttgagggaggcgctgtgggggacagcctggcagccacgcatgcgcaaaacaccgtcaggaaggggccggggaggggcgggctcccgaacccggaagcgagggacccacgtgggagcctgggagcgggtggtcgtagctcggtagtccagttgtgggtaatcggggctgtttgttcctgtccgagagagctcggcggagacggctgtcgagtacccttcacctcggtgttgggagcctgggagcgaactgcggcgcgggttaccgctcccggggacgcagcaaggggcatcgagtccctggcgggagctgcgccatggcattgctctcgaccgtccggggcgcgacctggggtcgcctcgtcacccgtcatttctcccatgcagcgcggcatggggagcggcctggtggggaggagctaagccgcttgctgctggatgacctggtgccgacctctcggctggagcttctgtttggcatgaccccgtgtctcctggctctgcaggccgcccgccgctctgtggcccggctcctgctccaggcgggtaaagctgggctgcaggggaagcgggccgagctgctccggatggccgaggcgcgggacattccagttctgcggcccagacggcagaaactggacacaatgtgccgctaccaggtccaccagggtgtctgcatggaggtgagcccgctgcggccccggccttggagagaggccggggaggcgagcccaggcgacgacccccagcagttgtggctcgtcctcgatgggatccaggatccccggaattttggggctgtgctgcgttccgcacacttcctcggagtggat

SEQ ID NO: 86143 - DNA, 1010 bp, Homo sapiens
atccaaaataatatcaatttaacatgtaatcattttaattattattaatattattaattttttgagagagtttcattcttattgcccaagctggagtgcagtggtgcaatattggctcactgcaacctctgcctcctgggttcaagtgattctcctgcttcagccttccaagtaactgggattataggcacacaccatgcccagctaattttttttttttgtatttagatggggtttcactatgttggtccggctgttcttgaactcgtgaccttaagcgatccactcgcctcggcctcccaaagtgctgggattataggcatgagccaccgcacctggcctttaaaaaatattattaatgaaatattttacattcctttaaaaaatgttttacatacaacacacctcgatttgaattagccacctttcaattgcttaatagccacatgtagctagtggctactatattgaacagcacatatctagaagcattttttggcttcacttttttgtagagagcccctttctccaagcctgataggagatgaggttcccactcatcacttccagcccctgaacaggtagcttctgaaaacacagaaacactgcagaacatccacttaagctccaggcatcacatctccctactgtcatcagcatctgacctggagagtgtcatccgcctgttgctgtggaagagctggaggtgccccaagcaggggcctgtgctggggccccatcccttcctgcgtactcagagacactgctgtagcaattttcctcctcttcctgcagcatccacttttctcttacactctcttcagcatgcaagcaaacattcccctctcacgctcttgatctcacaccagtcagctcttcctctcacactgaatcaaaggcttcatcaaggtcaccagtggcctccatgttgctgcattccagggtctgttctcaattcttttctgacttgacccatctgcagcagctggcacagttgaccactccttcct

SEQ ID NO: 86144 - DNA, 1020 bp, Homo sapiens
gagtctgggcggagtttgcgtggcctctgggaccggcagagtccaggggtgctccgggctggctatttcctccctcctccgggatgggtgtagcagggtgtgtactccgcatggggtaacctcctagagccggctacgccccaggcgcctcctttcacggccttgtcactcttttctgctccttgggctgttctggaaccgaagagagaggagggaaatggctaggggcggccatcatcctcgggatcaatagcagccgagagtgactgggcaggctctgtccatgggccgagcgtcattctggaacctggagggggcgggggcgggggaaggaagggaagtggaagtttgagaggggcaccttcaggctccccaaactgcatggcagctggagagggctgacagaaccctctccaacccgggttctgaccagggtccctctggggctgatcgtcaaggagcttctcaagaaaagaaacctggactgtgaaagtcacctcctaggccctctggggccgtatccgggggtgcctgggaggagggtggaaaggattctgcagtcaccgagctatgggcgaaaatgatccccgcggaccctggtccagaatgtacaggtcctgggcggtgtaagtggctgtgggtctgtggaggacattgggtaggaaaacgcttgcgtagttgaggatgcagacaataaatgtggccgggaaggtgaggagggaaggttggtgctcttcgctgaacggaactggcttaaatgcagagctgagctgagcggcttcggagaaggcgaatttagaaagcctggtcaattttctctccatgtccctgcgaccgattatgttttaaaacaaaagctcaatggaaacgaaaacaaaacaaaacccaccatttgtctaatgtgctgtccccgtggaggagttaaatctggactccaaacctagaatctggagccaagaggcgcactttgagttgcgctcctggccccccttgcagagacgccagggttggctcctgcgg

SEQ ID NO: 86145 - DNA, 1345 bp, Homo sapiens
agattgtacattttttcagatcaggtttgggaaaactggtaattctctaacaccagttgaaatcttactgttcttcaagggccagagcaaatgctagctcttccttagagattagcttaaattcacttgccccacagttaaaatttctcactcttctgggttattgaaattttgtcaaagcacttctgatgcttccttgagttgtaatgttgtgagtctgtctttcccactagctccttttgttagggtaggacccgtgttctattcatctttgcttctcccttagcattttggagattgtagatgtgtaataaatatattgttgaattgagtgcagtaagagattttccccctgatgccacagtgcttaagttgaaatgaagtctatggcttggtattttctccaggtaatacccatttttctctttcttccctctcttctttgtagatgaggaaatatctgatgaggaagggtctggagatgaagattcagagggactgggtctggaggaatatgatgaggacgacctgggtgctgctgaggaacaggagtgtggtgatcacagggagagcaagaagagcagaagccactctgcaaaaacaccgggcttcagtgtccagagtatcagtgactttgagaaatttaccaagggaatggatgaccttgggagcagtgaggaggaggaagacgaagagagtggcatggaagaaggggatgacgcggaagactcccaaggcgagagtgaggaagacagggctggagatagaaacagtgaggatgatggtgtggtgatgaccttctctagtgtcaaagtttctgaggaagtggagaaaggaagagccgtgaagaaccagataggtttgtacatggttttgctgattgcctgtttttcaaagtatctgcatttggtctacttttcatttgtttgtttttggctattctctatctcctgtgtcctttcaattagtttgtgacatgccccacttacccagaagcctaaagccctattcctgtatgcttagccagccatttctgcactgatctgcttagctggttctgctctagtacttcctgcaactggggaagattgaagagaagagtgttttctcctctccttgggttttagcattcccactctgctgtagcaaatacttgcttcatggatactgaatttattttctctaatagagaatatttgtttccatggcattaaactgctaaagctgtggtgcttagagactggtgtggtttcctgttcttccccacccctgccacctcacccccagaatattttattattgaggaatgggattctcttttcttcttttcagcactgtgggacca

SEQ ID NO: 86146 - DNA, 1032 bp, Homo sapiens
aggaaaaggaattgagagactatttggttcccaatgtcttcattttacacatgagagaattaagacccagaatgacttgcccaaagttgcagagcttatttgtgtatggcggagatgaggctccaacttttctaccttatgatgtaggaatcttccctctgcaccacactgcctcctgtgtgctgcttgcctgtgtgcccagtggcactgaaggactggggcagagggagatttagggtgagtgtgctgtgtttgggatctgtatatatctatatctagatattcagagtcctcatgaaagagatatctatatccatagatatagatatatatgtatagattatgtatctatctctctatatatatatttgggaggccttggcctcccaaagtgttgggattacaggcatgagcctctgcgctcagctgagatcaatatgtcttacttgcatgctgagacttcatgttttcatttgctctttaaaacttatttttttagtatcatggagttagagttggaagggacctgaggaggatatctaatttggcatctgcctgtaggtagaaccgccttaagacattcaagatcaatgtgtaggatttcccaggtagggagttcagtgaacgtttcttgtaggtgaatacctgatgtaattaggaatggcttcctagagtccagtttttgggttttgtgtcccgccacacttaaagtctgcttcttcccctgtgggaagtctgggcagtccttcccaggagccttacgtggcctgtgtgggtgaggtgggccatttatatccccgcccctgtctttgcctcctttctctctcaaatagatgacagattgatggttttcaagttttttgagatttttggagcacttctctgctatttttagtgtcctagtaccctaattcctggtatgcctttggaatgagacctagactgctctagattaaatgttttaaatgtttcacgataaggcctgttttcattttgttactcattattctttttgcttgagcctttttcatt

SEQ ID NO: 86147 - DNA, 1070 bp, Homo sapiens
tgctcaaagaggcatttggcagtgttcgaccatgtgagcaatcactcaatagttatcagtgtaactgagcctcactagtcttcagtgttttttacttttttattagtatttggattctttatataatttaaattaactaattgttctggaaagtgttatagtttactaatacttacaatgcagtgttggcctcttacgacgctatggaaagatggctacagatttccttattgctatacccagctactacctccttgaagcgtttaacttttccttgaaatacttttctttggcttggtgacactacctgtgctgtttgggttctcctacctttctgatctcttctctggttccttttgtatcctctcaatgtaaatttcattccgtttagaatcctgtcctcaggttgcgttttctcaatatagtctctccttggcactgtcacttactctgataaccctaactattgcctctaaaataacagacttccagctgtattctagctccagtaaactcctgagtaccatgcctttgtagcttcagcaccctaaactctacttttcagaaactaaatgaatatctccttcctctccacacaccaccccaaacacgtaaacttagtccccagtcaccttggtgttacatgttggtaatttaaacttgaactgtggaagtgatttcaaagacatcgtctgatattttagtggctgcataagtggtaagtcatggagtaatcttaacaaaattaagggattttctgtgcacaaaaccatttctctaaaagggtttgctttttctctctttcttttttttcttttttttttgagatggagtctctctctgtcacccaggctggagtgcagtggtgcgatctcaactcactgcaacttctgcctcccaggttcaagcgattctcctgtctctgcctcctgggtagctgggactacaggcgcatgccaccacacccggctaatttttgtaattttttttagtagagatggggtttcaccatgttggccaggctggtcctaaactcctgatcttgtgatccacccaccttggcctctcaa

SEQ ID NO: 86148 - DNA, 1169 bp, Homo sapiens
ggccttccctatttgtccctaggcaaccactaaatctgctgtcactatgggttagtttgcattttctagaaatctatataagtggaattatacagtttgtatcctttttagtctggcttttgctcagcataattattttgagcatcctccatattttttcttgtgtcagtagttcattgccttttgttgctgagtagtatcccattgtatggatataccacaatttgttttgtttccagtttttggctattacaaataaatctgctacaaacatttgtatagatgtttttatatggacatagactttcatttctcttgggtagctaagaatagaatggctgagtcgcatggtaaatgcatgtttaacttcggaaactgccaagctattttccaaagtggttataccattttgcagtcccaccagcagtgtatgagatttctagttgctccacttcctcagaacatttggtatgttcttaattttaaacattctaataattgtataggtaggttacagaactgagttgctatcctgtctctcattctttgcctttcttttgtgggtttactccttttaaaagttactttttaaaaaagttaccttaatcagtggaatagaatagagagttctgaaacaaattcatacaaataatgggcagttgacttttaaaggtgcaaagtcaagtcagtcaagtcagtggagaatggatagtttctttctttcttttttctttttttttttttttttaagagacagtgtcttcctcttttgtggaggctgaaatgcagtgacgatcatggctcactgcagcactgagctcctggctcatgcagtcttcccaccctaacctcctgagtagctgggactgcaggtgtatgccatcatggcctgctaaattttctttatttttcttagagatgaggtcttgttacgtttcccaggctggtctcgaactcctgccctcctgcctcggcctcccaaagtgctgagattacaggcatgagccaccattcccggcctggatagtcttttcaacaaatggtgctgggacaattgtgcactcatttgcaaaaaaaaaacttcaacctgtacctcatacttgatataaaaattaacacaagacagtcaatttatattaacttaaatataaatcataaagtgttttgaa

SEQ ID NO: 86149 - DNA, 1032 bp, Homo sapiens
ctggagctttcatacattgctgatgggaatgcaaaatagtacagccactttggaaaaacagtctggcagtttttaaataaagctaaacatatattcatcatacgagcctgatccagtagtctctgtcttagatatctgccctagaaaaatgaagacatacattcacacaaagtcttgtacatgcacgttcatagcagcattatttataatcaccaaaaactggaaacagcccaaatgtccaaatgtgcaacaaattgtacattagtcagcaataaaaaggaataaactattgatacatgcaaaaacgtggatgaacctcaagggtattatactaagtgaaatatgccagcctcaaaagattttatacttggaaattccatttatatgacattctggaaaaggtaaaattattgggacagatcagtggctaccatggattaggaatgggagaaaggtccgagtgcaaagaggcagcccagctttcttctttgttttctatgagtttctattttcctctccactaatcttgtttccttggagtattttccacctgttttccacagtggctctctgttgaacccttcagcctggcttgattgttgtgtacgttttgcttggattgagggagggggtatatgtgtgcttattcccagataactctgggaatatttcttatggtaatggatacatgatacagtacttctagggatagaggaatgggccacatcaacctatagtgtcatttttgcttgaaatatatatccttggtactgaaaccttacccagaagagaataatagattacacagagcttctagattttgatgtgggttagaactgaaaaatgagatgtctttaaactctttttccttctctctttgataagtgatataatgtggtttggacactcagagattcctgagattccaggttctggttgatgatttactgcaaaattgcttataaattgaagtagaaaatgttttgcagacctggcagctttctggcttcacacccatttgtcacccagcat

SEQ ID NO: 86150 - DNA, 1044 bp, Homo sapiens
ttcccttatttcaacttgtacttactcccccaattccccacatcattctcttaaaagaaaaaaataagttttgtccactgaatcctctttcttatttgatttaatatatcttgagttgaacgtttctcacaaaaacactttgcattcagaattagcctatcaagttgtttcctccatacactcctgcatagatcgcacgccttctactgtggtgccctctgagatatgaaaacccacgtctgcttttggcttagccttcatgattttagaatataagtctctacattctgctttgaaaagttctccttgtggttattttgtaccataaaaaaaaaattctacttttagtccgcagagctcaccaacaaactgggacagaagtcctcacactattccagttaaaaccatggtcctcataatagcacacacatttatctaaatctgaatatatatacacatatacctgtatatgtgtatatacacttggatatctagaaattctagttggccatatgttggaaatgatagcaacttatccaaatggttgatgttgaggaatttgtaacctgcagtcctctgtcttactggtaacgccattctgcttggggaatatagaacaagcccaaacagtaatactgacagaattcggaattatgatacagtggagccttcacgcaattctttgttgaagaagttagggcctaaatgttaaggcttattgttattctgagttgataatctctgccttgctttaataatttttcctcatgcctgggtagcccgcgagttgcacaataatcactcacacagctttgtaatcaatgcccaaagtaataggattcctctggccaccggcaattaataaatttgtgtcttttttaaaacactagcaagtcgggcctgaaatacgactgactggctctcctcatttgcatatttattgcagtggaaaaattcttaccagatgattgatgctgagcctgcctcttgaattccaagcagcacattattatgaaatgaaaaatgccggccatacagttgatt

SEQ ID NO: 86151 - DNA, 1033 bp, Homo sapiens
gttctagagttacttttgaaggagaaaaaaatgctcttgtaatctgtaaattccaattcaatgtatttatctggggtaatatgaatgggggagtttatgtgtacttgtacataaataattgtaatgtttgcgtatttatttaaaaacaactgtatagatatttaaaaactgataagctttatttactttatacactcactcttcctgttctcgcttcacgccattgccagaaattgtacttactggtttataatctaattaatgaactgtgtgtccatgcccaaacttattcctcgcttacagttttgtttatgttggacagcctagatgaatcagggaaaaaaataaagctgttaggtgaaaatggtttttagattggtgacattttatatatagaatgcttgcatatgggtagcatataaatgaatacctaatataggagtctgtgaatactgtccaatcctagtacaagcagagcttaagatttttaccatgtgaaatatgatttttgatagtaatatgccttctatttttacagcattaaaaaaattctaaaatgccttaatatataataacacagttactatttttaccttattttgtaaggacaagcaaaggcttgtccacattttataaacgagaaaattgagactcaaagagattaaattggtccattcagcataacatgactagttagtgacagtgtcagttgaaatacagggcccctaacccccagtaaagtactgtttacatttatcctctactgaaaattattcctaaagctggtggccagatgctaaggttgaatcttggtaatatgatgaggcatatgtccttcttaatctcctcttaagggaaagacctttggaaatggaccatgtagggtaaaataaacatatatattcttgacagtatccgtttgttttgtggccatgtgccaagagggagagggaagaaagtatatgaatctttgctgcttttcttaacttttaactcttgtaataattgggagaaaaattagaggtgaattaga

SEQ ID NO: 86152 - DNA, 1028 bp, Homo sapiens
ttttttccagacagaatcttgctctgtcgtccaggccagagtgcagtggcatgatcttgactcactgcaacctccgcctcctgggtttaagcaattctccagcctcagcctcccaagtagctgggattacagccacccaccaccaccctcagctaatttttttgtattttttttttagtagagatggggtttcaccatgttggctaggctggtctcaaactcctgaccttgtgatccacccgtctcggcctcccaaagtgttgggattacaggcgtgagccacagcgcccggccgaccagtttttattctgaaagtttttatccgtagactatatacatcatcttgaccagctctattacatatgcatcttattggctccaaggagaaccaggtgagaatatattctcaatgcccaaatttttaatatacaattcaatactgcaaatagaaagtgattcattagcttgggttttcgtatgtgaacaggaacttttccataaggatatgtgttgagagatggagtgaaggatgtggcagctcaaaccagaggcacatgagatctcctgggggcaaggtggaaggtgttggtggtggggatgcctagacaaagtcctactctttaggagaagagaaggaagtgctcaaggagctgactgataaggaatagtccaggaggtcagcaggtaacctgtaggaagatacctaagaaacttaacaccaacggaacaaattaatggttataatgagaggccggggaggagtttgtcaagcttaatacatttaagagctgacaatgtattggactcttactctttgcagacacttttctaagcaccttacatgcatgatcttgcttgttcctcacaacaatcctgtgaggtaggcaacgttgttatttccatttgggaatatttcagagagtatttagttcctgtgtgtatcctgtgcctccccttcactccccacagccagaactgctcaggagtcatgagttataggcatcacctactttggagaattgtagata

SEQ ID NO: 86153 - DNA, 1050 bp, Homo sapiens
tcaagataatttttttctctgtcaaatttttaatgtgctagctttagccaagtaatttgcgactgcttgttgagggtttagccatgactgctgtactgtgtatatggatatgaagaagaacttcttaggaaaattacatgtaaagtcaatatagaacaagtgattttatattggggatacctctggtcttgccctaaaaagagaaagagactttctattaattttttttattcattctataatgtttgataaaattattgccataagtaagtcttaaaagtaatgactagagggtataggaaaaaaagattggtgtggctgcagctgttccctgtcagaggtcctgattcttttttcctcttctcttattatattcatttgtcagaagagtaaggaactctattttgttctagagtgtctaaggaagtacctgatatgggatattaatgctgtataattgtgtgagatcacgggagacaatcaaaaatgttccagtcctcattaattgaagtgtacattgttcgatgaaaagtgcatcataaattaaataggcttaataaaataaagtgaaattactggggagaagttgcctctgttggcaatccttagtctgaattttttttttttttttttgcctggaggtctgtttaaaaagaaatagcattacttgattggcccttcatcccaattaataattttaacttcgataaattctgatttcagagttatgactagtcacatcttagcttttccccttgctggttaattggggtgctggggttaatctaaattaaaacttaaactaatagaggtcagcaaggcagctaaaacacctgagtgaaacaaatggggctgccaggcacaactttatcttggctgtttcccaagagggaagtggcagcaaattggagttgtttcagccttctgtaaaggtgaatgatgggtgacacttgttaatgtacagcatctccggaagcattccagattgctttgctgctacaccaactgctgccatccatgcacagtcagtaggaactggaccagttgcca

SEQ ID NO: 86154 - DNA, 2948 bp, Homo sapiens
tggagactattactctaagtgaagtaactcaggaatggaaaacaaacatcatatgttcccatgggtatgtgggagctaagctatgaggacacaaaggcataagaatgatacaatggactttggggactcgtgggggaagagtggaagaggggcaagggatacaagactacaaatatggtgcagtatctactgcttgggtggtgggtgcaccaaaatctcacaaatcaccactaaagaacttagccatgtaaccaaataccacctgtaacccagtaacttatggaaaaaaaaaatgtatatgtattgttgatctagataaaaacataatcattttaaagttggatagcgtctttggagaccatcaagtccaaactctcttttcacaagtgcagaaaatggagcctgaaggaagtacatgactgttgtaagatttacccacttagtgaaataggacattgaaacctgtgttcttgctcccagtttgattttctttctgacacattatactcccttctgattggacaagtttgaaaatcctttgagaattttattttcaaatctatatctgtttaggacattggagatctactgtatcttttagcactctgatgattcacaagtatcatttttatacagttataaactttattcagttaacatttattagtctgggcacagtggctcacatctatggtcccagctctttgggaggccaaggcaggaggattgcctgagtccaggagttcaaggccagcctggacaatatagtgagaccctgtctctaagaacaacaacaaaaacatttattatgccagatgctagttttataaaggctagtaagaccaaaatccctgcccaaagaatttgtgttacctaagaagagtgaatatctatgcagtcacaaaattaagagtgtgactttaataaaattaaggtggagaaaataaatgttgaaaagagcaatcaggtatttgatacaaaaatgtacatgtggttctctagggttctcacaaacatgcctcaagcattcattagcctactggtttacccctcaacatacacctgatctaattctacagtaatttctctataacttgtaaaaggccttacgaggcactatttgacataaacattggataatacaaattccatattttccaagaatgtaatcattgttggaagccgtatggagttgctggtatccactgttacttatttcagggtagaagaatcttcagattggtgataggtagaagagggttcattttgctattgtctacttttgtggatgtttgaaaatttctgtaataaaaagttaaagaggaaaaaagtcatatttcttttttccttcattcattcaacaaatatttgagtatctactgtgtatttattgagtaactactgtcctaggctgtgctgtctaatgtagtaactgcatgtggctgtttagatttaaattttgattaatttaaatagtataaaataaatggttcagctcctcagtcacactagttatatttcaagtgctaagtaaccacatgtgctagttgctattgtattggatagtgcaaatgtagaacatttccattaccacagaaagttctcttggagctctgttagaggctggaagaaaacaaagttcctgccctcatgagcgttcattctagcttagaggtaggatgaaacagggaactacattgtgacaaatgcagtagagaatgatgaaactggttatggtgaaagcaagccctaggatagggaagtgatggttactgttttaatttaggatgtttaggagataaagatatttgagaagagacctgaggaaatgacaaacagagccatgcagttgtctgggggaagagcattagggacaaaggggatggcaagtgcacagactctgaggcaaaagggaggctagcgtgttccaggaaaatcagggaggccagagtcatgggggtcggtgggggagtaggcaagaaagaggatggtaggagaggaagtcaagaggtaatgggaggccaggtcctgtgggaccttgtaggccactgtagcactttgatgtggctgagatgggaaactaccagaggattttgaatatagaggagtaatatgattggactcatattttaaaaggatcactgatggctgtgttaagagtagacatgagagaatggggggcaaggtggcagacaggggaccagttaaaagactctagtgataatccaggcaagcgatggcagtggcttaaactagggtggttttggaagagagaactggttggattctggatttatgttgaaggttgagctgacacaggatttgctgatgggttgtatgtggtatatcaaaagagagtagtcaagaatgaccattaagattttggcctgagcagttggagggattaagttgctatttacggagttgggaaaaaacagtgagagaagctagtttggaagataaatcaggagctcggttttggttatattgccccctcctcccaacccctgtggacctatgttggctttatttttgttactaggacctatgttggctttattttggttacagattagttatattgtttatgatacttctgccacattcatgtggagttgttgaagagttatatatatatttttggagttcatgggaaggtccaggctgaaggtataaatttgtgagccttcagcatataggttgtatttaataccatgagattgaatgagattacctagaaaatgaaggcagagagaaaaagagattcgaagcccacgtcctggaacattcaaatatttatagattggggagatgggaaggaccaacaaaagtgatgaagaaggagcaaccagtgatgtaagagagaataaaggaagagtgattttccaggttgcatgtaaagaaagtgtttcaagaaggaggagatcacttgagcccaggagtttgaa

SEQ ID NO: 86155 - DNA, 1519 bp, Homo sapiens
gtgactaattgtttaccctacattgcctaaagtgcaatttgtaaagaaattataaaacacctatgtgtttgtttttagagtttgttttccaaagtctttcttatgctctttgctccctggttttgcattgtgattgtatccatatcaatctgttgaccagtggatacaaagcagccatccaaatgtgagctctcagctgtcagaacatggcactgcgcacaacaggttctttgctctcagtcgaatctgctttgttagagtctgccctaatttagacctccacctcttcagtaaaagcttcagcacaattagaagtggaacgtggcagcattacccagatgtcagggcagaatgtaaagtagtgaaggaaggcccttgtgtgtatgcttcatcctgtggttggaaaataaaaagggcatttagaatgctacctaatgaatagtgtacatttaaatagccatgagccataatttgcaaaagcatgaaaggaaacaaaagctgcaagtgccagaatgggattctaggcagagcagccattcgagaaagcagtgaaaaatttgtgttgatgaaataattttatttaagtaaaatattatgtgaattttagggtaggatgttgatatttcgtttatctctggaatgttatagagagctgttcgctataaatttaatgtgatagagcaaattgcatttaagtggtgattatattgtacatttatctgactttacaataaaatagattatggtaattaagattatattaagattacagtaattggatttccctagattttttttttctggtgttgaattttcgttgtataaatcaggtaggatgactagctgctgctgctgtttctccttctttttctttttttcactttagttcatatgagcaatttatgaagattttcttagcctaatatcccttattgaaaaattaattccttcttatctaaaatgactgcagaatatgtgaatcttgtttggattctgatccaaacaagccaactgtaaaattgagacattccaggaaatgtgaagactgactgaatatttgataataaagaattattgttgacttttttttttagatgtggtaatggtattgagattatattgaggggagaagagtccttatcgcttctcttgtatagcaacacgtactgaaatatttatagatgaaatgaaaattaacaatttaaacaatttaaacaatttaaaacaattaaaaactagtatcagtagtggataattatttaaaaattagcaaaaattggaaagcacaagaaaaagcactggaggattaccaaagggaaagttagattttaaaaattcatgcattcaaaccaaccagcagttgcaacattagtaacagaacatgctgcatagctaaaacattaaaagaaaacccaagtagctctactaaatctgatgggtttgcctgcagactggtagatttagtgcttgtcacagcaactccaaatactaaggagcattgtgaaccaaatttgctgta

SEQ ID NO: 86156 - DNA, 1150 bp, Homo sapiens
ttttaggcaggtagttaaacccacatccttattagaacctgcctatcattaaattccctttagacaaatgtgggtctatctgatttttaaagatcttcagagaagtagatttctcaattactttaatgaacttgttttagtatttaacacaactcatcaggaaatgctgatttttctttaactttgcagaagtacacagtatcaacagctttgcaaagtatcgtcctttgatttagggtcgcttttttaaaatctcaggttaaattgttataatttctttacctctttttatgtcttgaaatttccgaatcttcataattctctaggttcatttttagaggtgaagagcatggacttaagacccagactgcctgagtttgaatcccagctttgacattgattagtagttactttgggcaagacccttaaactctgtgctagtttcttcatctgtaaaatggatatgataatatatcagccttgaatggttgctgtgacgattaaatgaatagggtgtgtatggctcttagaatagtgccaggtacatagttaagcactgtacaagtgtttgttgccattattactgtcattattattgctatcagtattccaaggttgggtcagtctcttttcctagtgttcatttatttgtttactgacacgtctcttccgtacctgtctccccccagcccccttcaaggatttaaagaaaaatgttactaatagtacttcataggtgactaggctgaatgattatcttattttttatttttgggatcaaatttttctccaatactgtacttttaaaattgtaattttatgaggacataaatgttctctagaaggaagagcttaggatttcaaatcacaagacttgcgttcaaaccctgactctgtctggtgatatgattttggttgttctttattctctgggcctcacttttctcatttactaagtggaggtaataatccctgctttggggatttggtatgggaattaaatgaaatcatgtgtaaatatctggtacatagtaggcattcaaaaatgttcaatatatcagtttgaaaagaaaaaaccaggattttgttttaatagcaactgctttttatattaatgaattcaactagcttcattaaactgttcattaca

SEQ ID NO: 86157 - DNA, 1875 bp, Homo sapiens
gtccttagcaagctactgagtttcatggcacctattgaccatactacaatgaatgatgatgccaggtgagtaatagattaattatgtgtctcaaatggcttcatgacagcctgatattgacctgctctacagccttcgccctctccatttcttcttatcagttaaccatttgtcattggcatcgcagtaagggtcacatctcttcaccctcataattactataaaaccaaaccaaaaacttgcataaatttcagtgctgcctttggtggtttgtttgtttttcctgttttgttttgaactttagcccagcgccctgggacatgtgagctctctaggacagggcaggtggcccatgttcttgccgtttgtacttggggctgttgtgcatatgctttccttttgaaagtggctctagtgagtgctctggagatgtgcatatgttgtatttgttggggattgtgagtgtttttacaaaagatgtatatgcttattttataaagctgaaacgagagaaatacagaaaaaaagtgtatgctcataatattaccgttcagggataacctttttaaaataatagtttcttctgtatctattaattggcattctataatgaagagcttcctcttctccctcatttatttaccatttatttattcatttatatcaatatggactcatgttttcctattttattcaatgagttatgtttattttgatattaaaattgtcccagatagtggaagtgccgtcaaactggcttgtgtccttcaaagttgtcttcagtcaatctttgagtacttccttactttctggcacaagaagatgtttaatgctcatcttagactttccatcttccagccctgaaatcagtctttcttgaaggagccctggctctgtttagtggattgtggtatttagaaaccaagatctaggtactaggggtgctccttgttagtgagtattgctatttctagacctgtcagcagagacgggaagtgtatgtatatacactcacacctacacagaagacagccacttttaacatcttacagcatttcatttcagtttttgtaagttccctttcagtattttcctgtttttcttttttatattgaaattatattcaggaaatgttttatatactgagagcattttcatgtcgttaaaataattaaaatttttcaatgacgaaataatattgttataatatttatttagccattcactgattgttggacatttaaatggcttttaattgtcatcattgtaaataatgctatgagaagcatttttaaacatatttaccaagtgaaattattggtcataacataggcacaggtggtttttgccagttttatccctcaaactacatataaactttttattttagagtattttgtttgctaccaaatgccatcagattttcccctccttgtctgaaagtatgagatctgcaaattttgacaaatactattattattttttatttggtttattcagtactttgagcacaaaacagcctatggatggttctgagtacatttgtgtctggctttgtgaccacatctgctatcctgtgctttgcaagtgaatgtctagatatggccatggttttttgttcatttctggatccagtctgtttaaaaattgcagagtaaagtgagtgcatcttagattccctgtcaggatgctgtgaaaaaattatatcaagaagaaagcaaaactagattttgaaaattaaaccaaaccctttaaggttacgttattatcccaggcataaaatgaaatctagtttagatattagtggtatcttttgatcatagtactatgaaatcattcagaaatcaactttatgccattcttagttggaatttt

SEQ ID NO: 86158 - DNA, 1489 bp, Homo sapiens
aataacccctgaaataccctccatagagcattttctgttggttaaaaacttgcaagcaagaatggttaaagtacagatgttttctctgaggcttcgtatctcctaaaaagacacaggttattctgacaggtgagacaagcccaggcaaatatgcaacattgatctaatcagcaagaacaagagtgatgttttaactggggctaccttttaccagcgtcattaaaggctcccattactcttttattagaggttccctctcttccttatcagattacagaatgaacataactcatggcagtgatttgatctcttgttaaagaggattacagctttgcattaactcggattgacatagtttataatttgcttgttgattctcaggtgggtagcaccacacgtttgaccccccagcagtgctgaggggaaaggacccgcatatatcatcattaaggatggcgtccagcacagagataggggcatggggccttctttcgccagtaatgtcagaaaggacaaaggaaacactctcaagttcaaacctaaggcttgggccagagttttaaaactgggttggaaaaaaaacactgctgttgtttcttctatttttcctgatttgctgctgttcagtctcttattctagagaacttgcattgtcaaaatgaagccttggctccaagcaggaggtagagtgataaaagcacatcttctagaaagagatttgtagatgctgaacagataaatccttcctcaaaatgggcctttttgactatagttctcatttctgcacttatattctcatcgcttcttcaaaggattgtaaatcctctttttttcccaaagggatgtttcacattctttaaagtgtgtgtaaatgtttctcttaaggacttgttttttaatttttattattattggctttctaaatatattgcaatatcttacagatattgtattaatcacagctaagtaactggcaagttacttgcaagccggtaggcaatagctaagtttttcaccttaatttagttagtcataatcatgttattgatgtgccccacagtgatcactgagccaacagtcgattgctgagataccatttctgtttctaagtgcagttatccttcgctctgatttatccactgtaagtctgtcccctgtgtctgatgggcaatgaaataatatagaataatcatatcatatttcacttactgagagtttactatatgccagacattgcactaagcccttcacatatattttcatttgttcctcatttaaaaaaaaaaacagtgattgatgttatctgcattttataagaatactaaggcatggaacaattaaataacttgcctaagctgaacagcaagtaagtagtggaacaggtgtgtgcatctaagagtgtggtcccaacccccactgctgttgccaagaaattcacaaacttttagaaatatttgggaatcatgtgccacagggaaggcccccatcc

SEQ ID NO: 86159 - DNA, 1042 bp, Homo sapiens
tctgagaaggactattttaaatgtaacccctaacagataattatttaaataaacaaactttgtgttttcacatctgtgtattacgccactgtccctcagcatgcaatacagacatagccatttctgtgcaaaccccaaaaaaagttgggtagaggcttcctgtctgagatgcttttaaaggcccccagcttgtatgtttgtttacagtttgctgtttacaagattatttttgcaactgtcctataagatgaagatgagtttcttgcctcttttgctgaaatctctccaaatcatctcacttctttaatatactttcctctgcttccatgtcactttgtatagatccatattatgtatagcatctaccaccaggttgtttcctaattattcataggttaggtctccatgctaaaccattgcaccgcttgagggccggctccttattttgttcttagctcatggcaatgttggaaaagacccagaatgaaaggttctcctctgggacttctgattccccaccctttgcttagagggtttttggggtcatttttacttaggattgaaccctgggaaaggctctctcaagaacactcttacatgtccatcacttccaagaccctaaactttgtatacactataggttttctcctgctatatactatatactataggtttctcctgctatatactatatactataggttttctgtgctatttaaaccaggtttggttctgatggccttcctataaattattacaggtcaagtgtcacctatcgaattcttgcgtccagaggaatttcgtatttcagattttcttggatttggaaatatttgtattatccccgttgagcatgcctaatctgaaaatctgaaatctgaagtgctccagtgagcattttcttacagcatagttcgtgtcggtgctcaaaaagttttagatttcggagcatttcagatttcagatacttgagttagagatactcaccatgcagttactatggagcatgaagaaccccagcagggctctgtagtgatttata

SEQ ID NO: 86160 - DNA, 1308 bp, Homo sapiens
atgtcagtctcaccttctgtgcggctgggggaagtgattcacgtctaagcagtgaagcatcccctagcttttaacaggagctgttagaggggctgctgtttgaacaaggagcttcatcttcctgaagccagcagtcacaaaaccgtaaacacaacactggccaactctattgcggggaccgtggtggcttgacgttaatattaaacatctccagcaaggcagagagctctgcatcccaggtccggaataaaaataaataaaaataaagagaaaccctgctaaaagcagtgtgatgatttgtcgtctttcctttgtgaggccatttgtcttctctcacatcaaatctgttataaaacagtcaaactgtgaaagtggacatcatcccgggaatatggaatattaatgcgtggaaggagcggcgccccttttgtctgaagagtggctcctcccccacccctctgcttttttgcaagtccgctaaggtaaattatttttctttaaaatcatgtggaagatttgaagctagtagtagggatggtggaagttttgagtatttttcttcctttgttaaagtgcaggggatttgtgactggcttgagtaaggaggaagcacaagtgagaagaaaacctgtccacgtgcagtccccttctcgcccccatccctctcccctctcctccctgttccccagcctctcagttcctttgtttggggcctgaacctgcttcttggaacatttataaatcttgagtctgtctgatctttaggggacaggccagaggccgtgtgtcaccatgtgtaatttagagctgtagggctaaaagcttttccagaggtttgaaggacctagttctgacctgaccaaaagaacgaattggaacagaccttctagagtctccttcaagcactggggaggatggtgatgagagcagacacacggggtaatttatgggctccgctgactggtggctgggtccacttggaaacgagtcgtgtactgccaccttgtggcagattcgggcggctgcggttttgttgttttggaaccttgtgaagagtttcagctagtgtcggattggacatgatttgccttgtatctagatttaggtaattagtgatagataaggggtgtctctgagtcattcttattttgctaagttgatcctgttaagaaataagtcttagctgaaagaagactgctttctttcccctttacctcctttcttctgctttgtggtttttttatgggggtttttgttgttgttcagttttggtttgttttttggtatggaattatgatgagatttcag

SEQ ID NO: 86161 - DNA, 1003 bp, Homo sapiens
tgcaggcaagcgcggcgaggctggaaagggtatgatgtgaagggctagcctcgcgcctctgcatttctttctcatcagacgttgttgtcctaaagtcacactgtccttttgttatggcaactctccctttcacgccatttaattttttgtgtggaaacagctagagagacttgtctttactggcaaataggcaggccatggtgtgatgaagtggagcctgccctgggcaccgaagtatccgtgtgacggagctgctgatttggaagccgtgggtttgcatttggtctggggctgccgtccaccttggcaggcttcgtctgggctgattgaggctagtcacatggatgtgtgtaacagaagagcagaagagatgggtggagccaagggggaagctgtgtcctttgtctgtggcctaggggtctgctgggtagttcagggtgaaggcaccagcacattcttgggataaaattcctgtaataaaattggaggcctgttgttttctggcctgcactttcactgcctgtccctcccgcggtccccaacatgataaggctagcttacatttgtggcttctgtagttcttccttaagatgtttttcttttgacttttttaaagctttgatactctattccttttgttggatttcctaattgtagtacctttattcctatccataactatagtagggtgacttcaaaaaaagaccagtagttttttgtgttgaagccttgctgtttgaaaggtggggttttttggttttgcttttaaagtctgatgtgccgatgctgaccctcagatgatgagagcacttttaaaacaagacggcaggctggaatttgagttccatcttgagaatatccgagcaggtgtagatttcttctggggctcctggcccatgacctcagccctgtgtgcgcctgccctgtctctgtgagggctaccggctgggccttctgcagggcgtggacatggatggctgcctctgcggccacgtgctacacg

SEQ ID NO: 86162 - DNA, 1079 bp, Homo sapiens
agtgactgccaggcctcactgaggctagagacttatactttaggcattgtgtctcagctcctctgagagcaaaacaccaaataaacagccttgccttctcaatcacaattttactaagtaatttgggcttttaactggttctctcaaacctgtcaggttattgaattctcttagcctttgtcaaataggtgggtccctagagtctgacaggacagagtcagggtatgagcaccagagtgctcgggagagccccatggagacttcaggtgtacacctgtgtccataaaggaagagaaggagaaggggcacagctcctgcctcgaggcctacttcctcctcctgcacgatgctgacagtgaaggagaatcgtggacacggagcacacttttggagtaagcaagcactccagatcctgaatagtcagggtgtcccggcctggcctgacccctggtgtttgaccaagagtcatctgtttgcaggcttatgtttgggacaataataaggatctggcggagtggctagagaaacagctgacagaggaggatggtgttcactcggtaatagaggaaaacatcaaatgcatcagcagagactacgtcctcaagcaaatccgcaggtgagaccaacgtggggaactccactagagaaggagggctaatttctttggaataaaaagtttccaaacaaatcatgagatgatcgcagaaatcttatgatctctgcagtctcttgctgtttgagacagctgtagttgacccacaggtacagatatggcctgaagcccaattctttttcagctactgctccccaggggcacttagtaatctcagctagatgaaggcttaattcactgtgcccacctcttagctctgaatgctgatactcaaaccggatgaacaactctgggaggaaagctgattgtgtgtgtggtggtttcctgggaaaccacctcctcacctcctgaagccaagagttagctgtattcttctagaggcttcagtctgctccataggatcggtggtagagactgcaggggcatttttgtaaaagtttatttggaaacatttcacttacagaaa

SEQ ID NO: 86163 - DNA, 1015 bp, Homo sapiens
tcgcatgtacacggaaacaggagctactagtttgtgctcggagtttaggggtgctctcaccacatcccacgtgtggaatagcccagctgctttgatgctggtcagcagggatgggcatggtgtcagtgtacaagtactggcctcaggggaaggaggagcctgggtggtgtcagcaatatgcagcaggcctctaggtcgctacttgcaccttctcagggagaggcatgggagaggggctgccatctgccttcacacttgtgactgccacagggaaaagagggcatgtgggcttcttgtggcaaggtaaagactggtgtggcatcttgtagggccctgttaatcagcaaagagcagagaagacaacggagagccaggccacagagggaagagggggcaggctgatgttgagcttcccgtgattgtggctgcttttgtgcagagagattcctggtcattacagagtgtgacgggcatgtttatctaattgcagggaccccagagctaagcacagctgagcggaaggagttggagaacaagttgaaggagcgggaggaattcctaattcccatttaccatcaggtagccgtgcagtttgctgacttgcacgacacaccaggccggatgcaggagaagggtgttattagcgtaagtacaatggttgccacttcttgtcagaggcccacatgtgggcaagtgtgtgtgtgtgttgcacacaggctcataagcagggagctatgagggccaaattaaaacaacttctgcagatcaaaacattttcaatattttttagattttcactgtttctgtaactgttatcatcttaaaacaatgtataatttaggtttccattaattcctcaggaggcaagctgcattttactggtgggaaactgagtcacatgtgacttcattggtgacgggtcctcaggatgtgggttactatagggtcaaggctcccgcagcagctaattaataattgatctgcaagttgtttgatccatcttctcaaaacgaat

SEQ ID NO: 86164 - DNA, 1352 bp, Homo sapiens
tctctcagggatatcctatacgggcagctgtctctgcgacaaagcaggtcagcctagatataacaggacatattatgaacccagttcctttggggttcacaatgattctggctcttttagtttgcctagaaccaaactaccaaaattctttttcacaaagtgggtgaaaatggtctcatttttcagactgggaaattgaggccaaaaaagtgaatcatctaagatacaaaataaataaatgtacatcagagtccagaatggaattctcattctctgtgttctccttttctcaggatttcttcagatttttcctcaactgaatactgagcccgaactaaattaaacaaggattctttccttttgtaatctaaagccatttccacagagaaaatctgatttaggagaaagcctgtaggagtggatgttatcttgtgttgccgttctctccccaaatctgcctctttactggggagcgtgctcacagatcacttagacaaaccagcgcacaactgattgactgtgttcaaaaacataattactccgggcacggtggctcacgcctgtaatcccagcactttaggaggaggaggcaggcagatcacctgaggttgggagttcaagaccagcctgaccaacatggagaaaccccgtctctactaaaaatacaaaattagccgggcatggtggtgcatgcctgtagtcccagctactcaggaggctgaggcaggagaatcgcttgaacctgggaggtggaggttgcagtgagccgagatcgcgccattgcactccagcctgggcaagaagagcaaatccctgtctttaaaaaaaaaaaaaatcataattgctatgtattttataagaatgagtaatatttgacttctgagcagctaacttcatctcttctagaatttttatttttttaaatggccttttgtcatcttacatggttagtttgggtggaaagatggtgaattactagtttgcaggtctgtgattataacagaaaatatgtaaatagtgcctacactgattcctaatagaagtaaagggaagaattacctcagaaagaaaagtgagcaaagcccaggccccagagtcttgcattgctgaatcagttctgaccctgattcacagaaccagggcttggtagagtcattgcaaggaggagaattacttcctaccatttggttgccttaaggaaattaaatttcttctctggaaatggagccgcagccctccaagtcctttttgtctctctctgacatccttctactgcctcacaaggccaggagcagggagagtggctgtggagcgggacggccttgctagcctggcctcttgagtgctgtgac

SEQ ID NO: 86165 - DNA, 1038 bp, Homo sapiens
tttgtagagacaggttctcactatgctgccctggttgggtctgttcttctcatgtggctgtgtggtatttcctaagtatttttaaaatttttctctcattgataccctataaaaatgcaactgttaaagaatttgtctttctttctcattatattctttccagagtatataactaatttattcagcattcattcattcagcagatatttgttgagcactaactatgttcaggcactgggcagggatatcgggataccaagatgaaaaatagtttttgaagataaaatttttaaaggatcaatttccattaggtgcacatttgaagagctcatcctatgctaagcatcatgagaataactgaaaagaggtagaatagttccttcctttagtaaacttactgtagtgggagagcacatattgacatgaaaaatactcaacgtttgtagagcaaatgtgaattaatgtggtgaaacgtgagtacagaaattcagagaggatataaaatggaaaggcaatctggaagacttacacactgtatcttgtgaaagacagtgcatctctctgttgctgtcttgtgcttttgaagatcctctggagtcttgaatgggatacaggtcgatactccctttagtctatagggtggccaaacaggaggcatagtataaggaggctcttcgtggccagaggtcctgaacagtgtttaaaagtactgctttgaggaagagaaatttcttgatttctaatttgtctcattctccatagatatgtacgaccaagtgctgaagtttggtgcttacattgtggatggcttgagggagtgctgccagcctgtgctggtttacattcctccccaggctgagctgcggggtggctcctgggtggtgattgactcctccatcaacccccggcacatggagatgtatgctgaccgagaaagcaggtagcgtgccttccacatttccattcactgcctttagggaccctgtagctgttggtttcctcctggagaatgttacagccatggcactacagcaccca

SEQ ID NO: 86166 - DNA, 1357 bp, Homo sapiens
tctgtctcttaaatacgaagggatttcagacaattgtgtgtcagattgttgccaagtgtttcaacctgcctttcaaaataagtggtttggggcagctgcagttcagtctgagcatgtcgattacagagtttatttgtgtgtttgtttatattttaatagcctgctttttgggtgttttgatggttgggctgtgggtctataggtgttccaagttagatggaggcaatatattagtcccaaacatgtcagctttaacaaaccctgatgctcctttcctactcacagtcttggggccgaaaaatacttgtttggcagtcagatccaagcctcacacaggctggtagtgttatcagtatagttttgaacatttctgaacacagaggaaatccagcagcagttgggaatattcagtcatgtattcaagtctctttttctggttttattttactcatcatattagatgttggaaagcagagtaccccagtctcatgctgtctctcctagcagtaagaatgaagtagtagaggctgggcacagaggcttacacctgtaatcccaacattttggaaggccgaggtgggcggatggcttgagctcagcgagaccagtctgggcaacgtggtgaaaccccgtctctacaaaaaatacaaaaattagctgcgcatggtggcacgcacctgtagtctcagttacttggggtgttgatggaggaggatcgtctgaacccaggaggcagaggttgcagtcagctgaggtcgtgccactgcactccagcttgggagacagagtgagaacctggcgcgccccgctccccacctcaaaaaaaaaaaagaatgaagtagtagaatgtggacattagggccaacaagatctagatttgagtcttatctccaccactcactcttatttaagcctcagtttactcacctgcaacttggatatataaataagataatgttctgatgattaaatgatttatatgtgtgtatatataatcatgttccctggtacacaataagctagccatgatgatgacaaaaaggagcccacgtccatttcataaaattaaaaatcacacacacacactcatcttcatttgaaactgtttgcatatactatgaaatctagtatttttttaatagatgaatgaaaatacattttaaataaaatctccccttctttttgagatgtcaatctgttaattataatacagagatagattttgttgtagctaagtctttaacaagaagaagtgagtaaaagagctggaaactttgtcttcacttacctctaactttttttttctttttcaggtagaatgactttttgtgctgtcttttattgctttattttctcc

SEQ ID NO: 86167 - DNA, 1073 bp, Homo sapiens
tttgagttgcaacttgaatggaaaaaagtacattttataattccatacagaatttcagaataatctactactagtgttattgaggtgacctactgttgtggatctcgctctcacagatggatgctggaccattctgatggtgctggggaaatatgattgtgactctgtccctcttttctgggcatatactttgttggtgttactcctaatgttctacagtgaccaagacagatactgaaattagcatttactggaagaaaatgaacaaattcagtaccagaggctgttcagtaccagtggcaatttgtgctatgttatattattatctaacaacagccctgggcctgtggctccagcatattagaccattattacaaaggctctactccatgctatgggaattgctaagtaattaggcagccagtatcaccatttacggagaaaccttgatgtgtagagcgactgtggacactacagggagagccaaaggaaacactacctcttacagtagtgaagccctctgtcccatggccagataattcatggccatgctaagccagagactgcatacctggagggtatgagagtatgctaagtataaattccatctgtcttggggagaatttggggttctaaagcaataggatagggccaggcggggtggctcacgcctgtaatcccagcactttgggaggctgaggcaggtggatcacttgaggtccaggagtttgagaccatcctggtcaacatggtgaaaccttgtctctgctaaaatacaaaacttagctggcgtggtggtgggcgcttgtagtcccagctacccgggaggctgaggcaggagaatcacttgaacctgggaggcagagattgcagtgagccaagattgtgccactgcactttagcctgggcaaaagggtaagactctgtctcaaaaaaaaggaaaaaacagtaggataggttaggggaaggagggaggagtagaaacttttggagtaaatagtgattagaaaatgcttaggatggccaggcgcggtggctcacgcctgtaatcccagcactttgggaggccgagg

SEQ ID NO: 86168 - DNA, 1218 bp, Homo sapiens
aatcctttttaaaaatgaggaacctaagcccccagagtttctttaactgagacttgtcactaaatattgttgaaagacaggcatgttacctttttgtgtctgtgtgcaaagagacttgcacacaatgaggtagcctatgcctctgggtctcagcctcacccaccactgcagtttcagctgagggtggaagtatgctttgcctatctgtggcagctggtggagagaaaggggcttgctggttttaaaattgcaaccatgaatgtgattgttaaaagtattttttgtttttttttaattttttattttatttttattatacttcaagttttagggtacatgtgcacaacgtgcaggtttgttacatatgtatacatgtgccgcgttggtgtgctgcacccattaactcgtcatttagcattaggtatatctcctaatgctatagtaagccctcttagcgcagctggcagcgcgtcaatctcatattttttgttttctaagttttctttttaggaagaagattcagatagtccctcagaacaaccaacccatggagactgaaatctctgttttgtggagaaaagaacccattttagtgcgacttgtgaaatcgaccatgcctttatttctatagagacaaatgtcttttctcttgctcttttctctaggtcctcgggcgggaagtgtacacctccaataaccagctggggggcatccagattatgcacaacaatggggtgacccactgcactgtgtgtgatgactttgaaggggttttcactgtcctgcactggctgtcttacatgcccaaggtgagcccttcctacccagcactgacatggcctgcagagcctgtcatttccaccacagctcactgcctctgtgtttaaggtcttgtctttatggtggaggaatttttttataaaatatttctctgaaagctattgatttctcttttccttacagccatattttgccttctacctttaagatgtctctggatttcatttgttgggcccctttctaatgtcttccagccacggaagccctcatggcctacctaaggctcagatcccagtatattaaggttcctcctcattgtgggttttctcctctgtaatagccattcattcctcagaggagcatcccagaaagcatgggcacactgaaatcaagagtcaaaacacaccactttgtgccagcctcctaaatgagactatt

SEQ ID NO: 86169 - DNA, 1059 bp, Homo sapiens
agcaggagaatgagaaaagagccgcagtgcctgggctgagattaaagacggactgagaggcggatgggagctcagtggtcagataccgtcttccctcttcacgaggctccttcaaaggagctgccagcatgttgctcagcttggggctgcctgtaaaggcttgttctctgcgcttccttatcaaggaaaacagtaatctgagagcaattttgctttccatattcctttcagaaaagtatcttatgcccttcctagctgaagttaaatggaatcaaggccaattgggtcacactgaggttattactttggtcaccaacttcctccatctttggaaggtcccgatgggggtgctgacccagcatgcaggggaacctctcaaagctcctaacaagaaggggcaaaatgggaatatacaggcagactttgctggcccttagttagttagattctccccagagactgaaaatgaatacacgtacggaagaaattttgtattgtcgttattttttaaaggaggaggggaaaggaaaaagaaaaggtaaaatacagtaagcgctctacaactgtttagagctctccggggctaccttagatgactgacaattactatacactcagcagtttgcaatagtcagtgatcaggctgcccggcttccatctgctgggtcagaaaacctccttccctgaaagaaattattaaccagtcttcaagggaaaaagaaaccctgcaatttccaagtccaggaatatcttttcttcctctttttttcttctttaaaggaaactttgtggtttccaattgcaggtgccctttgaccttacaaggattaaattcctccagggatataccagggattgaggccctgaactccctggagcctgggaagggaaggaggaggggaagcatgcttgggtataaatcacagccctgcacccagcacacaaagaagacttgagactcaggggttcatgtatgtatcatgagttgcttcaggtttttgctagctttagggcttgtgcgtggaggccagtgttaggctggtgcaaaagtaattgtgg

SEQ ID NO: 86170 - DNA, 2219 bp, Homo sapiens
cacggttccttaggaagattggtttcttcgtcttcttcattttatattcagttgtgtgttacaccttcatatgttgaattttcttcacctgtctctctttctacatatattcatagctctgtctttgcagatcagtgctcacttgaagctttgctactctgtcaacccctctcctctcttcagcctttcttctcccccaaccccagcctgaagcccaagtaaattagcttatcacccctgccccctagttgtaaaaaaattcccgtactcctccaacagtgtctattcttggatttgcagtcagcaaccatctccaataaccatcaggctgtcagctttgcagctccctaccacctcccacctcccccattactcaccagaagaaaaagagagccagagcaagagcttgaaatatatcatgcaatagtgtatcatgaatttgttgtgaatcacagtggtgaagcaggtttatttatttctgagaccttaaatcaatacaaagtaggtctcttagttctgaagctgggatggagtgtgaaaaaatgagcccattgtactcttacaactttggggaaaggagatgacagctatataattccatttaccaggcactaggggctttaatgtgaaggtgacagggagctctttgtgcatttagagcaccatatcttctaaataaaagatctgtagacttgatagtggagcatagctccaagtttaataatctccaagcattagaccgagccaatatgttcccaagtcagaaaggtcccccttaacactcataaattaaaagtgcaagaaccacacgttagtagattagaaatgcaaggactccagtcttttctagaaggaagacagagctgggccctggctgtgcacagactggtctatgaatatgataaagaagcggaaatgagactgtttagaaacctgactcctagctgttcatcattctagggaatgttccctgtgcatggatccaaatctagctatgtcccttctcattcagattggccatcatcacacagtctaatcagctaatgtacacagtcaggaatattgaattatgaaaggagaagcttaaagagctttttagattgaactacagattaccatgcctgggcttcaagattttctggctgatttttgaccggttcctaattttaataatgtctcagtgtctgggatttaagccttctaaaatagtatgcgcgtctaagaaattgagaaatcagtgttggtaaggaaaagaacccacccaaatttaaccaacagcataagatgcaaatatgagaagtcaagaccattggaacatgtaatcaacttttgagtaacttcattttctacctgacccattggtaaaatatgcctttctcaatagataaagcaggtttatgcagctcagaagagcattcctaacataatatgactttatagtacttagaattactagtttaattttagcccatgtaaagaattttgacagggagggagggagaggggcatctacattggggaaaactaaaaaggtaggaaaattgaaccactccttttgcttcagaaagccactacacattataacactaatatgaaagacttattttgcttatagtggtttaacttgctgaacatactaatcagttgaggttttatagaatacatagaaatgtggtagatcacatgcatttattgcatgcctgttaggtataaagctgttcttatgctgtggcaatacaaagatgattcctgctttcatggagctgaaatttagctaaaagacaataataggcctttcatgtgttctaaaggaaaaaataaaattgctgcccatcagacgtcaatgagaaaacacaaaccaaaaggccacagagatagtaagtcagtgctactcccctaagagcgaggccctgcaaacaccatactcttggggcctggacactggtgagcaatgcagtcagtcacagcctattcagtaaaaccagtaggaggcgactgacaaacagggatttttttaaaagttttccatctttagaaaatacataatctgataaaagattggtatccaaaagaattctcaaactcagtaagaaaacaacccagtaattaaaaacatgggcaagaaatttgaacagacattacaccaaagaaaatataaggatggtaaataagcacatgaaaagatgcttatcattagtcattagggaaatgaagattaa

SEQ ID NO: 86171 - DNA, 2547 bp, Homo sapiens
gactttcaagtttaagggtaagaattaagtgttctgtcattcccatttaggaaaaagttgataattccattggtttaattagattttgtggatgtcagaaattagaggaatcatttgatgcgatcagcttgctctgtgcattcatatgaactctgtatcctcctctgggcttgcttttctcatcaaggaaaggcacagcagtgctaacagtggcgaacttggctgtcttcctccctttttggagagtagcctggaaataaaggttgtgaaccactactactgaagattattattgcagtgggagaaactgctgagagtcttaaggttgttgttttttttttttttaagttgctcttttggataccttcttaggatgagatattgatgaatgccaaagataattttaggtaccattatctatgagaacagaatttttgaaagattttaaaaattctgttctcatagataatggtactttaaaaacctatatttccatgatgttcccatacccagtcagagagctaatttctgaaatatatcttcttatattgagtttctttctcccccctgccccgatactatattatatacaaagaatattacaaaaagcagatgttgggtttttggttttgttttgcttgaaaacttgctagttgaatttcatttgtgccatgaagaaacattagagattgatttcttaaaatctgattgaattgttctaatcaaattcattatattcactgtcatagcttacagggctgcttgttaaaacaaaagcttagttacagggtgaaagataaataaagctatagctttaacttaccaaacaatgctcacttccaaaagggcatatttgtttttagctgaagggagtgatcagatacagaggttacctaatgttgctctgcctgcttcactatcttcatgtcagctcctcttaagtatagagctgtgctgctgaagacacccgattttatgcaaattcgttcagaatatcctattagcccctttgcctataaggtatgaaaaaaggaaactaccatgctcagatggcttcctctgactcactccttctgtgtgttgtctttgtgtgtgctggtgtttttcttcatctctgtttgcctttctttctgtaggtatctctctgtattgtgtactttgggtgtgtgcaagtcaccctgagtgcatgtctctttctgtgtgggtgctgatctttctgtctctttgtgtctgtgtcttgcgtatagatccccctctttctctgtctgtgtgccgccctgtgtgttcatgtgtgagaaagtctttgtgtttttgaaacattatagagcctcctttcttaagccttggccattttgctcatagtatgtacctgtgtaaggtggaaatgtaggagacatgcaagcttatatacagtcttagactgtaaatatttgacccccacatttttgagtcttcatcctttatgttaaacattggggtgaagaataaggagtgggggtgttcagaggttgtaggggaaaaaaatcttgtgtgtgcaagtgccgatcctgttgacccctttgaaaattgaaataatgataatgcacgtctcctgactgcatcaaagtatcagcacatcaaaagccaggaggcatgaaatgcaaatgataaagtgaaagcagatggattgtgcatgatcgcctgatgcccaatgaattttaaaaggtgctggtttgcaggaaggggggttggggggttttgggggggactgaaataaacacgttatccctgcaatttttttttgttcttgatgctcactcctgacaatattttttcacacttgagtgaacaccctctctctctctctcccccctccttcttctctccctttctctctcctctccaaatcccctcctctgccccccccttcccccccacctcttacacatctcaggtcatgtcgctgcagctccggtggaaataataagatataaaccacgaggttgttatttgcatagaaatagcatggagccccaggcagcaagggagaaggacacagggatgatttgtctaaaattttaatgaaaacttttgctgaggcagagatttttaaaaactttctttctccctgcttttccccttccttcccctaccccccaaaccccatcattgattttacttaacatggttcagtttgaagagaaaaggttgacactccacatatcatactcccataatgcagcaacctgtaaattgtttcttcctttaatagatatgaagctgaagagacatgcattttcaacttaatacattgcatgtgtgcgcctggcttttatggctatactccatcttggcatacacatgatgttgcctgtcattagcctgtttttaattagtttacaccttcctatcttttgcttccaaagactcttactttttaaaggatttctttttatagccaacagtagtaaccttcatataaaataaatattttctggtgttttcctgtttttttacttttggtggtttttctgtatacttacatgttttattcatggacgccatcct

SEQ ID NO: 86172 - DNA, 1114 bp, Homo sapiens
aggctgaggtgggcggatcacgtgctcaggagatcgagaccatcctggctaacacggtgaaaccccgtccctactgaaaatacaaaaattagccgggcgtggtggcgggcgcctgtagtcccagctacttgggaggctgaggcaggagaatggcgtgaacccgggaggcagagcttgcagtgagccttgattgcaccacttcactccagcctgccaatagagcgagactccgcctcaaaaaaaaagaaaaaaggctatctgcttaattccagatttcgctctttctattaaaccatgttgcttccaggtaaaataggcaccaagctaagaaggaaagacatatgaatgaagagtataaaaggaagcacataaagccctggcattaaatataagctttcaatacacttttagccgccttttattggtgattattcttttaatggcttgttgttactgtgtttaacattcataatttgacatggccatatccaataggtacaagataacagatattattgggaaagaagagggaattggacccgagaaccttcgaggttctggaatgattgctggagaatcctcattggcctataatgagatcattaccatcagcctggtaaatctttccagaatgtgaaatttttgaagaactggctgtgtggctaggtttatttttttctcttatcactgctattcagtcccaaatgagagcatttcttgaagattgtatgtctataattatattttaatcacacatgataataggaagataggataatataaataactgaatttttcaaacaaacccagcactttgttttagcttttagtgtaacttctttttattttctttcttttttttttttgagatggagtctcgccctgtcaccaggctggagtgcagtggcacgatctcagctcactgcaacctccgcctcccgtgttcaagcaattttcctgcctcagcctcctgagtagctgggactacaggcgagtgccaccatgcccagctaattttcatatttttaatagagccggggtttcaccatgttggccaggatggtctcaatctcttgacctcgtgatccacccgcctcagcctccaaaagtgctg

SEQ ID NO: 86173 - DNA, 1020 bp, Homo sapiens
aaaaatgcaaaaattggccgagtatggtggcacatgcctgtagtcccagttatttgggaggctgagatgggaggattgccttgagcccaggagttgaaggttgcagtgagccaagattgtgccactacactccagcctgggtgacagagcgagactctgtctcaaaaaaaaaaaaaaaaaattctctacacagaggtcttagtaggagatcagaaaagataggaattactttaggctgggagaagctttactgaggaaatggaatttggatgaaccttttggaatgggtaagatttggacagagtgagaggagaggagagagaaagacaaagttttttacgtagaagttaatatagtagatttctgcttctaatagtgtgtttatcaaacccatgggtattattttcttaatttcgcatgtggggacattgaagctcagtaaaattaaataattttcttaagatcacacagttagttaatataagtgatagcgcctggatttggatctaagtttgttggactccaaagcccatgttcacctttatatgccctatcctttgattagcagtgaaatctaaattattttaatgtaaattgaataatagtgctttcttagatgtttgtccatcatgctacctcaaaactgaatgtcttctgatcaggaatcttgctgcactgagactgggataacactctccattctgtaatggtactttttaagatggggggcggggcggggtggggaggcggtcgatgagcaacatactttggaaagacattgataaagaatagtgtgttcttggtgctgctgtgctgacacctaattagaagtcaatattgcaagcataatgacctagccaattgctgaacttgctgcccaagtgacacagttagagtccccaggtagtaatgaaagataagagtattatttgcctgcccagtgccacatggtcgcaatgtttacattagcacacaaatgctgaagtagattcttcagggcttgtatctaagctgcttctg

SEQ ID NO: 86174 - DNA, 1019 bp, Homo sapiens
cacagcatagctagagttgatggatatgtctttcacccttaaaaaacaaaatcctggcatgttttgcccttagcttttcctgcaaatttctttgttgagcttaatattgttgttttattttgtagtaacaacagcagctttgggaagtgcctgtgtgtgcttgcacattctattcacattgatagtacaattaatgttgatgtcaattttggtgttaattttgggtcatgattagtgttgacactttgtgtcagactaatggcatttatgggcaccatcagaataaatgttaatattatcatgttttcactatctgttatagtaacattaaaccaaggtcctcccagcagaaaaaatacatatatggatagatagataatgcctttctgtatcgctggtgttactcagcgagaaaatgacatctcagggcagaatcctaatcactgtttggagcatcagaaataatgatcacctctgatcggaggttgtgaataattcatttggtttgattttcacgtcctgtccagtgatacttttcaaaccaaatgtgtttctacaggaaaataatggtcccacttcttatggaaatactgtggcacaaatcattttacccacataaaaacagttaaataagactgttctcttctgcttgctttctccttcccatcccctcctccctcacttgagctgttcattccagaatcagaatgtagccaaagaaatatgttctgccttagaacttgtataagggaaacaaatatttatttctgcttatccttagcttattcactgtggctcttttcatcctcttccctttttcactttaagataatcagcttaggttgataaccctaaacctaataaacctgctcgttggaatgttctgttatgaaaaatgatctgaaattaaatattttaaaacttattcatggctatagtaatgacaaaataatttgtagtaagtacctaggaccacttgtttagtcagtgcatgagagaggcagtgatcagagaagacg

SEQ ID NO: 86175 - DNA, 1604 bp, Homo sapiens
taactctttggttgaagatcctttgaaccttgcattagggatctattttttttttttaaagaagaggatgattgaagaggaaataaagtagtgtaaattaaagtttaaagactagctgacagccaggcgcggtggcgcatgcctgtaatcccaacactttgggagaccaaggtcggcggatcacttgacgccaggagtttgagaccagcctggccaacatggcaaaaccctatctctacaaaaaaaaaaaaaaaaaaaaaaaaaaaaaaaaatatatatatatatatatatatatatatatatatatatatataaattagccaggcgtgttggcaggcgcctgtaatcccagctactcaggagactgaggcacaggaatctcttgagcccaggaggtggaggatgcagcgagccaagatcgcacgactgcactccagcctgggcgacagagtgagactctggctgaaaaaaaaaaagactagctgccatcatgactggtattttggttttagtcctgctttatgttctcaggggtgaaatggtagggacagtggggattaggggttcagttttagaactgctagcccaactaatacccatatttaattattgttttaattgttggcaatgtactgatatcctatgtctcccaaagtatagcatctcattaatttttttattttaaacatataaaaaaatacacagtgatatgacaaatacccctgcatctactgaccagcttaaacaaatcttaccattttgactgggctcctcacttacatgttactataatcctttgaatctctaatttgagtatcaaaaaaacaatttaggagttggtagggaaaggaagttggtaagcttatataagcctaaaagattagaagaaattaattagtagatccattttgacagttcttaggctggacctcttaacccaaaggacctcttattttagaaaaaccaccataaccctctgtcttaattcacttggttgacattttccataccctcaaaggaattgcttgggttatcctggactcagattctagtggaaagcattatgttctaaaactctgcctgtagagagtgtgtatatgcttacgggttttggtggtgagaaaagggtaggccatttctcatgaacacaggacccaaatatttaacattagattttttaaattgttttactcaatttaacctcaaaatagctccatgaatgtgatgctaatttggatgtactttaccttgcttttgtttcattcttttgaaatcagtttgccttttcatgctgtgtatagaaattgagtcagtgtcagtcttttagatatgtgttagaaaagaggcatatttaaattgtactatgctgaaggtgagttctgaaatagacctaagcgaagcgggtctgtaaaacaggaccatggtctatgcattgattgttcaacttataaaaagggtctttgccattaatctgtccctaaagataggagaatgtttataagtgctttgggatcctcagcagaaaagggtcaaatacatatgattatgtataattatgattatccataaatgattatgattatacataagtattcataatttgt

SEQ ID NO: 86176 - DNA, 1171 bp, Homo sapiens
aatgttctgaaagccaaggctcaatgtaaatgcattggtgctatgtagacattaaatcatcataatgtggtgttctccaaaagtgacggctctaccaggtcatcattgtgggtggtattgcattaccttcaaggattggagtttctgagtttgaaaactagcacatggatgtaaggagtaagggtaaaatgagagattccttcagagttttcccatgaattgaggtgcttttctccatgatcgaaggcagaaaacctgcacttatcagaccattggctgtatgggtggccagtctttctaatttttttttccaggacagtaaataggtaaaaaggtgatgggaccaggacttggaccaattcagttccatttagttttaggtaacttctttgccatttgaggaggaatattggctgtttcagtagagatgtgacctgcattttgaacatttatgcctgtgtttagagcaggagacagagcttttctgatgctgtattagctactgtctcctttctattttcctagttgtcccttccccataaagaaagatgtaactaaaggagtaccacctaatgcatgatgaaaggtataggagaacacatttttctcattgtcatatttgaatggcattacatttagtatgactttagagtaggaataaaaaagatgtagactaaatctgtgaactacgttacttgcagatagctccaaagatgagttgtccaagatttttcttaatagtttcaagtaaagatgaaaattgaggaaaatgtgattgcagcatagactaaacggatctcatttctagctgctgtgttggtacagtgatgggcactgtatgtaaatacacagctagatgaatgtgtgctgttgagcctggatacagaagaaatgcagctatccaacagttctactttaccacttctcaattttggaggaattgttttcattttcctgccagtttactaacctgttttgatcttttggtggaagctataattgcaggtggggacattttgagtaacagttcgcaatccagtacagctgcttttcgcactaaatcctgttattaaaaagctcaggctaagatcaagccaagggctgtaacggacttgacagagaacaacttaactttgcctggtaggacaaagaaaatcctagccttcttgag

SEQ ID NO: 86177 - DNA, 1048 bp, Homo sapiens
tatcaaaagaatactgaatttgtcctttttaaaaaaatctatgaatataggatttttccaagtctcctagtcaatactaccagtattaccacatttgaattttagtaaagtaatatatgtagtcgtagtaaatagtctgtgtagaattcctgtgttattcacaaatacaagagattacctttatgcaaccatttgtttacaagttctgtctcctgaaagataccttcattcggtatttcccttttatagcattgctagcctaaaagctgagtgttacttctgtttcccaatgccagtgctataaatataatataaatcacattctatataaatataatataaatcacattctaagtaattcttcctatataataggcataaacacagtgattaggacacataggtatgtatgagtcacttgggattcaaatgttgctttgaggcaagcaaagaaagagctgaattagctcccacttcacaaaggatttacttacaggaagttggaaatggaaatcataatattttttaaatgaattggtatgtctgtgtcaaaattgagcagaattgatctgcacatttacaaatagtcacacacatctagtgagctaattcctgtgtatggtcctatagctatgaaaaatattagaaagaggtttcttccctggaatttctagtagaagcttcattctggccttcttggattttctttttattagctgagcgtcatgtcattttcctggatattcctttgttgtcaagtttctttaggattttccttttctttgttttaaggagtcgatgctacttatttagttttttaattttaatattcctaggatagtgttaggtctttcctgtttgttaatgctctggtgctgatttggaatcactcagtagtttgactttttggaaaagtgcctgacttttggcatgtaaaaagtaattacaaatctattttaactgagaatgggagctggagaatttagtctaatgtttacactctgcagaacacttggaaaagaaggcaaaaccagattgactgaatctt

SEQ ID NO: 86178 - DNA, 1051 bp, Homo sapiens
gccagctcaacaaggcaagaccctgtctctaccaaaaaaaaaaaaaaaaaaaaaaaaaaaaagaaatagccaggcatggtgtcatgcacctgtagtaccaactactcaggaggctgaggcagaagtatcacttgggccccagagtttgaggctgcaatgagctatgattgtgacaccacactccagcctgggcgagagagtgagacactgcctctaaaaataataaataacacctttattgaagtgcaatttacttataataaaatggactcgttttgtgtgtgcagttcaattcattctgtcaaatgtatacaccgtgtaagtactatcacagttgtggtagatacatcactgcagaaagttctcttattcgcctttgcagtcaaaggtagaagcaccaaccccggccttaggcaaccactgatctgctttctgttactatagattagttttgcctatcctagaatttaaatcaaacagtgtgtactattttgtgtctagcttattttactcagcataatgtttttgaggttcagccatgttgcatagattatgtgtatgttccttttcatttttggatagtattccgtttcatggatttttttttttttttttgagacagggtctcactatcttgcccaagctagagtgcaatattgtaatcatagctgaccacagcctcgacctccttggctcaagcagtccttccacctcagcctcctaagtagctgggactaaaggcgtctaccaccatgcccagctagtttttaaatttttttagagacagggtcccacaatgttgcccaggcttgtctcaaactcctggattcatgggaccctcccaccttggcctcccaaagtgctgggattacaggtgtaagctgccatgcccagccccatttaatggatttatcgaaatttttacattcatttatcaaaatgtttatattcacagatatgttttggcaggtaaggtgactaactgggagctctgacatgttccaaggaaacaaggctttccagagtttccatcagatatagctttgactag

SEQ ID NO: 86179 - DNA, 3725 bp, Homo sapiens
acacctgtctagaagtatgggtagtgtctgtatatagcaaggcacttcctgatgtgttcattattattatatcccatagccgtaccctttcttcagcttttcctttctaaatagctctgtttggcatatgtgaaatatcatcctattgaacttacagctatggggatgcccagtatttctacctcttggaagggaatgatgcactaaaagtaaggaggaagggctgacatggactctttatctggccctttcctgcccctgctccctgtggttactggactgactctagggagaaagataaacaatctcttcaccaagtgccttatgattcatgatatactgctgcttaagtgattataatagccatttctttattgcctcttttaaactacattaatgttgattattttcttcctgtataggaagcttcttttgaatatctgcaaaatgaaggggagcggctactcctggaagccatggatgagttggaagttgcttttaacaatacaaatgtccgcactgactgtaaccacatcttcctcaactttgtgcccacggttatcatggacccatcaaaggtacatttctccttagcttctctcccagcactagcaagcataagcacagaagttcattcatatttatctcacttggacttggaaacaggtactccttgttcaggctgttgagcccttaatctgtaaagtttatagaatgtttataagattgagtttctgggacagtgtcaaaaatttgatatagccattgaaaaaacagttctcaaaactgaaggttttggtgttagcttgctggtcacttataagcagtacaaaaacgtgaaaacattttcttttgttggtacctattttatatttgccataatagtggtcctgttttgtattattccctactatttctcatctggaattattaattttactgttactaagcattttggctaaattactgcttctgtgcactaaatgttaatcacctggtggccttagtgagataatgcaccttctcaaagtgtctaacctatctctctttagtgtttttccacagggagagaatttggctgataaggaatttctcatgtattatgtatattttcttccctgaggttctattctgaaatgcattctatataatttaaggaagaaaaacaaggtgattttgtacttgaccttttatcccaagtgtaataaagacaggctgctctctgtttctgctccctctaacgctttctttctttctttttttttttgttgagacagagtcttgctctgttgcccaggctgaagcagtggcaccatctcagctcattgcaacctccacctcccaggttcaagagactgtcatgcttcagcctccccgagtagcagggactataggcatgtgccaccacgcccggctaatttttgtatttttagtagaaacggggtttcaccatgttagtcaggctggtctccaactcctgacctcaagtaatctgcctgcctcagcctcccaaagtgctgggattacaggtgtgagccaccgtgcctggccccttctaactctttctatcatgatactgtggaatttggataggagaaccagtatctccctttttcaagatcagctgtaggcatgaatttttgctgctgctgctgctttttttttttttctttttcttttttttcttacagaaacagggtcttgctatgttgcccaggctagtcttgaactcctggcctcaagcgatcctcctgcctcagactcccaaagtgctgggattacaggcatgagtcatcatgcctggtagacttttgcttcttgaacttagtatctgagatctgagaagtagttttctacctttttcccttaaaaattccaagctaatgatgggttgctttagtttgtaaggaacgccaaggacagggctactcatttgactcaaatctcatcatctagtttaagcaaaacttctcctaagcattctgggactaataagctgggaaacttaaaacatggcatggacactgtacagctgtatttttttttagatttggcttaccttttctctgagtttttcagatcagcctctgctttcattctaaccacccatatacactggctctgcttttctaatgatagatagctgccaattttctgtacataaagattgttggcttttgttccctcaagaaaagaatgggtaaatatctcttggttaacaagcaagtatgataatagagaggttaactccctgaaattcattctaacttaaaattttgtggtgcagaaacaaactgcaagggtggcacatgctactaaagaaccacaagagaaagggaatgtaagatattcttgagattttctaagaagttgaggaagcattttagaaagatacttcatttaaggatacattaagttcgaatagcatgttctagctgcattatgttctgtgcagccatgttggggaaaaaaagttttgctttagcatgtaaataacaagaaatcatgtctaaggccatttagttaaaataactgtcctacccctaaaaactaagagcattaagctgccttggtataaacttagagaaatgtgggaacatctgccccatcttattaaatcctaggtggacttagcagtggccaagcttcagagctctgtttagagagaatgttctagcaccacctacaaattgcctttctttaatttgtgcaatttaccaagagacatatattataaagtttaataaaactgtatgaaaaaaagctcatggtggtaattgctgtgttgatttaaagtcctgtaagtgcagtgaaacatagttaccatgcatataaatgctacttaatagctatttaactagagattttattcttatttggggcttcctcttaaatcccatggcttgtaattttagatactgcagatctttgatatagaatatgaatataattgggaaaggggaaggagttgcagagatttgggtgttattatcgagagaaaaccactcaaatgccaggccagcatgaaattgtccctgacttgttccaagaaagaatagtttggggagaaactatctgaccactttttgtaaggtgtgcatctccacaaaccaacctctttttttttttaccccttctttctcaaatatgagcagacctgaaacaggtcttagttagaagatatttaagttttgtgcttggtgatgtgtctgtgtcagattgaggaatccgtgcggagcatggtaatgcggtatggaagtcgcctgtggaaattgcgcgtcctccaggcagaactgaaaatcaacattcgcctgacgccaactggaaaagcaattcccatccgcctcttcctgacaaacgagtctggctattacttggatatcagcctatacaaggaagtgactgactccaggacagcacaggtacaatactcaaacaggctcctcagagttttgatttggtcctacagataagacactcgtccttgttatagaagacccacactcacaaatcccattggttcacctggtgggattatcctctataagattaaatgattgtatgaatttgaaaaacttcatctgccttataagatttgcctatgttctctatcatggatgttataaaacccttaaccatttgtcatgtattggtaagcactaacagatgccaagtgaacctgactccagaggttattctgcaatttaggctctttttttagaggg

SEQ ID NO: 86180 - DNA, 1006 bp, Homo sapiens
ttatatatctatggatatagtgttccaaagccaaatatctctttaattaaaaaattgtatgatgtttctttgttgagtatttattatgtcctttgtacttatcataagtgagaaaatttttagattagttgggtaagctcaaaacattggcatgtgaagtagatattaatgtgaagcagcctgtaattaatataaaaatgaattatataaagacattaaatgttgtaggagttctaaggaaattgaggattttttgtttgtttttcatgtatatcatcaccacttgtaaaatcataaatgatgaaagtttaggaatatcatcctataaagtacctatataataggtactttagtgcctaatcttatgtaagctgtagcattagccttgaatgtagctcatttttgttgctcattagcacatcatagcttatgtttctattttcaggcatctcttttacattcacattcatagtataattttgtaactgcctcttgtgaactgttttttctctgattcttgtactcagtttgaggaggatcgtatctatcgtcatctggagcctgctctggctttccagttagagctgaaccggatgagaaattttgacctcactgccattccatgtgctaatcacaagatgcacctgtatctcggggcagccaaggtggaagtgggcacagaagtgacagactacaggttctttgttcgtgcaatcatcaggcattctgatctggtcaccaaggtgggtgctgtactttaatgggatgttatccctgagggaagggacagaataatagatatgattcaaaattaggtattatgcttctgctgagagagaacataaaaaaaagatcaggttttcattttttgaatcaaggttcttgttctatttcaatgtttacaaaagtaaatatttcatataataaaggcttttttttttttacaaagcagaaagtgcatctgaaaaaaaataaaaaatgaaggctctttttccactttaatttg

SEQ ID NO: 86181 - DNA, 1026 bp, Homo sapiens
tttagtggaaaagaaagcattttttattactgttttgtttttgaaaggaaatggttttgatcctataaatgtacataattaaataaatggcatcctaaacaaacattttaattaattagctaataatagttaaggcggaatagaaaagtgtgtgcgtaaaatatcatattatcactttccttgacttttctttcagagagttccatggaaagattttgtcattcttccttttttgacatttgttactttttaggtaatgctctgaaagctgtacctcactagaataaaaccaaaactaggttatataaaaccatgagcatgatatttatcgacacctcagctgaatgcatcttacttaaccttgaagtcagtcctatgtgcttcactctcataacgggtgggggcggtgtcagagaattatttagaacaaaacttgaggagaagttcagtcctgtgtaaaatccactttaaaaaggcttttaaaaaaggatttccctgaggttggtaaatgagctcctaggaaccttttaaatgcagtcttacagttaaaataccaaggaaaagataaaaagatttattaactgtgcaagctttagttaaggtgagagtgaggtgtaacacttatggaacgtattcaagaaattttcaggaaattcaagaaccacaggtttacagcatgagttttgctttgtttgctttctgctttttaaatttaaagtcttaatttctgtgtttttgtctcatcaaagagaaatcctctaaatgaggaatttagattataataaaaagagaaaggtaatactctgcccttgagagatcagagggcatgggctctggcactagagagacccaagtttatcttccagctctgtgattctgagcatatacttgagccaaggcttctgcaagatgagggtcacaatatctacccctagaggttgttgagagcatcagataggacaacacatgagagtacctgccaccagaagattttcagtccatgtttccttcacatttcctaaagct

SEQ ID NO: 86182 - DNA, 1700 bp, Homo sapiens
ttggtttggttttagcaattaagataatttggttgttaagccttgcttgtttgcaacaatgaagatggcacttgagattctggaaaggactttctaaactcaaggacctatgtgtgattgcttttattacctttttgtttattaggttttcaagacttgacattttgttttccttcatacagttcaccttgttggtctagtctatagagaaacaagagagctaagattttctgaaatgctttaggaaatgttgtggactgcatgactcccctgtgttattgatgtcaggaaatcaagcagagtgtagatatatgtcaatcaataactttagataggaaacggagtcagtggagaagtatgaggagcttaaaaagaaccctagggctttaggaagaaaaatcaggagcttagagaataaaattgatactttgggatagaatatgaaagcccatggataaacactgtggctggtagatgctgatcagaactaaggtagacatgccagagccaggccctggattttagaagagtattgtgctaggttcttaaatgttactgtgctttttatcaccgactttagaataacagcatattctagggaataacactaaatttgtaaaattgttttcctttttgctaatggattagatggaatcttcacatctatagcacactaactggtttctataataaatacactgatcaactaaaactgttcactaaaatttttagcaaaccaaagtgattagttctcactgacattttctcatatatgtaacacataaaaaaaccctttcttatctctgaatctatagtgtatagttataaatatgccctagtattaagagtatacttaacagctttaaaacatttttttctctctgctgtcctgatatttctggatctaggtttaatagggacatgtataggcaaaatcggctagaaaatgaggccagcagggggtcttccgtgacaatcattgtctgattcctatatatagtggcatcaagtgggaaatcacttaaattatcaagtgacttgatttgtcatgagtgtaggaaaagctgctttagagcatagagaacattaaggtttaagtgaggactgcatttgctctgaagaattgaatggcagaggagttggggtgtttttatgttagtccctttaaaaatgataagtgattttgcaaggtgcaagggcaactattaaaccgaactccatccagaatctattatacaatccaggatctacactagccaggaagcgttggcagaaactgtacaaatctgggggtcactgtcgtggtgctgctgtgagttcttttgctgatggtagcttgacattcatgaaggatgcttatttagcctctgtcatgtcatctgattgtgcttgccccatagttagtgtactgtgaaaaagaggaagctttctgggagtgtcagagatgaatcccttgatctctctggcttcttgataatccactgtgatgtatgcagcctcccctgtccaatgctgtggaatccctatattattgaatggaagagagaatttgcacttgagggagcaaggagaggaggaagtttaccaagtttgattcaagcacattggttagtggaataaagcaagctgtgctgttatatagttgttggtctttcaaattgcctcagaaccagaataagacaaatgagggccagagtaga

SEQ ID NO: 86183 - DNA, 1023 bp, Homo sapiens
ggcaggtcacacgtctctttatgatgaggataaggtataatgtcccttttgggagactgctttgttcccctcagacatgggacttctactgtatactatctttctgactttgaactattataggaaagaattcatccttttaccccactttatagtatttaattttgtatgcctcaccaaagtattttctggaaacaagtggaatataaatcctaacttaaaaaaactatattaattttggagtccatagtatagagtgggctcagctatgtccattgcagctgcctctgaatctctgaatgttgttttaaggatttgggctttggttgctggaattcttactcagccatggcttatatttttgcatagtggtgcaatcatagtcctcagagaatggaggactttagattacagaaaaaaagtaggcattttgttgaaaactttgtctttttattaaatcatttctttttatttatcagtaaataaattattctttctctatgatgttattttttcatgatttgatacttccattgtttgataaattgtaaggaaatatattatgtgggaacatgtccagatggcttatatcactcattttccttcacattctgtgaagagatgtggcaaatagtttcacccccattttattggtaaaaaaggtgagacatagtgatcttcagcttcatgccaagtaaagattgggccacctgttactaatgcctctgctgccttatcttttaaaatttatatgctttacctgatttaatctctctgtggctattgggcagtggtttcaatttgctcattcctactgctgggcaaaccaaaatatcctgtggggtgtatctctttttcaggtattctaccaaatattataacttctatctgcatctgtattggccagcctcataatttctttgacttgtgttcttgagttacaggttcccagggatgaaccaattcacattctcaatgtggctatcaagactgactgtgatattgaggatgacaggctggcag

SEQ ID NO: 86184 - DNA, 1705 bp, Homo sapiens
cagctgttcaaaaagcactacttgaaaagcctcagtatggagaagctcccatctagctgtatatgatagggggtttatctgccttatgtccggccttgctagcaacatcttcttttgctaagttctctgtgtagtttggggctttcagaggagaaacccttaaggttactcctatcctggcaaattattcacagtttttacaatttttagtttctctaatttgcttctccttttagaggagtgcagatccagaaatagctgatctcatgttttatcagtttgttagttaattttctaaagtgttaaaatgttatgatagtcagtttttatttcagacctataataagattaacattggaaaagtatatttaagttttgatgtgtttaaccctgtgtggaggtttccaggctaatataacataagtgatattttagtattttgggtttctcctgtctcttgaaccaagcaaggcaacacaatgcaagtttgagaggataacaattctgattggaattgaatccacaaaatgcaaaagcaatagtaagttgatggcaaggtctttgcagataatcagctacacgtggaactatttatagatttacatttattttgtccctctccctttaaaatattaagtaatcaagactaatcatagcttttagatcccaatttggatgtggagaggaaagggaatgcttttaattggtcttgtagtcttcccttggtgagtgggcttggctcattcctgcctgcctttagccaccctggttcacaagcatagcagtgaggggaaactgaatagtcgatatttcccatggggttcagttgagtgaaaaagctacttaaccccatggttgccacaaacatagtttgttaacttcttcagagggagttccctttaaatgtggtctggaacccttttatctttcctgtctaatgccaagcaagtagaaaagatacaatgcctcacaaacttgcttttttagtaaatatatttggtgatcctagaaaagaggaggatgatagcacttctgtggtaatacaactctgaatcccagtttctagtgagcaccatgtgtaagacttgcttgatgtgtgtttcatttgtttgtttcattcattgtatcaatggtttcctctcccactttgccttctactcccaagtactgtcaaaagatgatgtaccttttccatagtcatcactcgccaaaggaataaaaacctggagtgtcagtctctatagtctgtgtgagcagcactcccatcctacaaagaattccattgccttgtaattatgatttgcgatagggtacaatatgtacccagatatcaagtccacgttgtcgtctctcttccccctgcaacaccgcaggtggtgtacttcaaggagatttttggggcagttccccaaattcaagtgccattgccttgccctgaacttgcttcagatcagtatgctggtaacatgtcaggcaagtcctggaggcatcctttagcttggtccttcctaacaggctgtcctgattgagcattcagaaacactttacagtattatttatcagtacatactgttaaggtacatcaagaaatatagagattcattgtttttagattgagcaaatcagttcagttctcttcaggcatctccgtttagcagctgcttgtcatgcttacacatactttgagacccatgctctgcccttt

SEQ ID NO: 86185 - DNA, 1115 bp, Homo sapiens
atcctgaatgtctgtattttgcacaattcattgactcatttgaccttcaggatttcactaagctttgggcatattaagtgcctcaggataatctggaaacaaattcttcagtcaactagtatttgatcttttaaaatatagttatatttatacaaacatatgtaaagtatattatcccataaattgtgcctatacatatgactctgtataatataatatgacagtctgggagtacacaatttaaaactccaaatgatttttataattaatatacgctagtgaacatgagtaatctttttaacctttactctgtgattcaaataagaagcatcacatttgatgcaggagatggaggtgtactttgttgtacgtttctgtacatatataatgggtgaggacctattggtgtttatttccacctatttcatagatggaaatccatgctttagttaagtcggattccactgtaccttctctgctgtttgctacttgtgaatttggccttctgtgttataatgttttaattcaaatacttcccttttctcaagtcttacctccagaagaggtcggctgtgttttcccctgatagcatgtgttttggtcatggctgagtttaggctgcttggcatccatcctcaatgttcagctgtcagtgggcggcctctggactttttattcataaggaaggttagaaatcaggagccttccatgtgactaattggtagccaactgccattctcaagaattctgataatctttaacacccagagattagacctttctttggatagtactgagatactcagaagtcatccaacttgtagcattgtttctgcagtgggagcacttgttgtagttagcaagccagaatgagctataaataaatgaaatcttacagtgcttgcttccttcattcagggtagtctgctgataagatgcaagtatctggcagaagagaagattctcagcaggtttaagtgcttaccaaagtgctttcctgtatccgtggctcagcttctagtctctgctgtgttattttggcactctagacttgtaagattggagagttgagtttaaaactctcaatatatcattagggtagcccaaggtccctt

SEQ ID NO: 86186 - DNA, 1050 bp, Homo sapiens
ccctggccacttgcacttctgaccaactggctacaaatttgagggtcccctcaattttctcagtttgataattccctcagaacaactcacagagttcaagcactacagttttattgtcaggatcagccaaaagcacgagacgcttagggtgaagtgtgggatggtctcaaacacagagcttcccagtttgttccctgtggaatcagagtttatcaaccctctcagcacatccatgtgttcaccaaccaagaagctccattgaccttcagtgtccagagtattttaaaatcagggcttcattacgtaggcatgcttgattaaatcatagcctacgtgattaaactcaatctcccctcccagaggtctggctggctgaaagccctcaaccttctaatcacacagttggtctttctagtgaccagctcccctcctgagtcatctcatctcttagcataaactcaggtgtgatccaagggacttaaaataacaatgacactcctattacttgggaaattataaggatttagtctctcttccaggaaccagagacaatggccaaagtctttattatacaataggcctgctcatcttaaacagaaatctaagctcttttagatttagctagttttgagccaagtacttttcttctttttctaactccagtactttttttgtatgttattgttttgatcaagcaggcgaaaagcatattgtttctcattctacagaaagaagttacagagggctaccaatatttgttccactctgtcctgtaaggctcagttatgtccactaacctctagattaatgattctcaaaattatctgaggggtaatttgaaaatacacatattggagtcctgactttcaagacccgattcattttggattagagtccaggtgaccactttgaaaagctcctctgaactctgatgaacagctataattgacagttactacttctaaaccagtactgtcaaatagaaatataatacaagctacatgctatttaaaattttctattggccacatttaaaagtaaaaagaaaca

SEQ ID NO: 86187 - DNA, 1092 bp, Homo sapiens
aatctcaagctctgggggagaccttaaagatcatcaagtttaatgatatttacatttctttttaaacagaaatttctcgtctaaagaaatcatgagagagtttagagtaagactggggtttgagttattcccaatctttcagtctttaaggtacacccacctccccaatttttaaaaaatttaatgaaattgaggcccagagaggtaaaatgattttcccaggagcacacagtaaattgctaatagaactaggccttgaacccagatcttatatccaaattgcctgactcctagtccagtgttccttttactaaatcacattgccagtttctgtacaaatccatccaagaaaatccttatgatgtttcttctcactgctcgtctcataaattatagacagtacaaaacaaatagcatgtaaatgtgaacatttatacatgggtgagaaccagttcttttcatggtgtgcaggtcactatgacaaatgtgtattcgccctccgagaagagaataaaagtgacatgaacactgtactgaactacatcttctctcacgctcaagtcaccaagaagaatcttctggtcacaatgcttattgtgagtaccatttttcagaacttgtaaagaccgtcaatgatatgcaaaaagtatttttttccttttgatggctatggccagagaaaaaaaactactgccttttataattatgggatgaatggggcttgagctgtggattaacagtttctcacgtctacctttgtccttggtctgaaggaacctgctttagtgagaaaatgactcttctggccattatgcatatactcattcacaggaacttatacctcctaactctgtttagaaatgcctcgtgcttcaccattcctgtggtcatcatgacagcagctttaaaatttcatcttatttagccaatatattctaattttaactcttgttccatagatacaagcaatggctctcatgtcaaacttgaaaaaaaataaatagaaatccagcactccccctctctgaccagagaaatttaaatgtattctgcatcttcattggtccctttttatttacattgaaaatctaa

SEQ ID NO: 86188 - DNA, 1050 bp, Homo sapiens
taaatgataaattgtctcttaagtgtgaaataaccttggctaaaattttaaagctgtttactgctgacattgcttcctgccacaagatggcagtgaaacatcacagaatttgaaacattatctgaaatttgaaacattttcctttatctgctccttttcacttcctttaaaagcagcctatgccactcatgaccagcaaaaatcctcatgtagatatcagcaaaccgcatccaataacatacaaaataatacataacaaccaagttggctttatcccacgcattcaaggttgatcagtttggagaaagtcaattaatataatttatcatgaaatagatgaaaggaggaaaaacatgctcattatctcaagataacagggtgtggagagggagcatttgacagaatttaacatccattcatgacaaactcttggaaactaggagtgaaatggaacttttaaaatcttgtaaaagggacccacaaaaaaatctgcaggatacatcatgcattatggtaaaacgttgaaaacattatctttaagattaggaataagacaaggatgcctgctgtcactacttctattcagctttatagtggatgtcctagccagtgcagtaagacaaggaaaagaattaaagggtataagagctagaaagtaataaagcaatatatctgccattattaaatatgatagggtgtctctttagaaagcctcaaaggattcacagattgattattaaattatttaaaatctaacatgattgctaaatacaaaagtcaacatacaaaattcaacagtatttgtttacagtagagcaattgtttagaaaagcagttcaggaaaaaaaaaattaaaatagcaggctagatgtagtggctcatgcttgtcatcttagcactttgggaggccaggacaggaggattgcttgaggccaggagtttgagaccagccttggcaatatagtgagaccccatctctacaaaaaattaaaaacaattagccaggcatgatggcacatgcctatagtcctacctactcaagaggctgaa

SEQ ID NO: 86189 - DNA, 2482 bp, Homo sapiens
ttggtattgaactcatgggctcaagctatcctccctccttggcctcccaaagtgctgaggttacaggtgtgagccaccacacatggcctattggtagttttattttcagagacattcttactaccttggcagcatctttactctttacccataaagcagatgtatgtgtagggaatataggtagataagtggggagtgatgtttggatcttgaccttgaacagatattggtaagatgatagtttttgtaatgtagtcattaattcatctgggaaagggtgacaagggatgaaatctgcttgcttatgtagcgtgattctctatatagactacgcctggtaacttccagctgctgccaacatgtgagataggaactgccatgttataagaagaagattcctactggtcgtgctatagaggctgatgctttggggcattttgttgggttgggcctcatttttttcccttttttataccttagattgcaaacatcctagatagccatgcagctacattgaaccggaaatctgaacgggaagtcttctttatgaatactcagagcattgttcagctggtacagaggtagtaacttgtaactccagattcccagacctgtccatactcatgtcttcctttctttcaagtggtcacaaaaaaatttacctcagatttgacttcaagaaattggaaagcatcttatatcttagaaagtaccttgtcttttctaaatatcttagaattgtgagctaactctcatgctcaatatttctgacttcttaatattctacatttttttctgtcaattatttattattattattattttttgagacaggatctcactctgttgccccgactggagtgcagtggctcaatcatggctcattgcagcctcaacctcctgaggctcaggtgatcctcctgtttcaacccctctgaatagctgggactatagctgtgcaccaccacatccagctaatttttgtatttttagaagagctggggttttgccatgttgcccaggctcatctcaaactcttgggctcaaatgacccacccgcctcggcctcccaaactgttgggattacaggcatgagccactgcgtccagcctgtcaattaataaggcacagaaattttgttgttttctttttccttgccattttgatgaagctcctaatttttcttctgtcacagggcccagtatgacattttttcttcttagcttatggagcctattatattaggttggtgcaaaagtaattgtggttgttgctattaatactaaagggatattcacagagcatatttatttatttatttatttatttattttttttggagacagggtctcacactgtcatccaggttgtagtacagtagcacaatctcagctcactgcaacctctgcctcccaggctcaagcaatcctcccacctcagcctcttgagtagctgggactacagtcacatgctaccatgcttggctaatttttttgtattttttgtagataagaggttttgccatattgcctaggctggtctggagctcctagactcaagtgatcctcctgccttggcctcccaaagttctgggattgcagatgtgagctaaggcaaccggcctcacagaacacttttaactttaagatacttataaatttttcagatatctcagccatttcaagagtatggtaataatttctacttagcagtaggaactgaatcaaggtgttggtaggtggggctatgcaggattttgttgtcttctttattaaaaaaggtcttgtctatagtgagatttcttttaggcttagaatttaagttaattttgtagttcattttaggctgttctttattcagagggaaagcagttcagtggaatgtcgtggaggtaaatttggcctttgggtttattgcttaatagtgttggattgtcaggtttttcagtggagactttctatttgcctaggtaccgaagtggcatccgaggccacatgaaggctgtggtgatggatctgctccggcagtacctgcgagtagagacacaattccagaatggtaagcctcttcctgaggactctctagctaagaaagccttgattctgataaccaacccaaactatccctataggactgtgtaagagctaagccccctcctgtcaacaacacttcccattaataaacagtctcctatcactactcccttaaaaactaaacctctatatccactagctctaaagaaagaacaacgaaacacagcttgatgaaattaggaatccagtgtgcttctgagaaagggctgaagtaatttttctaatagagattaccattcctgttgatatctttttgaccttgtgtagtgtaagttggttgagtcatcacaggctgaaattgagaaacccatatctgaagagcttgattcttggcagctaatccatgaattgaaccagaggcatctaggaagagcaagttcaggttttcc

SEQ ID NO: 86190 - DNA, 1043 bp, Homo sapiens
actggagaataggggcaatgttagatgcttacgttgcaatttcaaagtactctatgatagttggctcacgcctgtaatctcaccactttgggaagctgagatggaaagatcgcttgaggccaggagtttgagaccagcctgatcaacatagcaagaccccatatctattgaaaattatataaatttttattgaaaagaagtagtatatgatagtgaattcagatatagttgactcttgaacaatacaggtttgaactgtgtgggtccacttatatgtggattttttcagccaaacatggatcaaaattacagtattgatgagatatggaacccacaactatttctatacatgggttccgtagggctcaagtatgtgcagattttcatatatgagtggtggttctggaaccaatttcccacgtatacagaatgacaactatatatctttttatttgggggattgtgttaacttgggtcctattttaccaatgctttctttctaggtaaaagactgggtagagcgattgatgaaaaccctcagagatccctccctgcctctcctagaattgcaagatattatgaccagtgtgtctggccgcattccccccaatgtggagaagtctatcaagaaggaaatggctcagtatgctagcaacatcacatcagtcctctgtcagtttcccagccagcaggtatttataggataacactatatttttttctggctaccaatgccagagtttatgttgtaggattccttcctatttggatcctccttactttttggatgttgtgcttgtatacttttaagcattgtattcctcacaaaactgcctcagggtacaaacccaacagtgaaagtactgtatgtgaaggataagtatctgtagttatgagaaaagcacacttggatcatgtataccttatagctttgttcctggggctattccctaattagaggtattttcatgaattgaaaatagagtgatattagttgattgattgattcattcattcactcattgatttagagatggagtcta

SEQ ID NO: 86191 - DNA, 1915 bp, Homo sapiens
tgtaatcctaccactttgggaggctgaggcaggaagatcgcttgagcccaggagttcgagactagcctgggcaagatggtgagaccccatctctatgaaaaattaaaaaattagcggcgtacagtggcacatgcctgtagacccagccactctggtgtctaaggcgggaggatcccttgagcccaggaattcaaggcagcagtgaatggagattgtaccactgtactggagtggtacaatttgtggcctgcgtcacaaatcaagaccctatttctaaaaaattaaaaaaaaaggtaacagattggaaataagaatgaaaaagaaacatcagttggcttaattagaagtgcgaaccttaagatttttaaaacacataggcaaatgaggaatctctagttctaaaaatagatactaggcaatagcacttgttgaatgttaggtgtcctaactgctggctatccagagaaaatacatggaggtggggcacaaaacagacaagaaatgtcatgtgattaattttaagagagctaagcatagagtgcagagggtcacctaacccaaatcaagctaagcttgtatgggaagatattctgaaagaagagacatttgatcttagttttgaaagacagatagtgatagagcaggtgaagaagggcagggaagagtgcttaaagttgaaggaatagcatgtacaaagacagaagcaagacagcacagtgtatttagggaactgcaagtatgtgttggtgtggcttgagaatagactaaggtttaatggggagggacaagcaaaggtgctaaagaagtaatgtgagatcttgaatgtgaggttatgaaggatcttataaaccatactagtaagttttcactatcctggaggcagcaggtaatctctgaaagatttaagtggaaaagtagtatgatgagatttggggtctaggaagattgcttttcgtgaccttgagggaggtatgtagcaagtagggagatctcttagggggtctttgaagtactttgggccagaaatgaagaaggcgtaaaccgaagagatggcaagagaggaagatttttgagaaaggtttagaagatatgtctggctgggttggtaattggtaggtaagggagaaagaggagtgaagaatgatccttaggttttggcctggttgtcttagattggattcactggtatgaggatattaaattgttccttactttctaagtacaaaacaaatataatcacaaattatgccaaaatggttgtaaaagttagaaaggagaaatgtcaataactgttattaattcctaaagtgaggtactgagagattttctaattgcttgccttgatagtccctaggagatgatggtaaattcccattttttcttggtcaaattaggtgtggtccaacttagatgctaagggaaaaattttagttcttttaagcactcatctgtgtaaagagagataaatctgagtctagtttatttttcactataggtaatgaagatggtaatgaccttaacagctgtggagtctggctgtatccattacgtcaagcgacctggagcagctcttgaccctggctgtgtactagccaaaatgcaactggacaaccccagcaaggttcagcaggtgagtaggaaggtgctccgaatattgctctctaagagctaaagaacttggtggtttggagaggcaagtgatttcaatgcttggtttgccagtgttttctttagctttgtcccctattaatcttatgccttgtatttgtgcctgtagtattatggaactagagtttgcaagagttactgtagtactaagattctgtaatttccttatgatgtttcctctattgacttccctcctggtagctgggtatgatgtctcgattttgaatgataactcttaagtgcagtg

SEQ ID NO: 86192 - DNA, 1053 bp, Homo sapiens
agaccgaggctggcagatcacttaaggtcaggagtttgagaccaacttcgccaacatggtaaaaccccgtctctgctaaaaatacaaaaattagccaggtgtggtggcaactgcctgtaatcccagctactcgggaagctgaggcaggagaatcactggaacccaggaggctgaggttgcagtgagccaagatcacgccattgcactccagcctgggcaacaagagcaaaactccgtctcaaaaaaacaaaaaacaaacaaacaaacaaaaaacagctagttttgtgtgactgcttcttttcgacgggacataaactttgtagttaacacagctcctattcagtctgcctcactcatttatgttcccagactggcctctgttggcatttaggtttaagtcctgatttggcagaccactgtgtattttcttcagggaatgtcctataacccaatccagaagccttgttccttatttctgaccagctctgtacatttgtctacagtacaaagctaactagcttaatttttagcatgttaaaaatacgttatctacaataagtctccttcttgacactatgccaaaagttcattcttcagcttagagctttctttgtttcttatttcttcatttcattaggtctatatctcagcttggggtttggactcttgtttgccagaatgccccaactcatatattccagtatattccagtataatttcccatgggtcataatctaaataccatgagaacaggactgtgtcttgttgctgctatatcccctgaacatagtaagcattcagtaaacgttggttgaatggattagccactcattcctatccttatacctctgcttcaatcataccattccctgaactcaagctgtattttccttttttttttttgagacagagtcttgctctgtcgcccaagctggagtgcagtggcacgatctcagctcactgcaacctcttcctcctgggttcaagtgattctcctgcctcagcttcctgagtaactgggattacaggcacgtgccaccatgcctggctaat

SEQ ID NO: 86193 - DNA, 2476 bp, Homo sapiens
tctaactagttagctatgtttctagaaagaagaggagcatattggaaatactggaaactggacaagagtctgtccccatgtttttttgtctgcatgcatttatgtctggtggggtgaggttgcttttgatgcaaagtgaaaaatgctcttttctcccgatttttcattgagtttttcatccttgtccagggatattgtataataatcagaaatgtgctctcatgtggctaaaagcttttgatggctcttatacacactgaacagttgagtcagtgagaggctgtagtggtctagcagttggataaggtgagatacttatgtttgcttatctctcttctttgagtgtgcggtgaaacttgccaaaatggtgggttatgtgagtgctgggactgtggaatacctgtacagccaggatggcagcttctactttctggaattgaatcctcggctgcaggtagagcacccttgtacagagatggtggctgatgtcaatctccctgcagcacagctccaggtgagtctccctgatctgggttgcagagcctagaaaagtcagagaggcctgaaaaatgggtttaaccagtgtgtgataagagaaaagcacctcctatctgagtcacacctaatggtcatttctctttcaccctgtatgtgttatgcatgtgtggtttggttttcctgatgtagtacagacataggaatgttattttttctagccagacacatctgatataatgtgtcatgttttagaaataaatgttaataatgtatgctttattcaattatttagctatagtaaacttcacaactttgtattataattattccctactcatttttgtttttttactagtgttctttattgaaataattctgcatcagagattagtggttgaagtttttccttacaagagtgtggtagcacacatatatttttataatttgtaaagtgcttgctgtcaatattattgtcttctctcagcccaggaaacaaatattatggaaagcagtaatagttaatgataaggcttgatattatttttatctaacatttgcccacatcgagaacaccttctgggttcctattaaagactaaagatttacttacttcctccagtggtttgcagggatggaagagataattatgacacaattaagactttctagctgtctgtttttggatggctattaacatttactcctctgttggatattttcattcttattacgtgatggagaaatgacaacaggggaactggtgtctgttgcattaggaatgtggggacttctttagaagtggagaatattctaactacttatctgtagtgatatattgtatttcaagcaacttagagttgatgattgtagaatacaggttataaaaatagaatgttttagggagtggctccaaaaataaaaatattttaggttatctgatagcctctacactttaagggaagtaactgaaaaattaaagatgtgtgttttattacctttcagattgccatggggattcctctatatagaatcaaggatatccgtatgatgtatggggtatctccctggggtgattctcccattgattttgaagattctgcacacgttccttgtccaaggggccatgttattgctgctcggatcactagtgaaaatccagatgaggtaacccatcacttaaaaggtttatacctccttttaatgaactttaatgttaagatagtatctgaaagtatacttctgaaatatcttgggacttcctctggagtgggaaacatagaggtttctcagagcagataagtaaatggttgttgcttcattggttacttaatcccacttaagtcactgtagagtcttcagtgggtctgtggcactgggtcttggcctttatcatttttgtgtgtcttctctgcttctgtgtgtgattaacagagaacttaaacaatgaatatataaatcttctcttccttcgaaacataatatggtctctcattctttattctctaacagggttttaagcccagctcaggaacagttcaggagctaaatttccgcagcaataagaatgtttggggatatttcagtgttgctgctgcagggggacttcatgaatttgctgattctcagtttggtcactgcttttcttggggagaaaacagagaagaggcaatttcgtgagtataatagcatttgattgcattttacaaaataaatttgtgctaatcttaagtgaaggtgtgagcatgggaataggaatcatctgctgtcaaagtaataatatgaacaacctttttgaagaaattttgaatatctttaattacacttgcattcatgttgtattaaattatgcagtgcttggcagatgtttttctgtttgttgttctgagccttttgaagtatttttcctttcaaatatttttgataaatgtataaaattgattgctttaaaggtatcttatttttccacaggaacagtatt

SEQ ID NO: 86194 - DNA, 1088 bp, Homo sapiens
gaggtctatttcctatgttgtgtatatattaggatgtactcttgaactgctgtaataaagatgccttcaaaatacagtggcttggccgggcatggtggctcttgcctgtaatcctagcactttgggaggctaaggcggacagatcacttgagccctggaattcgagaccggcctgggcaatatggtgaaaccctatctctactaaaaatacaaaaattagctgagtgtcatggcacacgtctgtactctcagctgcttgggaggctgaggtgggaggatcacttgacactgggaggtcaaagctgcagtgagccttgatcatgctactgcactccaacctgggtgacagagcaagaccccatctcaaaacaaataaataaataagcaaaatacggtggcttaaacaaggtgtaagtttctatttctctttcatcatagttcagagatgagctgttaccagaaacaggtttattgctcacctgttgcctgtttttgtaaataaaattttgttggaacacaatgatgcttatttatttatgtgttatttatggctgctttatcactacaatggtagaattgaatagttgtgacagaggctatatggcccacaaaattgaaaataattactatctggctctttaccaaaaaagtttgccaaactttgctcttggacattgtcatcttcatgattaagctaactcacacaagattatgttcacattgtggcctgtgggaggaagagacaggggatgtggagggcaagcatatggaagcatgatcttgaagtcacatacatcacttctgctcacattccactggacaaaattcagttacacaattatacctagcacaaaggatgttaggaattgtgatcactaactgggtgaccatgtgctcagcaaaaatttcgattttattcctaaaatgatgaagtagagaaaagtcactggagggcatttcataatctgtgcctcagtctgttcctctggctacctattatccctttatcctttttcctactttcagagcacacatagcctttgtccaaggaagacaacctgaagccccatccagttactagtaactgg

SEQ ID NO: 86195 - DNA, 1001 bp, Homo sapiens
actctgctgaggccaataaaaccgccatttctatttccaagggctcataaagattgaattatttcccagacctcttggccctggagcaggcctgaacacacagtttgaaggtattttgcctgctgagttgctgtgagaagtatgctatgttctttttttgtttgttttgatcttgtacgtctttgcatttttataagttgctccctgttagttcggctggcttttgccagcgttaagaacccaagttgccgggtcatgctgtggctaaatcctgttaaccccaaggactgatcagggttttatggcatccttctttctcccatccactctcagttttgggtaaatatgatagcatttcaaagaatgcagagcagaaaattgacaagagcagaagatcttgtaattgccctaagttgctattgtctgttgcaggtcttcgtgtggactggcaggaaaatgatttttcaaaacgtatcttaaatgttccccaggagctatatgaaaaaggttatgtgaaagatgtggatgatgggctacaggtaggttactaactccagggagtgatacctttcagctgaccagttatagtcacaaatgtggagattgggagcctggctcgtgatatatacccaaggtggtgttagggatgtaagaccaggaggtgtagtttgaaagtatagaatacgctggtttctctttagattgcataagtcttttgcctttaaaaagtacagattgaggaagtgactttaaatgtaaacaatctaaattcattttgaagcaggctgctcatctggacagaacatttcttaggtgattaagtcagagttttaaggaggtgctgattctctctctctctaccacctgttagtgtgtgagggcggggacaacaaacaacatactttttctactggttgaattcagaaccaagaagccaggaagcagagatcaaacagtcagctttattatgaacagagatgttgatgaaaatggcttaagtg

SEQ ID NO: 86196 - DNA, 1050 bp, Homo sapiens
gtaatatatgtgtctcagtaagtagtctttctaggcaggatttttcttccctgcttaagggggttagacctccaaaatatttgtcagggtctcttttccttttaagggtttaacccacaatcttttctgtatccgttttgtaccagctccattcctattctcaagctttggtgcataaaaccttagtttaggtgtctatatataccactactttggcctgaaaattagaatcgtggctcacacttgattctaagttccctagtagtggcgtgtttcctttctacgtgcttactttcccacctgacctgcttttccccaccgtgcagtctgataattggtattatttgttttgattggatctcagaaattacctctttagaccgagctgtgctcctccctctggatttcatgagcccattattttcttggcttaattgtccttgtaaatttggtctttttgtcctgggctttccctgtcatgtgctcctggcagccaggagaggcagtggagcttttctccgttgactgtcagaagaaagtgactgttgttgaaaatgtttgctgcaactaaaggagagctgctaagatctactttctagttaaacaagcttttatatttctccccggctcctctcagttcccttgggaaatcaactaattgtgtgtgtaagctaagtgtgtggaggagagaagatgcaaaaaggaagagaaaggtggggaaagaaggaaattgggaacaattagacaaaaagactatagtttgaggccatcaggagtattctagtctgactgaagccaggcagaaggcacagtatctcttgtcctcctgggttttaagcagctgcaacaggaggaggaactgcggcttgtgtttacaaggccgaaatctgaagaaaaagcttccattcttttcccatcttgatatggagggttctccagaggaaaataaggaaatgagatattacatgcttcaaaggtaagtgttaggctaccacatttgggtaatatatatatctttaaaaaaacagtaaggtactgacagctaagccc

SEQ ID NO: 86197 - DNA, 1044 bp, Homo sapiens
actccatctcaaaaacagaaaaaaagaaaagaaagtgcaggaaattttattcctgcttcctatctattggttcatcactatcaagctttgacatgggaaataaggaaattggctctggttttgtttatattaaggctttgcttatggatagtttgagagtgttcttatgtattgactttcttagcatttttcatttagctttcctgagcttcttcccttcccctaatagctctccaaactttctactttcagtgctccttccttgatattctgaggttcccagttgccatggtgcctttgtagtgagtagacagagaaggtcattatgagatctgcaacttggtactcctttgctgagggaactagtttcctctttccatctcccatcctccccttctttccattcagaaaacaggagctgtctgtggccatatatgtattttagtctctggagtgcattctataaacttagctaattgtggaaatgaaattatgaatgttgtaagtaaggctcggtacagctgcttgacagtgtttattacttttattatttcaagtgtaatgcatgcatttccccctcttttctttctgttagcataaatttacaaatgaagtttgcatttactactttatattgttaaattattagaagtaatgtaggtttattattagaaaagtaggaaatccaagaagtttttttttccagatagagtcttgctgtgtcgcccaggctggagtacagtggcatgatcttggctcactgcctccgcctcccgggttcaagcgattctcgtgcctcagcctactaagtagctgagattacaggtgcccgccactattcccagctaatttttgtatttttagtagagacggggtttcgccctgttgcctaggcagggccgcctgccttggcctcccaaagtgctgggattacaggcgtcagccaccgcgcccagcctcaaaaagtatttaaaaaaatagaaacactgaggaatacaatcattccatagtaatcactattcatattttatatatttcctttct

SEQ ID NO: 86198 - DNA, 2021 bp, Homo sapiens
ccagttccaactcactcctcagctagctaatgttctaaaatagaaaaaacgttttctgtttatccattccttaagtcacttctggatatggtgacctttggggtaattttaattgagtcaaattcatttgataggtgaaagacctctgttatgacatctgccactaattaggtgtgtgaccatggacagtacatattatctccttggagtcatctataaaaatgaagatattgattcagatgctccttttcactcctggaactcaaagttaaatagagactaagttgagtttaggatcagctcttagaacgaatagcctaatccttcatgggtgacatagattaagggggcaggtacattcctaggagatgttaactggaggtcatctgaaaccaaatgaagtaattgccataatgtaagatgggactgagtctctctctcaagtttaggtgctgagaagtctagtggtatgatggatgagcccaaatagaaaatagacttttcctgcgatggagatgatttgccccatgtattttctagagtccaatgaaagactgggtgaatcactttcttttttctttctttcttttttttttttagagggagactcgctctgtcgcccaggctggagtgcagtggtaccatctcggctcactgcaaccttcacttcccaggttcaagcaattctcctgcctcagcctcccaagtagctgagattacaggcacccgctaccatgcccggctgttttgtatttttagtagagacagggtttcaccgtgttggccagactggtctcgaactcctgacctcaggtgatctgcccgcctcagcctcccaaattgctgggattacaggcgtgagccagcatgcccagccttttttttttttcttttgagacggagtttcgctcttgttacccaggctggagtgtaatggtgcaatctccacttaccgcaacctctgcctcccgggttcaagagattctcctgcctcagcctcctgagtagctgggattacaggcatacgccaccacgccaggctgattttgtgtttttagtagagacagggtttctccatgttaggctagactcgaactcccaacctcaggtgatccacctgccttggcctcccaaagtgctgagattacaggcatgagcctgtaatctgtgcctgtcagcctatgcctgaccctggccatttttttttttttttttttttgagacagtcttgctctttcacccaggctgaattacagtggtgcaatctcagcccactgcaacctccgcctcccaggttcaagatattcttgtgcctcagcctcctgagcagctagtactggaggtgtgtgccaccatgcccggctaatttttttgtattttagtagagatggggtttcaccatattggccaggctggtcttgaactcctgatctcaggcaatccgcctgcctcagccttccaaagtgctaggattacaggtgtgagccaccatgcccagctggatgaatcactttctaagctttatgacccaaacatttgaaaataagaccctggctgggcgtggtggctcacgcctgcaatcccagcactttaggaagccaaggtgggtggatcacctgaagtcagcagttcaagaccagcctgaccaacatggagaaaccccatctctactaaaaatacaaaattagccgagcacgatggcacatgcctgtagttccagccagtcgagaggctgaggcaggagaagtgcttgaatccgggggtgcagaggttgcggtgagccgagatcatgccattgcactcccgcctgggcaacagagcaaaaaaaaaaaaaaaaaaaaaaaaaaagaaagaaaagaaaataagaccctaagtaaaaagtagttatagcttggtgggaatatacagacctcattgtagacaactgatttggctttttatttttagatatgatcagctagaggttgatatatcagccaggttgatatatttctggaactcactagtattcaattgaacat

SEQ ID NO: 86199 - DNA, 1045 bp, Homo sapiens
tagcttttgtcaggggtggggaatggggtattgtgattggcagccccaccagtatcacatgaaatgtgggagggtcagtttcccaaataaagatggcagctaaggagagaaatgatgctgagtagagaaagccaacagttgtttattagaaatatgtagcatttgcccctgccaccctcagtgccccatagacccagatccttcctcataaaaaagaaaaatatgtagcatttatagaggaccaggtaccatgctacattacttatatggattatgatatttgattataacatttaattctcacaactttggaaggtaggcactgttatacccactacagaggaagaaacaggttttcagaggtggaataatttttcaacattacaaagctaagatgtggcagagctgagtatgttgcatatcttctctttatcttgtccctttgaatgattttctgatccatgtgccacttttgtttgttcctagggagtcatcaagctttggtgtatgtgttggccggttctgaagtcttgaagaagctctgctgaggaagaccaaagcagcactcgttgccaattagggaatggaccgtttgggtccctttagcagtaagtacagtgggaacaagtctcaggtgacttattattattttttttttgagatggactctccctctgttgcccaggctggggtacagtggcatgatgttggctcactgcaacttctgcctcccggctttaaacggttctcctgcctcagccgcctgagtagctaggactacaggcgcgcaccaccacacacagctaattttttttatttttatttttagtagagatagggttttaccatgttggccagactggtcttgaactcccgacctcaggtgatccacccacctcggcctcccaaagtgctgggattacaggtgtgagccaccactcccggccttcaggtgactattaatagcaaactagagtggaagttgatcaaggaagaaaaataaacgatgaagttaggcaataaagccctttgactctgattctaa

SEQ ID NO: 86200 - DNA, 1058 bp, Homo sapiens
gcaccaccacgcctggctaattttgtatttttagtagagacagggtttctccatgttgatcaggctggtctctaactcccaacctcaggtgatccacctacctcccaaagtgctgggattacaggtgtgagccactgcgcctggcctcagtcatctttctttaagtggaaaagaaaggactttttagtcattatttctgtgttttagactagcaagatatggaacaccagattacaccaatctaggcttatatttatgtcatttttctgctgatatctttttgatatcaatttggaaatatgagagtatattatatggatgtgacttaaaatatgaaaagagcaaatgatgcttttagtattatgtgtaaatacaagtaccacttctctctttttcccacaatcctctaggcaggatgtagccaatcaaatgtgcaccaagaccaaggaggagtgtgagaagcactatatgaagcatttcatcaataaccctctgtttgcatctaccctgctgaacctgaaacaagcagaggaagcaaaaactgctgacacagccattccatttcactgtaagtgcctccctatcttgataagatatacttagctcatccttgggccctgtttcagtagcagataaagagtgatttgatgacttggacagctaatgatatcacggaagataggaggagttagtatggcagctattgagagtcaggatcgacccagcatggtggcttgtgcctgtaatcccagcaccttgggaggctgaggcgggtaaatcacttgaggccaggagttcaagaccagcctggccaacatggcgaaaccctgtctcaactaaaagtataaagattagctggacgtggtggcagacacctgtaatcccagctactggggaggccaaggcaggagaatcacttgaaccgggtaggcggagattgcagtgagccaagatcacatcactgcactccaacctgggtgacagagtgagacttcatctcttaaaaaaaaaaaaaaaaagagtcaggattataatgtggcaaagaaggaacatactct

SEQ ID NO: 86201 - DNA, 1369 bp, Homo sapiens
aaagtcatgatttcctttcattttaggaaagcagaaatcagaagaaatttccccatatttacttaaaggattgcctgagtcttggtttttctttttaaaaaacctgttttcataatactttatctttttcacatttccttttataaaaaccattttaaattttatttattcttggactattatgtcatttttttcatgccaatattgtattagttaactcagaaaccttctaaattcttccagctacagatgaccctccccgacctacctttgactccttgctttctcgggacatggccgggtacatgccagctcgagcagatttcattgaggtaggataaatgtgtttttagcacaaagtaggaaaaattcatttttgtttctcatgagccttctgtctcacccatagattccataccactaaaaggagatttttcaaggcactataatttgtaggacctttaggcagccacattttcttaggtttgagtgccttttctcatttgtaaacattttcacatatggaacagtaaaaattctttaaacaaacaacctatttctggccaggctcagtggcttacacctgtaatcccagcactttgggagctgagaatggaggatcgcttgagtccaggtgttcgagactagcctgggcaacgtagtgagaccctgtctctacaaaaaataaaaaattagctgggtgtggtggtgcatgcctgtagtcccaactacttggcaggctgatatgggaggatcacttgagcctgggaggttaaggctgtagcgagtggtgatcattccactaaactgcaccctagacaacagagtaagaccctgtctccaaaaaacaaaaaaaccccagcaaacccacctcttaagttgcatcagtgctggcttccacttccttaggtatgaaattcctatagtctggttctttttttttttttttgagacagagtttttgctcttgttgcccaggctggagtgcaatggcatggtcttggcccattgcaacctccacttcctgggttcaagcgattctcctgtctcagcctcccaagtagctgagactacaggttcctgccaccatgcctggctaatttttgtatttttagtagagatagggtttcaccatgttggccaggctggtctcaaactcctgacctcaggcaatccaccagcctcggcctcccaaagtgctaggattacaggcgtgagccactgcacctggcttgtagtctggttcttattgtacatctaggggctttcaagattgtactgtatcaggggttgacaaacttattctattaaaggccagatagtaaatattttaggtttagtatgctataaagtttctattgtaactata

SEQ ID NO: 86202 - DNA, 1395 bp, Homo sapiens
atgaattgactttatttatttatttcagagacaggctcttgctctgtttcccaggcagtcttgaactcctggtctcaagtgatttttccacctaaatctcctgagtagctgggattataggtgcatgctactgtgcccagctcagactaattttagtttttagagcagtatgtttagcttcattcctaaactcataactattccaattttttgttgtcactactgcttgtaagcctcttagatttttcccatgacttcctattacctgtgccagtattgtggccttttgccatatttagactttttaaacaactgtttgcttgtgttttttctgtttacttctaaagcatggctgctgtaaagacactaatcaaagccgatgggtttggggtggggatttttttgttcccctaaacaggaatttgacaattatgcagaatgggacttgagagacattgattttgttgaagatgactcggacattttacatggtaacagtttattttgtcaaatgtttatcgagcgccaactgtgtgatgacactgtcttgggtgctaggaattgaaggatgaatagaacatgtcccctgcccttatagaattcagaaatctagtggttaagttgctgaacttactgtgttgttggattttgaccacagtgaataagacttgtgatgagggtaaaaatattgattatataatagtagtaggaaatatctgttggactgtgtgattttacttttatctgaggtaaatctacactaaggtaattggttaaatggccctcacttgcattcttagaaggaagggaatcagtttgaattcttgggacttcactagcaactgctatcactaaatgttcactatattttgttacccggaatttcccctagcaaggaaaaagaatggaaattcctcaagagtttttaggcccaaatggggaatttcttgtttctcaggactgttgaattttcaacactgctggattcttttttatgtttgtttttgagacggagtctcactctgttacacaggctggagtgcagtggcgcgatcttggctcactgcaacctctgtctcccaggttcaagggattctcctgcctcagcctcccaagtagctgggattacaggtgtttgccaccatgcccagctaatttttgtttttttattagagatggggtttcgccatgttggccaggctggtctgcaactcctaacctcaagtgatctgcccgcctcagcttcccaaagtgctgggattacaggcgtgaaccaccacgcctgccccagcattgctgaattctaatctttgattagccctctaagggtttatgttaactcttttcctaaaacttatgtggtgaatgccaaagagctgttaagagtagatagtt

SEQ ID NO: 86203 - DNA, 4219 bp, Homo sapiens
gtaagatgtttagatgagtgcttttattttttattttttttgtgacagactctcaccttgttagccaggcgggagcgcagtagcgtgatcttggctcactgcaacttctgcctcccaggctcaagcgattctcgtgcctcagcctctggcatagctgggattagcgccaccatgcccagctaatttttatatttttagtagagagagggttttgccatgtttgcaaggctggtctcaaactcttggcctcaactgatctgcccacctctgcctcccaaagtgctgggattacaggggttagccaccgcgtccggccctaaatgaatgcttttaaaaagatgataacacttcagatttgggtatggttggctcacacctgtaatcctaacactttgggaggccaaagtgggaggatttcttgagcccaggaattcaaggtcagcctagacaacaaagtgagaccccccacctctaaaaaataaaaaagatgataacagtttaaagaagcttgtcagcactacagaccaaaggaatgacttgctcatgccacagagaggtattttgtttacagctctgagtctttacagcagctcctgtggcagcatgaccatgtccaggagcatattgtccctgagctgtcactcgcagaacactcagtgaagtgcactaggagcccatggaaagtcaggaaggaatgaaaaggggctttataagcacacctggaacagttagaggggcacagattttgtagaaatcaggacactgattcagcctctggcttgcttctgagtcatggtataatcatgagtaagtgcttggaatcttgcttgctgtttctttatgtcctctgccattaaagaagaggtgacactgattagtcagagtgtaaatgtctctaatgaaacatggtacataattcagatttgtgttgttaccattccattataccattatgctcttaatattactgagcattaacaacattatttttatggttcctcatttagaactactggaaggttgcagactgtttggctgggttttgtatttagaacctatccagaatattggctgatgccaccaagaccttttcctcacccacacaaagatttttgccttgaatcatggaatttgtttaataaatttggtttgcatggttcattatagagacctgggacacaatggagggataattgtattgcagccataccagaaggctttcagaatgtatttcaaatgtatactgcaagtgaagcagtatccaaggaaaaataaggaagttccgtgatccctaattggtacttactcatattttatggaaataagcagaaatgtttggttcagaaagagagagagagaagactcatatcttagaactgtcttgtctcatgtatgttgtgagatctcaatgcacatgcttagtgtagttccttcttgctgccatctctttccccatctcctttcatttgtaaaaattcttcctaaatttttagagtactctttccctgagtttctcaggatcctaaagtcctggttgtaatgtcttccaagtcattgttgccccataacccaggcaagcaagagatatgatgagctcctcctatgtgttgggtctgtgtttccagtacttctcagggttgcaccttagtacagttcacaatttcttctccctctgttctggaaaggtaattttagaaagttttctctcctaggcttggatctgtggaccccttcacctttcactgtatttttcaaattgtatttctttggcacatattattagcctttaaatcctttaacaattagtagagcagaggtccagcctggtctctgtatattcacctactggcagttcctttcacttatagtgatttcactgttttttttttttattttttttgagacggagtctcgctctatcgcctaggctggagtgcagtggcgcgatcttggctcgctgcaagctccgcctcctgggttcacgccattctcctgcctcagcctcccgagtagctgggactacaggcacccgccaccatgcctggctaattttttgtattttttagtagagacggggtttcaccatgttagccaggatagtctcgatctcctgacctcatggtccacccgcctcagcctcccaaagtgctgggattacaggcgtgagccaccgtgcccggcctgatttcactgttttatacataggatattttagacatgaatactatcagtaataattgctaatacatatagcatttactattagttaccattctaagctcttcatatatattaagtcatttaatcctcaaaaccttatgagttgcatattattattatcctcatttttgtggatgaggacattgaagcatagaaaggttagataacttgcctgagatcatacagccagcaagaggtagagtcatccccaagtctgtgttcttaatactgtacaatacttagctgtctttacaatcttgattttttttttttttttttgagacagggtcacgccctgttgcccatgctggagtgcagtggcacaatcatggctcactgcagcctcaacctcctgggctcaaactatcctcccacctcagctacctgagtagctgggactccaggcgtgcaccatcacacctggctaatttttaaaatttttttgtagagacagggtctcactatgttgctcaggctcaaccttgaatgtttgttgctgtttcatttttgtgaggtttcacatttgttatcttctatagcttcaacacattcctgaggaatagatattttcctgttttacattcagggaagcagacaaagaagttaagtaatttgcctaatccaggggtgtcaatcttttggcttccctggcccacactggaagaagaagtgtcctgggccacacataaaatacattaacgatagctgatgagctaaggaataaaaaacaaacaaactcataatgtcttaaaaaagtttacgaatttgtattgcgctgcattcaaagccgtcctgggctgcatgtgactcacgagcgacaggttggataagcttggcctaatgcttcctggttgcttactttagccattagatcacatgatcttccctgcacaaaattgtttgtgtgcatcttggccaaaagcttggggggaaatgacttaaatagtgttgcttctggggaatacctgtgtcacaggtttctacttgtttggtcgcagtagggattttgattggcctccctgcagttaaggcctctgagttggttttcttgccaagcaagcagtaagtgccttctgtcaagaaaacagaaacatgttgttagctattttgaacaatgttagaaatacattgcagtgggaaggagctgcctctgacttctgcccacttcttgaaatattttaaggctagccgtttggaaactttatcattctccagtgtaatcacagggagactgtgcttcccccaaagctgagatttcaggggccttgtagcaatggacaaattacaggtgattttggtttgtttgtttatttttaatgatctctggttctctgtttgctagcttatactgcagcttccagctgctttaagtagactgtgagcaagtgattctcattcttgtagattctgccttctcatttctgttctgcctgctgtgctgttgtcctccctaggttattcatacagttaagatattgtattcagttgctgctgagtgtgctcagagatagcttcaaatatgaatttttatctgggagaattccagttctcctcccatttgctcctatgtgtttcttttcttccttttgttctccagagccagttgtacaagtttaaactactgaagtgatcaaactgtagtaccaattatcagcagtatttattcagaggcttttttttttaaaagaaacagagtctcattctgttgcccaggatggaatgcagtggtacaatctttagctcactgtagccttgaattcctgggctcaaatgatccttccgccttagcctcacaagtagctaggacaacaggcacacgccaccacacttggctaatttataaaaaaaatttttgtagagacagaatctcaatgtgttacccaggctggtctcaaaactcctggcctcaagcgatcctcccacctcagcctcccaaagtctgggattacaggtttttttgttttttggctttttttttttttttgagacgccctctgta

SEQ ID NO: 86204 - DNA, 1755 bp, Homo sapiens
aaccctagaggtcttctggttattaaaaaaaaaaaaaaaacctgtgggagttttttgcttctgaagtttgtttttttgtttgtttgtttgtttgtttgtttgtttttttgagacggagtctcactctgtcgcccaggctggagtgcagtggcgtgatctcggttcactgcaagctctgcctcccgggttcaggccattctgctgcctcagcctcctgagtagctgggactacaggcgcccgccaccatgccaggctaattttttatatttttagtagagatggggtttcaccatgttagccaggatggtcttgagctcctgaccttgtgacccacctgcctcggcctcccaaagtgctgggatcagaggcatgagccactgcgcctggccgcttacgaggttttttaaaatacacatttcattttcaattaaggcagatttagaatatagcataaacacagagaaagtaaacatttagacaatttcagtgtttttcctacttaatactctggaaccagactgcttatttttggatccctgctgtgtacttaacagctgtgtgatcttgggccatttgttttgtatgcatggtgtatagggcatatgcgggagtgataggaaacaagaatggggccgggtgcagtagttcacgcctgtaattccagcacttcgagaggccaaagtgggtggattacttgaggttaggagtttaagaccagcctggccaatatggcgaaaccctgtctctactaaaaatacaaaaattagccaggcatggtggcgcacacctgtaatcccagctacttgggagactgaggcaggagaatcccttgaacccgggaggcagaggttgcagtgagccaagcgcccctgcactccagcctgggcaacagagcgagactccatctcaaaaaaagaaatgagtcgaaaggtaggcgtaatcaagacaataaatagtcttgtgtaacatgcaagagtttgaactgtacgtggatgggaagccactgaagaattataagcaagggaattacaccattacattgtgctttaaaatatttttcaagtaccatttggaagaggtgagttacagtaaggcaagaatggagtcgataagtgagtaatgatgcctctcctacaagatagcatgaagatgacaggagagacaagatgcctgagctagggaataggattagggatgaagggatgaatttgagagatgtaagcgttaagtgcagtgtggctaagactcatcgactatggaggagaaggaggaagaatccagattgagttctgtcttggatagctatctttactctgatgcagttatccaatataggagttttagaggataggaaaggggtagaatataagtttgcaactgaagggcatgtgagtaaattatatgcagtaggaactggagcttaaaatagatatcgagtttgaaattatgcattttgatggtacttggacccatagaagtagaggaatttataggactaaggtgaggggtaaaaaggaattagaacagaatctttggaactctgaagatggaaagagtggctagggaaagaaagaaccagaactattacactgataaaacttttactatttacagcctctttcctccttcttccctgtgtctttaacatgagactaaagccaggaaaggattgggtcccaggaaaccaagcagggcttttacactggttaggatacttgatggaacttttcactacagaatgcaaaactctacac

SEQ ID NO: 86205 - DNA, 1414 bp, Homo sapiens
gtgttgttcccctctatgtgtccgtgtgttctcatcatttagctcccgcttataagtgagaacatgtggtatttggttttctgttcctgtgttagtttgctaaggataatggcctctagctccattcatgtcctggcaaaggacatgatcttattcatttttctgactgcagaaagcagaatttataatctgagtaatgccataagatatataaatagcggaaaaataactttacttattgatagacaaattctttatgctggaatatttttatgttttctagactagtgagtgtggagtaattagcaatatgaggttcaaagtttgggtaaaagatttatttttgtcttggttttatttatttatataatatatatatgatatgtatatatagtatatgtatgaatttatttgtagctctgaagatggctgtggtagatatctatcattccaggttaaaggagagacaaagacgaaaaaagtaagtataaaaaaccatcctggcctcctttcagctttggattattgttttgtgtgtgtgtgtgtgtgtgtgtgtgtgtgtgtgtgtgtctgtgtctgtgtctgtgagagaggcaaggtctcactctgttgcccaggctggagagcagcagcacaataatggctcactgcagcctcaacctctcaggctcaattgattctcccacctcagcctcctgagcatgtgggactacagcagtgcgccaccatgcctggctaattttttgtattttttgtagatacggggttttgctgtgttggccaggctggtctcaaactcctggacttaagtgatcctccctcctcagctcccaaagtgttaggattgcaggcatgagccactgtgcctggcctcagctttgagtgattgaccacatatagtccatgagagaatgctccacttgtgactcatcttttgaccttggagaagactcttaccctccttagacctcaatttttccttctctcaattgaggatagtaattcctgtgttatttttatatcctctgcccttatcctttattgacgttatgatgaacaatgaataatatgggtacactgttttaagctatttgaagtaaaagaacaagataaaataaaggcatcaagacagtattgttacacttttttttttttaatatttgtgaatcattctttgcttttgtctttttttttttgagatggagtctcgttctgtcacccaggatggagtgcagtggcgtgatctcagctcactgcaagttctgcctcctgggttcatgtgattctccagcctcagcctcccaagtggctgggactataggtgtgcaccaccacgcctggctaatttttgcatttttaatagagatggagttttgccatgttgtccaggctggtcttgaactccccaccttaa

SEQ ID NO: 86206 - DNA, 1876 bp, Homo sapiens
cagcctggttcctaactggtccatggcccaggggttgggaactcctgatctaaagtaaaacttactctctgcatgtctggagttagcttccatgaaatgctgaagaagcatacccagttgctcctatgagaagcttcattgctagttatgaatacctctggtataaatcagattcaagacacataactttgcctggtttaaattctcttttgcttaaaacacaattcgagctagagagtactgtagaactcagttgctgatgttgctatcaaatcttttgttttataatgccctttcattaaacatgcacaatatttatttctagtaccgccagtgttgtgtgaatgcacagttgaaaatgttgaatatgtgatcatggtgccctttagcagatttctctaaaatggctgttctcaattatttccacaagctgaatagattaactttatgacatggacagagattcctttcggtttcatcttaagtgacagacatgtgtttttcagcatttgtgagtggttattgattgattcattcgttcagcaaatagtcatggagagtctactatgcccaacaagaggaaaaacccgtgatgcctgagagtctaaaattgggttagtgattcactgacctgcagaaatttgtgggagtgacttctttggacctctgtattgtattccacctcagcatgtttatgtctgatgatagctatatgtgtaaagcattagtaaatgtgaaaataattctaatgcacaaattattgtggcttttcattctagaattataagagaccatggattaatcaaccttagaaagtttcaatgtaagtattagcagttttctttattttacaatttttttccaatattattgaataattttaaataaatcacgtattgtagttcttaatccaagttgcatattagcctggctatcactccagactaatgaagtaagaatctctggggttggaggcacagcacctgcatttttaaaaagtcttcagggcaattctgatccatagtgagagtttaaagtattaatttggggccaggcgcggtggctcttgcctgtaatcccagcactttgggaggctgaggtgggcagatcacgaggtcaggagatcaagaccatcctggctaacatggtgaaaccccatctctactaaaaatacaaaaaaaaaattagccaggcgtggcggcatgcacctgcaatcccagctactcaggaggctgaggcaggagaatcacttgaacccaggaggtaaaggttgcagtgagccgagatcacgccagtgcactccagcctgggcgatagagcaagacttagtctcaaaaataaataaataaataagcaaataaataaatgtattaatttgtagtcaataaaacttgtattaaaattcttttttaaaaatttgtatagtaattacagtgtgaatattaatgaataattttctggatagagtcatgttttgcaactatgtgttaagcataacataaccttaatcttcaggttgtaaaaatattttagataaataacagaaagtgatctttattttggatggttatagacagacaaaataaatgatatttaatattatatgacggtgataaaaatacatatagtgatttttaaaataaatgccacctttgaccttactgtggttttttgttgttgtttgttttttaagagacaggttcttgcactgttgcccaggatggagtgcagtggtgtgatggtatcttgctgcagccttgaactcctgggtgcaagtgatcctcccacctcagcctccttattacaggctcgagctatcgtgcctggcctttattattttaaatatcagagatacctaagcagggcagaaaaagtc

SEQ ID NO: 86207 - DNA, 1048 bp, Homo sapiens
taatcccagcactttgggaggccgaggcgggtggatcacctgaggtcaagagttcaagaccagcctggccaatgtggtgaaattccgtctctactaaaaattcaaaaattagctgggtgtagtggcgggcgcctgtaatcccagctactttgggaggttgaggtaggagaattgcttgaatccaggagatggaggttgcagtgcgccgagatcaccccaacgcactccagcctgggagacagagcgagactccatctcaaaaaaaaaaaagacagtagatgtgggagatgagtagtgctcagtggtggagatgatctccagtgttaacaacatccctgtgggatagttgctatggtgctgtcattatgattagcgttttgcattcttggctttcctgtttgcttcctgtcatggataagttagtcatatgaggttatgaataatgttcttccattttactaattgtaaaaaaaaaaaaatgctgaaaactcagggatccttacatttcccatgacacatttatgttttattttctctgtagtaatggaacggcggtatcccaaggaggtccaggacctgtatgaaacaatgaggcgatttgcaagaattgtggggccagtggaacatgacaaattcattgaaagccatgcatgtaggtggtttttgagccttgagcagtatttgtgtgtgtatatttatataaataggagagataatggtgtgttttatgtgaagttctataaataaataaatggatatttctctctttgttcccctttattaccatgagacaaatttgggactatgggggtggcagaagagaggttaaaaagccctaatgacttcccccattgccccagataaacaataatttagtagtttttctccctactttgtatcatgggaactttcaaatatatatagaagtagagataataatatgatgaactcccgtgtatccatcatccagcttcagcagttttcaacacatggccagtctggtttcatctttaccactcactcttccctcctgccctcaactggatta

SEQ ID NO: 86208 - DNA, 1050 bp, Homo sapiens
ctaagaaatatggagaagaggtactacatgtcaaagagaactctttttttgtaattctaattgttttttaaggaaaggcatatgcttatagcacttgtgtgactttgaaaaaatttataaaaatagaaaaaacaggaagcaaatatgactatagtaaaagttggttactttttgagagtggaaatatgagcaattcttactttctttgtacttttctgttggtttttttccccttatttcttacagatagaaaaggaatacaaatgtttaatatttaatacttagtattaagaaaaggatttcagactagggaaaatctacttgggtcttggagaaataattgtgaaagcagttttgcaaaggaaacagactttaagaacaaaacccaaaaccggtttcttggtcagttaggaagcccttcagttctgctgcattgtcattgtggtcattgtgttttctatacccccaggtgccagaacctacgatcacctcaagaagacacgggaggaagagcgccttaaacgcactatgctctcagaagttctccagtatatccaggacagtagtgcttgccagcagtggctccgccggcaagctgacatgtgagtaattactccagggtgaaggaggcattctttctgggatgccttggccttcacatatatttttgggcaccctagatggcagagtaataataattgagtagctggaagaattcagaaatattttagcagtccatctcagaaacagtgccatactgacagttttgagaaataactgacctcctagaatcatactttactactttgatcctattttttaaaatgagtgtattttcccccagccttctacccatgacttcaactctctcttcatacctagattttcactggggaatcatgtttgtatcccttccccttgagtggtgttagtggtgttctagattacaagctcttcttaacaaatctgaggaatttttcttcctcagaacagattttctttcctgctcaatacagtgagatatctgtaaaacatagttcagtctatctc

SEQ ID NO: 86209 - DNA, 1049 bp, Homo sapiens
caccttgttagccaggctggtctcgaactcctgacttcaggtgatccactcacaccagctccaaaagtgctgggattagagatgtgagccactgcaccggcctgattaaaaaattatgtgacctactttttccagttgcaatcatcagacatgtcttcatattgattttatctgtttctaaaatttaaagccagcctcataagagtcatcatcaggagttttcagaaaactttgtcacatctctgaagtctgttcctcttttggaggagttcctcttttgctcctcatatgctccttttataattcccaaggtcagttccccatctcccaccatatatcattagttcagttcagataataaggaagggtcatagtgtaggggatagtgttagtcttattttatccaccaggaacagtaaggattagtttgggagtggaaggaaatgtatgtagtatctatgtattgctgaaggaggtcataggtcagcctgattcaaatattgaatggcctggaatttcaagctttttttatccttacccacataatggtgacctcagactcctcattgctggataatgtggcaattttctagatttttagcagttaaagttacctcctcttagcaaggtctctttatctcctttccctttgaagtaggaaatgtaatccccaaagcagggactactgctttatgctgacactaaaaacaatgtgatgcagccttgagaatccaagtgtctgtgcattctgcccccactgtgccccatggctcttccctgaccattggtgctgggactgtacctgggcatttagtgtttgactcctgaaagagccaggctgctcctcaggagcacatagttgtaaatccctaacaaacccaggcccctgagccagctggcatgtgctaaaggctcttctagtatcacaccctggctttctcttcctgggtgtgtgtccttagggagtgttctctccagagaggaagagactaaatggaatgtagtccagccacccatcagctcctataaatagttggaggttgatgtca

SEQ ID NO: 86210 - DNA, 1371 bp, Homo sapiens
atggaactaaaccacagtctgtaatcccaggagtccagctcagatccttatattgcgaggtaagtttgctgattatctgtcttgccttcaaacactgcagacagatttaaaataaagagaaaggttttagagcataagaaagctctcgttgaaggattttttaagctgacaactttttttttttttttttgagacagagtttgctcttgtcctccaggctggagtgtgatggcaagatctcagctcactacaacctctgcctcccaggttcaagtgattctcctgcctcagcctcccgaatagctgggactacaggtgtccaccaccacacctggctaattttgtatttttagtagagacagggttttgtcatgttggccaggctggtcacaaactcctgacctcaggtgatctgcccgcctcagcctcccaaagtactaggattacaggcgtgagccatcgcgcccggcctaagctgacaacttttatgagtaaaggggaagaaaatatccttatgatggtcttatcccaaactgcatctttaacttcggccgggcaaggtggctcacctgtaatcccagcactttgggaggctaaggtgggcggatcacgaagtcaggagttcaagaccagcctgaccaacatggtgaaacagtctctactaaaaatacaaaaattagctgagtgtggtggcacacgcctgtaatcccagctactcaggaggctgaggcaggagaattgcttgaacacaggaggcagaggttgcagcgagctgagatcacgccactgtgctccagcctgggcaacaaagtgagactctgtctcaaaaaaaaaaaaacaaaaaaaaacctttaatgtctggctttgtactttgcagtctgcctgtctaatctgcagtagtcttttgaggaggtggcaccggatataacatgtctctgttatttttagaattaattaaaatgttttgctatttaatttgtgggtgtgtcaaatattctggtaactgaaacacacttaaggtgttggatgcctgccccatcacgctgcactgtctgctgtcacatgtgtcctgaactcaccctgtttttgccctgggtttcccaggataccaagcccctgaggatggagatgatgcaacaaacctcagctttgcttggattgtgacttgaaccctatttctcaatggtgaaaggctagcctgcaataaaagctgcttttaaaacagaagtaaagcagctttatatatgggactcactagatatgagggtaagtagccccaccacatgtaaaacttggtcctcaaacgtttctgcagaataagaagccaaacttatggttatcttgtttctgttagaaacaaagttgtatata

SEQ ID NO: 86211 - DNA, 1180 bp, Homo sapiens
aacagagtgactggacggctttccaagattgagacctacccttttaaccattgtgtgtgtgtgtgtgtgtgtgtagtgaattagataatgcatataaagagcttagtatagtgcttgaaagtaagggcgtattagctgttgttctatttatggtctttagctggtgaccttcagatctctccacaagcaggaggcctgtatgtgtatccaaccacctgcttatatagcatgtggccttcgctgtcccacaggcagctccagctcagcttggaccaaactgaactcttctcctcagcttccatcctcaaacctggtccttctctcacgtgtcttattatggtgaatcctctcagctgcccgggtcccccaacctctcccatccagcaggtcacccaggcctgctcattctcctgcctcgtcagctctttcacgtgcccatttctctccattccccaccgccgctgccttcattctgaccatcggtatctgtctccaggactgctacagcagacttctggctgaggcctgtgccctgaggattgccacccccaattcattgcctatactgtagcgagagggatctgtcagtaatacgaacctgggcctgtcgtgatccagttggaagccttagtggcttccaggatgctccttatcttccttggagtcctcgtgctgcggcttcatctcctctttccctgggccctgcccccaccctctagattccttcccataccccatctttagctcagagcctttgcctgtgctgcttgttctgcatagaatatccttccctcccctacctcacccaaccctcctgtccccctcacctagcagctcccatctacactcagccaaggtgattttagaatctaggaagcaggccaggcacggtggcttatgcctgtaatcccaccactttgggaggctgaggcgggtggatcacctgcaatcaggagttcaagaccagcctgaccaacatggtgaagccctgtctctactaaaaatacaaaattaaccagacgtggtggcgcgcctgtaatcccagctactcagaaggctgaggcaggagaatcgcttgaacccgggaggcagaggttgccgtgagctgagatcacaccattgcactccagcctgggcgacagagtgagactctgtctccaaaaaaaaaaaaaaaagaaaa

SEQ ID NO: 86212 - DNA, 1096 bp, Homo sapiens
taactaaatgtaaatgccaactcaaggctaatgtgggtttttttaagatcagattttacagcccaactcttaattttagtacaaactctaaatttagctaatttcaacatagtataaaactaatcaaatatgctaggcattttgcttctacagagtttagggcattttgcctaaattgcttgcctctaattgtggggtcttatttccctttcagatatagaggacttaaaatatgctgcttttggaagctacagtagcaattttgcagtgagcacacttacaagctatgactggtcagacagggatgatgcaactcagggcagaaaactctctccatttgtcctctcagcaggaagtggatccccctcagccacctcaattcttcaaaagaaagagacttcatttggcagttctgaaaacatcaccatgacatctctctccaaagtaacgacctttgtaagtgaagatgctcttccagagaccaccttcccagctcttgccagttttaaagacacgattcctcagaccagtgagcaaaaggaatatgaaaacagagactataaagatttcacaaaacaggacctgcctacggctgaacggagccaggaggccacgtgtcccagcccagcgtccagtggtgcctctcaagaaaccccgaacgaatgttcggatgactttggagagtttcaaagtgaaaagcccaaaatcagcaaatttgacttcttagtagccacttcacaaagcaaaatgaaatccagtgaagaaatgatcaaaagtgagctggcaacctttgacctttctgttcaaggtgagtagcttccaaggtagattttactattgtggtttttttccactgagatgttagatgttcttaagaataaaatgttgctctctggtttcgcaggaaatagattgttctaatctttgaaatcagggtcaattacagatagctataataaagatttccctgagacgggagtcaaaatcagcatccctcagataactgctttatgggctaaaaacaagcacagcatgcaggtattgctcattagctcgtttggttagaggtgtgctgtgttaaaagagccagataaat

SEQ ID NO: 86213 - DNA, 1643 bp, Homo sapiens
ttttgtctaactaggggggacacgtgagacacttccaagtttacagattcaggcagaaattgtaaagtcctatagcttttgcatatgtcaaattggcaagtcggaaaacaaaattgcatccatcctttggttatggaaatgttgtaggtattgctaaacaggctgctgaatcaggagcaagttagcagagacattgcatgtttcatgttgctacttgctaaggtatttttcaaatgcagtgggcggtctgaagagctcctgtgcccttgactgtctactttctgtctttttttttttttttgtacttttcctcagaaattttcttatttttttgctgctgtttgtttgatagagtgattgtgggttttgttttgttggttttttttttttatgagctgcttgaaccacagcagttggttgcaaagtgctctgttttctgaacaatattggatttttatttaaaaatctcataacatgtatactagccttttggactctgaagttattaattagaaactatttttctgaaagtgaatctatattctttcacagtgccaaggtagatgtctttatgaaatgaggctaatccgggtttggggtgtctttttttttcccccattttatttggaggttggtttttttgaccaagcttgttcttactgacctgttaaaataatcttctgtgctcatgttcttttatgtatgtttggaacatcctcagcttggagcctgtaatgttcaagctaactcttcagttggaggatattcttaaaagcagattgtttcctcccattgatctgtaaacctcctgtcagaaaggagcagtatccctttagagcggttgttaaaaggggttgatgtctgaccaatgcgctatattgctgttgtgcaaaattgctgcatcaatgtattgtagagggtaaatggcaaggacttattcaaagtaatgtagttttattttatcctcatgttcaccacagtatctcttgctctcttagtttgagggttaaaggtacttcttgttggagaaataagaagtgagctgatgaagagagaataaaacctggtagattgctatctgcggaccttaatcctgtttagaagccctaacttaactctgaaggggatactgtctcttttaactcttgctataatcatttgtatggaaggtagataatactgataacattgcctgatttctctgcgtattattacatttaaccctttgaggccttgctgcatataatttcaactaggctgttttttccccctgactaaatttaatctgcggcactgaagcatcttgacgtgcagtcattaaaatcatatggttttattggcagcaagagctgaccctcatctgtgacattttcaaagggttagcaagacttctgtagctacctacctacctatctgtaaagtagctcttctttgacattgaaaatctttgtattttaattagcacctttttttttttttggctgcttttctgatgtctttttttcaatttagacattttctgtgtgaatgtgccttcaaatttactttagtatattcctctgcaaatactgatctgcatgcttattctgatgacttcttttccagctcttctgtatcactctcttttgtgatctgtaagtctt

SEQ ID NO: 86214 - DNA, 1024 bp, Homo sapiens
acatacagctctgacttgactacttccatactttccttgaatgaaactatttttttttttttaagacggagtcttgctctgtctccaggctaaagtgcagttgcgcgatctcggctcactgcaacttctgcctcccaggttcaagtgattctcctgcctcagcctccctagtagctgggactacaggcacgcgccactacacccagctaatttttgtatttttagtagagatggggttttaccatattgtccaggctggtcttgaactcctgacctcaggtgatctgcctgcctcggcctcccaaagtgccagaattacaggcgtgagccaccatgcccagctgaatgaaactattttggttttatctagaattcatactcattattcatttattcatccagcaaacatttatttagcatttgctatatgccagacactgggataggcatgagaaatacagaagcaaaaaccacagttcctgctctaaagacacttagttttatctggtatttaaattatctgataacattctcttaggattagtccttaaatgtacatataaaatgtattccctagtttatgataatctgtactccacattgttttaaaaagagatttgttaaatcatggtgtgaatagctaagcctaggaaagaccattttggacagaaaatgggcattacttgttagagaagatgaaagggcaagtaaggttttaggagtagaccgggatggagaacattgttggtctgtgagaaaataacattagttaaggacggcaccagttgtgggatggcttatgacttatgacatactctattttaaagcattttatgagtaagaagtggcacaatgaaagtgattattgctactgtgtatagaataaattcagttgccatggtaatcttgctgtgagatgatgagaattactcagggtttagagttatagacactgaacagtttatatctgagaaattggctagactcggtgttaaactagatagtcaaaggagagatggcagtt

SEQ ID NO: 86215 - DNA, 1050 bp, Homo sapiens
cggggatacatagagtaggttactggattatggtgagcacatttaaattcttaggttgtatctttcagaaaaactgctaaacctgaaattaaaatactttagtttttcacttctcagattagcaaaaatgttttaaatatataatatttaatgtcattgaaaaagtagggtaaaagtgactaatacactctaggcttattgtacagccttgttgaaaggcagacttggcaatagcaatcaaaattctacatgttgagctgggcatgatagtgtgtacctgtagtcccagctaccctggaggctgaggcaggaggatcacttgatcccaggagttcaagtctgcagtgagctatgattacgatcacaccattgcactcctgcttggcaacagaaggagactgagtttaaaaaaaaaaaaaaaaaaaagcctcagcatgtctatatcttctatcctagtagtcacattattagaaatctatcccaagaatagtaactcgaattagcaaagatatacaagaatttttgttgtaacattgtttgttagagtaaaaagtagaaatagctaaatatccaacaggaggagaaaggttaaataaatttcaattccttcacacagtggtaatcattaaactgaatgagatagatctacatgtactgcatggaaatgtgtctttgttatatagttaaagtatagagcaatatagtgtaatctcatttgtctttaaaacaaatgagctgttaacagtacttctggagtgtgggattaggagtcagtgtccactctttgtacatgtatgtgattggttatgatgagcttgtgtcacttaatttgcaaacatgcatgatatagctgtatgtctttttttttttttttgtagcattttgacctttcctttttagtttttttttttttttgagacagagtcttgctgtgttgcccaggctggagtgcagtggcacggtcgtggctcactgcaacctctgcctcccaggttcaagccattctcctgcctcagcctgccaagtagctgggattacaggtgcccgcca

SEQ ID NO: 86216 - DNA, 2396 bp, Homo sapiens
gggataacttatttctgttatataagtagaataatccagtgatgttggcaaataaacatgcacataaatgtatgactgctgttgaaattcaacaaaacaagtgtctagatttttaagttctggggtcttgacattccagaaaggtgatttaaaacttttgctcctcaactaggagcactttaaactgccttataactttaaaagaaatcttctgatttttccagaagattgttgtttgggagattcaccgatatcattttcttaagaataaggagctaggaaaggcttctttagaaagtactctttcagcttcagtgacagggcacttgggggcagaagcccaggttgtccatttactgtcaatttgtccttggtgtgccttagattttgtcatctataaaatgaatagagacagctacacatcctggcttgagacagggtgctgggagggatcttggcagacatgtacttagtccagactgtctcatttgatggacatggaaacagaccaagagatgatgatgatgttactggccagaggcctccctaggagttagtggaagtgttatcttatgtaggttgtcagatttcaaaggtagtgctccttccactacactcttccacctactgtctcatagaattctttagaatcacagtagataattatgtttacattctctaaaatctctgaagtctctcaagtcctatacaaatgtgcagtgattgaattatttcaacgtttacttttttttttttttgagacagagtcttgcactgtcatccaggctggagtgcagtggcgtgatttcagctcactgcaacctccgcctcctgggttcaagtgattctcctgcctcagcctcccaagtagctgaaattacaggtgcccgccaccacgcctggctaattttttgtatttttagtagagatggggtttcattatgtgggtcaggctggtcttgaactcctgacctcatggtctgcctgccttggcctcccaaagtgctgggattacaggcttgagccatggtgcctggccacaatgtttacattatacgtggcagggcctccctttagaatatgggggtgagctgggcaccgtggctcacttctgtaatcccagcactttgggaggctgaggtgggtagatcacctcaggtcaggagttcgagaccagcctgtctaacatggcgaaaccccgtctctactaaaaatacaaaaattagccaggcttggtggcgggcgcctataatctcagctactaaggaggctgaggcaggagaattgcttgaacctgggaggcagaggttgcagtgagctgagatcatgccagtacactacagcctgggtgacagagtgagattccatctcaaaaaaaaaaaaaaaaaaaagaatatgggggtggagatggatggttaaaaagattagacatatacagttatatacaaataatccttcatgctctttgtttaggcccttccttggaggagaagttcctagtatcttgtgatataagtacatctgggcaggaacaaattaaattaaatacttctgaagttggccacaaagccctaggcccaggttccagtaagaagtatcccagtttaatggccagtaacggggttgctgtagatggatgtgtaagtggtaccaccactgcagaggcagaaaatacttcagatcaaaacctgtcaattgaagagagtggtgagctcgtgaagcattcagcaaaaaacttgtttaaccaaatgttgctcaaatgctaacaccttaagcattaatcttcaaatgaatgctgcttgattttgctaatcgaaattttgcttgaaatatatttaatgcattcctttctccaattaacccctaagattttgctctgaattctttcaacacactgttactcctttttaaaaatgattttgataactggttttcttaattggaatcatttctgatttaaaattttctttccttttattttataaaaactctcttttttccccccttatactttctgttcttccataaaggttgaaaagttaaaatgtaactggaaaagtcaccaatgagaatatagttttggtttctctaaaataaatcatatgcaccactgcctaaaagatctaaattgtataaattcaaccctcagaaatgaattagaatgtgggcagccaaggaggcaaacttttgggaggatattttattggacagaaagcccccaaaagtcctatatatttaagacagcagtatcatatgtaggttaaaaaacaatgaaactttgcaaagaagcattagtaaaaactgcaagtaaagcttggacaattaaatatttttagatacataattttaaactatcatctatcatgtttttttccttaatttgtaatacatgttaa

SEQ ID NO: 86217 - DNA, 1039 bp, Homo sapiens
cggaggttacagtgagccgagatcatgccactgcccgctccagcttaggcatcagagcaagactccatctcaaaaaacaacaaaaaacaaattcaacgttttgacattttatcagctgattccaagaaaacatacctaataggtgaacagttttcataaatcatttagccagccaagaaagtactatcttctgctggaaaatgttgcattgataaattttatcttgaacccttgtattatagtacctttcatgggtgatatcaagagggaataatcactggcatagtaaccagttcttgatttttccgggacaactttgactctgttctgttaatttcacttaagattcccattccaaaagtatgccccaaaataaaatatacaagattgaaaagaaaacagatattagcaatcaggctgagattagaaaggaaaaacatatctaaaaatgaaaattataaggtgaataagctagtcaagaagtaatttaggaatatatattagaagttaatactaaaactagacctaggctggaggttaggaaaagtagagaaaggcagtcaggagttcaagaccagcgtggccaacatggtgaaaccccatctctactaaaaatacaaaaaattagccaggcatggtggcacgtccctataatctcagtcacttggtgggctgaggcaagagaatagcttgaacctgggagatagaggctgcagtgagtcgagactgcgccactgcactccagcctggacgacagagtgagactccatctcaaaaaaaaaaaaccaaaaacctagtcctaaagtatttataaaaagagtttccagccattctaccaccaaaggcaccttttaaatttctctttatagattgtttatcttaaaatactgaatatacaaactatattgatcatataactttttttttgagacagggtctcattctattgccctagtgcggtgacatgatcacagttcactgcagccatgaccccccaggctcagacaatcctaccacttcaacctcgtgagtaaccggg

SEQ ID NO: 86218 - DNA, 1449 bp, Homo sapiens
gaaatcaactacaagtacatgggactggtgataaatgatcctaaactatcaagtcagtttcaatttgtaggtgccttttttttttcctgtagagatgagggtcttgccatgttgtccaggctggtcttgaactcctgacctcacacaatcctcctgccttagcctcctgagtaactgagattacaggcacaagctgctgcacccagctctgtaggtgacttttaaatgattatacaatggaaataacattcattgacatttctgtggtttgaatccagagagatacttcttatagaaaaacaaatgtttatgctaaaaataacaccaaaatgtggtgaactcttaaggacttttcccttcaagtgtgaaggaaggtgtgatgaatgctgtggagaggcatctggaacagaaattcaaaataaagccttgacattaaataccccttccactgctcactttgtggatggtagcatgagctgtctaccaagaagaaacctgctgctctcttaattttaatatttcctaatttgttgatggccttttgtgttgtgaaccacaacaaagagaggcctcttttgtggctggttattccagttccctgggattttaaattctttggtctattaagtatccttgtattggatacgtaataccttagtgctgtcataatgttgtacaagatcatgatcagcttctccctttcttcattttctgtgatttaaccatgttctttcctgtctctttccatttaagatattttatttgaatactgataaacattttatcctgataaggaagaatgttcttgttacttgatatacctctgtcttcattctcttacagcttatctttccttaggttgatggtgcctcatttaataagtagatctctacttaagctaaaggattatgatcatatggtgttggagactattagctattagatttttctcaaaatatgagttttgtacaatggaatgaaaaagtgacttcatatacgtaagactggtgcctaagaatgacttgaatgttatcagtactaccacagaactataatatacattgccttttctcagcagcatttgaattcaacttatttatttcctctatttgtagctttttgttctagagtcagaacaggtggactttgctttgaatattttagatgggacaaaaattgttcatcttcggaatttatttaaagaaagatctactggtacagggtgtaaaaatacttacaagaatatgatttttttgtttgttcatgcaaacagatcctttacccaatatatattctggaggtaggtatactggtgcaacccatttgccagctgtgtgactttgagtaagttcttaatttctcagagtttcagtgttctcatctataaaattatgtctccaattgtgagtacctagcactgtacctgatacatagtaaactcacaataaa

SEQ ID NO: 86219 - DNA, 2450 bp, Homo sapiens
tccctttgagttagctctgtaaatcctattaggcgatctcgtttattaaagtagttacagccccaccttaaaccagtaaatggttttgtaaaatgaattttgtggctgagcgtggtagctcacgcctgtaatcccagcactttgggaggccgaggcgggcgggacctgaggtcgggagtttgagaccagcctgaccaacatggagaaaccccatctctacttaaaatacaaaaaaaaatttagccgggcgtggtggtgtatgtctgtaatcacagctacttgggaagctgaggcaggagaatcgcctgaacccaggaggcagaggttgcagtgagccgagattgtgccattgcactccagcctgggcaacaagagcaaaactccgtctcaaaggaaaaaaaaaaaatgaattttgtgatcaaggatcaaaactaattttagctttaactcttctaattgaagttgcacttaattcttttccttttttactttgtaactttcagcaaacaaaagaaaaagatgattaagaaaccattggaaagggagagcattagtacaactccaaaatgtttcttagaaaaagctaaggataaacagtaagtatgtggtaagaaaaatggctgtttgacaccatcataaagttatagtaggcattatttttccttaggtaaatttttagaagtagaattgatactacagtctgttataaaacgttataaaaataatatattttaggttgcctataattgggaaatttgtttgtttgtttttttgagacagtgttttgcactgtcgcccaggctggagtgcagtggcgtgatctcagctcactgcaacctctgcctcccgggttcaagccattctactgcttcatcatcccaaatagctgggattacaggctcccgccaccacacccagctattttttttttgtatttttattagacacggagtttcaccatgttggccaggctgagctcaggtgatccacctgccttagccttccaaagtgctgggattacaggcgtgagccaccatgcccagccaggaatttgttttaatattggaatttttctgtaccaatatgttgatgatctgtttttttccgtcttggaaaatattatttcaattctctataaattcgaattatactgcccaccttctctacacagcccacattaggacatgctactaaggccaatagttaggaccattgacttacatggatctagtcttctttgaagctccatattctgggcaggatttcaatatgatctcaggcttacgcagatgcacattgtaacacctgtaagaagtattacttaggtaaatttgtgctagcttagctgagttttatgagaatattaaagtatagttttttagcattcatacaggctaccttattttgcccagtaatactaggaagctttatattttgaaaaggataggccaagatattttgaacagttatactctatccactatttaaggaaaatggcactcttcacattctaccagaaccaggttattatatactctaatagaattgttcaagtctataatttattgtttttttctcccctgagagtgctatcaatggcctaggatattaccattgtgaaatatgctaatgcttatatccagttatctcacatctgttctatagaagtcattagaaaaaaactgtttccatcaaccagtaggcatttaccaagttgttctgcaaggtacttggtggtggtagtgtatacaaatgaatataaaatgagatcctttcctgaagttaggtaaagaagattcgtgtacatgacagaaaattagagactggcttttaaataaaataggagataagagaaagatgattgtgaattggtgtggttacagaagtttcaacaaagtagaactatctttaaggataggtaaaatttaggcatggagaagggaacaagatgaatagaggcatgaaaattagagtgtgctttgtaaataagtgaacaagagttttcacatgttggtattgtctatgaggaataaaagtcggttcaaatatacagtgtatatatagtgtctcaaaattttatcatacttttaataacttgggaaggataagtgctacaaactgaaaaaagtatatttgaatagtcaatcaatcaataagtacaaattccatttgtacttattcagttttgggaatgcttcacaatcacatttactttttttttttttgagatggagtcttgctctgccaccctgtcgcccaggctggagtgcagtgtcgcaatctcggctcactgcaacctccacctcccaggttcaagtgattctcgtgcctcagcctcctgggtagctgggattacaggcacccgccaccatgcctggctaatttttttgtatttttactagagatggggtttcaccatgttggccaagatggtctcgaactctcaaact

SEQ ID NO: 86220 - DNA, 1097 bp, Homo sapiens
tttataattttattttgacaatagtttagtggaaaagaaaaattgaaataatggatataacttaggttatggattatctttgggttttagttacccgtattctttacactcattcaaagggaatttaagggcaatgctcagaaactttgttggggtgatggtggcatggatggatgatgttaggaaagcagatatgacttgaaagattagattcattatgtaaaattgtatttgtttttttctatggctggtagcgttatttgaccaggctctgaaaaatttatgtactttctttgtagtatttaatataccctatgtttttagggtcgggaacttctggcttctgctccaactggatctggaaaaacattagcttttagcattcctattttaatgcagctgaaacaacccgcaaataaaggcttcagagccctgattatatcaccaacacgagaacttgccagccaggtatgacttgtagcttttgaagagtatgcgattggtttttacttcagtgatctttcttatttgaaggtaataaaaagatcttaaaaagcaaggcccacgtcttctgtcatggtcaagtatcctctacacagcacagtgctccggatcttactccatgtgggcaagtcttttaagtctttctgtaagtttctaaaacacagtgattttaatatttacacttctttggtaaatgctttaaggtctttgaagttgaaaggctaattaaatatagccctgcttggacatttatttttctcatctaaaaaaaatgaatactcatcttagttttggtttttatttatttatttgtttgttttttagccacagattcttactctgttacccaggctggcatgcagtggtgtgatcatggcttactgcaacctcgaactcctggcctcaagagttctccctcttcagcctcttgagtaactgggactacaggcacatgccactgcgcctggttaatttttttctttttgtagaaacaaggtctccctatgttacccaggctggtcttgaactcctgggttcaagtgatcctcccaccttggcctgccaaagtacagggcttacaggcatgagtcatt

SEQ ID NO: 86221 - DNA, 1046 bp, Homo sapiens
atgcgtgtgacatgtgtttcttctttctctaactggtgagtatgaactctggagccagattatctgggtctaaatgctaagtctgccagttactcatttttagacctacctcaagttacttaatttccgaatgccttggttttctcattcgtaatactgctatttaccttatagagttgtaaatatgaagcaatttaatatgtataaacatgcttagaaatctgcttgacatttagtaagcatatatgtgttcattgctaatattaatttgttactattatgaggtcagagaaggtctcttcagattccatttgtccagacacctgttagctcgacagatacttggtgaaagggtagaaaagatgaggagtcattgaacagtcttgcttgaatgaaagcaatggtattctgtcagtaggtttcattttacattttttgggttttagataggaaaaaggaaatatgactttgattcttcggaggtgcttcagggactggacttttttggaaacaagaagtctgtcccaggtgtgtgtggagcatcacaaacacatcagaagccccaaaatggagagaaaaaagaagagagcctaactgaaaggaagagggagcagagcaagaaaaaaaggaagacgatgacttcaggttagtgtttgatttctgtcatgttttttctctttaatttttttcagttataaaaataatacaggcttatggctacaagtcagacaataaggtcatttgtcagctgatggcactcaggttgtttccaggtatttgtcattagaaatattgttacagcaaaggtaattttaagtaaagatatttatacataaatccttttgtacaggtactgttatttctgcagaataccatccgaaaagtagcatcatatggtgaaagggtatgtaccctttctctgaaaaatactacaaagtgacttcccaagtccttgtcagtgctgaatattattggtgttaatttttttgccaagctaatgaatgaaactttttttttttgagacagagtctcactctgtctccagg

SEQ ID NO: 86222 - DNA, 1071 bp, Homo sapiens
cccgaagcccagtttcccttctatgcagtattgccacaatgcctctcccacgatgtcaaggactcctgtctgtcctggaggtgggagacaaggaaccaccgaagaggaagcaagaaagccgtactgtctatgttgtgatccttcatcgaacaaactgatgcgaaaacttgaatctgttactgaaatgaggagagaaggacatgtgctattgaactgagccaaacacactgtaaatatccacagactccctcccctgcccccatcccacatgatcttgagatttcttttaaagaagtaaatttgtccaatggctgtaaactataaactactgtaattaagtgcaatttcccctctgtgtcctctcccctctgccctgtatataatactaaagtgtctattagttttctttgtaaaggtcagagtcaaaatttcaaaagtgatctgtcccctctcccctcatggagaaacatcctaagtgggaagtgaagccccttgtcctctcccgcgggcctggacacttatggggacagcataccttggactgactaccagctaactccagtctcctgacattaagacacacctctggatccctggaggggctgaatgtagtgtgtcagagtaacatgccagcttcctgtgggccaggagctcagccgtgcactccctaagaaaccccagggcagggaaactggctgtttgatagcagaagaaaaagttgcagtctcagaaagccttccattaaaacaatttattttatcactacccagagtctcatatttctgtctctgatactttccctgccatggttccaccgagaacccctggcccctggtctccttggaattttctgtatactccactgggatcctgtagtgtgtcatctaggggtgtagagaggtgggtggccttctcttgccgtcatgctcccagtgtctgtgtaggctttactgctgattgaggtgaagaagagttgaatcccccagtaagactccacaagtcgctcagagggaatctggccagagcaggagctagcacccttttcttccctgcaactcacaggggtaaagt

SEQ ID NO: 86223 - DNA, 1136 bp, Homo sapiens
gcaaaggttgggcctcactgcctcggcaacccaaccatcctggttcttgccacggatcttatctggtttaagggttttcagaggagcaaacgcttttgagatgatcctagggccgctctctcattgccagaatatactcccctggaaataatgtgtggctctgatcagtttcctccaactcctggttcagccattgccctgtgagggctcactcggcttccagggagccctttaccctatttgtctccttccctcttcttctccctgtgtggctgctgactcagcggtcattctacactgaggaggctgccttatgggtgggccagatccaaaccgcaggcaaacgggtcgtgatggcgtggcaaccctcactgtgttggaggatggcactccggccacctcctccatctctggccatatcctgcccctcgctcggtccggctgcctcaggagaagctcagtagcctttggggacggccactctgttggtggcctctgcttgttggcttccgtgtgtcatcagggttggtgggggtcagtcacttgaaatctttgcagcaatgagttgggaaaaactgaccgagtacctgctccatcatgcttgattgagtgctcctgtgtgctgggccctggcctggattagaatgcctctgctgtgggctttgggtttgtcaggatggaatcctacagcctcctcgggggaaagcacacctcatgctgagcgctgtgttaggcacaggctgggatggagcacttcttctggtccttcattcttctggcaaagctggcttcctagaatggatgtgctcactggggtctgtgtggtgcccatgaggacaaagtgtagcagcctcctgcctgctccaagaaaagggcttgcgaaaggaaagccaaacactgtttctaactcaggggtgattctgaaacctgttggctcccctcacctgtcggttgcccttctgatgagaaaggcctgagggctgggggctgacccaagtgttgaggggaccaaagccaccaagacaggctcggagccatcagctgggtggtgtacaagcatttgttccatgcctgctgtgccctcccatagcactgcctcttccagggcctctgggagcctgacagtgcccagcatg

SEQ ID NO: 86224 - DNA, 1005 bp, Homo sapiens
agcctcccaaagtgctgagtgctgggattacaggtgtgaaacactgcaccagctacatgtagaacttgataaagactggctttcaccgtgtatgagatggggagccatcttcagttctaatgcagctgggactacaggtgcgtgccaccacacccggctaattggttttgtgtttttttttgtttgttttctgttttttttgtacagacgggtttctccatgttggccaggctgggctcgaactcctggtttcaagtgaacctcccaacttggcttcccaaagtgctgagattacaggcgtgagccaccatccccgccccctcaaaatctgttaggacgacagtctcgccaaggcaatgcagtcgcaatatgccgtttccattgcaatcacaatatgacatttccatttactttggattatacgtcattatgaatattaacaagacttaaaaaggacaccttcgggtatgtcagatgaaagtacaaaaattgcgttgtggggctgcagtttgaggacagtgtctgcagccgtcacgtggtagcaaaacggtgttaagcattgcaggagagtctgcatctacgacagccagagtccatacgtcgggaggtttatttggtttgagagggaacaacaggcaggatgggcaccacccggggctggacagtcaggcgggctagggtgcggttcctcgcactcgccactagaggtgaggcgtttaccgcttcagggctggaagatgggccctcggggactggctactgctggcccggggcggaaacctgggcgggggttggatgcgacgcctcaggcggcccccctggttactgacacccgactttggcatgactttatttgtttttccccccatcagatttcctgtctttgtgggctgatggactagaggaaagatgcctgttgacggtcaaaggcagagcctcttcggcagcttcttaaagcgccttctttaacagagaaacaatctgcatggggtctagaacggttct

SEQ ID NO: 86225 - DNA, 1162 bp, Homo sapiens
agaaagcagttttctcctgtaaagctccattgccctcttcccccttttgctgttattagaataaacattatatatgaaatcacgccactgcactctagcctgggcagcagagtgagactcctgtctcaaaaaaaaaaaaaaaaaaaaaacccaggctgggtgcagtggctcatgcctgtaatctcagcactttgggaggccgaggtgggaggatcacggggacaggagatcgaggccatcttggctaacatggtgaaaccctgtctctactaaaaatacaaaaaaaaaaaaaaaaaaaatagccgggcatggtggtggcgcctgtagtcccagctactcgggaggctgaggcaggagaatggtgtgaacccgggaggcagagcttgcagtaagctgagatggtgccattgcactccagcctgagggacaaagcaaaactccgtctcaaaaaaaaaaaaaaaaaggaagcaagctgggtatgtgcgtttagaggtgctgtacattttcagcattataaatgaatagagatgagtggcagtagtttttttggtccatagatttttggtatcttaactagttttggatctcttccactaaagggattgcctgttcaacgttgttaggaatgtacgtactgaaggcaaattgcctgggtttgaattttgttctgtcccttgcaccctgcctggtttcaaatcctagctctgcttattaagttcttttaaggtgatgatctttgagcaaatgtcttaggttctgctttcccagtaaatggatacaatagttgctaccttgtgaaagattcatgtaattgaccagcgtttaccaagtagcatcagtgtttagtttcagtcattggtgattctgcagttggactgtgagggggtattggggtggggggtggtgtgtgtgtagcacttaattgcaggcaggaaggaaaagatacttttgataaccgacaggcagcttttctctgcttttgtgtcaaaagggaggaagggagtttggagagggaaatgaattctctgtaacactaagctctcttcctcaaaaccagaggtagatagaatgtgtaataaatttacagaatttctagactgaaacagtctgattttttaaaatttatctttattttttcaggttgagactgagctaaagttaa

SEQ ID NO: 86226 - DNA, 1569 bp, Homo sapiens
ttccattgtttatgtcaaggaaaattctggacatattttattgtcagggtctgttttgtgaatactttaattctcttgacttagcctatccctacttcagtttatatatataaattttgtatctaaagaactagagttataatcctacttcaacatatttaattaggctcccatataattgtaattcattacaattagtgcaagaaatctaatgttcttcacctccatgtcttcctcatcactcctctgcaactaccccaaaaataaacagaaccatagtggcttctttcccagcagaacaaagccaggactggaacccaagctctaagggatgacaggaatcatgttctattcaactttattattattagttactacatttttttgaggaccatcgttatacattatgagtgagttaaaggcagaaaaatgtaagttagaagggttttcctagaaagcgttttatgtaattcagtattacgggctatctgcttcctgtcataaccctgaatcacattgtctgccaggtcagtgtgggccatccatctgaggttgatgagatatttgatgctatatcatatagcaaaggtgcatctgtcatccgaatgctgcatgactacattggggataaggtaaaaaaaaaaactttaagtatttcattctttcatggtgaaatcataagagttttgcatgaaaaaaagtctcactttatttggattaagttcccaaatagtttctggcttgtcattttttttaatgaccaaaaagaatgagaattcaattatttgaagttgactactgtggtctctcagatgagtgatgtgcaggtgtgtttgggagtggaaatgggaggctgttataaaacttaagagcaagaatagaaggcatagagtacgcattattaaataaaaggcagtaggcatcagaaggatatatgtgtttcagtgtatctgatacttgagtatttgagtaaatttgtttttgattactaatatacaaatatactataaattctgagatctgacttccctggattttaaaaattgtgttttctcaggactttaagaaaggaatgaacatgtatttaaccaagttccaacaaaagaatgctgccgcaggtaatctttaatagcttgagatagaaatggagagaaagtattgtcactctatccaggctgggacattttatttttgttctgaatacttaactcaaggtcaggatccatgtaataaataaattagccttatttgaagctgtgttcaggttgaatatctctaatctgaaatttgaaatgctccagaatctgaaactttttcttttctttctttctttttttttaattaaagttctagggtgcatgtgcacaatgtgcaggtttgttacatcagtatacatgtgccatgttggtttgctgcacccattaactcgtcatttacattaggtatttctcctaatgctatccctcccccagccccctaccccatgacaggccctggtgtctgatgttccccgccctgtgttcaagtgttctcattgttcaattcccacccaaaatctgaaactttttg

SEQ ID NO: 86227 - DNA, 1010 bp, Homo sapiens
atttacaatgttttgaaaatatcctttggcccaggcatggtggctcacacctgtaatcccagcactttgggaggccgaggcaggtggatcacttgaggtcagaagtttgagaccagcctggccaacatggcaaaaccccatctctactaaaaatacaaaaattagccaggcatagtgatacatgcctgtaatcccagctactggtgaacactccagcctggtgacaaaacaagactttgtctcaaaaaaaaaaaaaaaaaaaaaaaaaagaaaggaaaagaaaatgaccctcagatataattctaatatcaccagttggcctttcttgacatctcttttagtcttctctctttttcagaaatgtgagttctttgccaaatgttttgaactgaattttaggtcattaaattgtgagttttggaatatagtggaagggacatgtgagtgttttagattagtagaatgacaatcatttcaatttctttaagtattttcatcttctgtttttaggaatggtggactcatctttggttaaatgaaggttttgcatcctggattgaatatctgtgtgtagaccactgcttcccagagtatgatatttggactcagtttgtttctgctgattacacccgtgcccaggagcttgacgccttagataacagccatcctattgaagtgagccatactttctaaccattagcctatgactgctctcgtttacaatgaaatacgtaatttgttacatagatactttggactttgaaaagaagagaaaatagcatgggtgattttactggttcatatttctagtcttgaaaagctagtaagtctaagttctaattaaacatttcttttaaaggtaggcagtaaaaaaaaattggtctggccaggcgcagtggcttacgcctgtaatcctagcattttgggaggctgaggcgggtggatcacctgaggtcgggagtttgagaccagcctgaccaacatggagaaaccccgtctttactaaaaat

SEQ ID NO: 86228 - DNA, 3421 bp, Homo sapiens
atggattaaagtttggccattgtattcaaagtttggagctaaggcagtcttcggaggtagggctccctgggattcatttctagtaatttaagatacattggcttgcaacaggattcctttgtgggtttcaatatgaattataataacatatttattagatggttattttgtttatacttttataggttgctgctaaaaccttgcctttttataaggactacttcaatgttccttatcctctacctaaaattgatctcattgctattgcagactttgcagctggtaaagtaaatttcattttattgctgaattgtaataactttttaaaattttgtgacttttgatgcaagagtatatatatatatatatatatatatatatatatatatatctcaataaatgtttatatttattttgtgaaggtgccatggagaactgggaccttgttacttataggtatgttaatgatgtattaccctgccttatcttttcaaatcactgatttcaaaagggcttccctcctaatcacagttgagtagcttctgctttacgatatggtgtaaatttttctaccttcccccacttccatgcacatttcaagaatgcagatggacacctctccctttggtgctactgtctgagggtgtaagattttaaagtgagcatctggcggtagtagcatttttagatatattcttggctaagtttctcattgcagtgcctttctttcctgccagtagtttcacagctatttatccagcttggagaaccttccctaatttcatatcttctagccaagtttttacatgtctgtcaccacaacataaacatgtgagttgaataacttttaaaagcagagtctgtctgtaaacaagtttttgccttctactttcaattgccttcttagatgagctaagtgttgaacggccggctcagtgctgtttttgggactatggaatgcatcttcctccaccactcccctcatttaatgaaaggactttcttctctctccatctagcacagtaatcgctaatcccttagacaatgttttcccaaaatttcaggcagctattctatcaacaaactgataattaaacttgtgtcacatctttgatattctgttgtattaattctgttggggtagtctttaatcttcgtgaaactttttctttccatattaggaaatattttcctaatatctctaaagcctaacttgtccatctgacttactgtctgaatcttcccaacttatgcatgcccacttttattgtttaaatttgtttcttttttttttttttttaaacatagggagactgcattgcttattgatccaaaaaattcctgttcttcatcccgccagtgggttgctctggttgtgggacatgaacttgcccatcaatggtttggaaatcttgttactatggtatttaatatttttaagtgctcaaatatatttatcttcatcctactccacattattttggctacatagtatttcaagtttggctgcaacactgtgccaaaaaataattgagtgatagaaaagtattattttaaaaggtccactttgaaagggcttatcagaatctctgcattgaacaagggcatatggacagtctttattcaacagacacttcctaaactgttctaaaatttgtctgcaaatgggaaaagtcaagatactaatttgggtgagaggaaaagattcctcttaggtgtagatgaatgaatcatgcagtgagattccaggctaactgtagtttcttgaatcttatttgttaatctgactcacagctgaaaagtaacctgatgaataacagactgatctttaattagagagaaatgtttttaggagtcagttttttcattgcctaaaatgttaagttgaaatttaatgaaataaaagtaaacaaactgcagagtgactgcagaataaagctgtattaaaattccagctgttctgttgaaatccttataatgtttgcagtaatgatctctgtccttcagtcctgatttttcactcttactctaagtaaatactatttatgaatgccaactgtgttagagcttgggagcacaggatttaataagtgaactagatgtacctctgcaattaaataactggatattctggagccagctagattccctgacattttaggctgccaaagagcagaacctgatttgaatgtagattgagtccatacgttatataaataagaatgtaagacatttatcaactgttacgtgtctcagagagtttctacagaaagtcaacccttgaaaataaatcttttccttttattttggatgtttaaaattttacaggtgaaaaaaattctttgaaatataatttcaggccgggcacggtagctcacgccagtaatcccagcactttgggaggccgaggcgggtggatcacttgaggtcacgtgtttgagaccaccctgaccaatgttgcgaaactccatctccactaaaaaaaaaatagaaaattagctgggcgtggtggtatgcacctgtaatcctagctactctggaggttgaggcagaagaatcgcttgaacctgggaggcagaggttgcagtgagccgagatcacgccactgcactccagcctgggcaacaagagcgaaactccatctcaaaaaaaaaaaaaaaaagaaatataatttcatgtggaactatgtgttggtgcctgtattcaaatatgtgaagaaatggccttttcttctaatgcagcgagtttgctactttgtaccaaataatttttttgcttggctttgagataactttatgattttattttgaaactacaagcaataaattttagtaggggaaatgtgtacattcttattaaacaactttttactggttttatgtaactattctagttattagaactgaaattccaagggcttagggataggttggaaaataagtttcattttatgctagtttattttaggaagctactaggcaaatagccacttatcacttaatatcaaaataattttttttttaagacagagtctcactctgtcagttaaactggagtgcaatggcacaatcatggttcattacagtcttgacctctgggctcaagcaatcctcctgtctctgcctcctgagtagctgcaattacaggtgtgtggcaccatgcccagcttatttttgcactttttgtagagacaaggtttcactgtattgccttttgtagagacagggtttcactttgttgcctaaactggtctcaaactcctgggctcaagcaatcctcccacctcagcctcccaaagtgctgggattacaggcatgagctaccacacctggccttttctggggggactggttggggatggagaataggatctcactttgttacccaagccggagtgcagtggcacaatcatgggtcagtg

SEQ ID NO: 86229 - DNA, 2027 bp, Homo sapiens
cggcacttcgggaggccaaggtgggtggatcacttgaggccaggagtttaagaccagctggccaacatggcaaacccctgtctctactaaaaatgcaaaaattagccaggcgtggtggtgcccgcctgtagtcccagctactcaggaggctgaggcacaattgcttgaacccaggaggcggaggctgcagtgagccgagatcacaccactgtactccagcctgggcaacagagtgagcctctgtctcaaaaaaaaaaaagagagaaagagaaagtcacaacattttgaacaatgtcaaatgtcattgctctttagcgttccaaaatgacaatttgaaacattaggatataaaagtttggtatgattggttaattactttatagtcatgccctatctttgatttgttagacttcccatgctttaaatcttgatatacgtagggcctttaaaatggtcaactaaaaagtcaccattcctctacgttttttcgtgacttgatttgtaaaacacagaatgggattactgttttgccatgcatctgtatttagcagatgattactagataataattataattttttatgttataaaaaagaaagtatataaactcaaaaaagctcacttttttgtctaaattgtttttgctcttatacaatagaatacatatttaagttgtatttttatttgcatttaataatttattaattaaatgtatttctttgtcagatttcaaatgattgaggtgacttgtaagaatttgttttatgccctgttgctgatcaaatcattggtcttccctatagctccttacaaaattatgcaatcagtgttccatttggagtaaacatttagtgtcttatcttgatagagtaattggctacatttctctttctatgcatgaagttgtgtaaaaggaccaattcacatgtataattggcagagagcatgaattctggacttaacattttatcccattctcactacttactaattttatgacactggacaagttatttagcttctcagcctcagtttcctcatctgaaaaaatgaggacaatatctacttccaggtttataaatagttatatatattttaaaagcactgtgcacaatagcacatatcaggcatttaagaataaatgtttgtttcctttcctgttcttatttccacatattggtagtttgagactaagttaataactttttaggcagtcaccctaaacatgactttcaagagttattttaggattagtctgccttttactttagtaagtactgtattctctccattgccaggaggaatatttgaaaaaggaaggaatgatttgaacattgtaaatagctaactgaatatagtgtcttgaggacatatttttggtaactgtgtttaacatctccataaaagtgttttttatttatcttcaatcacaggtacgggaaccttaaagatagattttgttggagagctgaatgacaaaatgaaaggtttctatagaagtaagtatactaccccttctggagaggtgcgctatgctgctgtaacacagtttgaggtatgggttattcttctctaaaatattattattcttaaattaggcattctgacaaaggtgtgtttattatgtggggtgattatttgaggctaggtgcccttggccatgattgtattcacaattttagaatttttattttatatttagccattatctctatagaaaggagggaattaagggtatgggttggggaatgattatatacagttatacacacagacattcaaacacacgacacattttgatacctgaattgcctatatactgtgtacctttcttaaaatcattctcttagtatttgacacctatggcttttcctacagtattattagctgttttctagaattcctttccttctttgacatcttttgtttatcttactgtagtatctgtgctgtctttgattttttttctctctctctgtgtgtgtgtgtgtgtgtgtgtgtgtgtgtatacatatatatatatacac

SEQ ID NO: 86230 - DNA, 1035 bp, Homo sapiens
cagtggtgcaatctcggctcaccacagcctccacctcgtgggttccagtgattctcctgcctcagcctcctgggtagctgagattacaggcacacaccaccacgcccagctgatttttgtatttttagtagagttggggtttcaccatgttggccaggctggtctcgaactccggaccttaggtgatgtgcccacttcggcctctcaaagtgctagggattacaggcgtgtgccactgtgcccggccagaagagaaactcaaaaagacaggaacatttccttgaactgatagagcaggagccttcagtttgcaaaggtacaccattgagagagactagcttaaaaaatgtaaaaattgccacactgactgaaattttagaacttctgcgataaagtaaaactcccagaaagttcctgtctgggatagggggcaataggagggaaggcaggtagcatactacctttaaaatttaggaatcagaatagtcctagacttaccattaggaacagtggaaacttagactctaatgaagctgttcattcaaaatacaaagtgaatctgattttcaacctaagattgcatgcttagcccaactttgaatttcggagtaaaaatattttcagatttgcaaggtcatagaaaatttgattctttgtaaaagatattggagtgggggatggattagctaaagcatgactttctacagtgaagagaaaatgtctaaagttgaaaaatgaagaaataggccgtggtcgtggctcatgcctgtaatcccaacactttgggaggctgaggtgggaggattgcttgcccaggaattgaaggctgcagtgagccgtgattgtaccactgccctcgagcctgggcgacagagcaagactgtctcaaagaaaggaaaagaaaaaatagctgtgtaagcaagacatttagaagtcacagagtttgaaattgattgcttctaggggcagggtgtggggagtagggcctagtgttgagcagggcctggagcttacgtattttaaactgtgaactat

SEQ ID NO: 86231 - DNA, 1071 bp, Homo sapiens
tgcagtgaaccgagatcatgccactgcactccagcctgggtgatagagtgggactctgtctaaaacaaacgaacaaaatacttttacctagctccatcttctattaattcaatccaaatccctgaagtgaatggtcacagatgattttgatatacaaccagagatcaaataggtattgtgttattgagggcacagaaagaaagatacgttgatatgttactattgttaggtataaaagcacaaagaaatagactttctgagcttagtatatgtggaagaaattatataccaatcaattggtgaagtactaagactttgatgaatgaacaaatgaaaaggaacagataattcaaaaggaagaaaatgtaaatgactaataaacatgtgaaaagatattgagcctcctagtaatgagaaatttttgcttctcatgtgagctgaaatttaaaaaattcccaatgatatggctgccttgatatcgctggggggagtataaatccatgtaatttttttgtaaagcattctggcagtatatcaagagcctaaatatgttcatgtcctttgacccagcaattctgctaataggaatatatcccaaggaaaagtcataaatacagaaaatactttatgcccagaagtgtctgagatattacttacggtagtaaaaaattataattaatatatttgttcaacactaaggaaatgatcaagccaggaatgatatatctatatagtgaaatatacttagcaattaaaagtgaggtttgcgaattcttaaccctgtaaagtgcttattataatgtaaaattgaaaagaagaatataaaattacatatttaaggtggtgaatcatgtctctaaatggcacaaataaaatgataattatgtctgggtgttgacataattggtgatttttattcttatttatatcttttgtctgattttcacaattttcctactgagaatctattgaattaatataaaattatttttagaaaaaatttaaattggagatgtttagtcttttatttcagtgctcttggaggccctttatgtgtaattattataaaaa

SEQ ID NO: 86232 - DNA, 1033 bp, Homo sapiens
gatgactacatatgaggcactaagtgctaaaacagagactttacatagattatcccattattggtcaactttttaaataagtgcatctctaatataagacaagatgctgaccaatttttaaaatgtgaatggatttctatttttaagataagtacctttgttcctttggttcctccctcccacccttccagaaatggtagtatcctggaaaaaaaaaattagtagcaattcaagaaacagcttaattcattagtataaatagatgagtttcccctaaacacaggaggagttggaaggtacttgaaattggatgttgtgcatggtgcctttccaaaatgcacaaatactttctctcaaatggttgcagtagtaatgtgctgtgtgatttggcatgtataatgttgtacaggtatcttgacattggtggattaactgcttggctactgtgaaattcactgtagatgttgatggatgaaagtgtggttgcctaggtaatgattaagaccagtaactaaaccacagttattattttgctggcataaacttcaaactcagaaaggtttttattcattttacccattggagcataccccagtaagtgcttcatttctttgtgtttctgattttttttttttttaagatggagtcttgcttttgtcgcccaggttggagtgcaatggcgcgatttcggctcactgcaacctccacctcctgggttcaagcgattctcctgcctcagcctcccgagtagctgggattacaggtgcctgccaccacgcccagctaatctttgtatttttagtagagatggggtttcaccatgttagccaggctggtctcgaacccctgacctcgtgatccacccaccttggcctcccaaagttctgggattacaggcatgagctgccgtgcccagccatgtttctgaatttttaagtcaacttctgaataggcaaagaattctttttgtttttttgttcaactttagtgctataaatcgccagttggacacaaaggttttagtgctatttag

SEQ ID NO: 86233 - DNA, 1022 bp, Homo sapiens
gatttaaaaattagttgtcttggccgggcacggtggctcacacctgtaatcccagcactctgggaggccgaggcgggcggatcacgaggtcaggagatcgagaccatcctggctaacatggtgaaaccccatctctactaaaatacaaaaaattagctgggcgtggtggcgggagcctgtagtcccagctactcaggagcctgaggcaggagaatggcgtgaatctgggaggcggagcttgcagtgagctgagattgcgccactgcactccagcctgggcgacacagcaagactctgtctcaaaaaaaaaaaaaaaaaaaaattagttgtctttcacattagtgtggtctagctggttttgaaaatttgttattatacagaagtttctctaggcccaaaatttatttcattccctgtcccctccctttacactggatacttgagagcagtggacttttgtagatatttcatattttgatcctctccgtttgtggataattaattaaaatgaattataagtttatgtgtgtgactactatttatgattatgagtgtgtagtggttggtacaataattgggtattcttttttttttttttttttttgagatggagtcttgctctgtcacccaggctggagtgcagtggtgcgatcttggctcactgcagcctctgcctcccgggttcaagcaattctcctgcctcagcctcctgagtagctgggactacaggcacgcgccgccatgcctggctgatttttttgtatttttagtggagatggggtttcaccatattagccaggatggtcttgatctcctgacctcattccatcttcctcggcctcccacagtgttgggattacaggcgtgagccaccgtgcccagctgggctttctcttatggaaatactttacctgtgccagagaaactaagtttatcattcaaggccagaaatcaggatatcctagccaacccctggcctctactaacaaaatattcatgttggagataactaaattggcact

SEQ ID NO: 86234 - DNA, 1046 bp, Homo sapiens
aagaagctggctgggcgcagtggctcatgcctgtaatcccagcacttagggaggctgaggcgggcgcacttgaggtcaggagttcgagaccagcctgaccaacatggtgaaacccccgtctctactaaaaatacaaaaattatcggggcgtggtggcgggcccctgtaatctcagctactcgggaggctaaggcaggagaatcacttgaacccggggggcagaggttgcagagtcgagatcgcgccactgcattcctgcattccagcctgggcgacagagtgagactccgtctcaaaaaaaaaaaaaaaaaaaaaggaaagaaagaagctattagttataacataccaccggtgaaaatattccattactcttcactgcagtttttggtgaatcatactcccctccctcctcccgcagcattatctgaagtattgtttgattttggagaccatcagtatagatgcccgacaaacatcctgcacaataggcatttatgatactatgtaacaggaagcctgtaataaaaatgggaactgtttgatagttatctgtaaacagaatgttagtaaatatattttgtttcatttcttttcctactgcagtctggggtcgggggaaatcagtaggctcccaccttaaagaacatggtgtatatagtaatgaaatgaagtgaagactggtgctcgaatgaattgaatgttggtagttgtctttgaaaaccaagagggtacggtactcagattaaaaatatgtctaaaagtacagaatttaaaagtatagttatctatactttatacttatctgtgatagataactatagctgtcacatttggggcattggtgtgaaagcaagagggctctaggatttggcagcatcaaaaggcagaacttagtgaaaatcaggtgatttaaaatttttccattaagaatatgaatcagaacgaatgcatcttgggtctaaattagaatttgagaaggttatttgggaaactgtggcttaagccaagtgactagagtgtttgatatatattggcaaggggcagat

SEQ ID NO: 86235 - DNA, 1072 bp, Homo sapiens
tctcaaaaaaaaaaaaaaaaaaaaaacctttaataatctaggttacttcaaccaatgagatctggacttttgagggagtgatttcaaaaactatatttttgtttccatgatttaatgtttaaaatgggatgtttcgggcggtcgcggtggctcacgcctgtaatcccagcactttgggaggccgaggcgggcggatcacaaggttaggagttcaacaccagcctggccaatatggtgaaaccccgtctctactaaaaatacaaaaaaaaaaaatagccgggcttggtggcgggcgcctgttgtcccagctattcgggaggctgaggtaggagaatcgcttgaacccgggaggtggaggttgcagtgagccgagattgcgccactgcactccagcctgggcgacagagtgagactctgtctcaaaaaaaaaaaaataaataaataataaaataaaatgggatgtttcaccttttccccattttcatctttgtttctttttaaactaaaagatccttcagcaatcatggcctctttaatggtgaactatctgtggctctctcagttctgtagataccttgcaaattgaggaggtatatatataaatgcatatatatatatatatatatatatatatatatatagtaactgaaattatctttaaaaaggggggccagggccaggtacggtggctcacacctgtaatcccagcactttgggaggctgaggcaggtggatcacgaggtcaggagttcgagaccagcctggccaatatggtgaaaccctatctctactaaaaatacaaaaattagcctggcatagtgtcatgtgcctgtagtcccagctactagggaggctgaggcaggagaatcgcttgaacccgggaggcggaggttgcagcgagccaagatcacgccactacactccagcctgggctacaacgagactctgtctcaaaaaaaaaaaaaacagtgggcccaggtgtggtgacgtgtgcctatgatcccagctactcgggaggctgagacgggaggatcacttgagcccaggaggtggatggaggctgcagtgagct

SEQ ID NO: 86236 - DNA, 1056 bp, Homo sapiens
ctgcaagctccgcctcccaggttcaagccattctccttcctcagcctcgcgagtagctgggactacaggcacccgccaccaagcccagctaatttttcgtatttttagtagagacagggtttcaccgtgttagccaggatggtctcgatctcctgacatcgtgatccgcccgcctcggcctcccagagtgctgggattacaggcgtgagccaccgcgcctggccctaactctccagttgtattttattatagttcgtctgtttctcagcttctcaaaatgttattttcattatgtctgttaaagcaaatttaattcataaccatttaaggctctccatgaactgtccttatcattttcccagacttgttttttcttatcctttaacatatattctccagtcttaacaagctaaccagtttaatgcttggcccttacagcttgctcattcttctcttctctaccattgctcaggcattattgctggtatgacctcctcatctttttcggcaaaccggggcccctcccttccttcaacactcaccttttccagaaagtcctcattgactaactccacccaactctcttttcccatcagttcacaagtactggcttttgctgatttatttgtacttgttctgactgttactctgtaattatgttgttgtttttgttttattctggtttttttctgagatggagttttgcttttgttgcccaggctggagtgcaatggcacaatctcggctcactgcaacctccgcctcctgggttcaagcgattgtcctgcctcagcctcctgagtagctggaattacaggcatgcgccaccatgtctggctaattttttgtatttttagtagagatggggtttctccatgttggtcaggctgatctcaaactcccgacctcaggtgatctgcccgcttcggcctcccaaagtgctaggattacaggcgtgagccaccgtgcccggcctataattgtgtttaaatttattttatatgtgtatcttcgcaagatgtactactagtaagagcttgtttcctaattccttta

SEQ ID NO: 86237 - DNA, 1029 bp, Homo sapiens
ctgcatttcagtgcaaacccatctgtggaatggagataatttcgcagatgggtacactgaaatgcagagaacttacctcatagaggggttgtgaacgtaagtaaaatcatatatggaaacaggtaactcggtagattgtaggtgcctaaaaccgtttttgcactggcctattataaactgggaattgagatgttgaggagagaaagatggatttgcaggcactgagtacctccaaacaagagacgtgaccttttgtcattttgctcttaaggcttgcaggtttccaggctagcgctgcagggcatgccccagccttatccttcagctgtgttctatcatctgcaacagcccagccatgtcgttctgcccttttcccatcctgatttctctggaggtgagtttagtttctacttcctactcgcctcctggatgaaaagtctcatgtacggtgttttgccctgtgctttctgaagtgtcacatctccacctagctctgctctgcccttttcctctcatctctccaacagtcacttctggggtggaatgtgccatctgtttctgaaactgagcagaagtttgggaaagggggagggacagccgtgtccagggcttgcgtgtcagcagacacgttacagctgctgcagggcaaaccagggtgaaaccacaagccagaggacccagggcaggcagccgtgaggcccgcccctcggcttctctctcatctgtctcacccagaggtttcctggcaggagtgggagaggttggtatcgagtccttgagccctgactcattccctgacctagttgggtggtacccagttatctcctaaatctctctccagggccctctgttagcaacacaacagtatcatcctagacagaagacgcgggaggaaagcagactacctatttatctcattcccttctgagggtcccaacaacaaccaggaggtttacaggttacattgcttataaaatgaccaaaatcatcccatagagctacactaagagattggctactttccagatt

SEQ ID NO: 86238 - DNA, 1342 bp, Homo sapiens
tgggattacagacagcaccaccatgcccagctttttttttttttgagatggagtctcgctctgtgacccaggctggaatgcggtggtgcgatctctgctcactgcaacctctgcctcctgggttcaagcgattcttgtgcctcagcctccggagtagctgggattactggtgtgcaccaccatgcccagcttatttttggatttttagtatagatggggtttcaccctgttggctaggctggtctcaaactcctgacctcaagtgatctacctgcctcggcctcccaaagtgctgggattacagacgtgagccaccgcgcctggcctattttgactcttgagcatttgtaagaaacccgttttttctgtttttagtgcatatcagatgttatctttgattctagaattctgaaatttcactatgagaagtcttagtctttctttagagtgcttaatttaagagggagaaggttgaatttccaggacttgacacattaaaaaatcaattattggccgggcgtggtagctcacgcctgtaatcccaggactttgggaggccgaggcgggcggatcctgaggtcaggagatcgagaccatcctggctaacacggtgaaaccccgtctctactaaaaatacaaaaatttagccgcgtgtggtcgcgggcgcctgtagtgccagctactcaggaggctgaggcaggagaatggcgtgaacctgggaggcagagcttgcagtgagccgagatcatgccactgcactccagcctgggtgacagagcgagactcaaaaaaagaaaaaaaaaaaaaaagctaaacagttattgagtaagtggatggacatgaatggaggtcagtgtaggctgtgaattatggaattgtaagacctttagaagtaatactcaggcttaattttacagaatccggaggataaaagactatgatgccaactttaaaataaaggacttccctgaaaaagctaaggatatctttattgaagctcacctttgtctaaataagtaagtgaactccctatctttacccattctgttctcagcagttagctattattttaggcacagtttttttgtttgtttgtttttgttttgcacaaatttgttttctgccttcaggtaagagatctagagtgagagaacttcctatattggaagtaattagtgactgacgctgtctttcactcccctctctgcttctgggaatttctaccatttggtctgtctcagttccacctgcaagtgttgggaccttgtgccagaatagctgcctttttcaccctatctgatccctgaattcattctgatcttttttgtgtgtttgtcttacg

SEQ ID NO: 86239 - DNA, 1303 bp, Homo sapiens
ccctcactcctcagccataagagcagcaggctgctgtttgtccataacgaccagaccctgtggtggaggcagagttaacccacagagtgggcctaagagtctggagcacaggtctgtgctatacacagccaaagaaagtgagctggagtattctgggagggcgtcttggaggttgggattaacaggattgaagtgggacctaaatcctggagagggcaggagagggcagaatgccccctcgtcctaagcgtatcagggttggggctgaggtgaaacgccagtgagaaggcaaagcagaagaggcaactcctgcctgcagtaatgacctgcgcccctatcccgccccaggtttgtgctggttccctctctgcacccggactggaccctcctcctcttcttcttccacacccacagcacagtcaccaccacgctggctctgatcttcatccctaaggtgaggccctcccctcctgcctgtgaggtggaccccagcccctctgtcagggccactgtggagcggttgtcccgcagcgccctctgcaggccagggtgaggacgacagaaggtgctgggtgagtgagcacagtgccaggggccctaagctaggagctgacttgagtggggacactctctgcttccagttcctgggcaagggaaagaaaacccagggctggaggggctccctcctgcagctggaaggttggcacactctgaaaatctactcagaagcaggtatacagggagaggtgggagagctgaaggacccggctaggaattgcagggtcaggggcttagaaccaccctgctgtctgagctagagaaggtcagggaggatgaggggagtaaaactctaaagatccccagaattccaagtcagagaagggggtgaagcgtcacaaagtaaggacgcattccacagggcaggtgagtgcaggagtggacaaggagccagggcgagtctttttcccactcttatgcgcccctgccagttctggaagctgggggctcctccccgggaggagatggtggatgaggtgtgtgaggacgagctggacctgcagcactcaggctcctaccttggcagcagcatcgcctcagcctggagtgagcacagcctggaccctggagacattcgggtatgtgccaccctccctgcctcctttcaatgctagcttttaggaactgggcagagggaggactgggccctgccacctgggctatgtgccactgcaagtcctcttccctccaagacctgccctctcccttctccactggcctaaactgattcccctgactctattca

SEQ ID NO: 86240 - DNA, 1034 bp, Homo sapiens
aaaaacttaatgtgttgtctgtagccgttacattatgaatagcacaaaaattgagtaaatattcttccagtatttgaaaccgttttctgactcagcaaagaagttgctcccatcattgacaatccaattaagttttgtctttttcagttttatcaaccaacattcacctttacaattacactcctaggtcaactgcaatcacagtttggctacccatataagagtttggcaaaaatcaatgaaagcattctgtgagaaagagttatatggaatttgccaatttactattaattgtaaattgtgaactacacatcctttatgtcagtaaaacttaacgacaaatttttgtacctatatatgtgcatacattcccgttctccccccagagagctggttgttacacatttatcagtacagcactgggtctagaacacgattcatgtactgattccacaaacattcactgggtgccaggcggacggagatacagattaatgatgaaatgactcagccaaggtcacacatcgcaagcggcgtagatggcagaaccatatgtgctcccaaggccagcggcgcgctcccaggaccagaccatggtttccaaggcctctccactctaccgaatgggatggcctgggcctgggcgcccaggaagtgaaaagcaaggaccgggaaaagagaccaacgccagccaacagacagctcaccgccaataggggccgggggcgcgcgcggcgtcactcgccgtggaggccagcgcgagcacgccctggggaaagtggcgtggctaagcccttccggaagtgacgtcggcttgggggcggtgctcggcggtggcggagcgcggcctgggctcgcgctgggctccgcgcgccccccgcccccctctatgaggcagaggccgcggcggccgttagcgctgtcgctccgggggccgcggcgggcggggctccggcggggcccggcctagtccccaccccagcccggctcccagccgcccgccctccctccctctccccgatgcaggaggccga

SEQ ID NO: 86241 - DNA, 1046 bp, Homo sapiens
aaatacaaaaaattaggcgggagtggtcccagctactcgggaggctgaggcaggaggatcacttgagcccaggaggcggaggttgcagtgaatagtgatcgtgccactgcactccagcttgcgtgacagagtgagagcctgtctcgagaaaatagctttgcgctctctcaaagccttttgagaattctaagtaccagtaagatatagacaaggtagagacaggtacatgagttctaggccgattgatgaaaattccaaacatagacgttgagtttttttcctgcatttctgaggggtggactgatcttcggcatccagtgttacatctgtagcgttggtttacaaagctgtcaactttggtgtcagtgaaattagttaccttgtagtaactgccattgtggtttgtacttctttgggttctcagaaagattggaatgggttttgttgtggtttacgtgatggattcttgagacatactggcagccataaaccaaagctaaagaacaggtataaattgataaccttactgtgaactaagatcacttggggagctttttgaaaagcctaagagtttgaactttttaaaagctccccagttgatcctgaactgggaaccactcatccatagacttctgttttcaagggaacttgggtactccaacaagaaaatgttgggtggatttggctttcttgccctttctgaacagctgtgccatgggcttatcttggggatgaggccaaatccaaactttctaaagaaatcagtgtgttgtccctttaggtaggccagtgtttctgctttgcctcccagtgaattcatgctgggagttcagatcttgaaaagtgggtggctgctgaaacagctttttttgtggtaggctctgtattcgatgctccacttaccagcacagatgaaattttcatcagatgcaggggagggcgggattaaagctatgggtaatgacataggatagattgctaattttcttgtggtttgtcttgcctttgttccatattgaccaggagttcgtctgagattccagaga

SEQ ID NO: 86242 - DNA, 1105 bp, Homo sapiens
gtgttgcccaggctggtctcgaactcctgagctcaggcagtccgcccaccgcagtctcccaaagtgctgggattacaggcgtgagccaccacgcccagctgactccatctctttaaaaagaaagaaagaaagaaagaaagaaatgggcccagcaactaatcaggtttctgttctggggaactgggctagggcttataacacacatatgttggaattcaaagagctgggcttgatgcctgtggtcctcagtgtaatctagcattgctatttcaggaaaaccagtggagttcccatgtctgtttctcatatgttgagttgattgccttcctttggatttggtgagagatctaatttgatctgaccattttgaatcatcacgtaatacacacttggttggaaataggtaccttgttcacttttcaagatttgttttttaccaagttaacagatgaggctattactggctgtcttcatggtagtgaggtggagaaatggaggacggttctgtagtggtttcctatctatttatttgggggggaaaaaaacaaaatatagaattctggaaagagaggcaggctgctttggcatccatttggggccctgctgtcgtggacaggcctggcagacgtgagaaacttttttcactgtatccttgggtcttcaggtctaaagggatctttttgagtaatagcatgacatgctgagagcaaaatgattttatggtgtggcgaggaagttctgattttatgtttgggttttgggtccacacactgttgatctttttaactattttttccatgaagtggttgtggttggcagctctcctttagaacgaactcctgggcttaaaaaaaaatctctgtccatttgagtcctgtgcagtgcttctcactccttaacattctctctgccaacatcatttctaaggttttagaccttggaccatgcctcttggcttttccctggaagttccctctataggttctttagttggtttatgatggagttttggatctgaccttgctgcacagatgtctgtgtattggaactaaaaatgaacacatggtttttgtgcctgtagcacatgaacagacactggcttatg

SEQ ID NO: 86243 - DNA, 1048 bp, Homo sapiens
gaagtgaagttatctttggtatattaaccaaaagatctgggttttcagactggttccctgaaacagcatcaagaagtcatggggagggctgtgtgagtggcagctcagagagacgaatgggccctcttggatgctaggcagagcccctaatctgaggaggcccacttagtagctgatggctttgacccatgccttggggcaattgtgcagaaatcagaggtcttcaaggttgaagactgcacatgcatcctgcagtgctattctcaggtcagaatctgttccttggttcactttgggatgacctatcctataggcaagcccagagggaaactttgctctgagctggtgcctgtccaggttaagagcccttttcttggctcccagatggaaattagctctgcatcagacttccttcctcttgaaatggacttgctaattaccactcaaggtgttttactcttttaatgtactgggtatggtgagctccaaagggatttctcattgctttgtaggttggtgaattctgtagccaaatctatttaaggaattgccttaattatttcattctccccctttattttatgctgtattacaagagtgttgctgacaacgactagggtttgctttatttctcagtgcatctggaactgagtgttgtggtgacttaaatgcatatgtgttcatttctcccctctattctctctctgctttctcactccctaggaaacccaagttgacaagaactcaaagtgccttttctccggtctccttcagccccctgttcacaggtaagggtaatatctttctctcttctgacatctgaaaacaggggcgttctgagacctgttgggaaacacttacagatgcatcacagggagctgtaggcgtgtctgcagttatttccttcattccatgcttagtgggtttggggtgaggctatttttatggtatggaatgtgttcttgactttggatgctttatagttggaggtaaaggctgcttgttggtaattaggtggcctgggtggccctagcagttatgcagtgct

SEQ ID NO: 86244 - DNA, 1041 bp, Homo sapiens
ttgccagcttacagtacccaaggaataaaatgaatgaaatcagcattcttttctacttgcctggcaaaatcattactcttcctgggcaagtaagcgagtcactatttccaaggctgccttatcggcacttcacttcgaggtgggagaagttggaatcgctctaggctggtgaagcccctgaagtagtcaccttagtaaggttagtgagcagctcccctccccctttcttggggtcaagtgcccccacccatccttcacagcttacacaagcccacacagctttttgttccagcccatccagctctttgccactgctttggcttctaccctttccagcttagcttctaatgccttgccctcttcagttagcatcctctgtttttgggggagggtctatttgtggttgggagcagtgagggtaaacaagtgaccaccactgtcttgccctgcagatgcatttccccggattgctcccatccgagcagctgaatccctgcacagccaacccccacagcacctccagtgtcccctctaccggcctgactcgagcagctttgcagccagccttcgagagttggagaaggtaggtggtacctaaggactggcaggtcacttctcctcccattagctaaattctgtattcggacacacctttatttatgtgtttatttatttttagagacagggtctggctctgttgcccaggctagggtgtggtggcataatcatagctcactgtaggctcaaactcctgggccaaaggatccttctgcctcagcctcctgagtagctaggactgcaggcatgcacgaccaagcccagctaaaatttatttatattttttgtagagactggtcttgcagtttcccaggctggtcttgaactcctgggctcaacgtgatcctcttgcctctgcctcccaaagctctaggattataggcgtaagccaccacacccagcccctgtttattgttttcagaggaagaatagtttacttgcttccatatttacagtgacaaaacagtgtgctcctgctattag

SEQ ID NO: 86245 - DNA, 1039 bp, Homo sapiens
aggagttgactctgcttagcagtttttaaagtttatggctttttggggggtttttatttaacaaacatttattttgtaacttaattatcaaaaataagctacctttctgccttcagagaagtcatagtctaaaagaagggacaggaaggaagacaaaggtcagagcacatgttcaagtcagtataaagcatgtggtggtaaccagcaagagtagggtagtcagctctgcctgtggacaagcccgggaaatctcaaagaagattctggactctggaacatcactctatttgtagaatattgagaaaacttcgtggaatattggactcctcagatacagcttatttcattgtacaaatgtaccctgtctgcagatattttaaccaagattcttagcattgtattaagggctagagtgtgtagtgtttgcaactgttaatattgagtgcctgttaaatgccaggtacttggccaggctctttatttaaatatattgacatttttacaacaacctcaaagttaggtaatatagatcaatctattaaaataatatggctgggctcggtggctcacgcctgtaatcccatcactttgggagtccgaggtgggtggatcacctgaggtcaggagtttgagaccagcctgaccaacgtggtgaaacctcgcctctactaaaaatacaaaattagccaggtgtggtggtgcacgcctgtaatcctagctactctggaggctgaggcaggagaatcgcttaaaacccaggaggctgaggttgcagtgagctgagattgtgccactacactctagcctgggcccccaagcaagactctgtctcaaaaaaaaaaaaataataataataatgataatgatgtgtccaacatggtgaaaccacacctctactaaaaatacaaaaattagccaggcatggtggcgggcacctgtagtcccagctacctgggaggctgaggcaggagaatcacttgaacctgggaggtggaggttgcagtcagccaagattaagccactgcacttcagtctgggt

SEQ ID NO: 86246 - DNA, 1486 bp, Homo sapiens
ggccactgcactccagcctgggtgacagaacgagaccctgtctcaaaaaacaaaacaaaagacacacaaaaaagtgatgctagggaggcctttggcagagaatggatttccttaattgtgaatgtggtggtggtgcttctggaaatggaaatcaacagcactttgtggaggggcttttgcacagaatacatatatgaaccataaagaagtcccatttcccctccctaggttctcttcatacaagaaatggtagttagctccattgtttcctctgaatactttcctttgttttctttcttgaaggactgccaccaactcctgtccagctgctctatccagtgtcccgattcagcaatgtcaaatccctccagcacctttgcagattccggatacgacagctcgtcaggatagatcacatcccagatctcccactgcctaagtacaatggggttgtcaggtttgggacaggaatgagtaagggggttgtggggaggtaacaatgtcagtgaggcctgcaagctaccttcacaggcagagtctggcataaaatatttgcagatgtcattcttacacatttcctgtgtcttagcacctaactctagaactgtcatattgcagccagagggaggaaggtgtgtgtgtcagccttccttctgcagtctctaggaagaatagagtagaagtggtaagagtaaggaagacagaactataataactgagaaaatggggattgtgttaggtctcaaccatgtagggagtgaagaagagttgaacaaaggagttacttcttttatattttgtataaaaaccttttgtgtatatccgtcatttgtttttcacagacctctgatctcttatatccgaaagttctactactatgatcctcaggaagaggtatacctgtctctaaaggaagcgcagctcatttccaaacagaagcaagaggtggaaccctccacgtagcgaggggctccctgctggtcaccaccaagggtatgagctctctgcctcactgcccagccacatttcttcctgggcagtcatcatcatgcattgagccttgggccccctccccacaactcccaacatggatagccccgatccaggcatttgcccatagaatgacaagatctgaccgtggagtcctcaaggggcacacaccccatttgggagaaaagcagacagacgagaaagacatgaaagtagattgccaggaaacgtgcaagctaatcactgaatgtgagcaaggagggggacacccaagtgtagctaagagtgcggcctctggcaaggagagggtaattgaaaaaaataagaagaagagtgcagcctcctctcatacagacttgggctgatctccctgatactgcacaaatggcatataaagcaggaagctaaagggaaaggaaacttcatcaaagagaatgcaaacatgcctttaattgcaacaggcatgcacttcagtgagactccaccatgtcccaca

SEQ ID NO: 86247 - DNA, 1056 bp, Homo sapiens
ggaaacttgcaccattacctgactgtggaagggtggcccacaagatgagctgtgcaccataaacacagcccacctctgatttgtcatgtggtacctcttctttccttggcttccatggtagtattaccaactaagcaagattgtgatcccagaaattggcttagcatgtgagtgttgcctcgtgagagtacaagtaatataactcgccatcttgcaggaagtgccaccccaatatagagcctgaagttggaatctgttgagatccttgggtggctgatatacagcctgggatctttcttttttttgttccttttcaaccacccataattttaatattattttttagtgtgtgtgtgcctggctttgcgctagatattgtagaaaacaaaaaaggtaaaagacgtaatatgtggcctaagggagcttttaggtgactgctgcacatcaagcagaaaatcaaggactatctaaagacgtttatagtagataagatcagggtagaccagatggtctgggaaagttctgtgcctctgaggctttgggttgtagtcaatggcaggacagacagtgagatgaaaaacacatgagcaaaagcaaggaagcagaaatctgcatggcatgtactgaacagtgcacagccctgttagagcaacatggttaaagaatcctttccagtgcggttttctagatggaagcttcccagccaccaggcagacctgagtgccgaggggttatgatggtgaggtggagcccaaagcccaaaggagtcagcaaggctcctgcccattgccagggcctcactatggtcagctcaggccatgtgagggaggcagagcctccgcaccccctgtgttactggggtttcttctggagaactcatacattcaggtacaaaacaaaccaactgaggaggtgtgacccaacctcaccacccacctttctcctcctggggagtgtcgtgttgaactgtgtctgtgtcagtgcactggtcccagccctggccgcagcctagtcctttctctgtggagtgggctgcaaaacagcagcgcaagagga

SEQ ID NO: 86248 - DNA, 1045 bp, Homo sapiens
gaggaacaggtgtggcagcacctgcccttcacctccctgaccaggcccgtccctccttcgccagtgctgtgcagagctcatttaaatgtattcctttctaggtctgggcgcggtggctcacgcctgtaatcccagcactttgggaggctgaggtgggtggatcatgaggtcgggagttcaagaccagcttggccaaacagtgaaaccctatctctactaaaatacaaaaattagctgggcatggtggcatgcgcctgtagtcccagctacttgggaggctgagacaggagaattgcttgaacccaggaggcggaggttgcactgagccgagattgcgccactgccctctagcctagacgacagagtgagactccatctcaaaaaaaataaataatttctttctggttgtattttcaagtcacaaattggaaaaggcttacatctagggacccactgttgattcctaagttgtgggtgggtgatatcagtggcctcagtgcctgcataaccctcacctgtttatgactgatctactgtaaccttcctcaggttgagagtgagctgctgtgagccagtgacaactactgctacaacttgctgttacttgaaattcgtgtgctatgttggtagcacaggagtaggcgggcgggggttttggtgtgggcactaggtaagtgggtggcaaccggctctttgggaccattggtgctgacctttgcctggtcacctgcctgtgcctaggccaagtgaatgttacatcttggaacctgagccatggaggtggcgccacctccctgaggagaaaggtgtggccaaaggaaactcctgcatggctcctgctccttccccttccctacatttcacttgggctaatgatgtaagccccccttgaggttggggatggtgtggagatagctgcagacacccctgtaacagacatccaggaagaattagggagtgggggtaattatagttcctaggtctaggggtgagaggtgggagtagaaccagaagtgccctggaatccagccgtgtcagccctcac

SEQ ID NO: 86249 - DNA, 1110 bp, Homo sapiens
gttagatctttcccttccctgctgcctcgctcccttagctttggagccctaaagttagtggacaagacactgggataaagctctatggctgctggaaggaggtctgagtctgtgtgtgtgcatatgcatgcatgtgtgtgtgtgtgtgtgtcctcatttgcagaagtcttgctaccagttagggtgttaagagcatctccactgggcggagacctggcatttgttttccactgttaagagaatgacacaccccctgtcatgtaagggaggagctattgagttagacattttccctatgggaatcctcggtttggtttgtgggaaaggagggaatggataagtgatttttatctctaatcgtcaacacagctgttcttccactgaatttgtgctattgcatacatgtagccatctttcttttcactgcagcagtgtttatcagtagttcaaaatgatttatttgctcctggggagtaaaaccttttttattaaaaaaagaaaaagaaaaaaaaaagaaagaaaagtgtgcccccctcctatgctgcgatagctataaaatgattgggtcacaaaggtcaagtctgcacgtccctgtggtagaccctgctttcacattggagccttcacactcagcacaaaatgattggaggccttgataaaatggagagcaaagtcttgggagcagtgaaatgggggttggatcatagagacaggcgctggggactcgggtactgcagttaggaaagtagcgttatgagttgtactgaaaatgttgattctctaatctgccagaaaaggacctgtcttttcatgcagatttcatattgtctttgtccttttcattgcttcttgaccttcctggcaggtgtcgctcagtttcttcctgtttcccttcctgtcctctccacacctgctatcccgtcccactcccatctacctcccgggaagccagccctgcatgctgagtttgtgacctgcttcattcccatttcatttctagagggtttagaggtgacctggaaccgttccctttccctctcctaccccctcctctgcaacaccaagaggcctggaggggcagacagaaagcagccagccacggcgggaaga

SEQ ID NO: 86250 - DNA, 1027 bp, Homo sapiens
gggacgtcctccactaaggcgtccggacaccccctccccgcgccacactcgccccctgccgggtcggactgcgggacgggttgccaggcgcggttccgccgccctcctggatcctggggaagttctagacacaggcccaggaccccgggctctgccggcgaggctgccctcccctctgccctctccgaccggctgtgggtgggtcagagcgcggggtgccaggggcattactcagcgctgggctgctctgcctgggttctttcatctgccagctgctgaggctggggaggggccagcaggggcctcccagccccatccccccatcagggccattcccttacctctgagcctggctgcccgccctgcaggagccccccagcaggcctccctgctcctaagttgaagggttgaacactgtcaggccaacagtttccctgagctcggaaaagaaattccccggggtccaggttgaggtcaaggccagggctgaggcctgttcctctttagacagggctgaaagacttggggaccctcctccccagctttcccggcagtgttgaaggtgggatctggtgcttgcaactcttttggagactggtgtgttccttggttgctggatgtgtgttcagttctccctcaatctgcatctctccccgactcccttcagccaaagtgtgtttcctaattatgaacttgaaattcaggatggacggggggtgggggtggaggtcatgaatccaagcatgagtcccttggattcaatcccccaccagcaacacatacttcatctctatcccctgcacccctctctgtctccaccccaaccctgcggcctagctgggggtgagtggcttttgatcccatgtggttctcccctctgccagggcaacagaccccattccccaaagtgacagctctcactgccatgtgctccttggcatgcgatttgaatctcgattatataaccagtcatttcgcctccaaaggcagcccaaaggcccccggccccagcggcttcttccacttg

SEQ ID NO: 86251 - DNA, 1120 bp, Homo sapiens
acttcattgttttagcctcggctttcttttattcttttgaggcagggtcttgttctgttgctcaggctgaagtgcagtggtgtgagcttggtacactgcagccttgaactcctgggatcaagtgagcctccctcctcagcctcctgagtagttgagactacaggtgcatgccaccatgcccagctaatttttccattttgtattttttatagagacagggttttgccatgttgcccaggctggtctcaaaattcctggactcaagtgatcctcccactttggcctcccaaagtgcggggattacaggtgtgagccaccacacctggctggttttcttatccctgaaataatccctcaaaattacagagagggctaaatgaggtagtattggtaaagtggctgagatttagtaatctcaattattggtagcaactattattaaaaaaaatcaatggatagaaatgagaacaatgcacttttgcctcagtaaaaagtactgacctttatggtcagagcaatctaaagagaaagtgacctgcctctggaggtaatgaggcccccatcactggaggtgcagtgaggtctgggcaagcacaggctggagaatgatgtgcactagagagaattcagcaaaggcttggcacaggaaactttaagggccctgccttgggatcagcactatatgataggaaattagaggagcaggtgaatcctacttcctactgtggggcattgaggagagcaggcagagatgtccccagcctctgggaacatcaggggttggctgctatggtttggactgtgaggctccccagaggataggtagtcctgagaggctgcctggaggaggcctgcaagggtgggtatggttctgataggtgggaaaatgtgggattgtattctaggcccaggaagggcttggtggccgagggacagagaggagcctgggccactggtcctgaggttggccccggggttgcgtcatcatcctcgtgcctcagtctcctgggctgctgggattacaggtgtgccactacacctggctaattttttttatttttttagagacaaggtttcggcatgttggctggcatgttggccaggctggtctcgaactcct

SEQ ID NO: 86252 - DNA, 1848 bp, Homo sapiens
tggctcttgctccccagaggcccctggtggacacccaggcccccaggttattcaaggcagagtgccttctctggcagccttcctgctctgccactggggctttcgctgggcagccataggacactcctgcatccccatccagaggccgtgatgagggaggagcccgctgacctagagcggcccatttctctgttagcttagagttagcagcacttaggagcagagaaactttgttggggtgcaatgcgatttgtgcccaccctaggggcctcggacctctgcttggagtccctgagcctggggaagggaggaggtgggggatgtgagtattaggtgtcttgctgggtctgcgggagtgggcatccctgtgaggagggcgtctgactctgccacatgtcttcagaactgttatggcctcttgtatggcgccctttcctctgtctcgtgacttgtgtgtgctgcacatgtgtgtgtgagaatctgcctcccccactggacagggagctctggaaggacaagggctgtgcttgttcatcctttttttttcttttgagatggagtcttgctctgtcacccaggctggagtgcagtggtgctatccgggctcactgcaacctccacctcccgggttcaagcaattcttctgcctcagcctcctgagtagctgggattacaggtgcccgccaccgcgcccggctaatttttttattttttagtagagacagggtttcaccatgttggccaggctggtcttgaactcctgacctcatgatctgtctcggcctcccaaagtgctgggattacaggcgtgaaccaccgcacccggccttttttttttttttttttttttgagacagtgtcttactttgtcacccaggctggagtgcagtggcacaatcccggcttaccacaacctctgcctcccaggttcaagtgtttctcctgcctcagcctcctgagtagctgggattacaggcatgcgtgccaccacacacagctaatttttgtatttttagtagagacagagattcaccatattggccaggctggtctcgaactcctgacctcaagtgatccacccgccttggcctcccaaagtactgggattacaggcgtgagctaccgtgcctggcctgttcatcctttttagtgtagtttttagcacatgaagaggacacaggaggtgtttacggagtgactctttgtatgtccccataggttttctttctcccaggtctgtgtcctcctgttgggttctgtgcctccatggacctgtccagtgtcctcgtggatgtttgagcctgtgcatgtttgtgaccggacgagtgcaatcattctctgagtgtgtgtcccctgtgtgtgtagctgtgcatgggtgtgaccttccccagccacccccagctaacctggctgatgcccactaggaccctccccccggtaccgcctggagcccatggacaccatctttgtcaagaatgtgaaggaagacggccctgcccatagggcggggcttcgcacaggtgagctggcccagttacctgggctctactttctaccttctggctaggattttattctcagatccaggtgttggggaggctcctgtccccacagtgttagccatgcctggtacaggggttctcagatggggcctttgatgccctttggtcaccactcatgcgctccttgtccccaggagaccggctggtaaaggtgaatggggaaagcgtcattgggaagacctactctcaggtcatagctctgatccagaataggtgagtgtccctgacccctcgtcccatattatctcccctcccctttgccctggggatgccctggagaccagga

SEQ ID NO: 86253 - DNA, 1049 bp, Homo sapiens
ggggcaaggagtgggaagggcagtagcctcaagttctgctgcccaggctggggtgggctggcagcgccagatgacagcatctgggggcctccactggcccccgcatctctgccagccggagggtggggcccaggcattcctgtggttggaagccaaggctggaggccaatcgggcctcggcagctgctgacgccaccaccgacgcggcgaggcccctccacacccatcctctcctccctcctcctcccgccagccagccgagagagagtcgggtgggggtgagggggagccgcagggagggcagacggagggggaccggaggccctggccagggcaacacagtggtcagtgggggggttagccggagctgggggtgggcggaggcgggctgggatgctgccgccgccgtgatgatgccgggagcctggggagacggcgggatggcaggagggagaggtatgtgtgtgccggccctgtgccagctggagggggctgagtgtgcgggggtgtggtttagcttgtcctcatcacatgatgtttgtgcctgggactggaggtgtagttatttgtgtgtgtttcattgtgttttactgtgtgtgtgtgtgtctctgggtgtgtatcttccagtgtctcctcgtagtgtggtgtgtgtgtgtgtttggtttcaccctcccaccctttggttctttgccttgagttaggctcctgggcagctcagcaggggccaggctgggcccaggccacaaggccgctgtccctgggagctgactccttttttggctgggcctgggcgctggccctgtcactccttagcaatgcagcgtcagcctcagctcccagtgccaaattccaggcccaggggtggcagaaggtggctcaagtcccctccttcaagcctggcaggaggtgggcaaactccttctcacccctgtggctcaggagccagctccccattcccggggatggagggacagctgggctctgccagcctctgccccacccagacacacccctagccggctttcttctctcatctgccaccttgactg

SEQ ID NO: 86254 - DNA, 1031 bp, Homo sapiens
gggcctggatgacctcgggtacatcggctaccggagctacagcccatcattccagcgccggaccggcctcctccatgcgctctccttccgggactcaccctttggggggctgcctaccttcaacctggcccagtcccctgcgtcattcccaccagaggcctccgagccacccagggttgtacggccggaacccagcacccgggccctggagcctcctgcggaggatcgcggcgatgaggtggtcctgaggcagaagcccccgacgggccgcaaggttcagctgacccccgcaagacagatgaaccttggatttggtgacgagtccccagagccagaggccagtgggcgaggggaacgcctgggcaggaaggtggcccctttggccaccaccgaagactctctggcttccatcccctttattggtgagtgatggtacatgtggctgtcctggaggacttagctgtcggctgtctgtgtcctgctgtaccccatctgcctgtctgccatgggcagaattcggctgggtgctggtgggatcatcttgtttctctgtcaattcattcatctgttcatccatccatccatctgttcttccatctttctttctgttctctgtcatcctttcttccatcctacctctcattcatttatcctttcagcatctttccatgcactctttcttttttccctctccccatccatccatccatccatcatctgttcttccttccttctttccttcctctctccctcctttgttcattcatttgttccatccattcatccatctatccatccatctattcttccttctttccttcctctctccctccttcttttgttcattcatttgttccatcctttcttccacccattcatccatctttctttcctttgactcttccttccattctcccattcttccttccatcttccctttgtatctttccctctttgtcctttccatccaccctccatccctccatcgactcaacagatatttgtgtcaggccctgtgcatggctccatgc

SEQ ID NO: 86255 - DNA, 1053 bp, Homo sapiens
caagggtctcattagtcactggggttggcttttgagagcagagggaaccctctaaggcttgccttgccttcgactggatgcaggagagggagaggcaagagagtagagtggctgggtgatgcccaggtttctggccgggcttgggggtggtgcctcacccccgtgttgggagtgagagggggacaaagttcaggactgttgaatatgaggtgtccaagagggagcaggatagacggggctggggagaaagagcaagatgcagggtaatggagagggatggtggtagatgggagatgagctcaccctaccagacagtgagagggaggaggcctggggcagggggaagacacagccctggctcccccagccagccttcggtggagcagagacacagccccttctgctagtaaggaaggctctaggctgtggccgggagaggcagtctcttcttccacagcgcagtctgtttgagggggagatgtcatctctgcccttgaggagccccagctgatgggggagcttttgcccttaggaagctctcagtctgatggggaagacactgcccctgccctcaggaggctcttggtctgagaggggagacataattcattctctctgagtgccctcagtctgatgagggagacaccgtccctgccctcagcaggctcccagtctgatgggggaatattggctctgtcctctggagcccggtctaaggagggtggctcagccccactcctgagggtaaggattccatggccacagtctggacagtgggccagtcatgcttgacagtgggcatgttgccagcaggaccctttgggatgtgtctgagcctggaggcgagtggcacgggggctggcaaggctagggtggaggcaggcaggctccgctgtctgctgccttcacacctttctccttccacatgcatagatgagcccaccagccccagcattgacctccaagccaagcacgtccctgcctctgctgtggtctccagtgccatgaactcagcccctgtcctgggcaccagcccatcttccccgaccttca

SEQ ID NO: 86256 - DNA, 1060 bp, Homo sapiens
ctggcttctcctttatgtacgtctcatgacctcaacacaagtggtccagagaggacaagcaatgcccatgaggtcgcacagcacatcggggtgtagcacagacatatatcaggcctgtgcggccacaagtggtccatggggttcctgagatgctggcattgtgggagccaccctaaattgtcctctgttgtctccctgcagtccttggatagctggggcacctctgaagatgctgacgctccttctaagcgacactcaacctctgacctctcagatgcgaccttcagcgatatcaggagagaaggctggttgtattataagcagattctcaccaagaaggggaaggtaagatgggtggaggaatgaggtggaagctggctccagcagaaccctccagcctctcctaggcctaccctgacagcctctggagccagagagaaccagtgtaggttgttgcatgaaggatggaggttagatgctaggaagaacttcctggcagggggatttaaagaacttatgtaaaagaagttaacaagagaggtggattttgctgtgggatggatctgatcgagtcatgcttggaatattctggcaaaaccatcccacacgggccctggcttgacaggccatcctgaagatggccgctggggctcatggaaaacaaggagcaaggccggggtgatttccgtaggagagctaaggcccaagaagacgcaggcaagccagcaaagggcttagtgttcatcctaagggcaaccaaaagctctcgggggctcttgccaagggagttacagctttaaaatattcatttggctccctgggagtgagttagggaggggccatgctggaggcaagaagaccaattaggagccaccgtggagatccagatgagaggcgaagggggcttcggggagtagttggggagggcctgggagggaaccagcaggactctgagaggagaagggcagggcccctggatccatggggtgcaaatcctggccccaggctgcgctgtgggctggagaagtgggaggagagaccactgccttccctcctggcg

SEQ ID NO: 86257 - DNA, 1085 bp, Homo sapiens
atttgggcctcctcctctgggggcctctcttggctgtccccaacaaggcttagtcaggggatcccaagtcaccatcactatggcagtagcagtccctcctggggcacctcctccatgcctgctcagtgtctgccaggacggtggcgagtgctgcatgattctgcacccggccctgagccttccctgttagccccccatgtttattaccgaggagactgaggctcagagaggctaagaggcttccccaaggcctcagctggtgagagggtgctggggagtccaggcctggtctttctcactccagggtctgggctgtccacctggcaggtggacaagaggggaagcagggctagggatgagccctggggtgggctggctgtgggcactgacatgatccgctctctcctctcctgcttcaggaccccggctgtgccaaccaagctctgatcagcaagaagcttaacgattatcgcaaagtgaggtgaggcccagccctcgtggagcagtctcctctgtgggggtggtagggggctgaaggcaaaggatgtcttcctggcccacctccagggctgccctctgctgggggaaggggtatccagggtctccaggctgcagttaggcatggaggcattgcctcagggtggaggggaggtcccgaggggcgggaggccagggtgggtggcctgcttggccaccccaaatgaagacctctcctctccccctttttcctacacagccatagctctgggcccaaagctgattcctcccccaaaggctctcgcggcctggggggcctcaagtctgagttcctcaagcagagtgcggcacgtggcctcaggactcaggacctgcccgcagggagcaagggtaggaaggtggccactgagacagggtggtgtgtgggggcagggggcatggggaggggagggcacgcgtgtgtgtgttgggctgtgtctgctcatgtgtgcctgactgtgtgccagggctaccggtatgtctgtctgcgtgtgcatgcctgtgagggtctaggggctctcagggtctcggggtggaagggcctggagcctgattcccgtccctgacat

SEQ ID NO: 86258 - DNA, 1037 bp, Homo sapiens
cactgtgcttggcaaaaaaaattttttttaattagccaggtgtggtggtatgagcttatagtcccagccactcgggaggctggggagggaagattgcttgagcccaggaatttgaggctgcattgagctatgatcataccactgcactacagcctgagcgacagagactctatctctaaagaaacaaagttctatggcttccgccttgtagttttggcccacgagccacacggaagtccttgcattgctctgggcctctcctttggggtaagcatcctccccttcaggccttctctcttgccatacaatgtcccatcagccctgggcatctggtttcttctctgatggaatccccatacgtccaaatgtgtgaatgtggcagtgaatgtgtgtgaccctcctggataccccagctcactctggctctgtctcccccacttcagatgacagtgctgcagcccccaaaaccccctggggcatcaacatcatcaagaaaaataagaaggccgctccgagggcgtttggggtcaggctggaggagtgccagccagccacggagaaccaggtgagtctctgccacacgccagagcaggcccagcagggggagaccgaggcacagagggtcagagcagcaagggacatggaaccagctctccacctcattgtacaaacacagctgggaaaacagcccagagaggggaaggcccccgcctgccccgggcctcccagggagggagcagcagggctgaggctgagcccggctccttctcagaccatggcgaggctttggtgtcatttttagctcccagactggaggcagcaagggccttttgttccccccaagggttcctggcagcagctctgggccttgcattgtccccttcttggcctccccagctcctctggcccctgtcccccctaacacccctcccatgtgtccccagcgcgtccccttaatcgtggctgcatgctgtcgcattgtggaggcacgagggctggagtccacaggcatttaccgagtgcccggcaacaatgca

SEQ ID NO: 86259 - DNA, 1051 bp, Homo sapiens
ctcaggaaacctccaacgcctttctcctgtcatttccttttctgggctgagtacgtgacacccctgttgtcagtgtggcacccatgggtggcaggtggcgtggggcacactcggctgtcacagccatggacctggccaacactaatggcactggtgcctccctgccccccggctcgctgtggggagtataccacaggggtgtgcccaggacagtgtttagagaaaagcaagtaaaagcgaagctctccctaagcctatctcctgtctgaggtgaatgctcccactccctgccgtgtctcctcccacactggggtcccaccttttctctcccccagggtttttcatagtctgtggagtcaggttttagggtccgtcaagctccctctgagccctcttttgcagccccgccagcctggggtttgttgagagagaggcgccccttgccacctgagcgggtcctctggaatgagcaggtggaagagactcttctttcccatgctgatttcatcccttccttttgtcttctctgcagtcagactggttcttcagtgacgaagaggacaagggagagagagtaagtgatgccgcgggctgggctggcatgggggctggtctggggtgagccccagtccttgggggtggggcaggcagcgggacttaagccggggaaggtgtctgtccttgaggcttccctcaagtctggtggaggaaacacagaccctctcctcaggagcccctagtctgatagagaagcacaaagcttgccttcaggaatccccagtcgaaatgggggagatataggccttgctcagagggaacccagttcaggagtaaaggcagctcctgccctccaggctactgagaaggacttaggttggaggagttccagtctggtgcgggagacacagctcctgcccctagctgaaggggccgctctggccttcgcggttcccaggtgttgaggaaggcacaaaactgtctaataggggacatgtaggaatcatcctcaagagcgcccggctgatgagggagacggtccctgccccagtga

SEQ ID NO: 86260 - DNA, 1003 bp, Homo sapiens
ctggttttctcagaactaattaatgtgagagcaaggacagtggctgcagtggccacaagaggcatctgggtctccattcattattacaccatggctgaaacaagaggtggtctgtgaggaggggttgaaagggcagcgtgaccttgtcaggtcattccagcccaagacaggaaccagtcccagcgtctgcttctacaaggcttcctgtgttaaggggacttcattcaccaattgtttgttcatttcatgtttattgagcacctgttatgtgccatgcagaaacaaccaagtcacagcctttgctcttaaggagctcagagtttgatgaggctgatgtgagaagagctaggagcatagtgagatgacaggaacatagagaagtgatctcccatctcaggcaaagggagggctgggaagtggctgtacagaggaagccatgttcgagctgggccttgtagggtgagtaggagctcatccagcaaatagggcagggggacattaagggctggcagcaatgtaacagtgtaggtcacatcaaaggaagggttggtagggctgtatttccacagtgagggctgtgttggggttggggtcagggcagagcagggcagtaggctgggaaagttggggctgggttatgaagagccccatgtgctgaactggggaacttgtgctttatcctggtgggtgctggggcatgcaagcttctgagcaaagctgggtgaggatcagattcctgcttcagaatggtggctctggaggagagacccgggctggggcaagggtggaggcaggaaaccctattaggaggggcaggagggcccagagagggcagaatgagggcctgccggaggaggaggaggagttggctttgggagccatttcaaaagaatccaggacttggctgtgggtggaggagagagggaggagtcacaagaccgccctaaggtgagcagtgtgaatggaggcagtttggggcaggggtaggtaggatgctgtggtt

SEQ ID NO: 86261 - DNA, 1050 bp, Homo sapiens
ccagcctgcacctcctcttctgtggcccctgggtgcatggtgtgggtggagggcgcagcaggcagtgtctctagttggtgtgctggaactggcagggcagaggagaaggctggggccggactaattgaatggaagggggttccagaggtgatgagcagaagaggagggggcgtgggctgctggggtctgtgtccctgcacacatgcgcccgataggtccttctgagcctttctgtggctgcacttggggacccttgtggaccatggggtgtggctagggaacccctaagtttcagactaaaggaaagatcctgggtgatgctggctttttgcttctttcttctgccctcccacctcagcttgtaagcggggatgtgtgtatgtctggggagaggaggtgtagggtgcgtatgtccatggggggaggggcttgtgtgtgcagtcattgtcccaaggtgtttccagtagcgacttctgtccccctatccccaccctggtccccactttgcgcccccgggctccctgcctttggtgcacacaggatcctgcccgccccccttgccagagccagagaagggggttggggccattccaaggaggcaggactgaaaccctcaccagggttactccccaacatccttttgcctgagtcaccctctaagcgctttaaccacgggcagctgcctgttccccagacagtttttggtggggggggtccagggtcccccttgctggtacctccctcacccctctttttgtttttccatctgtgcctgttccttccacagcccaggcacacagaagcccaccttcttccccttaggaggagggatagtcaacacccctgctgtctctctgtcactcacacactgatttatggggtctgagctgggctgttcctgcaggatggacaggacccagcgccctcttctccccacaggctgtaaatagacttccaatcaccaggccagcccccacacaccctcactcattccagggaagcccaggtaggtggtgaacccgctgccacgtctatcagtcctcttgtttt

SEQ ID NO: 86262 - DNA, 1014 bp, Homo sapiens
cacctctaactgatttcccaagacctgggggtggggagggaactttgtaaaatgcagatttgattgtctctgtgtgtgtcacacacacacacacacacacacacacacacacccctgccagcttaaaatccctgccccggcccctggcagatgatcaacccaaatccttcatgtgcggcccagggcccttcacagcagcctcagctcaccctgcccctgcacccacaccctcggtgtgctccagccatgcgggtcactggtgggacacgatccacactagctcagcctgtggccttggtcaaagccctctgtcttctcaggccctttcttcgtctgtacaatggggacagaagtatccagcctggtcctgagctcacataatgccaggtacaggagagagcttggaacaccacagtgagctctacggtggccggcgggggtggggattgggggggcggtgcccaaggcctctccttcatccagtgagtccaagctgtctttgataatgttgagatggaggggactagaagtgctgggatcagggacacagaaattgggagtaagaaagttctaagatggaggtgccttgcagcagtgcctgaccccacagagtagtcagaggaagtgactgaggagaagcccgtgaatgttgtgcttaagatcccagggagggacgggagccaggttcccaggcgtgcaaggatcaaggctttgtgtagacctgaagctatggacaccccctcttctattagggctaagaaatttgctgaacaactgcttatcttctcagatggctgaaatgaagatactttttttttttttttttttttttgagatggagtctcgctctgttgctcaggttggagtccagtggcgtgatctcggctcacggcaacctctgcctcccgggttcaagcgattctcctgcttcagcctcctgagtagctgggattacaggtgtgtgtcaacacgcccggctaatttttgtattttcagtagaggtggggtttcacc

SEQ ID NO: 86263 - DNA, 1017 bp, Homo sapiens
gggccgatgccatcccaggccaccctccccaagggtgccggggccacaggccagcacccccatcctccctagtgccccctcctccaaacctgcccccaccttctgctccccaggtgtttgagagaagctcagtgtcttccctcccccccacgccccgccgccagctgatccccaccttgctgtccccccaggacctggggccccccgggggctcagccccaggccctacacggaaggtaacggggctgctgccacttctcacagctctctctctgcctgtgcccccacagcttcctctcctcacctcccacgctaacccgctaaaacgccagtcaccatcccaagtcccaccatggccacagccactgccacagcattacatgtggactcacccctcccccactccaaggacaggcgcataacccttcctccccgctgcttgctggggggctccctgagactccagcagcctgggtgtctggtggccccttgtgtctgcattttctcacgggcttgctgatggaggcctgagtattttgttctggttcgcagtttgagcttaggtctggcccgaaggctgagtgtggccaagattggagtttggatcttgctcacaagatgactttggatccagctcaaaatctgaccttgtcctgagcccttgcctagcccccacctccatcttcgctgctctgctgcctgtgccggggaggggctctgtttttcccctagaatctatgccttgcgctgggggccaggacaccacaggggtaggctcgtctacagcctcactagcccaagggcctacgatgccctcttggacagagagcctggaatggaagaaagctatgccattccttggctgctggttcttttggcattgggaaattcttccttctctctaatgtcagtccttgctgctgtcctgctgcacttatttcctctttattctttcctgggaatttgggggtgaacctgctgtctgcaccctacccctggggactgtgcttggggagg

SEQ ID NO: 86264 - DNA, 1050 bp, Homo sapiens
ccgcatggctatggcttccatcatcccggaatggggacgggactggaatgaaggactcaagcgctggcatttgatagagcttctatggctgggacaggaagactaagttgatgatcgatccaaccctgttccaagcctgaatggcgggggtgggcaagatcttacccgttgcccagatggcaattctctgccccctccccagcctgtctctgctaattatcctcacctgacggcccctgggcctgcttgaggagcggactcggcgatgccaagctcctgacaggtgggaccatctgccaagcagggccggggagactgttggggctcaggagggaggagctgagaggacttgggggaagggctctcgctgactcagggaaagggatgcagggcaggaaggaactggaactgccccgagggatactgacgacggaggggctcagtgggtgactggggctccaggagggcgatggggactcagggaaggagaaggagggctcaatgagggggtcacgggcgagggataaggccttggtgaggaagtggaggttcagcgagggagcggaagctcaagaaaggggaaggggagaaagggttcggagagaggccagtgagcggcgaaggactcgggcgtggaagctctgggaaaaggatgaggtagtaggggatggggcgggacttgcggcaagggacttctaccagtaggtgggcgttggtggggcggggcccaggacggggcggtacctggagcttgcgcaactgctggagctggccgcgcaagtcactggcgctgttctgcaggcctcgcaggtgaagctgcatctgcagccggctaacggcggtaggctgacctgcgggggtgctgctggccgagggcgggggcgggccggacaccggggtggccccgctgctccggccgcctgacccacaggctgcagaggaccacgaggatgggagaaagtgaacaaactgtgagcctgggaaggactgggctgggacaaagtcctccctactctccgaccccacacagtagccagagaagcccgtggc

SEQ ID NO: 86265 - DNA, 1036 bp, Homo sapiens
gagggcccttgtcctagggctgagtgctgagttccaagggtctctaacctgcccctgcccctcttttcccctcctgggccccctcataaccatctcttctcttatttccatcagcagccaaactactggagtttcaaggtcagtgtgtgatgcctctgctcccatgacaactgcatgtgctctccctcccctgcccctgcctctcccttgcacaggctttgcaccggggtgcgcatctgcacggacaccttctggtatgggcggtgggcctcggggctgcaggctgtggctgctgctttgggagagtctgggttcgcctgtcaggggcttgtggatggagtaggagtttgggccacccctgctggggatctgggctagagatgctcagtccccaggcatccccagcccctgaggggcattttgaaatgacatacattttccccagcctggagagactgctgcctctgagttagggacttagacccttgttgtgggccctcttctttgaattcatatctcacctcccagggaggccctgtgactgtgatgggtcccccttccttttcttactgtccaccatgggggctggtccgtgctaggcaggagactcatggtcctacaccctcaagcctgttgtctaagtggagggctaagctgagggataggtgccttcttgcctcctcctgagctctggcctttccagagctaagacagctgtctgcccctcccagggtatcctgttgacccctgggagagcaccctcaggcacctgcttgcctcctggagtctctggcctcccaagtcccaggcatcatgacagcgggtgggaggcatcccacccagactccccaggtgtcttatttgcatgcattcttcctagcactgcaagaagtccttgaatcagagaatcatggagtcaaagtcacactgtcaagcatagcctctttggaggaggcagttgagggtagtggttaagcgcatggacccaagagccaggctgcgtagtggtgaattccatacagtctgctgctaacta

SEQ ID NO: 86266 - DNA, 1035 bp, Homo sapiens
tctctctctctttctctctctctccccctctcccccctcccttccctgtctctctccctcttccctctctctcgccagggacccaccctggaaaaagggtttaattagaaccattgattccttctttggctgtgggcatcgacagtgtggtcagagctagagggtgggggtggcatggctgccatctgcctatgccaaccttggaattctctgccaaaaccccagccctggaagtgcttaggagggaggcggctgggctctttgaagtacccagtttgttgagcccccacccccaccccaggttaggttttggggaaagaagggagacagtgttgaggatttgaactgagggagctgagtttggggctcaaggaagaacagttcatggcgtctgtcatcctgggtagcaggcctggggcacatgaagaggcagctgtggtggggggtgctcttgcaaaggggcctgtgggtgctgggcaggcagggagttcaggggaaggatccagggcttgccataaaagctgctctttcgaggaatctcaagcatttatctcctccaagccctggcaaggaaatctgttttctttcttcatttatgtccttgaggcccagagagggacacagactgcctcagaggcccagcagacttaggtctagctttaagcctggtttcctgacctagggacccctgcttgggcacaagctgctgagggtgagtctcctggtagctgaggctctggactctaggatttgtggggggtgggggacaggttgtgccccccaagtcctggctgcctgctgtgggtgggctggtgcaggtgcaggcttcaatgaggcactcagatgctctttgaagaatccctcactggcttcctagggcccattcgagcaaagataataaaaatctggccgtcagcgggtttgagggctgtactcgcttccccttctttcattccaagctctgagtagcggagatgaaggcttcggatttggctgggaagcagtgcctgccccgagggaggaagggagggaggc

SEQ ID NO: 86267 - DNA, 1033 bp, Homo sapiens
ggcaggggagggcgcccccagctggggagggcatctagggtgagtgagaagatagggaaggcaggcggctgaggggtggagggtggggctgggaaggggacgcaccgtggccccccctcccctcccacgcacccccctgctacgtcagaagctcccgggccagctccgagtcctgtcggtgggggcagcaggatgctggtggaagcagaggggacaggccgggtgcctccgcagctcagctgtcagggcccggcggggcgtgtgcggctgctggtgctcgtcccccagccccacgcgtccccatgcagccctggcagtgcctccggcgctttgccctggcctggtgggagaggacggcggagggcagagcccgctctcccagggaggaggctggaccgagggaccctgggggccgaggggagccaggtgagcaggcgcggggaagtatgcaaggagggggatcttcccagcccccctcctcaaatgttgtgggacaaggaggtcctgcagcaccccaactttaaggaaagtgggctccccgagctgggggtgggggtttctggcagcagcctttcaaaaggagatggaggagctgctgtctgttttggggaagggagaaacaggtgaggcttgggagtgagggaagctgaccagacttccaggtttgtgggcctgaatgttcctttgggtggggtttgagcacttttggggggtcgtcaggataccttcttcccgactcttggtatcttggtctgggtgaccttgagccaactgctttgctgtctaattccttgcctcagtttctcttattcccatccctttccctcttgttgatctttaaaaattgatgatgcatttgatggagattgtgaggctgtcgccactggtggcagctgtgatggtggtggtttctggtgtggttgtatgtggggagcagctatggtgcatttgaggggttttgctggttctggttggtgatgggccactccatacaggtgtcagggacatgggaaggaacattcacacaggaagg

SEQ ID NO: 86268 - DNA, 1004 bp, Homo sapiens
gtgagccgagatcccgccactgcactccagcctgggtgacagagcgagactccatctcaaaaaaaaaaaaaaattgtttacagagtctccctatgtttcccaggctggtctcgaactcctggcctcaagcaatcctcccacctctgcctcccaaagtgctagaattacaggagtgagccactgcacctggccaatttgaatggggagctggatgacgctccccatccagcctggtactgctgaagaatccaaccctaactccactcctgcccacacatctccaggctgacctagtttctgtttcaaggcaggggggacacatgttacacactcctagacacagagctgtgcagagccaagagatgcacacgcatgcacgtgggatagacgaatgcaggagatcgcacactcgaggccggtgcacacacatgcatatccagagactccttcctgactcacgaacaaacccaaggaccccctccagcagacacacagacagagctccctgttcacagggccacacagacacacatggacctcataagccataggcgtgattccccacaggggttccctactctctatccagctcctgctcccaggtccccactctctggggcacaaaaacagcaaaggcagtcctgctgccacactaccagggccatgggatcaaggatcaccgcaaccctgggaatggatccccagtctcccctcttctctccataagctcctgtcttttggaactgcagtgcttatttccccaggacaagtctctctgtgggagggaccaagggtggaggacacttcacttccctacttcccttctggtttttttgtttgttttgagactgtcgcccaggctggattgcagtggagtgatctcagctcactgcaacctccgcctcctgggttaagcgattctcctgcctcagccttccgagtagctgggactataggagtgcatcaccacgcctggctactttttgtatttttaatagaggcgg

SEQ ID NO: 86269 - DNA, 1584 bp, Homo sapiens
ggtcatttagagcacaaactcaaaggacacaattccgtagctgtatgggcttaacctctgtgaaccccagttttctcatctgcaaaatggagctaatagtaccacggttgggcgcggtggctcacacccgtaatcccagcacattgggaggccaaggtgggcagatcatttgaggtcaggagttcgagaccagcctggccaacatagtgaaaccccgtctctactaaaaaatacaaaaattagccaggcatggtggcccacgcctgtagtcccagctactagggaggttgaggcatgagaatcacttgaacccagaaggtggaggttgcagtgagccaagattgcgccacggcattccagcttgggcaacagagtgagactctgtctcaaaaataaataaataaataaataaataaataaataaataaataaataaataatagtacctacctcatgttgtgtcctgaggattacatgagcaactaagcataatataacaaggcctggttccaaggaaatgccattacagtgcttgctatgataaccactcaggaggaaacctagtcagacagaccagagctactttgctcctccactggctgtgtgacctcaggcaagttaattaacctctctgagtcccatttcctcatctgctaaacaaatagtacttatctattgctatgaaagcaaaataatgcctgtaaaacacctgacacctgcttaagttccttgtgtgcagagaccacgtcttgcacatcgatccccctcagggctctcactccatggcctgggagaatgaatcccttccccagccacccttctctggctcgccatcctctttctggtgctagcagacagcagcatctagtggacaagctctggaactgcattctggccaagggtcactcgccaagctgctgtgcagtcatttaaatgaggctttttaaaaatgctttagacaagggtggaggggtcaggaggaacggaggtggggtgaaatgcattgggcaagtattcattaggtgcctgctgtgtgcaaggcactgatccaggaccttaaaaaatgaagcaagagatacaagatcactgtagaaggacacaagaaaaatcacaaataattataactttgtcatcaataccctaactttttatcttagagaaaatgtgaacacagcatagggggacttggcacactggacagtgtcttctcaggaagtgttttttgtttttgtttttgagacagggtctcgttttgtcacccaggctggagtgcagtggagtgatcacagctcactgcagccttgatctccctgaagtggctgagcaatcgtcccacttcagcctccagagtagttgggactacaggtgcacgccaccacacccagcttgttttttgtttttgtttgtttgtttgtttttggtagcatcaagttctccctatgttgtccaggctggctcaaactcctgggctcaagtgattctccccgccttggcctcccaaagtgctgggattacagacacaagctaccttgccagccttctcaggaagtttttacaattgcaggggcgatttttttttgaaat

SEQ ID NO: 86270 - DNA, 2217 bp, Homo sapiens
ggcctgaagcacctctgggcaccgaccgggcggcccggcgttcctaacaccgccgccggcgaggatgcggacgtcgcagcgtgcccccgccgcggagaggaggaagagggcggaggcggtttcccgcacttcggcgttcgctcctgtgcacctccgggccgctgccctgcgcccccgcaccctcgggaatctacgaccagcttcgcctcggccccgcctcgcccggccccgggtctcgagcctcagcgtggcccagccgccagcccgcctcaggaacccagttcccggcctccgtcgccacctgcgggcctctccaccgagcccgcgggtcccgggacggcgccgcggccgttcctgcccggccagcctgccgaagtcgatggaaaccccccgccggccgcccccgaggctccagcggccagcccctcgacggccagcccggctccggccgcacccggagatctccgccaggaacatttcgatcgtctgatccgccggtcgaaactttggtgttacgcgaagggcttcgccttggacactccgagtttgcgccgggggccagagcggccgcctgcgaaagggccggctcggggagccgccaagaaacgccggctgccggcgccccctccgcgcaccgcgcagccccgccgccctgcaccgacgctccccaccacgagcaccttcagcctcctcaactgcttcccctgccccccggccctggtggtgggggaagacggagacctaaagccggcatcctcgcttcgcctccagggagactctaagcccccgcccgcccacccgctgtggaggtggcagatggggggtcccgctgtccctgagccccctggcctcaaattctgggggatcaacatggatgaaagctgaccgtgggacttctgccaaaggggaaaagttgggaccatggccaaaccgcgggcttgaggagggagccccgtttctcacatttgtccccttcctttacattttaggagctgtgggcagagggacctaaataacagtgatcttcattcaagcacctaagttttcggggtgacagtccctccccctcatcctttgcagaggaacccagggctggagtcgggagaaggctgatgacatagattccaatccctgcctccttccatctcggaccgttggaggcagggcctgcaccccagtgggagcaaaggaggccaccgctcaaagacacccccccacccaaaaaaaaggggagaagagagagacctcggtgatggacaaaccggttgttactgtgtctgtgggcgagcctggggtgcggggctgtggtgggggtggggagatgattggcagctccctgggggcatcccccacccccactgtccaggcctttaaccctttgctcccctcaggccttccctaacgctccaagcaccgctggagcctttaatgggtgagggaacttgggtaagaggaagatcacccccttcctgtcccctttctaggccccctcaagtgcaggtgacccttaattggtgagatcttcagcctcagccgccgacctttcccttttgtccagttttggagttcccgttttttccttgtttgctttccgagtgtaaggtctggccggtgagaaagatttcccccaaccttgattaatcagccccctcccccaacttacttcccttaggacgggtagggctgagggacctcctctcctggaaagtgcttactttgcctggggaaggggctagacactgtcccagggaaagtaatagaaggtggaagaaatcaataaaatcagaccaaacaagtcgcctttcgagggcctccaccgatttatggatgagagggggtggaggtggaaggcaggcccaagtccattctttggacacccaaactcagcccccttaaagagtggaaacaaaacaagctgcactttgcagaggtggtaaatgaaaggactcttggcctaacttcaagagtcccctggggtttgaaggggcaaagtttgagtctggatggaacctgggctgaggtaccttaagcttccccccgcaacaccccagcctcagggattgcgggagttgtcagagatctgatggatccgaaaggggcagggccaggggattaggtttggggtcagaggttctgttttccaggggaggggtgagataggcctggatcatgccctctgccatgccctccagctaggaggatcttgagtcagagagg

SEQ ID NO: 86271 - DNA, 1037 bp, Homo sapiens
ggtgtccaaagaatggacttgggcctgccttccacctccaccccctctcatccataaatcggtggaggccctcgaaaggcgacttgtttggtctgattttattgatttcttccaccttctattactttccctgggacagtgtctagccccttccccaggcaaagtaagcactttccaggagaggaggtccctcagccctacccgtcctaagggaagtaagttgggggagggggctgattaatcaaggttgggggaaatctttctcaccggccagaccttacactcggaaagcaaacaaggaaaaaacgggaactccaaaactggacaaaagggaaaggtcggcggctgaggctgaagatctcaccaattaagggtcacctgcacttgagggggcctagaaaggggacaggaagggggtgatcttcctcttacccaagttccctcacccattaaaggctccagcggtgcttggagcgttagggaaggcctgaggggagcaaagggttaaaggcctggacagtgggggtgggggatgcccccagggagctgccaatcatctccccacccccaccacagccccgcaccccaggctcgcccacagacacagtaacaaccggtttgtccatcaccgaggtctctctcttctccccttttttttgggtgggggggtgtctttgagcggtggcctcctttgctcccactggggtgcaggccctgcctccaacggtccgagatggaaggaggcagggattggaatctatgtcatcagccttctcccgactccagccctgggttcctctgcaaaggatgagggggagggactgtcaccccgaaaacttaggtgcttgaatgaagatcactgttatttaggtccctctgcccacagctcctaaaatgtaaaggaaggggacaaatgtgagaaacggggctccctcctcaagcccgcggtttggccatggtcccaacttttcccctttggcagaagtcccacggtcagctttcatccatgttgatcccccagaatttgaggccagggg

SEQ ID NO: 86272 - DNA, 1029 bp, Homo sapiens
gagaattgcttgaacccaggaggcggaggttgcagtgagctgagatcacaccactgcactctagcctgggtgacagagcgagactccatctcaaaaaaaaaaaaaggtgggatgttaagaaggatgttcagatgaaccccatccaccaaatccatcccctaggctgtacctctgggagtcctcccctgtcttgcctggtgcagcctagggtatttggtggacggggctatctgtacactgaacagtagaacccaggagcggggcagggtgatggagctggtaacaaactgctttggatgtgctgacgttgggtgcctatggcagtaggcagttgactatttgtgtctggattagcagagagggtgagagggagagccggatgtcctgagcagcaggagagtttatgttatagaagtcaaggacatttaaggaggaagcagtgctagggtcacatgccattgagaggtcgagggaaggaagggttctacaaggaggaggtccctggtgacctcagcctggaaggttccaggcactggtggtggtggacgctgactgcagtgggccaaacatgaattgggaggggagaagggaggaaatcatggattgggaggaaagggaggaaatagtggagaatagcactgggggatgggaggatcaggaggcaaggaacttggaggcaaggatggacacctgtgatgatgatgatgatgataatagcaacgataacagcaacagctcctattcgatgagagtttattatgtgccaagcaatgtgctaagcatgtaacatactccctgcaacaagattgagataggttctattcttgttcccattttccagagctactctagtcccagccctgccccagccagcagtgtgaccttgggcaaagcggttaccctctctggtatttggtcaggtgaccagatcttgaaagtccccttggtgttaacattctgtaggttgatgactgtgctcctgtggaaatttctagggcgaggaaagagcagtaggtgcaaaagtaggat

SEQ ID NO: 86273 - DNA, 1002 bp, Homo sapiens
agaagagggaggcttggagtttcccccagcagcacatggttcgggagttaactccttgaggaatcttgccgagggcgcaggctggcatctcccgcctgcctggcacaggcagccgggcccccccttcctgggacatccctgaatgctgtggcccggggctcttcccgccacgctcctctcggttcccagcaccgcacctgccctcagccttgacttttaacctgattctggaatacttagaggtagaagatgaggtccctagaccccctacttctccgcctcgtccctcactggccctttaagaaatccccccgcccacaacaacaaaacgtgtttgacggtcgtgactgttgtcccctctggttttctctatttctgatgctgatggctggtccgaggaagaagctgggaaacaagtccagaaagggcgtggggggaggatcttctagaagtttaaggtcaaagactcagacttcccgccctgtttgaagtgcttaattgtgtggttgaaggctggtgttgggcggttgggcagtcctgctgtagagtgagtgacccgtagactggggagcagcccccactgctggaactggctctagtcctttggagtcaccgccttcccccagttaccctgggaaaaagccactggctgacagctttgctcagcgactgtcctccccaccctcagcttgctatggcatcgttcaggtgccaacgggaccctggttctgccggaaatgtgaatctcaggagcgagcagccagggtggtgagttccagactgcccctctccactcccctgcccctcccacacacctgagcgtctcaggttgagctaggggactctgaggccgaggctagggtgggatttagctctgtcacacagacttcctgtttcctgcacacctacctccaacctcatctctgcctcacgctcatccctccctctgccccacctcaggcatggggctttggtttttgtctgtttgaacttttttattat

SEQ ID NO: 86274 - DNA, 1212 bp, Homo sapiens
cgccgtgtcccctaccagttccctcccatctatgggttcctccaacgctctcttcatccggtgtaatttgattctgtccaacgagcactgaaagggaacttgggaggtgggtaggtacctaccagtgaaccacccttctgttgacagacacactcatgctctggcactcaggtgaaatagtaggctcccctgcagtagttctgccagagggtagaccttcgcagttacttcattcattcattcgctggacacattttattaagtgcctactatgtgccagacctggtgcaaggtagctggcacacgctgttcggtgctgatcaagacaggtgtgctgcccgctcaatggaacgcaagttcttgcatgcgaagactataaatatcagtaaaaaggcaaagtaaatgcaatttgtgataaatgctgtgaagaaaataagacactaaaataaagacctggtgggggcttactttagaccagatggtaaaggaaggagacatttaggctgagacctggggcgtgagaaggagccagcttccaggagggtaagggcccccaggttccaggcagaagaaagcctgggcagaggcacagaggtgggcataagctccctagtgagcaagacagacaaaggccttggcctttcagagctaaccatccaaggactgtgctacccagcatagtagccatcggccacacgtggctacataaattaatcaaaattaaaagcaggctgggtgtggtggctcacacctgtaatcccagactttgggaggctgaggggggtggatcacctaaggtcaggagtttgagaccggcctggtcaacatgatgagaccccatctctagaaaaatacaaaaattagctgggcatggtggtgggcacctgcagtcccagctactcgggaggttgaggcaggagaatccctggaacccaggaggcggaggaggttgcagtgagccgagatcgtgccactgcactccaacctgggcgacagagggagactccgtctcaaataaataaataaaaataaacaacaattaaatacagtttagaatctagttcctcagtcacgctagccatagttcaagtgcttatagcccatgtgactggtggcatttgtcttggacggcgcagaccatagagcgttttcatcactgcagacagttctgtgggatagcactgatctaagactgtagagagcaaatggaat

SEQ ID NO: 86275 - DNA, 2079 bp, Homo sapiens
gtcctggcgaccagcgcatgagcgggtcagtcagctgtggtaagatggttagagggcatgggctctgggccaggccagtgcctggtgctaggaggacagagagggaaaaaacccagtccctgcccaagaggagctcttcattcgatgaggaataaagtacagcttcaggtgtgtggatcagagctagaccaagcagtctgtcccaaaagacaaagctcagaccctgcctgtcagagtctaggaggcttcaaggaagaggtagcatttaagctgagtggaggtggaaatcaaagtaagagccaacatttgtgtgggaggcagcatttactacgcctccgccttaggacaaagttcctgccatgtgttattttgtgtggtccccccaccaaccctaagaactaggtgtgctatattttccccattttacagatgagtaaactaaggctcactgaggtcatataacttatcttgcagctggtagatgggatttagaacgggcagcctaatttgaaaactcctcaggagcctgccaaacagagaaacgagtcccaggcagagggactagcgtggacaaagtcctgagaggaggaagggcatgggtgagcagcgggagaatggggtgtttggtggggaagaggcaggagatgaagtgagaaagcagagcccgagctgggcttgcctctgccccaggcttcaggggtccagggggaggctggaaagggtgctactctgtgtctgtgtttgtggagagacgtgtgtcccagaagctgtgaggtattctggagcagttggctgcagcttggatctacccccgagccacaggcttgtcaggcctgtaagcgggagagtaacatgatcagatttgttttttaggaagattaccctggcagccgctgtgaggctagatcagaagggctgaggctggtggccgggagacagctgcaagaagggggatggaggggtgaggctggatgctagaaccatttctagggagacttgcctaatcgtgggagtggctgagaagtaggagttgggggtgacatttaggatctaggctctagacactgggtaaatggagcttgaatacctggggggtgccatgaacaaggggtacagctggcttctgtagggggaacacatgtcctgatttgccccagacagtcccagtttatacctgttgccctggtgtaattattattagttcccctgtttcatttttgaaagtgtccaggtttggatcataagttacgtggtcaccgtggtttcagggtttgatgatagcttaggacaaggtagcgagcttggcttggtttgcaggagacaccatgtggagacatttagatttggtggatgtcagactcctgggcagggtgtagtggcagctccaggcttataaggctggggccgtaatcccaggttgtccacaaggatggatcaggcgggccacgaaagagggggccttgcagggtatggggctctgcaggtaggagctgtgtccaacactggggagctgcccactggtcagataaggcctgaaattagcccttgggtttggcagttgggaggtagctggtgaccttagagggagcagctataaccccggggagggtggagccatcaggctgggtctgtagtgaaggggatgggggaggcaggccctggctgggaggagacgcagcatgtgggttgtttgggttgtgttgatgtttaacttcccccctttcttcaagttaagggcagcatatcctttgggacaggagcaaccactgtgtttggtggaggggaggggccaggataaaggagaagagggtgatagctgagccaagtgtctggagggaggattggatatggagtgcaggggagcactggctccccacgagggtcccctgcacgccctctgctccagggaaggaggtagaaacgggccgtggctcagtcagccaagagggcaccatggagagaatgaaagacccgggccccagtctcacctccacctgggccttgctggggcccagacgcatccttgcctcttctgggcctcagtggttgactctgcacattgggcgagccagctggaac

SEQ ID NO: 86276 - DNA, 1308 bp, Homo sapiens
tcccacacggggacttggagactcacaaacatggctcaaaaagccatcatgaggtgcccttaaggtcttggccctgccttcttccttcctctgaggccactgagggcaggagggggctgaaatgaaacggtgggggggtgaggcgggagcttggcttccctgtggctgtgttagtggttcctctgggtcctccccatgacatcacagtgtcccccaggccccagacacatggctctgcacgttgcacacgtctccgcagtccagccatgtgccgcctagtaagtgctcatgcctgcattccctcgcgccacatagcacagcgtgcccagctcctgtccctctgtgcagctgtgtcccaggtggacacccttgcaggtgttatgttcacgcgcgtggtgctctatagcactggcgtgataatgggacaggctatttttagcaggcggggccgggggaagggctgttggctctcataggaacttgcctgaatcgctcctgcccagcccattatccagccctcctcagggagagatggtgcccacaaaaccccatccctaagggggtgtcagctccccatacccacatgtcatgtttgtcctcgcccagacagccccccagcacaatatctagtcacctctccctctccagagtcgaaaggacaaagaacgccttaagcagaagcacaagaagcggcctgagtcgccccccagcatcctcaccccgcccgtggtccccactgctgacaaggtactgctgcccaccttcaggagggatggtgtgtgggtctggggtggcagagggagggaggcgggggcgagaggttggtgagtcagggacctgggcaccctccccacagcttcaagttaatgccactcccctcctaccccataccctctactccttcttccagcctagaaggggccaccaatcaccgaccaaccatgggattgggagtttggggtgctgtctgccagatactcccatctgcctctgtccagagggcctcagccctgggctcttgtctgcagagagtgggggacggcactcaggcctgctctccaagttctagggcccctgtccccagagatcggtagaggacatcccctacgccccatcaggaggacacccaaagcttgtcacccaacccaaatcccactctgtgcaggttggaggggctgaaagttctgaccaaggtggcatggggggcaggcccctggacagtatcccgaaactcccactcatcccaccattcccagcagggcatggtatgtcaggcctgtctccagaaatgggcaacatctggctgag

SEQ ID NO: 86277 - DNA, 2001 bp, Homo sapiens
gaggttcaggtatcaggtttccagggtgatgttgctgtggcaactgccccagtaaacctctcccctgcttcccagggctcacctggagaccttgtcattcatgccctctgacctttccaggggcctgcaggcaggtggcaagaaatggccaggggtctgggagtttttccagtaactggatgtcccttggacatgccagagaactctgcccatcctcctccactcgccccagcacttcggctacccttccccccagcccctctcttcccttgctctcagaaccacatctggctcccttcagaactccagctgttgaaaagaacaaagaggaagacagagaccaggactccgcccgggaggggcagtgcagggtggctctcgtttctggtccagcctgcattcagcatttatctgttcagcacgattaactgaatacctggtcgctactaggaggaaaagggccttccctggcagcagcctgaagcacgaacgaactcacggcatgccaggctgtgttctagaaccaggagatggaggggcatatggagattagtccatttaatactcaaaataatccaattaggttggaaatttataaaccccatttaatatatgaagatgatggggcacagggaggttaagtaatttgcctaaaagcacacagctagtaaagtggtagacctgagattccaatgcagtctggcttgaaggcttgtgctcttcacctgcccacagcactgtctctgcagctgctgccactggacgtctcatcatttattgaccctataccatgtatctggcatcatgctgcttccaactcaccacatatgcatagtgctccctgtaaagacactgacacttatcgacgttgagactttgcacagtataacatggcagtgaggccaggcgtggtggctcacgcctgtagtcccagcactttgggagtccgaggcaggtggatcacctgaggtcaggggttcgagatcagcctggccaacatggtgaaaccctgcctctattaaaaatacacaaaattagccgggtgtggtggctggtgcctgtaatcccagctacttgggaggctgaggcaggagaatcacttgaacctgggaggtgattgaaggttgcagtgagccgagatcgcaccattgcactccagcctgtgcaacaagagtgaaactccatctcaaaaataaattaagaaaaaacaaaaacatggcggtgaagggcagaacccatcaggctcataccttgctctgcccgacttagagcccacgctccttcaaccaccaccctgccgctctctttggtttctggtgcctcagataggacagaacatttcagtgcagagtggcagctgttgacatgtggtcatgtgtgcacagttctctggaaataaggggacagaatgtcttgttccacctgaggtatttagggaggcttcagggaagagggacttccaagctggattttaaaggatgagagatttcccaggaagagtaaggataggctgtcctggcaaacgcttagtgtgtgcaatcaggttgtctaggaagagcatggggtggtcagagaatgggtggaaagccagggggccgaagtttggggtagtagctggagggctccaggatggcaccagagaagcccattctcctgtgggtcctcttctctgcctcgccacttccagcataggtcccgccttcttagacgccctaagtattcagtgaatgaatggaccaatgagtaaatctcttcagactctgggactgttttcatctccctcttggcttccatcttccctgcctaaggtgaaagacagacaccttcttgggttcagtgaattcccctctgccttacacccaggagtgccacagctgcctccccatatccctggtctaggagctcctggccactccctgcccggaagtccttcatgaaactagctgtgggctctcccagttgagctaggtcctgtgccctcctgcttcactcccacatcag

SEQ ID NO: 86278 - DNA, 1712 bp, Homo sapiens
ggccagtagggtgcgagttactctcccccattttattacaggtgggaaagctggaggggtcgggggtactcatcccaggacacagacagtggcagagctgagacaggaaaccaggcatccccattcgtggaccagagctctctcccgccagtacacgcgggagtgggagggagtgcggggatctggggtccagctgtaactgtttcccctctgtgcacagtctcgtccctgcagagctcccctgacttctctgcattccccaagctggagcagccagaggaggacaagtactccaagcccacagcccccgccccttcagcccctccttctccctcagctcccgagccccccaaggctgacctttttgagcagaaggtggtcttctctggctttgggcccatcatgcgcttctccaccaccacctccagctcaggccgggcccgggcgccctcccctggggactataagtctccccacgtcacggggtctggggcctcggcaggcacccacaaacggatgcccgcactgagtgccacccctgtgcctgctgatgagacccctgagacaggcctgaaggagaagaagcacaaagccagcaagaggagccgccatgggccaggccgtcccaagggcagccggaacaaggagggcactgggggcccagctgccccatccttgcccagtgcccagctggctggctttaccgccactgctgcctcacccttctctggaggttccctggtcagctccggcctgggaggtctgtcctcccgaacctttgggccttctgggagcttgcccagcttgagcctggagtcccccttactaggggcaggttagtgacccctggggacagagggcatttcagggcccagccagtctagtgaggaacagagcttacacatgcacttagaaggaaatgggatggataccactccaaaagatagagcacggaggagacagtcaccttcaggacatccccctctgcatgcgtggagtagaaaggattggggacagattgtcagaaggttttaccaagttttgggagggagattagaaaagctaggaattctgtagccctcggcagggcagtttaacaagcaggcgcagcaagcagatgtcacccaggcaggaagtgacatctttgcagcaagagggttagactggggcatgtagccagatcccggggagcactcgagctggggaggggctgtcagccacctggctgagcaggagtctggggtggagagtaaccacgtgcttccctctgtccttgtgcctgcaggcatctacaccagtaataaggaccccatctcccacagtggcgggatgctgcgggctgtctgcagcacccctctctcctccagcctcctggggcccccagggacctcggccctgccccgcctcagccgctccccgttcaccagcaccctcccctcctcttctgcttctatctccaccactcaggtgagacctgactcctgggctcctccttccctgggcaggttggggacagactgacagaggaccccagccttccatgggaattggagcaactgggctgagttgccatcagaccaccctccgggctctggacccctctgctccccagcacacccggccccctgcaccccggtacacacagttgtgctctagatccaagaataaccgccaggggattctacctccctcccttaggtgttttctctggc

SEQ ID NO: 86279 - DNA, 2319 bp, Homo sapiens
gccccagccttgactctcggccaccccgggcctcacctcccatccctgccaggccacacgaccggccctggtccctcagcgccccacctttggccttcgtggcctccgggccccgaccttaccaaaccgcaacttccgcccttctctcctgacccgtgtggcctcgaccccagcctcaggctccgccccaggtcttcacacctgtggctccccaagtcccgcctctcttctcagagctcacctgtgtccctccttaggatggcgccgccttttcaagggctgagcactggctcccctccaggccccgcccccggtcccctggccccgcctccgccccctcgcccctccctcaggttcctcgctctctccgcagtcgtggagatgctgaaggcgctgcacgcgctgcagaaggagaaccagcggctgcaagagcagatcctgagcctgacggccaaaaaggagcggctgcagattctcaacgtgcagctctctgtgcccttccctgccctgcctgctgccctgcctgccgccaacggccctgtccctgggccctatggcctgcctccccaaggtgaggggatcctgcccagcccgggagagaggcccgtgccctgaagtccggactggccctgactgcagcctgtgacatccctcccacagccggcagcagcgactccttgagcaccagcaagagccctccgggaaagagcagcctcggcctggacaactcgctgtccacttcttctgaggtgggcgctacgaggagtggggcaggaaggagggggagactcaaggctctcctggtcccatctcttccccgcagctattggaggctgggcaatgaagtgactgactgagcaattgattgatccattcagtcctcccttaatcaagtaatatttatgaggtgcccacttagtgccagccattggctaagcaatcagtgagcaaaaccggcacagcgctgcttcttaagataggctaccccaagcaaagaaggagtaatcacaaactgggagatatgttagtgtggagagaaattgagggctgtgagagagagaacgggggagggctgcttctgtggatagaaagtggttagggaaggcctctttgagaagtatttgtgaagggtttattatagcgcctcacacaaaataattcctgtgtaactggtggcggttcgaatagcagttgctattgtgttgtggttattactggaatccaacaaactgggttcttgttctctctctgccatttattaactgtgtgacttgggcagtaataatcataataataaccagcattaattgcacacttgccctttgtcatgccctatgcaaaaattttttaaagcattcatttagtcttcatagtaagcctatggaataggtactactgttaccccccagcttacgagtgagtaaactaagacaggttgaacccaaggtcacccaagccattggattgtggacataggatttgaacctgagcctttcactttagctgtagtgcttttgcctgcagagttacttaacctgtgcaagaatcaatggcttcacccataaaatgagaatagcaagatagcacaggtcaagccctcagcccaggatctggttcaccagatggtcaccaccatcatcattgtccattattaaatgaggatgatgaggggcgctggactcccaggaaggggtcaggaaacatgattcgtgaagacaatttggattcttagccctcatccccggaccttgcttcttccagggtgcctgggggtgaagtgggggttgctgtgctctgtgagaatgctggtgggtgctgggccaggggccagaaaagtcatgctggccctctgacccctcccttccccctccctccccaggacccacactcaggctgcccgagccgcagcagctcgtcgctgtccttccacagcacgcccccaccgctgcccctcctccagcagagccctgccactctgcccctggccctgcctggggcccctgccccactcccgccccagccgcagaacgggttgggccgggcacccggggcagcggggctgggggccatgcccatggctgaggggctgttgggggggctggcaggcagtgggggcctgcccctcaatgggctccttggggggttgaatggggccgctgcccccaaccccgcaagcttgagccaggctggcggggcccccacgctgcagctgccaggctgtctcaacaggtgagggagagctcagccctgggaaggggaacagggtggggggctggctctgggaagggagggattttccccaaaacacccacaatccct

SEQ ID NO: 86280 - DNA, 1033 bp, Homo sapiens
agcagcagagacatctccttcagcagcaagagcagcagctccagcaactccagcagctcctggcctccccgcagctgaccccggtaatgcccctcccttccctgcctcaggtgccccttggtctgcctggaagggcacatctcagaggatcagggccagccaggagagggcaggagcaggcagagtgaggggaagctctaggctgggcctgtgggactggggctgggccctgtggagcatccatggcaggtaagggggataagatcatgcccaggatcccctgggcattgagaaagggctgctgtaatagccccaggtcgcatcctggtgaaagactctggagggcagcaagtcctcagttattcagcatttcagtcccagccccaaaggcattcaggggaaactccagggtctgagtggctgtgcaggtgacaccaccctcaaccacagcagcttctttgggtctgtctcctgttgggtcggctgaaactacctttggagaaaaggagttttactttttaaaaatgagggaagcagccgggtgtggtggctcatgtctgtaatccaagcacggaagactgaggcaggcagatcgcttgagctcaggagtttgagatcagcctgggcaacttggtgaaactgagtctctacaaaaaattagctgggcgtggtggtgcacgcctgtagtcccagctacttgggagcctgaggcaggagaatcgcttgaactggggaggtggaggctgcagtgagctgagatggcgccaatacactccagcctgggtgacagaatgagaccctgtctcaaaaacaaaacagggagttgaaaaaataagaaaaatcaacattttcatataaagaaatattagacaggaaaccaattcagctggctgcctgtagggaccagatgggagcaagaggagtaagttcttaaggtaaactttgatatattattttggtttctgggacattaagaatgctttgcctattcaaagcaaaataaatgaatcttaaatgatagaagcaaacaaaa

SEQ ID NO: 86281 - DNA, 1030 bp, Homo sapiens
catgatatcggctcactgcaacctccgcctcccgggttcaagggattctcttgcctcagcctcccaagtagctgggattacaggtgcatgccaccatgcccagctaatttttgtatctttagtagagatggggtttcaccatgttggccaggctggtctcaaactcctgacctcaagtgatccaccggcctcagcctcccaaagtgctgggattataggcgtgagccaccgtgtccggcgaattgaaaactattgacctagtcagtagttttggcgaaaccccgtctctactaaaaatacaaaaattagccggatgtggtggcaggcccctgtaatccagctacctgggaggctgaggcaggagaatcgcttgaacccaggaggtggaggttgcagtcagccaatatcgcaccactgtactccagcctgggtgacagagcaagactccgtctcacaaaaagaaaagaaaagaaaagaaaactattgacctagtttagtgtttttcaacttgggggcgtctgtggttgtcttaggagctgaggggtgattctgtgggcagggccagagatattaaataccctgctgttggccggcagtgctgcagctggcaaataccaatggcgtgcaaccattttcttgtctagatggggagacccaggctaagtgggaaatgcgagacagtaccttgactgtctcacaggcctcttgcctcctgattccagtgtgatggggtggggcctggccaggcagggcaggcaggcagcagggaagagacccccgggactgttggccaacaagcggtctggcccccttgcaggaacaccagactgttgtctaccagatgatccagcagatccagcagaaacgggagctgcagcgcctgcagatggctgggggctcccagctgcccatggccagcctgctggcaggaagctccaccccgctgctgtctgcgggtacccctggcctgctgcccacagcgtctgctccacccctgctgcccgctggagccctagtggctccctcgctt

SEQ ID NO: 86282 - DNA, 1439 bp, Homo sapiens
atgaatggttaacaaacaccagagcagtactccaatattggagagtcgctgggggcacagggctttgaatcagggtagtatcctgccttccctcccctgaccccacatggtctcagggcccccttagggccccctaccccactgatagcttcctccttctctggcacaaggggagccccagggcttgggggagggcgtaaggtggggggaaatgccactgcttttagcaaaagcctccctcccagaattagccagcttgcctcctgcaccccacccccaccaaccaggggagccactaagctgactaacaactgtcccctcacccaccagctatttccccagggtagagtgggcaattctcaccttcaaagagtccccgcctgcccaggcctttggcacagaggctgagtggacagtcaggagagaggcgagaggcaaggcgaagcctgtgtccctgtttcagttgcactggggttggagcccagggtaggggtttccagcttccccaggctccggccttgtcagtctctttgcatgtgtggatttttctgtgtgtgtttctgtttgggtttttgttgttgggttttttttttttttttaataaagaaaagaagatgtgtatatttttggcaacgacagaaacgtagtgcagatatatttttgcctgtgctgctcaactgttttttttttctgatactgaaaataatattaatattcctgttgataagactttgtaagatgttagggagctgataatggaggggggtgggaatccttcaaaggcaatttcttaggcacttgcaagggcttgggggagggggaggcagttgtgatgacctcagaaatactcactttttattaatgctaaatatgttagaaagaaatgatagcattcagcattttattcttcttaatctattaagctgtgtaactccctgccccaaaccactgaaaagaaaagtaaccttcaggccaggcgcggtggctcacgcctgtaatcccaacactttgggaggctgaggcgggcggatcacttaaggtcaggagttcaagaccagcctggccaacatggtgaaaccccgtctctatcaaaaattagccgggcatggtggcacgtgcctgtaatcccagctacttgggaggctgaggcacgagaattgcttgaacccaggaggctgaggctgcagtgagccaagattgtgccactgcactccagcctgtgtgagagagtgagactctgtctcaaaagagaaaaaaaaagaaaagtaaccttcagagattcttagaagagttgctcattcacacccacgcccttgcccaaggctggcccacttagagcgaaacttaacttttgtctggatgggaagagaagtaagtctaccccgaggttgccatgttgaagagtgagaggtccaagtgattctgtgcattgaaaccaa

SEQ ID NO: 86283 - DNA, 1099 bp, Homo sapiens
tgtaacgatctcaccgtctcctaacctcagtcccttttttgagagtgaatggtggagggtgggaagggacccagatttgtagatctctttgtctgggggaggggaaggatgtggtttgcagagcggaagcagagtttggaaacgcatgagagcagagcttcgtgtgttcccaccctcagtgaggaggtgtgagtgggtgagcatgtggagttgggtgttcccaccctcagtgaggaggtgtgagtgggggtgcatatagaggcagtgcctgctgtggggtcacaactggtgcatgccagcgccaaagggacctgtctttaggggtcatttcagccagctcctcccatcacagatgacagctccaagcctagaaggggctcagtgacagggccaggacaagccctcaggactgtggcctcctggcccttggttcccctgccccacaacatggtctccacatggctggctggctggctgtccctgtgtgtgtgtgacacacggtgtgagtgcagggctgtgcccggggtgggagggtgtctatgtggcactgactgtcttagctcagagctggtggatcctctccatggacaatgacactttaaggattgtcttggtttgtttttcctatttgtggggtattttccccctcaggctcctgggtctgctgctgcctcaaggtgtcctgaccttgaggctgatgaggggacccctgcctgtttcccccatactgagttctagggaggtgctcaccccagactcttaggaagggtctagagaaatgagaggagcccaagccaggggccagctccgagaaagggtaacctccacgcttctctctcccaaattggaaatgaagacaggttttcaaaggcacaggctccccctgccagcttctaggatcttccttggtgtgcaatgggccagttaggggtaggcagcttgcacccagttctcctttatctcaacttattttcctggggagaggtgcctagagggattgaggtaacttcaactgggaattccaaggaaggtgggcaagtagccttggctctctcccaccatgtccatcaggattgagagtgtgtctagctcccgacca

SEQ ID NO: 86284 - DNA, 1069 bp, Homo sapiens
tggaaaagaagattcaggccctgagaggtctcagctcttggaggagggctaaggctttagcattgtgaagcgctgcacccccaccaaccttaccctcaccggggaaccctcactagcaggactggtggtggagtctcacctggggcctagagtggaagtgggggtgggttaacctcacacaagcacagatcccagactttgccagaggcaaacagccttccaattgcccctccacccccagctgaggcccggtcacctggtcaggacagagcaactgcatctaaaagcacaagaagacagaaacctgtaagctctgaccccacccccaccccttgagaggtcagcggaccacctccttagggacagaccctggcaggtcgctgcccaccgagatttcctcaagtgtgcatagatctgagaggagtcgggagtcgagactcgagattccatcatagcgtaggtgtgtggggttgggagccccctgatgggcttgtctgtgtttgcaccttgtcctgtgtctgaggtcctgtgactgtaccctcctttgccctgggacatctgtatctcttggctttgtaataaatgctgcatactttctggagcctgtagttctttggggtggagggaagaagggaagggtgcctctcatctctgggtttagcctggcttggggaccccatacagaatgaatctgaactgccctctcctgtggctggtcaggtgcccccagcccacagagaggttaaaatctggagcaggaggcagcacgtgggcctcatagcagtgactgcaggactaccagtctggttgggcaggcttgtttttgccatcttccccatcagcaaacattgaaccagggcccactcccgcctgccccagactggagacttttaggttataaggaataattcttccttcatgagccagcagtgggtaccagagtctcttgggctcagcacctgtttcctttcccacagaagggggtgcctgtcagaggcctggagccaaggccacctgtggctggacagcagcagccccctcagagtggggagcccacttctgccttctg

SEQ ID NO: 86285 - DNA, 2079 bp, Homo sapiens
ctaggcattggtgtttgttttttgttttgttttgttttttttgagacggagtctcgctctgtcgcccaggctggagttcaggggcactatctccgctcactgcaagctccgcctcccgggttcacgccattctcctgcctcagcctcccgagtagctgggactacagacacccgccaccacgcccagctaattttttgtatttttagtagagacggggtttcaccacgttagccaggatggtctcgatctcctgaccttgtgatccgcccgccttggcctcccaaagtgctgggattacaggcatgagccaccgcacccggccacattggtgttttttaaagctccctgggtgattccattttgcagctgggggtgagagccagagttccaggagatccccctgagccttttcagctcctctgggcgacctgccagagataggagacccagacagctgtgtgcatggtgggaccagaggctgctaacaataggggaaacttctctggaacccttcctgcctggtggtcaggagttatgttggaacaactctgacagggaagtcaaatccacagtgaaatcccagagaaataagggaccatctgtaaatccacccttcccattgccccgcctcccagtcccccacattcccagcctggagccccgagctggccagggtcatggtgtcctccgcttccctcccccaggtggaggttctgtacgaggacgagccactgaaggaatactacaccctcatggacatcgcctacatctacccctggcggcgggtgagccagcgagtggggcgggcagggagcagactcccacagggtctggcataggtctgtggccacatgggccacccttctgtaatcagagacagtctgtcccttatcccatgagctgcatgtccagggtggcttgctacagcaggtcagcctctgggccatctcttgcggatgactttccgctcaggagacaaggctccctgggcagacggtgtccccagatttgggggcagaaataggtgctggcagctgccgtgtgtttgcctccctctctcccgtctcctctctgacggagtctctgctcttagaccttttccctctctgggtcttcatgcaccctgtatccttgtctctctcctctccaaggccccatcccatcccttttttcgagtttggacactgtggggtggagatggtggccctttagttggactctgtctcctgataccttccccttccctgtgtctctcctccccactctccccgcagaacgggcctctccccctcaagtaccgtgtccagccagcctgcaagcggctcaccctagccacggtgcccaccccctccgagggcaccaacaccagcggggcgtccgagtgtgagtcagtcagcgacaaggctcccagccctgccaccctgccagccacctcctcctccctgcccagcccagccaccccatcccatggctctcccagttcccatgggcctccagccacccaccctacctcccccactcccccttcgacagccagtggggccaccacagctgccaacgggggtagcttgaactgcctgcagacaccatcctccaccagcagggggcgcaagatgactgtcaacggcgctcccgtgccccccttaacttgaggccagggaccctctcccttcttccagccaagcctctccactccttccactttttctgggcccttttttccacctcttctactttccccagctcttcccaccttgggggtggggggcgggttttataaataaatatatatatatatgtacataggaaaaaccaaatatacatacttattttctatggaccaaccagattaatttaaatgccacaggaaacaaactttatgtgtgtgtgtatgtgtggaaaatggtgttcattttttttggggggggtcttgtgtaatttgctgtttttgggggtgcctggagatgaactggatgggccactggagtctcaataaagctctgcaccatcctcgctgtttcccaaggcaggtggtgtgttgggggccccttcagacccaaagctttaggcatgattcc

SEQ ID NO: 86286 - DNA, 1265 bp, Homo sapiens
gggtaccctggctgggagagcagggcgaggtcggagcgctctggagaaggcattgctgataagccctgtccatttttccccaggtctgacaaaacacttcaagacattgtctacaaattggtccctgggctttttaaaggtatctgcactccattcctcctccactgaccccatttcccaacccatggccctgtcctcatcctgctgccttcttccagatgagatgaaacggcggcgggatttctatgcagcgtaccccctgacggagggtgagtgtgctcgcgtctgtttgtgtgtgcacagtcttgcctgggaccatgtaggtgtgtagcgctacccctcaccctctgacctcctccgcgcacacctctccagaaggtggctgggctcacctggctgagttcatgatctctgggtccttggcgggctcccttcctacatcctccgccaacccgagagctctttccttctgcagtccccaacggctccaatgaggaccgcggcgaggtcttggagcaggagaagggggctctgagtgatgatgagattgtcagcctctccatcgaattctacgaaggtgccaggcaagtctggcccaggctggccccttctgggttcctagtctgggtaaccccttctcccacccaggaccctctctggatgtgtccattgagggatcatcctcctgggtctcctggttcttcctgggtcttcctagcttcattctttctccgtccccagggaccgggacgagaagaagggccccctggagaatggggatggggacaaagagaaagtgagtgctggggcctgcccaggactggaatgtgggctgggagggagtggcctggggtggatcccctaccatgggtgcctgtgccccagcagacaggggtgcgcttcctgcgatgcccagcagccatgaccgtcatgcatcttgccaagtttctccgcaacaagatggatgtgcccagcaagtacaaggtgggtccctgggcctttcaaaaaatgagtgtctgtgtatgggtgtgtcagacagtctgtgcagcccagccattggtcagagctggctaggtgtcacccagggcttgcgcggttaactgagcccatgcgttaacagaagggtggttgaaaccaagattgggggcagtctaggggtgttgaagtcagtgtgcagtggtgcatgggaccaagacggtgtgtatgtgtgcatgttgcacactcggaactgtggcagaggtgagtgcaaaaaacgcagggcctcc

SEQ ID NO: 86287 - DNA, 1370 bp, Homo sapiens
ttcctcaaagtaatgacagctggatttccagtcacccatcacccctttttccctcaccttctcacagcacaccagccagtgcagcgggggaggaactgggtatcaggaattcgcggcctggggcctcctggggtggggagatggggagagggtgctctagggagtcagagctcctgtttacattgctcttggcacctgctggcagggccctgcaggtaaccatggcaatcaggtgaggagccaatcagtgcttctccccacccccagccccagaggtaacagtcagaacctgtggggatggaatgaggggagcagggagtgtggcaaggggcttattttcttaaactggagaaggagcagcgtttcattcagtcagcaccaccttgggcctcgtgtctagaaagggtccagaggaacaggctggggctgaattctcagaaatgctcggggaagtgactgggtgaggggtacagccattcgcagtgtggggctctcggctgtggggttcttcttaaaagcaagtgtcagccgggtgtggtggctcacacctgtaatcccaacactttgggaggtggaggcgggcagatcacttgaggccaggagttcaaggctggctgacatggtgaaaccccatctctgtttaaaaaaaaaaaaaaaaaattagccagtgtggtggcatgcacctgtgattccagctactcagaaggctgaggcacaagaatcacttgaacccggtaggcggaggctgcagtgagccgagatcgcaccactgtacttcagcctgggcaacagagcaagactatctcaaaaaaaaaaaaaaaagagcaagtgtctgctttgaaaacacagcgagtgtgtgaatgaggtggctcgggcacgatgtgaagtgtgcggagcctacatgtgtatgtgtgtgtacgcgtgcatgtgtatatgagggtgaacgggagatagatgagggcatgcgatttaccccagcaacagagaccccaggcattatcagagctcagcatcagcatgtttgttggtggctctgcacacacacatagatgcatctggacacacatatgactgacaggcagtcacaggaagtacctttggaggcccagatggcacgtacacaggatggatattacacacgctcagagagacagccacttggattgttctctcctctggatggttgtaataatatttgggcatcttgccagggacagggttactatggaaacgaccaaacagtggagtatccagcagctttctgcgtaattgcaaaggggggacccatgcagggagggctggccgaggccaccctgcgtggggtgggaacccctctcccttctcagatccccggggccgccacctctccg

SEQ ID NO: 86288 - DNA, 2046 bp, Homo sapiens
cggccacccggtaactggggtccctgatccttggacatgggctcctggggaagcccgggcgctgggggtagaatggggatggagggaaatttatcgcaatatttcccatcgccagcggaagcagggggatctgctaaactggccccccttcccctgggacgcccagccaccccaccctgcgcacgccctcctactgctagctctgagggcgtgggacccccgggcaagcagacaccccctgcctgtctccacggtgggcccgggctgcccctcgccctcccccactgcccctgtctgcccataatcgctccggttggcttgaggtgggaggaggcggcatggaggcgggtggatttgccagtgaatattgtggaagtgttacccagcgcttcccgagatctttgtccctcagtgtcccccatgctgcctcagtctccccagaggtctgtctcgaggggagggctgtctcctggttgtcccctccccgctctgttctgatgcctcctcctctgggacctctggcagtttctgttcctgaaactctttaatttctctcctccctccccccttcactctggtccaaggtgttattactgggagcataaagccagctctgttgcagctttttggtgggaaggttttcccacgggctcccctggttgggggttgggggattgaggctttagaactgactttggaatgaagcaggaaaccaaccccaggatccagaccatgtgtagctaggtagggttcaagttgaagtcttgggggttgggcaggaagggggactctgctgcccctggccttgcctgagagatcttggttgatggagctgttgtcatgggaatggagagagcccgaacaggaagagggtacagctttgtgcaggtcacatgcccactgcagccctccagcctctggtccccagagcggactttggaagctgaactgcttttgttgctggaagacttatgttataatttaccctgggtggaccagggtcgtacaaaaggttagtgtgtgtttgcagggtctgtttccaggcagggatgtcaggctgtgtgcttctaggtggggggtggatgtggatggcttctgcatgtagcgagggtgggcctggctctggtctggctgtgattgtgtgtgtgtgtggcgcagggtgggggagggttgtggcgtgtctatctggccttgtgtgtagtgagtgtgagaggtggaggggggtgtgtcttgctgtatgtgtgtgtatctggcaatgtgtatattttggggttttgcctttgtttgatcttagggagttgagaggtgggagagggaggaagggagggttgagtaagcccagcttcaggaggcccttttcaatgcatggtggggacaggggagcagatctttgtgccattgtcaaggattggggaaagttgggaggttcacagtgtccctaggcagaccctcacggccccaaacacaaatacaaggggcttgcgcagttggacccacgaagctgggagaggaacagagtcataaaacccctggtctgagtcttgatgctgtactctggctggctgtgcttccctgcagcctctgtttccctatgtgtaggaagtggggtaaggcaattaacatgtgcctcctcttcctgcctcaaggcaggagtccatgctgatggtcatgtttgggccagactgactccctcccagacggcggcccactgagtggttttcccgccactccagggagctgctcttttcccctcccacctgctgggatgaagccgggcattactgctttagatgagtgaggagcctggccaggtgccaggatgttaaaagcactggggtgggagtcaggcactttcttgtcacaggactgccactgctttgctttgtgaccttagacaagtcacatctgagtgtgctcatctgtaaaatgaaaggattgaacaggtgcttctttttctttttctctttttttgagatggagtttctttcactctgtggcccagcttggagtgcagtggcacgatctccactcactgcaacctctgcc

SEQ ID NO: 86289 - DNA, 1006 bp, Homo sapiens
aagagtccgcctatcagccaatgaagagacagcagtgagagcggttgcgcagtgaaggctagacccggtttactggaattgctctggcgatcgagggatcctagtacaccgcaatcatggtgagatggggagttaaagcaaaggggcatggggaaggattgagaagcggagggggtcaggagaggcttggggacgaaaagggcctagggtcgatggaaggaagcggtttcagttcgaggggagcgggccccggtgaggaccaagagggtgagtgcggctcattgccgccacacagtgctcatcccagctggagaaccaggggttcagacgcctccggaatggagaacgggcgtacaggagcctccgcatcaggagctgggccgggggctgtggcagcgtttgaccccccgcgctgacccctccgctctgtctgtcctagtctattatgtcctataacggaggggccgtcatggccatgaaggggaagaactgtgtggccatcgctgcagacaggcgcttcgggatccaggcccagatggtgaccacggacttccagaagatctttcccatgggtgaccggctgtacatcggtctggccgggctcgccactgacgtccagacagtgtaagtttcaagggtccccgcccacacccaggcctcttcttggaccatccaaccccggcgtcttgaccggccaaggtgtcagtcatctaccacacaccaccagtgagtttgagactttgccgcctccaaaaaacatgtccttccctttcttttttttttttttagacagggacttgctctgtcacccaggctggagctcagtggcatgatctcagctcactgcaacctccacctcccaggctcaagcgattctcgtgcctcagcctcctaagtagctgggactacaggcgcgcaccaccatgcctggctaatttttgtatttttagtagagacagggtttcaccatgttggccaggctagtttcgaactcctgacctcaagt

SEQ ID NO: 86290 - DNA, 1180 bp, Homo sapiens
ggtgatccacccacctcggcctcccaaagtgctgagattacaggtgtgagccaccgcgcctggcccaagactgatttttcttaaagatcagtgtctagaacaagtttctgatgagctgccatttccttttgacaatgagagtaacccagccactgagtatccctctttgccttgcctgctagggggctcaaaacaaaactttgtgttcagtctgagttatcttgtattatgttttaatggtttagttttatttttcagtgtttttcatataaactgcctccaatcttttctctaaaggagtagaggtataaacatacacatagaggactgagtgatggtaggaccttgggtgaggagagggaggattagaagaaaacaattctgaaagaaagaaggagcacaagagggtcagaggtgagaaggatagaaaggtaagtgttgaagaaaagaaagtggaaaagtcttagaatatttctagctggcaggagaagggagagggagctggcctcagggaaaggtgatcttcctaaacaggtcctccatttccctttgggtctgggtctaggccggggccttgtctgaataggcttaaacatgaaagcgagcgttcttgagttctggtttctctctctgatgctggcccccacaggtttggcccttactacactgagccagtcattgccgggttggacccgaagacctttaagcccttcatttgctctctagacctcatcggctgccccatggtgactgatgactttgtggtcagtggcacctgcgccgaacaaatgtacggaatgtgtgagtccctctgggagcccaacatggtacgttggtggcatggagaggggctgggctctgagttacccacccttggtcattaggaaaaaagtgtgtttatgtggcaggtaatggggagaatggtgcaggtgggagagaaagccacagctgctgctccttggaagggtatccagaaattccatctgccaggctggctggctggctccagaggagagcatcttctgttaggagaccacagttagatatttgccacagcagtaagaattccttacattgggtttacagggttctcgcatccattcactgagcaaacatttaactcagtgtagggttagaggcagctcaacaggttgtctgggttggcaacctggatccaccc

SEQ ID NO: 86291 - DNA, 1186 bp, Homo sapiens
aggtcattcgctgtgctatcttcaaaaccttgagtttggcccccaatttttggcattcaaatgtttaaaagctatttatcttggtttatacaagtttcctttctcttctttttgtcatggtattctatttggtctgcagtttgaatgtagagaaagtggactgatcccccaagcgttgtctgcccccactctttcctccttgggtcccgccattcttttactgggcagtcgagggcattggaggggaagtgactgccctcagcctcactccctggggccatgaagaaaagctaaacagtctcatggcatctcagaataatgttgggtctcccaagaagaaaggtgtaagaataacgacatggctgattaggcgaggccaggatagggctaaggccaggattcctggctggcatccagtcaccccttctcccatccttccccctcttcttccacaagtccgcagccgagacactgtagtctcccagccacagtgatgagtgccctggagactccactgacctctagatgaaggcccctggccctggttcctgttaattaacctctgggtctttgagtcccccagcacaaacttctttcctgtaccctgcggcttggggtcacagggcatgccgggaagccacagctgaggggcgcagactgaagcagtgctccacctctccttctttagctcaggggttgctggtctgtggcaggcgccacgagtggcccctgtggctgttctcagtggcagtctcttaagttcccaccacaggcagctctttatcccctctccctacttgactctttctcttgcctgtgcttttggcctcaaacaggcctgctggtagcgctcagggcgtgaggctacactcctgccctgcctttcctgtcttcatggtctgccagggcataccttggggaggtggaccaaagacccaggactttttgcagtagccagtcctaccccccagttgtctttttaccaattcagggtgggagagaaaactgcagcaccccagcatgtgagttactcaggtgttgggggctagaagggacagtgcgtttaaacaacactcagagctctggccttaaacctgtggccccccaagtctaggagcctcatctcttcctggcagtcatgcgggcaggaggtcctgaaagggaaaacccattcagacaactgttc

SEQ ID NO: 86292 - DNA, 1032 bp, Homo sapiens
gcactcttacttctagccgaactcttagctctgggcagatctccaagcgcctggagtgctttttagcagagacacctcgttaagctccgggatgaccttgtaggagatctgtctccctgtgcctggagagttacagccagcaaggtgcccccatcttagagtgtggtgtccaaacgtgaggtggcttcctagttacatgaggatgtgatccaggaaatccagtttggaggcttgatgtgggttttgacctggcctcagccttggggctgtttttccttgttgccccgctctagacttttagcagatctgcagcccacaggcttttttggaaggagtggcttcctgcaggtgttccacctgccttcggagcctgccacccaggccctcagaactgagccacaggctgctctggccaggagagaaacagctctgttgttctgcattgggggaggtacattcctgcatcttctcaccccctcaaccaggaactggggatttgggatgagatatggtcagacttgtagataaccccaaagatgtgaagatcgcttgtgaaaccattttgaatgaatagattggtttcctgtggctccctccaaacctggccaagcccagcttccgaagcaggaaccagcactgtctctgtgcctgactcacagcatataggtcaggaaagaatggagacggcattcttggacttcactggggctgctggattggatgggaaaccttctggaagaggcagatgggggtcaaaccactgccttggccccaggaaggggccataggtaggtctgaacaactgccgcaagaccactacatgacttagggaacttgaaaccaactggctcatggagaaaacaaatttgacttgggaaagggattatgtaggaataatgtttggacttgatttccccacgtcataatgaagaatggaagtttggatctgctcctcgtcaggcgcagcatctctgaagcttggaaagctgtcttccagcagcctccgtggcctcgggttcctaccggcttctc

SEQ ID NO: 86293 - DNA, 1042 bp, Homo sapiens
ctacccccaagagactgggagaatcagctcagtctgcatctttgtgttcctgatgaggaaatgcaggggtagagaagttaaatggctcacccaaggtcatagtgcgtgtgagagtccagattagactcagccccctccatcagaggcagaattttagttggtaggatagctatctgggatcaggatggaaactttcacagtcagtcctcttcccatcctagactgggatgaagagcaggtggtaaggaacaattcttgtcactttggaggaagacttagggagggatgtgaacaccctgtgagaaaaggggagggtaaactcccatctgggagtccctctatctcagtgttgttggctttcaagcagtccagcccctgagggaagactcagcgaaagtcagaattctgttcccctgccaagcccagccttcttttgtctcgattatcagaattcagtgacgcgcagcgcccccatcaacagtgacagccagggtcggtgtggcacgcgtttcctcaccacctacgaccggcgctttgtcatcaagactgtgtccagcgaggacgtggcggagatgcacaacatcttaaagaaataccaccaggtatggtgagtcccaagcctgggctgcagaggatgggttggaagagggagaagagagccctgggggagcttcttagggaggggttggtcctctctggtaatggcagctgcttctgatcaccaagcagtgggactctcctgcaaccgtatttctgtgagctgaaatgcctactttaaaaaagaaaaaaggagccatgaaggctcatcgctgactgactcccagttggaaagtgttcacgcactggcatccgccccgtttcttctgaaagaggccccctcagctcggcaggcttgtttcttttcccgtcccatctctccactcatctggaacctgtccatgaggaaggcagggagccccgtggcaccatctgtgtgtctgtcctcagcctacttgggtcttcatttctggggcacctgagaagggccgaagggagcttctgg

SEQ ID NO: 86294 - DNA, 1781 bp, Homo sapiens
ccctagttgagatatggattgttcaccaatgttagctgagttaaaaatttcctaggctgggccaggtgcagtagctcacatctgtaatcccagcattttgggaggctgaggcaggcagatcacgaggtcaggaattcgagaccagcctgaccaacatggtgaaaccccatctttactaaaaatacaaaaattagcagggcatggtgacatgcgcctgtaatcccagctactcaggagactgaggcaggagaatcgcttgaacccaggaggcagaggttgcagtgagcggagattctgccactgcactccagcctgggcaacagagcaagactcgatcttctgacctcgtgatccgtccccttaggcctcccaaagtgttgggattataggcgtgagccactgcgcccagccgagccctgaactctttgtctctgttttccctttaagtctcggagccaggcttgatatgccaggaaaaaggaaatgggacagccaccacgaattgtttctgttggcagaaaaacaaagaagtggaatggtttcctctgtaggcacagatttgacagtcacattctcttgtgagcaccccctggaataggaactggcatgactcttctggggttttttttggctattgggagggtttagccaatgaagggtatcacagagcttgatgctgggaatttaaaaatcaactttattgaggaataatttatgtatattaagtgtgcgtattttaagtatacaatttgatgaatttcagcaaatgtatttgctcatgtaaccatcaccccaagcaacatataaaacatttctgtcaccgtagaatcacacttctcatgtccctttacactcagcaccccccgccccctggccaggcaactcatctcatttctctcattatagatgcctgctgtagaatttcatataaatggaattatacaggatacactcttgtgtctatgccagtttttgccagcagtttacctagtgtctgctccactgccaacttataaactaccctgcccccagcatccctctcaaagcacgtgcattcctatggcttccttcatttctccatgagtaaattgggttttttcccaactctaggaagatatggttccccagcccagttactgcattaacttgaacttcctccattctctgacatttctaaataaaaaaggtttgtaacataaaaggagcagcaaattaaatgccatttcccccatttatgctcctggaggagttctaatgactctaggttatcccctcactgccacctggggcctcattgagataacaggatttgcaaggaaagtgggagacacaaggctgtgccccctccccccagtccattaagtcaggactaaggtttcctctgtaaatcctgaatgcattagtggcaactgggttgagggtcaaatgtcaaatactctgctgtgatgggagaggacatctgtggttaattagaccactaactggctaaactcgaggtggggaagggcaggatctgccctcatctctgcaccaatggaaagctagctctctgtctaggatccagctccctgaagggatgaaagtcagaaggtttgtttgcagtagaggcaaggcatcctgccccatctcccttagtttagtgtatggcaggacttgacatcaggaactggccctgctttattttattttcttttttgagacaagatctcactcttgcccaggctagagtgcagtgcagtggtgcagtcagctcactgtaacctcaaactcctggcctcaag

SEQ ID NO: 86295 - DNA, 1347 bp, Homo sapiens
tgccagctctgtcaagtagcagtggtctgcccaaatagtcctctctttctgatcgtttggttgttgtggctgctcaaattcttccatcctccaggcctccttacctttgaatgtagaactccaccctgggtttccttttttttccctcttgaacaagatgtatcaactggagaagcacaggcttccttgaaccagacacttcacctgggtctctctgggttagggagaagaaagaatggctattaaccatttgagagaagaggatgcctggttataaggagggactattcatagtagaaataatatgtcttcccatagtttttgaaggtgatcattttaaagatgttgacttatctgttgtgtggctgcaatgttgtgatgatgcatagtgattatggtcctagataggagagataggtcccctgggtccttagggtgctttgagattgttcaacagcccctgccaggaagttggatcctgacagtttaagctggaagactgtttatgtggtgtttgttcagggtctttattctccctcttccaaccacttgctctttgccttctgaccatttctttatgaatccccacactaggaatgagcagaggaagtaaaaggacccgaaacaccaacttcactaactagaattttggaataaggaggatcaagcttgggtttcctgtggatttcagttctttaggttcacttgtgagtgcttgaaattgctcacaagaccaagcgatgacaaagagggccagcaagactttgcattgctttggcagaggagctgaaggtgcctttgggtggagatcgatgaaccgtaatctgagctagggttttagatcttgacctgtcatttaggaaagtgcatgtgtaaattgaggtctctgtggtttcttggtcttgggcaggttactgttttcactgtcatcactggtgttagtgagggtcctgccaggatagcgagtaccagtggtataatgcccagacctctaggagctgcttcgggccaacaatccagcccagtttgttactcggtcttcctgctgtcccaggggtcatctgacaacatttctagggaaactgggtgatcagaatatgaaccccatgtccctttctggaagtcaatccttgattttgttctgcatcctgcttctcactctaccaggcctctctctgctggttctgtttctcacagaaagcaacctgtctgtagagaactggtagaggcctgagagtcaggagtattacagctagctgcaatgaaccttgggtcccttattttacacatgaagaaaaggaggcctcaggtggaggattagcttgcctgtggttacagcaagagatg

SEQ ID NO: 86296 - DNA, 1117 bp, Homo sapiens
cccaggaagcctttttccaatgaggctttgacttattttccaaaacagatacattttcccttatggacactggtttaaaaacatttggttccaggtggagtcactcgaaagttatctatgggagcttaaaagaggttgtgtttttacagctgctctatggctaacaacccatttcttctgaagctgccagaatagttgactgattgaaaatgtttttgacttgcatttgcctgtcttctcttcctagccgcatgaagctggagagtgcatctacttcctccctggaggatcgggtgaagcggaatatctactctttacagagaacttcggtagctctggagaagaactttatgaaaagatgaaaactgtcccctctcttattggttttcctgcattttccagggaagctgctgaccccttaattctctttataagagttcaaatgacttctttcacagatgtcaaaccaccagtgttcaaagtgaccctgcttcattgagtcctgaaacagctcacttcctttgagagctagtgtgacttgctttgtgggacactcagtaactttgggttttgactctttaacgggtgggcactggaccatctcggtgggagtgcttgtgccactctggaaggctgttccctggggttgtgatgtttatcatgccacttccttcttacctgtgccaacagacctatttcactgcctcagcgtacaccagacccttcagaaacctctctggtgtcacccagatagattgtgcttactgagacaaatgaacgtttacttgatttagaagataatgtgacagaatgatgtcaggttaggtcaaagccaagggagtgacagaatctggaaaatcaaacaatacaaaaagccctaaatgaactgttaactatttgatctttggatgtaaaattgtaatgcgtatatgtacaaatgtacaatttttacatgcttttaaaaaaggttagctttgtgaaaataccttgtttggtcaatgactttactgggtaatagaaccacattgaaccttgatggcaagtaatacaataaggcaggccagctcgtttttctctctgaatctggctggtttaggaggagcctgggtttatcgac

SEQ ID NO: 86297 - DNA, 1106 bp, Homo sapiens
ttacaggcgtccgccaccacgcctggctaatgttttgtatttttagtagagatggggtttcatcatgttggccaggctggtctcgaactcctgacctcaagtgatccacccgcttcggactcccaaaatggtgggattacaggcatgagccactgcacgcaacccgcactatttctttatgccggccacatggggtgccgtgtttattgcatggtaggtgccagtagaatgaactctgattagctgtggttctctctcccttgtgtccaggttttaggtgtaggtttgcagaagtctgctttttaaagaaattgtatttctttttcttcccttgaaccaggaaaaaagaagaaaagttggactggatgtaccagggtcctggtgggatggtgaaccgtgacgagtacctgctggggcgccccattgacaaatatgtttttgagaagatggaggagaaggaggcaggctgctcttctgaaacaggacttctcccaggctctatctttgccccatcaggtgccaattcccttcttgacatggccagcaagatccgggaggacccactcttcatcatcaggtactaatggggggctaggaagggggtttgttacagatgctttgagaccctgctaaggccattgattctcttgctttacagttttctcttcgcttttttttttttttttttttttgagacggagtctcgctctgtcgcccaggctgaagtgcagtggcgcgatctctgctcactacaagctctgtctgccgggttcacgccatcctcctgcctcagcctcccgagtagctgggattacaggcacccaccaccacgcctggctaatttttgttgtattttttagcagagacagggtttcactatgttagccaggatggtctcgatctcctgaccaccttgtgatccgcccgcctcggcctcccaaagtgctgggattacaggcgtgagccaccacgcccagcctattttcttgataatattaatgagaccctgggtgcctgtagtcccagctatttgggaggctgaggcaggagaatggcgtgaactgaggtggtgcttgcagtgagccgagatcacgccactgcattcc

SEQ ID NO: 86298 - DNA, 1049 bp, Homo sapiens
tctgaagaagagctggcacccgcagaccctcaggaatgtggagaaagtgtggaaggccgagcagaagcatgaggctgagcggaagaagattgaggagcttcagcgggagctgcgagaagagagagcccgggaagagatgcagcgctatgcggaggatgttggggccgtcaagtaagtgaggagctgggggtgcgcttgtgtgtagggaattgcagagctgtcctgagatgcatcatccagtgttgtataatggctgagtgcttaagggcatgggttgtaatgccagactcacctggattctaaggttggctttgcatgtactagctgtggaactgtgatcaaatttgagagacttggttacttcagtaggaccagggagtaataatacccaacgccttcttaaggtttgttgagaatcaaatgagataacacgtaaggacttgctgtaagccgagctcacagtagatggctgataaccgtgatggaggatggttgctctaccctgcttctcagcatatgttgaggatgcagtcctgcctttgttaatgtatttcaggcttgcttgggtcggcggggacagggggcagggagtgaggtcccatgagagaaggtggatggtatgcttgtcaataaaagctgagtgattacggccaatgccactagattttaccctgcttcaatttcctgttgtataatataggatacgagtagcagataataactaccccatccatctcataaaaggagatgggagtaaatatgtttgagaaaataaaaagcatacaatatgcagtgtattcttaagtcagaataaaataaaataacagatagactaaaactggggactaggtgcggtggttcatgcctgtaattgctgtattttgggaggctgagaaatcacttgagcccaggagtttgagaccagtctgggtaatgtagtgaggctccatctctgtttaaaaatatataggctgagtgtggcggcttatgcctataatcccagcactttgggagactgaggcaggcagatcacttgaggccaggagttc

SEQ ID NO: 86299 - DNA, 1255 bp, Homo sapiens
tgccaggactgggaggagttgggggtcccaggtcccatttctacatcccaattcagtgatactgggatcttaataacctacctgtaaggtgaagttggaaaaggcataggcaaggatagttgtcctgagagttttacacttgtgagaaaatactggcagctttgattttaagatgtgaatagatgatcgtggttcatgcctttactccctatactcccagcactttgggaggccaggcttgccaacatggcaaaaccctgtctctatgaaaaaaaaaaaaaaatctgggcatggtagtgtgcacctgtagtccaagatactagagaggctgaggtgggaggatcaccttgaagattgatatttacactgtcactgtctcaaacgctgagtgtacattctgtctagttggaaactgcttttgtggtggcactgcgacttgacaggttaatgactgctgtccttttttcttctctcagtacatccagcagtggtcattcgacaacgaaagtcataccgtagaaaagatggcgtgtttctttattttgaagataatgcaggagtcatagtgaacaataaaggcgagatgaaaggtaggaaatcagtccagcttgttccttaggtctctgaggttgggtggattgtctagaagtacaggccaaggatcttctgtgtttgacgatgtcttaatctgtcccccacatgtttttattttattttattttatttttttaatgcaggttctgccattacaggaccagtagcaaaggagtgtgcagacttgtggccccggattgcatccaatgctggcagcattgcatgattctccagtatatttgtaaaaaataaaaaaaaaaactaaacccattaaaaagtatttgtttgcagtgcttgtctccctgttcacttccagggttcaagcgattctcctgcctcagcctcctaagtagctgggattacaggcacctgccgtcatgcctggctagtttttgtatttttggtggagacagggtttcaccatgtttgccaaacgactcaaactcctgatctcaagtgatctgcccacccaggcctctacagtgtttttgacataccctgaccatcacttttctgaaatggaaactctgggcattttttttttaaagcaatccttgcttttttgtgagtttgcagactttcagcatcttccaattgctgtatttacaattttggcctcaaaaagtattatttgggttttgagtcccaaaaataatagtag

SEQ ID NO: 86300 - DNA, 1290 bp, Homo sapiens
gcgaggtgaggttttgtttctggaggatcctccaccatctgtcgtgcagtggctggcggattcgtcaggagcggtggccctaggcagctggggcgctttgctctccttcaggccggagagagagagccaggccaccgcgagagcactgccagggccctcgaaagtggcagtggggtgctggagagttgagatggcaggatcccgacgtgaatgtagtctggataccgcgagatcgctccgcgaatagggctatcgtaatggggttgaagttagactggattaggccctggtttgcgcgacctctgcggttttatgccttgcaggagtaattgcgttttgcgaaagttagagcaagggttgagtcgtctaggtttcttaatttcgatgtcagagtgttaatagtaagaaataggctactttccgtgagaatcgggtggcacatggggacggcataagtaaaatccgagcgagctaatctatagcgtacagtctatcaaagcatgtgcggtgaattacagcttgagtatgagggggaactccgaaccatgtctagattgtgatctctttatcctgtttcccttccctttatatccacaggacgtggtgggtcctctggtgcgaaattccggatttccttgggtcttccggtaggagctgtaatcaattgtgctgacaacacaggtgaggtctttgcacgttgctatactcccccttttaaaagcactcaatgggcctgtggctaatgacctattgagccgtcaagaaaggggagagtgaaaacatcgcttttgggtgaagtggcaacatgtgttgtttgcttcaatcggtggtgtgacaaggcgttcttgcggactaactgcttgggcagtgagtggagggaggggctttggaagtgtttgggaaatgttatactgatggaacggcctgatggccctcaacattttttatttttatttacattcttttgtaggagccaaaaacctgtatatcatctccgtgaaggggatcaagggacggctgaacagacttcccgctgctggtgtgggtgacatggtgatggccacagtcaagaaaggcaaaccagagctcagaaaaaagggtgagtaaacactgagcccaccttaatactgatgagtagtggggggacgctttcctttattggaaaatggatcagttttcaaggcctcaagtttgttttccattgagaggcagtgtgagataagtatcttaagtttttgctcatattgtgttggaggggggaccatcatcttgtcacttccataccttagt

SEQ ID NO: 86301 - DNA, 1043 bp, Homo sapiens
tgcggtgaatcagttccagcgttcaggaggatccaaccccaccctcgacgggcttgaggggttagcccgcctcccgcagcccgggcgccccagatgtgcagcctgctcgcctctgcgccgcctccggctggggaagggccctgggcaccgggcgcagtcagcctgagagcgctgaggcgccagcaccgcgggccccgccgtccccccaggaacccgcccccgcgcagccccacgtcgcccggagagcgcgcctcgctgcgcgtgcccttgcccgcgcccgaggcgcgtgcccgccccagtgcagcccctcctccccgctgtgtttattaggggaaggagggcggaggcggaggccagttccccagctccagccgccgtcgctgctgcctgtgtagttgcagccgcggccgcctcccgccagctcgcctcggggaacaggacgcgcgtgagctcaggcgtccccgccccagcttttctcggaaccatgaaccccaactgcgcccggtgcggcaagatcgtgtatcccacggagaaggtgaactgtctggataaggtgagcccgggaccgggagacgcgtctttgcaatcccccgcagtgctccgaatccagggaggagagaagggccgggtctttgccgccttatccccgcgatcccaggagaatggagggagggcgagcgggcggtgtcatggggtgtggggacacatcccagtctgaaaaccaggagatctggggcgaggcgggaagtccacgcgtagcgggcagccgctgctggagaggggtgggctctgtgtcccggggttgggaggacgggagaggagcagggaagtcaggcgccggggtgtgttgggggaaggttaggggtgcagtcccgccccctacggcctggagagtgagaagagacggccgctccctctccgctctgcgccgagcgccaagtaggcggaagcgcggggcgctggtggagggggcgggggggcggggcagaggctggggggccctgcaaaaccgtccgctccggcgggggtggcctggcttcctg

SEQ ID NO: 86302 - DNA, 1035 bp, Homo sapiens
tcccaggtggaagtgcagaggtgtgatctcggctcactacaacctccgcttcccgggttcaagggattttcctgcctcagcctcctgggtagctgggactacaggcgtgtgtcaccacgcccggctaatttttgtatttttagtagagacagggttttgccacgttggccagactggtcttgaactcctgacctcagatgatccgcccgcttcggcctcccaaagtgctggcatttcgtgcccgacctgtatcatatacctttgaaaagttcagagggataggcagctcctaagcaggtgtggctgagaggccccagaatatctctcataatggccgagcttggaaacgagttgggtttgaaggatgaagtgctttgttttgcacccaacctgccaagcacatctttccccagaactgagtgctggaggtggctggggtccatctggcctccccttcgctgtctgggcagctgtggtgtagaggagaatgccttgggcaaggtctctgtccttgacactggacctcagtttcttcatctgtaaaacggcacaatgagaatgccagcctaaagctgtgtggtgggttttgagagagaatgtgcacaggactcagtgtgccaagatgttgctttgtgtctctgtaaattgtcctgaagcccgaggctgctgccaatagctgcctgtttgccctgccctatccctgtccagtccctgttcctgccccgcttcttcctgtcctacatgcctctccctgcaaactccccagagcagctgatagcagggaggaagggtgggtggggcacctgcagagagcccaccacccacttggaatgattaacaaggggccagtacaggctggcctatgggacaaaggacagctgtgctctggactctgccctgcacccagctgatcacctgtccctcattcctcgccatggcccagtctgtcatggggttgggttccagcggagtcaccagctgggacgggtggcccctggtctgtcttagcacccatgttggcatgcacacatttcc

SEQ ID NO: 86303 - DNA, 1072 bp, Homo sapiens
ggccgggccagggcgtgcccaagcataggacgaagttcccaggagggcatgctctgtgagaagcccagaggctcctgcccctcccccagagtcacccccactctgttttttctgtcctgcagacactaccccaagcagtccttcaccatggtggcggacaccccggaaaaccttcgcctcaagcaacagagtgagctccagagtcaggtgaggggctgggcggtgctggggcctggcagggagggatgctggggagggaagttgtaaggtcggcatttggcaagagtaccttcccctgcggttactctgcaaggccaaggtgctgaaatcctagcattgcctttaatcttgaccccacccctgactttatcaaaggagcagggtagagcgttctcccacttcctacctagagggggttggagaggtgtgggtgtctatttgagcccgctctggggctccctaaagcctacctcctccaggaagccactctcccctccctcttccccattcacactcacccacaaaggaggggtttggggaggaccagggaatttgcccctccaggtcatgccagtctgaggctgggcaaccaaccctctatagccgcgtcccaaacctccacccactgaagggcaaggtgtgaagggggccctgccatgggggcacaggatagggggctgttccgcctctgtctcctttggcttgactttccagaacactgctgagtgggaggtatgtgcccctgtaggaggggaggacgggttccaggcctagggagaacttggtctttaggggacacggaggaataagcaaagggtctggagtcctgagaacagaacagctgacccaccctgcctgggggtgcgagggctcctgggacaaacctggccagtgatgaggtggggtggggtggggcggggcttcagccgatgaaggattaggcgcgagaatacatgtaggggaatttaccacgtgggcagcgcgcccaggacccactcaggatcgggagaagactgcagaggttccacccgggccacagaggggatctctcccagttcctccagaggggact

SEQ ID NO: 86304 - DNA, 1026 bp, Homo sapiens
gtccattcttcagtgtctctgttttttaaaacctgcgacagcttgtgattcctacccctcttccagcttcttttgccaactgaagccttcttctgccacttctgcgggctccctcctctggcaggcttcccccttgatcgacttcttggttttctctctggatggaacgggcatgggcctctctgggggaggcagggctggaatgggagacctgttggcctgtgggcctcacctgcccctctgttctctcccctcacatcctcctgcccagctcctcacatacccacacattccagggctggggtgagcctgactgccaggaccccaggtcaggggctccctacattccccagagtgggatccacttcttggttcctgggatggcgatggggactctgccgctgtgtagggaccagtgggatgggctctacctctctttctcaaagagggggctctgcccacctggggtctctctccctacctccctcctcaggggcaacaacaggagaatggggttcctgctgtggggcgaattcatcccctccccgcgcgttccttcgcacactgtgattttgccctcctgcccacgcagacctgcagcgggcaaagagctcccgaggaagcacagcttgggtcaggttcttgcctttcttaattttagggacagctaccggaaggaggggaacaaggagttctcttccgcagcccctttccccacgcccacccccagtctccagggacccttgcctgcctcctaggctggaagccatggtcccgaagtgtagggcaagggtgcctcaggaccttttggtcttcagcctccctcagcccccaggatctgggttaggtggccgctcctccctgctcctcatgggaagatgtctcagagccttccatgacctcccctccccagcccaatgccaagtggacttggagctgcacaaagtcagcagggaccactaaatctccaagacctggtgtgcggaggcaggagcatgtatgtctgcaggtgtctgacacgcaagt

SEQ ID NO: 86305 - DNA, 2271 bp, Homo sapiens
gtggaggaagcccaccaatctgccctttgcagtgtgcagggtggaaggtaagaggttggtgtggagttggggctgccatagggtctgcagcctgctggggctaagcggtggaggaaggctctgtcactccaggcatatgtttccccatctctgtctggggctacagaatagggtggcagaagtgtcaccctgtgggtgtctccctcgggggctcttcccctagacctccccctcacttacataaagctcccttgaagcaagaaagagggtcccagggctgcaaaactggaagcacagcctcggggatggggagggaaagacggtgctatatccagttcctgctctctgctcatgggtggctgtgacaaccctggcctcacttgattcatctctggttttcttgccaccctctgggagtccccatcccattttcatcctgagcccaaccaggccctgccattggcctcttgtcccttggcacacttgtacccacaggtgaggggcaggacctgaaggtattggcctgttcaacaatcagtcatcatgggtgtttttgtcaactgcttgttaattgatttggggatgtttgccccgaatgagaggttgaggaaaagactgtgggtggggaggccctgcctgacccatcccttttcctttctggccccagcctaggtggaggcaagtggaatatcttatattgggcgatttgggggctcggggaggcagagaatctcttgggagtcttgggtggcgctggtgcattctgtttcctcttgatctcaaagcacaatgtggatttggggaccaaaggtcagggacacatccccttagaggacctgagtttgggagagtggtgagtggaagggaggagcagcaagaagcagcctgttttcactcagcttaattctccttcccagataaggcaagccagtcatggaatcttgctgcaggccctccctctactcttcctgtcctaaaaataggggccgttttcttacacacccccagagagaggagggactgtcacactggtgctgagtgaccgggggctgctgggcgtctgttctttaccaaaaccatccatccctagaagagcacagagccctgaggggctgggctgggctgggctgagcccctggtcttctctacagttcacagaggtctttcagctcatttaatcccaggaaagaggcatcaaagctagaatgtgaatataacttttgtggaccaatactaagaataacaagaagcccagtggtgaggaaagtgcgttctcccagcactgcctcctgttttctccctctcatgtccctccagggaaaatgactttattgcttaatttctgcctttcccccctcacacatgcacttttgggcctttttttatagctggaaaaaacaaaataccaccctacaaacctgtatttaaaaagaaacagaaatgaccacgtgaaatttgcctctgtccaaacatttcatccgtgtgtatgtgtatgtgtgtgagtgtgtgaagccgccagttcatctttttatatggggttgttgtctcattttggtctgttttggtcccctccctcgtgggcttgtgctcgggatcaaacctttctggcctgttatgattctgaacatttgacttgaaccacaagtgaatctttctcctggtgactcaaataaaagtataatttttacctgcggacttggtttcctctctggctctgagctgctgttgtgtgtgtctgtgtgtgggtgtgtgtctctagctgtaaggtgctgctgtgtgtgtgtgtgtctagctgtaaggtgccactgtgtgtgtgtgtgtgtgtgtgtcctgtctgcttgggggcactggcctgtggccctcctgggacctctgctgcccctcggggagagaatgacttgtctggatgccaagggggagtttgctgctgtctgtcaggcccttggcccctacttcctccttgctgagaactccccaccaacctacttctggctttccacccgctcattcctctctgcccaacttggtgatgctcccggaagcttccctgagctccgtctcgtattactgtgtcacttcctcagtgacatatctgtctccccactagccagagcccttggggcaggtgatgagtctaattcatctctaaatcccgggtacctgcccaggagcggtgcggagctgttgaattaatgaatgagcttggctggggagcagttctagcactctgccgctgccaggcagagagcaggagctccacgcatttgagga

SEQ ID NO: 86306 - DNA, 2174 bp, Homo sapiens
tttagcggcctcattgtgtttttattactttgtggttttgctcacaaaacatggtttagcgagccaaaacaaagagaggaaaaatgtgaacacctcacagccaaaatcagtgatgccacatttcaggctccaaacaagccaatttataaataaacatgctgtgttcgccaaatcaagaggaatgtgttaagagaagacaacgtgaactgatggagaaggtgctgagctggacggggagtgggaaggtgggagcttggcctcagccctgcccctgagtagctgggtgatgtggacaagtcactggacttctctgggctggcttccacccctgtgaaataggaggtactagactaactggtctaaagtgggacctgagcaatcagctgcctggtcctttttcaggtcacacagcaacttagaccaaagcatgcctttctctttcattatcccgatagggtgaccaaattgttctatccaggactctcctggttctaacacacaaagtcctgcatcccaggaatctcctcaatcctgggcacattggaatgttatagaaccaaaccaggtcttctcacctggcgcaataacaccagatgtccacactgagactttgcagcaatagagaaaggaaggcatttgtttgcaggactccaagcaaggagaattgggtggcttatgcttaagatatgaactcttgatggcttgcaggtaaggtttttttgttgttttttttttttttgagagagtctcactcactctgttgcccaggctggagtgcagtggtgcgatctcagctcactgcaacctctgcctcctgggttcaagtgattctcctgcctcagcttcctgagtagctgggactacaggcatgcaccatcacgtgcagctaatttttgtatttttagtagagacggggtttcactatgttgaccaggctggtctcaaactcctggcctcaagtgatctgcccacctcggcctcccgaagtgctaggattataggcatgagccgctgtgcccagccacaggtaaggattttaaaaggcaggggtaaatttcaggaaagcagatgttacaggtaaaatcataaatcaatatatggaagctatacgttggtttgacctaaaaaggcaggacgtctcaaagcaggacccacaagtcataaggtgggttcaaagattttctgatttgcgattggttcaggaggcgaagctttgtctagacatgtgggatcagcagaaaagaatgttagctctggctcatgggcaatggcctcctccaggtccctcaggaagaaatttagaacaacgaactatagtcagagtcagtcctcagcacccgtttatctgaggtctacatgccagcggatcccttttggaggggtctgggcttctgaaaaacaactcagggacatacgttaagatgttatctttagtttgtagagaggggaaccaaacatctcctggctctaacttcctcagctattgttttagactactattaccttcctgcttaccaagttgctgatttacttctcagggctagctaggatttccctgaaggaactcaagattttcctttatccccatgtgtgggtgtccccagctccctcgccatgtttggtcccctctacccttggcacagccctcccaccccattggctgaagaaataatgatttcaagcacctggaaagcactttagaatatagaaccttgctagttaaagtctggtccagggccaggcacagtggctcatgcctgtaatcccaccactttgggaagctgaggtgggaggactatttgagcccaggagtttgagaccagcctgggaaacacagggagacattttctctcaaaacaaaacaaaaacaaaaacaaaaacaaaacaaaaaaaattagctgggcacagtggtacatgccctgtggtccgaactactcgggaggcttgggcccaggagttccaagcttcattgagccatgatcacgctactgccctctagcctgggggacagagcaagaccctgctttaaaaaaatgtaaatctgtataataaagtgtggtccaggccaggtacagtggctcatacctgtaatcctgctctctgggaggccaagatgggaggatggcttgaggccaggagttcaaaaccagcatgagcaacacagcgagaccttg

SEQ ID NO: 86307 - DNA, 1036 bp, Homo sapiens
ttccacactctagctttcggcaggtttcccagtggttgggggatcacagcacggaacattttagggagagggtccctgaaggtcagttgtgtggctcctggtaggcccaagtgccccagggcccttataagagacagtcttggttggctctgtcgctcaggagtgtggggtccccatgggggcgggggcatgcccactgactttgcctctgtgccttctgcagcgtagacctcaccactggccagccatgaagtttcgcagccaccctgaccattccacctatgcggaggtggagccctcgggccatgagaaggagggcttcatggaggctgagcagtgctgagaacaccaagtctcccctttgaagactttgaggccacagaaaagacagttaaagcaaagaagagaagtgacttttcctggcctctcccagcatgccctgggctgagatgagatggtggtttatggctccagagctgctgctcgcttcgtcagcacaccccgaatattgaagagggggccaaaaaacaaccacatggattttttataggaacaacaacctaatctcatcctgttttgatgcaagggttctcttctgtgtcttgtaaccatgaaacagcagaagaactaacataactaactccatttttgtttaaggggcctttacctattcctgcacctaggctaggataactttagagcactgacataaaacgcaaaaacaggaatcatgccgtttgcaaaactaactctgggattaaaggggaagcatgtaaacagctaactgtttttgttaaagatttataggaatgaggaggtttggctattgtcacatgacagactgttagccaaggacaaagaagttctgcaaacctcccctggacccttgctggtgtccagatgtctgcggttgtcagccccttcctttcccccgacctaaacataaaagacaaggcaaagcccgcataattttaagacggttctttaggacattagtccaccatcttcttggtttgctggctctccgaaataaagt

SEQ ID NO: 86308 - DNA, 1390 bp, Homo sapiens
gcattagctcttggcaatatcctcccttccatctaagatttgttttccagactgccttgagccaatcagacccactttggaaggtttcagagggctctgtgggtctctgagacgagcattctgatgccttgaccttaagtgggcagctctcaaggaattcttttggtgcatgcagaggggatgttgggcatggcctcagccactgctggctcctctgggagactgtgcacctgctgaccttaatgatgcacctgctaagcctctggtcctctggcttttgaggaaggcagtcattctgggagtgagaagggtggttccaggcatctcctctttagaatcccatccaggttccttctcactgcaagaattttccagtacactcaacactgattctaggtggaaagcatcctattctcacaccatagactaacatagatgggtctattcatctgtgccctcttttttgccccctccctttatatcttcttgcaaagcaagcatgctgcatgtgccaagcatgtcactgtgagttgccctaccctcgctcttatttaacctgaaccaaaagctgggggccattgcccccattgatcgatcacaggggaaaactggggctcagagaagtttaatgaattggcctgcatctcgctgctagaaggtgacgggcccagcatttaaatatcaactctccagaccctgtggccatacacttaccacagtctatttattagtctgagtctgggctttaaaaaaaccctgtccagccgcctacttttgaagttagctgttggtgaccgttcagatttgctctatttatttaagattggcatctcagccccttccttgaggaaggatttgaagcagctgacagataaattgccctgtaagagaagatgctttcaggatgaagggaaaggtgtaaatgcattcaagacacagcactggctctctcctgcaggcagagggcaggatgtgcgaggacttccaggatgaggaccacgactcagcctcccctgacacttccttcagcccctatgatggagacctcaccactacctcctcctccctcttcatcgacagcctcaccacagaaggtaagttctgagcccaggaggggagcagagaggaggccaggaaggagagctacccacccctctggggccccctctctgtccctgacagggatgatctcatgggatgggaactgccccatccttttatagctaagggggcctgaagttcagacagtttaggtcacttgctggtgagaagcagagccagatttagaacttgaactctactcctgggctctaaccactgtactggcccacatcagggctacagacaattcactgtgaagaggggaaaaattaatagcccaggccagtgc

SEQ ID NO: 86309 - DNA, 1089 bp, Homo sapiens
tcctggcctcactgcccacagtcagccaacatgagagtatctctggccagtaccactctgactcttgggacaagaacatggcctgggggcttctggaagaccatttagggattccagctactcaggctccctcctcacacccaggaggagagggttcatcctggaacagggcttctcggagtgttccacagctgtgggcattagaccctgggctccagttaaacacactggattcctgggacccatcccagaccctctgtatcaggatctctgggagagaacccaggaagctgcattttaacatcatgcttcatctgcaaacaagtgtgagaactgccagttcagagacaaagtctggtccaaagacccatgaccccaaaacaccacctcaagatctttcttgggctgcaagggatttttctgaagaccaggggtgtggactacaggcatccatggaaagttgggagagctaaaaagctgtgtttgcttgcttttagaagctcagaaaattctgggtgagattcagtttcagtgataatgttcttaaatccatctcctcttccactccttgttctgaaatcatttcctcacagattagactcagcattcaagctctgttccctgtccaagataaataaatgacaggaggagggggaagaaaaagatttccttggggactagagttctcatgagagtgggaagtcctatgaactccaagggcttttaaggcaatcttgaaaattgctaaattatagtctctgagttcctgtgcagctgtcgtgctgctcctttccaatgctcctttccagtgctttttttttttttgagagagttttgctcttgttgcccaggctggagtacaatggtgtgatcttggctcactgcaacctttacctcctgagttcaagcgattctcctgcctcagcctcttgagtagctaggattacaggcacacaccaccacacccagctaatttttttgtatttttctagtagagatggggtttcaccaaaccaagagtttggccaggcttgtctcaaactcttgacctcaggtaatccatctatctcggccttcccaaaggcgtga

SEQ ID NO: 86310 - DNA, 1085 bp, Homo sapiens
ttacaggcgtgtaccaccacacccagctaatttttgtatttttagtagagacagggtttctactaaaaaccctgttggccaggctggtctcgaactcctgacctcaagtgatccacctgcctcggcctcccaaagtgctgggattacaggcatgagccaccatgcctggctgggctgcctgcctttcaaaattgaagaaaaccaaccccaagtcatggttcctgggtgggtatcgtggcctagagagaagtatcagagcacctcagattgtcattttaaaaaagaagcctttcatgtacagttccagctttttcctcccaagggtgttgtggtaggtgtttctgtctttccactccacagacaagaaactgaggtccaaatgacttgcctgaggttatccagcaagtcgtgagcagaactagaacgaacttggatctcctgactctgaggtcctgtgagaagtttctgcagggaccaaagtaggactcgagcctggctgcaagccctgagccttgctgggggatttgtccaggaggggtgaggtggatggtggacagcaacatgcaaaagtcagcctgtccatctgcagacattcacagagcactcagcgaggttcaggaccagatgatcatggtctcacacatccccagcctccaaatagaccctcatgtccacagtgtggtgagtgcagtgggaggggggcacctggcctgagccaggcagaggagggagctggccaaggagggctgctcaggggaagtggcccttgagctagatctgcaaggatgagctagacaggaagaaggggtggaagaacatcttgggtcaggggaatagcagttgtgaaggcgcagaggcaaggagaagcaagcatgggatcccatttgtcctgcccccaagagcagccaggtctctgcgttgagtcacttagcctcacaccacaacactctcctctccaggtccgcacctgtccctgtctccagcagcgccaacatcattgtcccaggctgctgggtgcacttactgccttcagtgcagcaggctgacctgtcagactgtccgggaagaggcctcgatgccctctg

SEQ ID NO: 86311 - DNA, 1470 bp, Homo sapiens
ggtgtctgcaccgacatgctgaaggagtcaacaaatgtgctgcatggtggcgctgtgctcttgtagttttctcgtttaagtagatgttttccgtctacttaatggctaggcttggtaaattgtaaagagatgtggcctgtgtggtggctcatgtctagaacctcagcgctttgggaggctgaggcaggcagattgcttgagcccgggagttggagaccagcctgggtagtacagggagacccatctctactaaaaatacaaaaattagccaggcatgatggggtgtgcctgtaataccagctacttgggaggctgaggcaggattactgagcctgggaggtcaaggctgcagtgaactgtgattgcgccattacactccagcctgggtgacagagcgagaccctgtctctaaataaataaataaatgaaaaagtaaagtgctatacaaagttgtatctgtctatgggttaatctgtctgaacctcagtttccccacttatgaatgaatggcaagacaacttgattttttttttttttttttttttttgagatagagtctcactctgttgcccaggctggagtgcagtggtgcagtctcagctcactgcagcctccacctcccgggttcaagcaattctcccgccttagcctcccaagtagctgggattacaggtgctcaccaccacgcctggctaattttttaaatttttagtagagacggggtttcaccatgttggccagactggttgcaaactcctgacctcaagtgatccacctacctcggcctcccaaaatgctgagattacaggtgtacagccaacttgacttcttaactcccttgctctctcaacctgatatgtctgagtctctgcagctgtagctcatctcctctctcataaagcccacacctgcgcagtgctcgccttggggaccacctggactcctcatcccacccactctgtccagctgctttcctgaggaggagcaagttccctgatctgcctgggatggaaggaagggagggagacgtgggaggaggcctggatctcattctaaaccatccggctccagtgcaggagtcgggcgaaggaaggagctgcagggctggagctgtcatcctcctggtaggaaaggaagaccaaggctaaagtcctctccactgcctctccccatgggagtcagtgggtgtgtgttgcggggagatggattccaagataagtactctctgagcagccctcagagggggcgtgggaaattcacctcagtctccagggtccccagtccattcaccacctgagcactgccgtcccccactgctcccatgacctcattctccagtggtggcaaaagcaagaaacagtaatcaggaagaaacaaggggaagctagggtgggggcagtggcatccacagcaggagaagcaggcagcctggactgtgggggcagcagaagagaggagaggcctgcagga

SEQ ID NO: 86312 - DNA, 1714 bp, Homo sapiens
cacgagtcagtgtggacagccctgtgtcccggagttgctgaataagagggagagggagactccactgagagcttgggctcctggggccaggctccctgttgataggaggcacctgtctttaatccctgcacttcagttccacatcccacttccccagggatggggaaagctgtgagtcctctcctcttcctgccccctcgccctatagtctgtgccctgctgaagggacagggaggaccttctcctatctggggtcctttggctccatacacaccagacccagagcccgccagatggggatgggcgacagaggtctcaggctcacttccagctctgcctgcgctgcccttcttgcccttggggaaaaggcccccaaagcggcccctctgggccatttctggtgactcctctgcacctctcccaccctaggcttcatcttcatgggggacgtgatccatcggatgctcacagctactcagtatgtggcgcccctgatggccaacttcaaccctggctactccgacaactccacagttgtttactttgacaatggtgagactggatctcagaatttaagtcacccagctccagggatcccttgtccagtcctttagaggagcacagggcctagagagggcaagggtcccacagtcccacggcaaagcagccacctacctttctctgctcagtttcctgacctgtcagataggggcaaaaatgcctgctacccagaagaatctgatgagataacaaaacgacagtgcttggctcttagtcgaggtaaaataaatgttaggggcctttattgttacttacattcaccaggatgtcccttgagccccgtctgaatccaggagaacagacattcctccttcttttatctcaaggagtcagaatagacaagaaggaaagggaaagagatgatcaagtacagtatctggggctgaagcaggatcttctggctcctctgctgcttggaagccgcgctgctttagtgagctgcccagctcctgcctccttacctttgcaaacttccccatcatcccgaagggacccaacctgtggccgctgccctccgactggcatttctgtagggccctgctccttgcatgatctcccgtccagccgggtctctgttcttctccccagggacagtctttgtggttcagtgggaccacgtttatctccaaggctgggaagacaagggcagtttcaccttccaggcagctctgcaccatgacggccgcattgtctttgcctataaagaggtgagtgggcccagctgcagagacagctgggtcttggagcctttcttcattcagcaaatatttagagaatttgcaatgtgccaggcatggggcttgctgctggtaatacagcagttaacaagatgtttgcgggtcctacccttttggagcagtaagtctggttgcggaggtggacaataattacagggacaaatgtagaatcaccactgtgacaagcgctcccaagtagaggtgcctggtgctagctgagcctttcacagacctcttaaccttggcagaggccaggggaggctttgctgaggaaaagagttgaaatctgaaggataaatacgagttcaggaagcaaagaggagagtgaagtatgttctaggagagacaacagcacacagcacatgcaaaagtcctgaggcaggacagagcacggctggcacaaagcactgaaagaa

SEQ ID NO: 86313 - DNA, 1674 bp, Homo sapiens
tactccctcctggacccagagacatcaaatggattgtatcaggatgcacagcctgaccacagcattcctgaaactggactctcccatgacttagggaagaaaaagctgacagtggccttatgagtcacatctcagctgccagatggggcccttccccaccccatttctgccccatctacagactggggcgcaagaggattaatggctgcttagcctaagggctgggcactcagcagggggctgagtagagaaagcaattagggtgcagctcctggagacaacctccttggcctggggcagttctggggtgctggcacagggaggagaggcctggagggagtgctcttctctcagggtttccgggaggctcttggaagcctcggtgtgtctgggggtgaatctattaatataattgtgcgtttctgggaatgggtgtgtgtgtcatggacgctgggttcgcacctgtgtcagatgattttgtatattatgtatgtgtacctgtctgtcactgtgggctgtttgtgggtgtctgtgatgagcatgtgtaagtgtgagtgtgcctgtggctgtgtgtgtaggtgcctgcggctgggagtgatgagggtggattcttaggacgcaagaagcaacaagaggaccttcttctcagtatagatttattttatattttaataactattttcttaaattagtatgtgctgacagttaaaaaaaaaaaaggttaaatagtgctaaaatcataaaacaaaacagcagtcctgcccctcctctcccctggggcctgcccccttccctttctcagaaggctctgtctgggctgtttcctctggagtttacttccatatttccaagggatttgcttatactgtactgctacctctctgtgcactggttttaggccgtacctattcatggcctgctgcggctcagggagatttggcttttgtatactcccgctgagcaacctttcaccctgccgcccaatcttcctgttcaatccgtgtgctcggttgtggattgtgacgatcatgtacatagtgttcacttctaatccaggcagggtcataacattgtttcttttcttgtatgattttggctcttcctggatcctggccccctctcctgcccttgcttacttagttttctgtgcctaccgtagctacattttcctacacgtcccctagcctcaaatgtaattccagtgtgggctgggcatggtggcccacacctgtaatcctagcactttgggaggcccagacgggtggatcgcttgagctcaggagttccagaatagcctaagcaacatagtgagacccacgtctctaaaaaattaaaacaaaaattatctggatgtggtggtttgcccctgtagtcccagctacttgggaggctaaggctggaggattgcttgagcctgggcggtcaaggctgtgctgagctgtgacctcaccagcctgggaaaaagaagaagactctgtctccgaaaaaatataaaagaaagaaaataagataattcagggtggtcaaacctgtcagttcctttatccccccgagaaacttctctcctgtcctgcactccaatcccgcccagccactcgcctgctggtaccacgggtgccatcctggggcctccctttctgttcgtcctgggaacccctttgtctccctcctgtg

SEQ ID NO: 86314 - DNA, 1032 bp, Homo sapiens
gcacagtgcccccctgtgagtgcctagatcccagggaagggaatggagggagaacatttgggttgtcctggtttcctctggcctacatgagagacagggtgaccaggaacacctgggtcaggcctgtgggtgcagactggtcttctgggaagagcgcaggtcccgtcagtcaaagactgggttcaagccccagaagcacccttctgcgtggagagtcaagccctgtctcccagccttggttgccttatctctagaatgagggagttggactgagtgccaaaacttcttgcagttctgccaatctgtagatctgagagctctccttcccttctacatccagaggcctctttttaaccttgtccttcaatcccttgactctacccactgcacccaggccacaccctcaacccccttggccatgccccactcatcccagccctgccccctaaccccgccttcacaggaaatgtttgacatcatcctggatgagaaccaattggaggatgcctgcgagcatctggcggagtacttggaagcctattggaaggccacacacccgcccagcagcacgccacccaatccgctgctgaaccgcaccatggctaccgcagccctggctgccagccctgcccctgtctccaacctccaggtacaggtgctcacctcgctcaggagaaacctcggcttctggggcgggctggagtcctcacagcggggcagtgtggtgccccaggagcaggaacatgccatgtagtgggcgccctgcccgtcttccctcctgctctggggtcggaactggagtgcagggaacatggaggaggaagggaagagctttattttgtaaaaaaataagatgagcggcagcttctggtgtctgtggtttttgatgggtctggggcttctggtgctgtcttcctgggcctggtgccataggagcgcatctgctgcccgctggatatgaggcctgatgggagcgcttttaagacaagggactaggaaggacatgcgaggaagactgataaactgattcgc

SEQ ID NO: 86315 - DNA, 2120 bp, Homo sapiens
ccatacagcctggactaggcctcaatggttgtccctggccctgagggcacagagctgcctgtggcatcaccagtggggctggagcacctccgggggtgccgcatgtgagaggatgagagccccccacgcccacctctttgctcacaagctcggtttgcctctgcccacacagcaaatcaggcgataactccagttccagtctgggagatgtggtgactggcacccgccgccccacaccccctgccagtggtaagagccatcgccatgcaggggtttgggaagaagctcctgggtggggtggtctccccactccctgaatcctcctttccctgcagtaggaaacaccccaatcctgagtcccccaagcacatgcagtggttccccctccatgaagagtaggctacccctcaagctgggcctgtcatgtctctcctctcccttttctttggtagctccatctctctgcctgattcccctgccctgcccccattcatttctcccagccctgttccattcacctcttcttctttcttttttccccatccccatccctgcgttctgtacttgtgtctccacgttcatctcactccttctccccacctcgcctccctcctccctctctcctgactctccggtccaggtaatgaaatgactaacttagcctttgaactagaccccctagagttagaggaggaagaggctgagcttggtgagcagagtggctctgccaagactagtgttagcagtgtcaccaccccgccaccccatggcaaacgcatccccttctttaagaaggtaattctcgctgtgttcttgcaagaggtgggggagtcagggccagcactttggtggagggaagggggctgtaatggattcagatgtggtaccaacctgttctgtgggcatcagggcttcctgctgaggtggagggaagggtagcatgggcacatccccctccacacacaactccaccctggcccgatctccaggaaggagatcttgcccttggaaggttgcccccacacctggggcagcagggtttggtggtcatgaaccctgacctctcccctcactcccaggggcctgctctggtgttggtgtctaccttggcatgtgaagcaggacatgggatggcattccttctttgcccttttttgactctctgggtgggcacatagtgggggggggctgctggctgcaaagcaagacagttaagggaacccctaaaatgggcatgttggcatgcactgggggcaggagatgggcaacaagataggggctgtcaccctctccagctcttttccaagacccagaagagggtaggatatgtctgaatattcccacatccactggactgactgtcagtcctgctcccagccctgatccagggccacctctggctcccccttggcgtggggtcccgttccccgtctctggctctgtctgtcactaacacgcatgccctgttatctctcctcgtctgcccggctctccctccctctcttgtcctggctcctgccttgccctctgcccctgcctgggtccccttccctctctcctcccccttccctctcttggcaatctctggacccagccaaacagaagcagaagtcggtgagtatcacagctttctgtgtcctcctccccactccctgggatgagctagggggaccttctaacacccattcccacatctgtcccccatttcccccacccttcctggttctccctggccatccctccccacccccaccctgatccctacatctgggctctgggaccagggtgggggaaggctgcatgggggagcctggagtctgggggagaggatctaatgtcatctccactctggggtttcccctccctgcttccccccccagacagagcatgtgcccccctatgacgtggtgccttccatgaggcccatcatcctggtgggaccgtcgctcaagggctacgaggtaggacttcctagaggggagtggatgcagaggggccttagaaagatcttcagaccccagagagatcccctagaagggcccgatcccaaggcatcctcccaggagggctacagactttcagagacaacccccagggggcccaatccacagaaagaccca

SEQ ID NO: 86316 - DNA, 1048 bp, Homo sapiens
ttgtagctactgtgattgtgagagagggagctgagaaaaagtcctgtctgggcaagggatgagagtggggagcaaaatttgcccccatggtgccagggatcaggctggatgtttactctccaaatacagttccatgcccctactccctccccagaaatctggctctgagtctccaagagagctgtcatcccctccctactctgtgaatagcgaagggaagagttgggcacaggggagaagccaggctgggccctgggttggcagttcctcctctctgggggccaccaacacaaacagccctgctctgctcctgcggagggggagtgggggtgactttcccgctctccccacccaacacccagcactgccggctgcctctcccttcctcggaggcctctgcagcctgcccagcatcttaattagctctgctgcctaatgagcctccagcttctccgcgcctccccccttcccagcctctctggcttggtttggtggtttccgtgtgggtcttctggggctctcttgcactggtccccactcctggctgtgctctgggccctctccgtgaggatgggagaccctccctccccttgggtcgtaccacctcaggaggaatgtgcaggggggtggaggtggggctgggagtgctgttcccaagcttggctgtagctctggggctggcaagatgagggttgggaaagggcccttctgattctactcttgttcctttcctggcctcttcagggcaaatacagcaagaggaaagggcgattcaaacggtcagatgggagcacgtcctcggataccacatccaacagctttgtccgccaggtaatggggaggctgggcggagaggagggaggtggctggttggtggagaccagcattggtgagccaggtctgcggtattgtccaggcacccttccctgtgccatttgtcacctgcctggagccaccccatcaccctgacaccccatgacctcttctggatgtgctgtcagcggcacccactcgctcagcccccgcccctgcccggcccctcccccag

SEQ ID NO: 86317 - DNA, 1323 bp, Homo sapiens
cctctctcactccgcctgcgcaatccagctgacttccggttacagataaccacgtgattgggaacccttgctgcgcatgtctagtaggaagtcggactataccactttccctacggaaggggtacttttttatgtttttaagtttaaaaccgatttctgatatttgacttttatcatttcaggcctatatggaggctatgagtgagtttagtgtggcagaagatgaaagaaccggacaggaatacggacgaaattggagcagggtttgggctctccccttcgcagataatgggaggagccgggcccgagcgagctctttcctttcgctgctgcggccgcagccatgaggtgagggcgagctggtctccatcaggcgctgacgcgtgtcgacaagggactgtcggtcttgggaccgcagctggggttgggggagatgaaatggaggccgccctaaagcggccggtcccggggtttggggtaggccggagcactttcgtcccgggcctccggagtgagggggggcggggagcgtcgcagcaactgagaccaggaaaagtctgccccggctggtgccgcaccgcacacgtgtccggtcgacccacgcgagcagagcaaacggagcgaacaagaccaagccgtgggccctttcttgcttggcacacccggagcggagccgatctctgctttcacgtgatgtagggcaagcctagtgtaggccccaggcctccgactgccgagagaggtgatctctaactcttgactccattcactcctttggcctctcataaaggaaatctctgcgaatagccgaacgaggcttgttactgtgataaaacagggaaataagcccagaaaacagagtaacttgcctgcattcctagactagaaatcaggtctactcacctcgaatattctttaaacgctgagtaccagaaatggcataacccccctattcaatccaataagtccttggcttgactttccagaggagaaatgcgaacatgaggctccgagaggtgaaggcatagcgtgggttttgaagtcttaaacccaagggggccagctgcatagcccagagccttaaagatgatttagggaagagtcttatttcgcggctgtggtgtgggtcacaaagggcaggtcttgatggggacgttcattcttgcccaggattggctttcagagtctaatcatgttttctgtgtgtctagtatgctcaggcttcagaagaggctcgcctctagtgtcctccgctgtggcaagaagaaggtctggttagaccccaatgagaccaatgaaatcgccaatgccaactcccgtgag

SEQ ID NO: 86318 - DNA, 1049 bp, Homo sapiens
tagtgaccttgggtggaggaacagctcacaaggcagcctctgatccatcaccaaccagcatctcttcactccgtgtaccctgcaggtatcacagcctgtacctgaaggtgaaggggaatgtgttcaaaaacaagcggattctcatggaacacatccacaagctgaaggcagacaaggcccgcaagaagctcctggcgtaagtttcttttcagagtcttaggggaacattcttagacctttgagagttgttcttagatacttaaaatgtgccaatgcctaagtcttgacttgcacgtagtctgtcttaggaatacagctgttcccttagaggcacccactcctctgtcctgtacacacccactcttcctgtctcgtagggactagaggttagttgaagcaggagcctttggtgggcccagcaactcattccagaagctgactaggctcaaagggagaggtctggggatgtgcttctgtctccctagcatctcatctcttcccaaactgacccgtcttttctcttccctgaccagtgaccaggctgaggcccgcaggtctaagaccaaggaagcacgcaagcgccgtgaagagcgcctccaggccaagaaggaggagatcatcaagactttatccaaggaggaagagaccaagaaataaaacctcccactttgtctgtacatactggcctctgtgattacatagatcagccattaaaataaaacaagccttaatctgccttcctctctgcttcttgcaaggtttacggttactgagtgaggttttttttttttttttgagacgagtcttgccctgtcgcccaggcttgagtccgatggcgcagccttggctcaccgcaaactccacctccaggttcaagcagttctcctgcctcagcctcctgagtagctgggattacaggtgcgtgccaccacgcccggctgatttttgtatttttagtagagactgggtttcactgttggccaggttgatctcgaactcctgaccacaagtgatccacctgcctcggcctcccaaaatgctgggattgc

SEQ ID NO: 86319 - DNA, 2122 bp, Homo sapiens
ggggaatttgggctggtgaccaacagagacaggagactgaatgacattagagggagcttgggttagcgcaggagcactggattcagagtctaaagctcaggtttgaatgctagctctggctttttgtgtaatttgaggcaagtccttttccctccacctcctctgtgatgggggtgaggcagggcagtacagcggctaatctccaaggtcagccctgaagtgctgctgggtgtctgctgacgtgctggtcttgctgctgaggcctctacactcctgggatctggtcccatcactccagcaaagggctccatccacatctgacactggtcccatcatcccccagggtgggtcccctgggggccatgggcaggactcagggccagggctgcaggccatgccaggcctcagctccatgtctctctggctcagatctgcgtgggcgtgggcagaagcaaggatgctgacggcttcatccgcgtcagcagtggcaagaagcggggcctggtgccagtcgacgccctgactgagatctgagaggagccaagggaacccagatgacacccttgcccatgcctggaccttgcttctggccagggaggggatcaggcccccttgtccactccatacccttcctccctctgtccctctcctaggtgccacttaccgtggcttaggagccttttgtactggggaagattttatttcttgggtggggtgccctgagtgggttgatcctctgggacttggcggggatggggtggggtgggagggaatgaggaagctacaggtaggtccacccaacgcccaggcaccccagtctacttgctgggctgagtccagccctggggaagattcctggggaatttatttgctgcttctcccagccttcccctgcccacaccacctgcgcatgcctggcacacccctctccccacagagcctctgcttgggtctatgtgtgtgtgaccgtgcatctgctcctttgcaagtggggtcttgggagcaggcctttttgtgtcctcggccctccacccttggtggggaggggacccaggaccataggaaggtcctgagtccacctcctggtctccacctctgtcattccgtcaattctcaggaaagttttgcaggaatctctcccgttacttgaaacctgggcggacagatgaggggaaggctgaggtccctggaaggtgtaacaaatcagagactatctgttcaagtagaaaacccaagagctggccaggtgtggtggctcatgcctgtaatcccagcactttgggaggctgaggtgggcagatcacctgaggtcaggagttcaagaccagcctggccaacatggtgaaaccccgtctctactaaaagtacgaaacttagccaggcatgatgggggtctgcctgtaatgccagctactccagaggctgaggcaagagaatcacttgaacccgggaggcggaggtttcagtgagccgagattgcaccattgcaccccagcctgggcaacagagcgagactccgtctcaaaaaaaaaaaaagaaagaaagaaaaggaaacccaagagctgcctggacacacggaaacccaactgagaacaaaatcctggcccgtgcttggtcaaagcaaacccatttcactgtcaggacccccggtcacacaggaaccacccgccaggggagcctgtgactgtcagttcctgtcccaggctttgcccggccgccccaggaacccaaccctctgggctgacctttctcctgcttctctccaggctctgcaggggacagggcaggtgctgcaggagcccctttgctggctttatctgctcccttgttctggacacagagccctgggaaaaagagggggtggaagacagacaaggaaggtggaatgttctgttttggccaccaggaaatggggtggggtgggcatacacagagaggacccctctcttaatacagctgcttttctcggtgccaacctccctcccccaagctcagatcctcctcttatgcccttgattgtgccagcccatgccacccccatcctgggcacagttacaccctcccatgcagtgggagaaacacagaccctcgtacccaaaggcccctgccccacttctccccc

SEQ ID NO: 86320 - DNA, 1350 bp, Homo sapiens
aggatgagggtccaggacgaccactcctcaccccccaccagcctgttcgagaacacaggtggatactacgttgcccaggctggtctccaactgcttggctcaagcgattccctcccgcctcagcctctcagagtgctgagattataggcaggagccaccataccgtgcctatttttttttttctaaacttgagtaaatggtacacccatacaacaaaatactttgtagccataaaaaagaatgatgaatctatttatgtatgggtatggaatgatttccaagatttactgtttatgaaaaaaagcaaggcacaggaaatatagtatactaccatttcttcaaagaaaaatggaattaaaccacttaaacttgtttctatccgatttcacataaaagtctagatttcttttgaaaaactagaaaacctggcaacagcctcaattggcttgaggagacctgcagctactccctggccatccagtttgccacagtccccacggctcttgattgctgcccacctggccagaactcctttctccatggaggtcaaccacctggcttttgtggcacctgagattgcgaagtgtcgtcgggacctggggagcctctctgttgctgtttcatttcgctctggccctcagcccccacgctgctgctgctgctgctgctgccgcccctaccgccagagacaccctgaagggaagcccgccctggccagccccctctaggctcccactcacagctccctctttttctcccagctccagcgattcaagcgctccctctccctcaagaccatcctccgaagtaagagcttggagaacttcttccttcgctcgggctctgagctcaagtgccccaccgaggtgctgctgacgcccccaaccccactgccccctccctccccaccacccacagcctcggacaggggcctggctaccccatccccctccccatgcccagtcccacgccccctggcagcgctcaaaccagtgaggctgcacagcttccaggaacatgtcttcaagcgagctagcccttgtgagctgtgccaccagctcatcgtaggtaggtgcctgggcactgaggcggccacggggaggggccagcgtgggtactggggagtgggctcatgttgcgcccaatattattgggctcttgctgttcaggagccccaatactaattgtgcctctgtgcctctttttttttttgagacagagtcttgctctgtctcccaggctggagtgcagtgatgcaatcttggttcactgcaacctccacttccctggctcaagggatcctcctgcctcagcctctgtagtagctgggactgcaggcacacactacca

SEQ ID NO: 86321 - DNA, 1033 bp, Homo sapiens
ggagcggcgtagggcagggggcgggaccaggcgacctcctaaatcaaagttgggcggcgaggactgggcggaggggccgccgggtgccgggctggggccggcgggggaggggaggggatggggggcgggcgcagcggacggcggagccggctggacacggacagctccttggctccctccctcggctcatccccgcggccccacttccctcctccccgcgctgcgagcagcatcctctgcagaccctcggtcctcgcgcccggggtcgtcccgctcctgcggctcagcgtggtggcctcccctcgcccgccaccccggcaactttctctgcccgctcccgcgggttgggggctgccgtgccgggggctaactgggggcagcctctggagaacggcttcagagtcccggagacgcccgccacccgcagcctgcccgcggtgggcctgccgtcggatctcggcaccctctcctcccctctccccgaaccatgaccgagatgagcgagaaggagaacgaaccggatgacgcggccacccacagccccccagggaccgtctccgccctccaggaaaccaaggtaacttggggggcgcaaggcctgtccgcgccccgggcccgggcgccctcttcccggcggggtcctcctgtgggcccgggcgtcctagggtcgcggtcgcgaggcccgcgtgaccactgaggctccgcgccgctcccgggggtaggagtgggttggcgacgaggggccacaaggagcccccgatcacaccggcaccgcacgcccgcgcgcgccatcgcgaccttctggggaggcggccactggtcttcgttggagagatgggcgcagcgaggccggagggcgcgcgtggagcggtgcgggcggggtacgcgcccggctgtgcgtgcgaggcgcaccctccagcggccgccgggtcccagtcccgggctcagtccgcgcctctatcctcgctcgtgtctctgaatttgtctctacaacctgcgtgtctgtgtcttggtgtctctgtgtgcgtctctc

SEQ ID NO: 86322 - DNA, 1344 bp, Homo sapiens
ctttgctcctcctcataggctctgttcctcaccaccattcgctctggataccttggggtgtagcccagttgaggtgagccttccccttcccactctccactgtcccaaagccttctccgcagcttcatctcaagctccagaatggagtggccctgccccctggtggccagatgtgatatggccatagattgtaacttacctgataagactgggcaggaagagcctcccttctcagacttgggacctcccaagggaggggctgtttccctttcttgttctgtccctgggtcctggtattacctggaccatccattttatacctcaggatctgaaccaaaaagcccccatctcagagacacagcaatggttgcatcagcactggttctccagctactgccggatgctggccaacttcactggtgaggctagtgtctggcaggagccagacctgtaggggactgagagtgggtgggacacacaggcaggaagcctgtctctgtcctggcttgttgtgggcccttcaactaacatttactggggactaagagttgcccagcattgtgctaggctctcgtctcacgaattatcccatataatttatacactattccttgaggacagtgcccagagaggttaaataacttgcccaaggacacacagctaacaagtggcagaactggcatttaaatccaagcctgactcccatatctgagcacactagggctatttgtagactaatagactgtgtcccttacttcccacccttgatcccaggcctctttcctcagtctggccctgtctgactctacaggtctggatctgctgaagcttacatgccaggaccttatccaaatctgcggggctgctgatgggatccgccttttcaatactcttagagccaggtgctggacactgccaaccagggtccccttcccactgtagtggcccttactaacttagctagcaggtatgtttcatacaattttttttttaatatggagtttcactcttgttgcccaggctggaatgcaatggcgcaatcttggctcactgcaacctctgcctcaggttcaagtgattatcctgcctcagcctcctgagtagctgggattacaggcgtctgccaccatgcctggccaattttttttttttttttttttttgagacggagtcttttgcccaggccggactgcagtggcactatctcggctcactgcaagctccgcctcctgggttcacgccattttcctgcctcagcctcccgagtagctgggactacaggcgcctgccaccgcgcccgtctaattttttgtatttttagtagagacggggtttcaccacgtt

SEQ ID NO: 86323 - DNA, 1013 bp, Homo sapiens
attagccaggcgtggtggcgggcacttgtaatcccagctcctcgggaggctgaggcaggagaatcgctggaacccgggaggtggaggttgcagtgaactatcgtgctactgcactccagcctgggtgacgagcgaaacttcacctcaaaaaaagaaataaaacaaaaaaacacttgggtgtgccagacgcattgtaggctgcttggagggtgaggacctgactggtcctgctggtgcctttttactgctttcggtgcagaatccagatggctactacttggttctgacctaggccaggggaactccactgctcaagagactgatagcttgtcttcaccagaaaccttgttaaaacacttggctgactcaacaggctccaggtgagccaaagtatcttgcatctcaccccgagaggaggcaagtagcctccagcttcacttttctttctggtcagcagcaatggctgttggaagtcttccttacccattcgttcttctgagctggccaagtttatgaggcaaaaaaaaaaaaaaaaaaactggcaatgtggaaagagcttttgccatgagcagtgttggctggtgatcactgagagtgttaattcatttaaaaattttaagccctttttaaattaaaagttaatttttaaaaggtatatacacttaatgtgttgtccaatgtgttgaacatttaatgtggtgttcagttttcttggctttattgtccccaaggggaaatgtcttctgcttaaactataaactagggcaaaggatggggtctggaacaagggaataaatcaatccagctggatctttttttcacaattagtttgggcaaaactaattactaaagcctccaaaagaccattcaatattcaaatcactgtacctactaaaaaactcagttctaagagatttaggaaatactatagctattatctagaattgaggctatggggcttttagaaaaaaaaatttagacatattgtttccttagttttaagagatgaggtc

SEQ ID NO: 86324 - DNA, 1059 bp, Homo sapiens
ccagctacttgggaggctgaggcaagagaatcacttgaacctgggaggcggatgttgcagtgagccgagatcacgccactgcactccagcctgggcaacggagtgagactccatctcacaaaaaagagaaaagaaaagaaaactttgcttcactaagtttctcttgccattatctcattaattcagatctgtacctcattgctgctcacacatatatgtttcttaccttagcctgaaccttctcaggccttgaagtcattattctactctttttttttcttttccttttttatggcactagagaatgaaaacctaaggtcttagaaaatcttaacttgaaaaagtctctaactggcatgatttgattacttttttcccctgtggacaaataattttctttcctatataatagatttttagtaagtgaaacctttgctgctgctttcctgggtttacattagttttttcctgcccttaagaataatttatctgtgcttctctgatgactgttaatttctaatagtgcaggaagggatgagcttttgatttcttctcactcccctcctcaccctacttccaaattacacactaacttctaacccttacagcctgttggcacatacacaagatccacgagaccatgctcctcagaagctacccatgtcctttctcaccatggtgtggctcttggagccctgagtatctgtgactacccactccaaaggttgactgtaagaggagagcggccttcttaattttgcatttcttaattttgtttttctccattcctgttttatgacttggccttcagatgcttcctactctggcctcctccttttttctcctaggaattgtttccaggtaacctaccatgtgcacttctcagctgctctgctcacctttgcccaccttcccgtgaccctgagagtacagatccgaataatgtggcctgtgcagagctcagagaactgtgaggactacccatgcctgtcagactctgctcagggacagagatggatgggtaaatggtgctgttggagacatttttatcttcatacc

SEQ ID NO: 86325 - DNA, 1013 bp, Homo sapiens
atatataataacattaatcattaatgtctgaacttgggtgttggggactttcaggctctgttttgtgatttatcattttcactctttcctaataatacatctctctctttccttatgatacagttggtggagtctgacagaaggaagaatatgtagggggaatattggggataccatgcgaattatcacatatcagaagataaaatagaaaccaaaaggtagcatctgttttcatcaaaacagtttcttctcataacttttcttgctttcattagagtttccttgcaggttggcaaagattcaggcagggtcccctaatggtaaaatttagaattaaaaaaatatttattgataatatctttttaaaaaatgtttggtaatcccaactaatcattcaaaatgcaaactgtaaacacgacaacagcaaaagggtaacaattgagtgagtaagcagactgaacaggtgacagactgagcaagagtgtgggggggagcaacagagaatgtaagacaggtgcacaagtgtgctacagacagtgataatttgagtgtgtaagaattacatttggaccacagtgatttcaaggcaaccatttaggaaacctctgggccaaatactaaaacacaggaggaatggacgagccttctttgtgagcatgctcagcatgttggcatggaaacaaggaagcatagaagctctttagtcacaatgaatgtctaccatttctaagatgcaaagaaattttctttctggtccctgggtacatcatatattgtctttccatgcttttcttgaccccggaggacagcagatgctgttctaaaatccccaaagaaacccctagacaaaaatttaaaaaccacagtagcattaacacggggtttgctggaatgcccctccctatcttggcctatgattttcttatgggcacctcaacaggaatggttaaattttaccaatctacttgataaaaaagccatcacaaacttcagtcccatggtcacaaagctag

SEQ ID NO: 86326 - DNA, 1033 bp, Homo sapiens
tctattagaattccattgtagctttcaacaggattctattatagcttcttccctttgcaccaaaggtaagcacagagaactggaaggaagaaacaacgtgtgttcattttcttttaggtctgctatctgatgaatgtgttaagcatgtcttgatttcctttttggtgattattttcacagagctatcatttttttctttttttgttttgctaagatactaatatctatggatttttttgctcttgttttttagcaaatcacagatgaaggtctcattactatatgcagagggtgccataagttacaatccctttgtgcctctggctgctccaacatcacagatgccatcctgaatgctctaggtcagaactgcccacggcttaggtaaacatttcttgtttagctcaaaaaaatcatagaacaaaagtttccttcacccatatttcttccttggaactttggaattttaaggtaggcactgcagacgctttgaaattttaaggtagtcccttttagatgcccacctacttcctttttgtacctcatttgatttcatgtaattggtgtgaaccaaggggtaacaatccccaaattccactacttgctatccatactagaaaaaagaatcaacattttattacttgagatagaaagaaaggtattttctcttattaatgcttttgtataattcttttctcaaagtagtttttaaaggtccaccctaaggtcatttgtcatagtaatgataccaggtacatagcagggggtactatatttaaaagacactcttaaaggaatacctcttttgtactgatgggtttttaaaacagtcttatttctctctggctcctcagtttgaagaatgctgtgttttttactttttgtagagatggggtcaggctgtgttgctcaggctggcctcaaacctcagcttcccaaagtgttgagattacaggtgaaagccactgtgcccagcctgttactgtcttttgaggtagtgttgtgtatgcctgcctcaatctcctgggctcaa

SEQ ID NO: 86327 - DNA, 1620 bp, Homo sapiens
caacctaatgaatataaagtgctttaaaaagggtccctgaggccaggcgtgatggctcacacctgtaatcccagcactttgggaggccatggtaagaggatcgcttgagctcaggagttctagaccagcctgcgcaacatagggaaaccctgtctctactaaaaaaaataagaaaatttgccaggcgtggtggcatacccctgtagtcccagctgctcaggggactgaagcaggaggatcacttgagcccagcaggttgaggctgcagtgagctgtaatcgtgccactgcactccaggctgggcaacagaacgagacctcatctcaagaaaaaaatacaaatttagttaagtagagtataaataatctaaaatgtggctccttttagaccttctttgtgaatattgaacacatgtacctaagacggtttgctgtgtaggctaataaacttgataatataacaacttttatcatttataaaatattttcacataaatgatcttatttatttaaaagctttgtgaagtagagtggatggtcattttacagctaagaaaatctagaaagctgttgactgccaggtactgtgatgcaaccatgagatgtaaccgagtaagatattgctgcccttaagttgctcacagtcaactgttattgtggaataaatgctatggtaggaatgagtacatcagttttgggaaaacagagagctatggggctaatcttggactaagagaggttcagacaggcttcctaaagtcatttgcctgaagttaaactattaatattggagaatgaacttgatatcatggctttatcttctggatcttttctgcaggcaggaatatttcaaacaatttatggagtgtttttctgaagaatattatagaaaacttggaattcatccataatacaaatatgaagctaaactattaagagtagatggaatcaacaatgaaactagtattttgaaggcagagatcggacataagatatcctaaattcagcctacaaaagcggtactctagaaacatctcagataaggaaatacacagggcctttgtaattttttaaaataaaagtttaaaaggcttcattactactttggtactgtgagttgaatatccccgtttcaaaaatccaaaatgcagctgggtgctacttgagggactgaggcgggaggatcagttgagccatggaggtcacagctgtagtgagccctgatggcgccactgcactccagcctgggtgacagaacgagaccctgtctcaaaaaaaaaaagaaagaaaagaaaatctgaaatgcttcaaaatcccaaactttttgagtatcaatgtgacactcaaaggaactgctcactggggcacttcagattttcagatatgggatactcagctatgtaagtataatgcaaatattgcaaaatctgaaatctgaaacactgctggtaccaagcatttaagataagggatactcaaccagtaatagcattgctcgatggagaatctcgttttgaatcagagctctttattaattactctgtaaactagaataaatcacttaatttccattttttgtctagagagctttgagatatgtgataagtacaaaaggaatata

SEQ ID NO: 86328 - DNA, 1105 bp, Homo sapiens
tgtaatttcagctaccttagagactgaggctggaggattgcttgagggtgtactatgatcgctcctgtgaatagccagtctacttcagacatagcgagaccccatctctaaaaaaaaaaaaatttttttaaattccgttgttgtcttttagtatccacctcttagttctttcctgtgttacagatgaagtgaaactaagggaaatggaggaaggaggaggagaggtggacatgaaataatattgtcactttgaattttagtttctttcctttcacttcataacttcaaaagaagttttcagtagggcatggaacatttccaggattaagcagcaccagttcaacatgagattcagtcatattcagttcttcagagttcatggaatcctccaggtcctagactgttgctgaggatggttaatgtcaaataaattaaaaatactgaaaagaaaaaaataaaagtgtgtagatgctctatttttggactgagagcagtgaattggtagtggacataggtttgggttaagtaaatgaaacagaagtcagcataaaagaaagctcagaatattgagtcagatgttagaaggtgtccaaagcagaaagtttgacctattaagtaatgtgtctgttagctaaatgtattccttccgtaatgtttttatctagtgatttctttcttaggagaagtttagtcatgagacggcaatgcactggcagtagttagcttctaaaaagcaattttatttctgctagggacaagatgttgggcggaggaattataaacttactttgttttaggtttatctggccaaacaaaaatgtttttccttttagattcgggcaagaaaactggccaactggaaaaaacatctggtgttggttgaatgaaggaatggcataatcagtaaaaattacttataggaaaaatacacatttaaaaaatcttctgcagcttcaactctggattttttttaatgaaaattgattcttaatctctcattaacattttcctaccaccaaaagatttgacctgtattgggctacctttgtatgttagaaattttgcttaatctatgaaatttctttttttaaatttcttaatctat

SEQ ID NO: 86329 - DNA, 1719 bp, Homo sapiens
gggtccttttaccttttatttatttatttttgagacggagtctcactctgttgcccaggctggagtgcagtggcatgatcttggctcactgaagtctccacctcccaggttcaagcgattctcctgcctcatcctcccgagtagctgggattacaggggcatgccaccatgcctggctaattttgtgtttttagtagagatggggttttgccatgttggccaggcttgtctagaacttctgacctcaggtgatctgcccacctcggcctcccaaagtgctggaattacaggtgtgagccaccacgcccggcctagaagtggtcacacttttaaaatcttcttatgttttaggtcatttgttagtttttaactgttagtgttgatgatgctttttaatcctaattttaaaaaaatccatctcttttcattcccaaagttgtctgttttcaaatcttgatctcacttttcttgcaaatttataagtgctttcttacaggccaaggatctcattcctactctttagattactgtttctcaactagtaacatactagaaactgaattaaaaatttccgtatctggccgggtacagtatctggccaggcacagtggctcgggcttgtaatcccagcactttgggaggccaagacgggcggatcacttgaggtcaggagttcgagaccagcctggccaacatggtgaaaccctgtctctaataaaaatacaaaaattagacgtgtagtagtgtgtgtaatttcaggtactcagaaggctgaggtgggagaatcgcttgaaaccgggaggcgaaggttgcagtgagctgagatcgtgccagcgcacttcagcctgggagacagaatgagactccgtcttaaaaaaaaaaaaaaagaaaagaaaaattctgtaatctcagcactttgggaggctgaggtgggcagaccacaaggtcaggagatcgagaccatcctggctaacacggtgaaaccccatctctactaaaaatacaaaaaaaaaaattagcctggcgtggtggcaggtgcctgtagtcccagctactcgggaggctgaggcaggagaatggcgtgaacctgggaggtggagcttgcagtgagccgagccacagcactccagcctgggcgagagagcgagactctgtctcaaaaaaaaaaaaaaaaaagtttcagtaatctaactagtactgtggtttttagaagggtatttttagatgttcaaaataaaatattccgtgacaccaggaaaatccaaaggagggagggagaagaaagaaagcccttaaagtgaccaaatttagctacttgtgcacagttgtctttacactgttttcctacttgatcttccagacttagtgagactaagcgaattcttagatcagacccctcccacccaaatattggctcagaagagccaaggcatccaactgtggtttacagttttatgtcttaatgtagttggattcattagatatataaaacatttttacttgacagcaactaacaataggtggtggtattgaactgtgcaatagtatttgtgctcaattcatcttgcttagttgtataacttttataaaaaacaaagatacgtatttaatatgataaatccaaaccaaatttgcattagcttttgaagactttctcttaaagtaaatgattttattgggtattcagcaaagtttaaataattatttattaggcatttg

SEQ ID NO: 86330 - DNA, 1610 bp, Homo sapiens
aggaaaaaaaaaaaaatttatgtggtttttaaaatttgttctgagtggggagaatcttagggggaatgtactgaatagtatcatgggctcagctcccccatgcagggccaacaaataccaaaatgagtaaactgggaagcttttctctctttctgtcttcatcccagatcaaagaatcccgagttaggatctggatgaaggataagcccctgaattgtcgatgggctcacccccacactgacccagcatctgaacttgcttaacagggagccggggctaaactgcttcaccctgcctgagaaccagggagcactgcatttctccacagggtggaggagaagaggcagaataaaccaagcctgggacacctccctcctgtctaggtgtactcattcttctgtttcaaaagaaggcaaggacatgaagtcaacttctacctatcttctgctgctggtgtcttatgtattctcagtttgacctgattcctcttctgtcttttgacttaacattaggggttcttggtcataacctgctctgatgtacataaagatttcaggttcaatatcaatgtgtcttaaaacagaagtattttagcgggtggggggtggggtggtggggacaaacaacgcaggatataattgccaaaaccaggcttgaggttggtgactcttgaaagattttctttcttcaggcctagatcagaaaattaagtgcagcaatatcatgaattctcagaagccctttcagggagccagtgagtcatacagtatccacagttgagtcacttaaagatgtcagtatacgaaacattattcacaatccttgggcaatctcatttttttttccttctcccctcctcccctgccccccatacatttctatccttgagttagttttggaggggcaggaagtacttaacatctcagaagctagattgggaaacatgctcagctataagaactgagctttaaattttgagtttaaaaatgtacatcaggagcagctggggagggtctttttttaaaaaaatctttcaaatttggttttctgtgcatatggccgttttgtaaatactttggggtttttcatttttttgaaagtagatgaaatctgttgtgggatttttttcccgaaacattacaaaataacctgtttatttacatgcaaataaacttctttgataaaaagtaatttgcctgtgtgtaataaaattttagcctttgaatacttttttcatttgttcaaaactccagtcaattttaaagagtcagtcaacagtaaatgtcttccctgagtactacttgaaatgggtcaactggtaactgacggagctgtgaaacttgtcttcattctattactctgtaggccagtttttctaccctttgccatttttttttttttcgagatggagtctcgctgtgtcgcccaggctggagtgcagtggcacaatcttggctcactacaacctccgcctcccgggttcaagcaattctgcctcagcctcccgagtagctgggattagaggcgcccaccaccacgcccagctaatttttgtatttttagcagagacggggtttcaccatgttggccaggatggtctcaatctcctg

SEQ ID NO: 86331 - DNA, 1570 bp, Homo sapiens
aagaagacctcagagtcaaaaaatgtggggagcacaggtgtggcaaaaattatcatcagtaagcatgatggaggctcccctagcattaaagccaaagtgactttgcagaaacctggggaaagtagtggagaagggcttaggcctcaaatggcttcttctaaaaactatggctctccactcatcagtggttccactccaaagcatgagcgtggctctcccagccatagtaagtcaccagcatataccccccagaatctggacagtgaaagtgagtcaggctcctccatagcagagaaatcttatcagaatagtcccagctcagacgatggtatccgaccacttccagaatacagcacagagaaacataagaagcacaaaaaggaaaagaagaaagtaaaagacaaagatagggaccgagaccgggacaaagaccgagacaagaaaaaatctcatagcatcaagccagagagttggtccaaatcacccatctcttcagaccagtccttgtctatgacaagtaacacaatcttatctgcagacagaccctcaaggctcagcccagactttatgattggggaggaagatgatgatcttatggatgtggccctgattgggaattaggaaccttatttcctaaaagaaacagggccagaggaaaaaaaactattgataagtttataggcaaaccaccataaggggtgagtcagacaggtctgatttggttaagaatcctaaatggcatggctttgacatcaagctgggtgaattagaaaggcatatccagaccctattaaagaaaccacagggtttgattctggttaccaggaagtcttctttgttcctgtgccagaaagaaagttaaaatacttgcttaagaaagggaggggggtgggaggggtgtagggagagggaagggagggaaacagttttgtgggaaatattcatatatattttcttctccctttttccatttttaggccatgttttaaactcattttagtgcatgtatatgaagggctgggcagaaaatgaaaaagcaatacattccttgatgcatttgcatgaaggttgttcaactttgtttgaggtagttgtccgtttgagtcatgggcaaatgaaggactttggtcattttggacacttaagtaatgtttggtgtctgtttcttaggagtgactgggggagggaagattattttagctatttatttgtaatattttaaccctttatctgtttgtttttatacagtgtttcgttctaaatctatgaggtttagggttcaaaatgatggaaggccgaagagcaaggcttatatggtggtagggagcttatagcttgtgctaatactgtagcatcaagcccaagcaaattagtcagagcccgcctttagagttaaatataatagaaaaaccaaaatgatatttttattttaggagggtttaaatagggttcagagatcataggaatattaggagttacctctctgtggaggtattgacttgtaatctcattttcctttcaaaaaaaaaaaaaaaagctaaggtggcttgttgggatgtaaacatgtttt

SEQ ID NO: 86332 - DNA, 1261 bp, Homo sapiens
agcactagtgatgattgcccagccattggcacccctcttcgagattcttcaagctctgggcattctcagagtaccctgtttgactctgatgtctttcaaactaacaataatgaaaatccatacactgatccagctgatcttattgcagatgctgctggaagccccagtagtgactctcctaccaatcatttttttcatgatggagtagatttcaatcctgatttattgaacagccagagccaaagtggttttggagaagaatattttgatgaaagcagccaaagtggggataatgatgatttcaaaggatttgcatctcaggcactaaatactttgggggtgccaatgcttggaggtgataatggggagaccaagtttaagggcaataaccaagccgacacagttgatttcagtattatttcagtagccggcaaagctttagctcctgcagatcttatggagcatcacagtggtagtcagggtcctttactgaccactggggacttagggaaagaaaagactcaaaagagggtaaaggaaggcaatggcaccagtaatagtactctctcggggcccggattagacagcaaaccagggaagcgcagtcggaccccttctaatgatgggaaaagcaaagataagcctccaaagcggaagaaggcagacactgagggaaagtctccatctcatagttcttctaacagaccttttaccccacctaccagtacaggtggatctaaatcgccaggcagtgcaggaagatctcagactcccccaggtgttgccacaccacccattcccaaaatcactattcagattcctaagggaacagtgatggtgggcaagccttcctctcacagtcagtataccagcagtggttctgtgtcttcctcaggcagcaaaagccaccatagccattcttcctcctcttcctcatctgcttccacctcagggaagatgaaaagcagtaaatcagaaggttcatcaagttccaagttaagtagcagtatgtattctagccaggggtcttctggatctagccagtccaaaaattcatcccagtctggggggaagccaggctcctctcccataaccaagcatggactgagcagtggctctagcagcaccaagatgaaacctcaaggaaagccatcatcacttatgaatccttctttaagtaaaccaaacatatccccttctcattcaaggccacctggaggctctgacaagcttgcctctccaatgaagcctgttcctggaa

SEQ ID NO: 86333 - DNA, 1050 bp, Homo sapiens
tactgagttccattattaccaattttcttttagttaagtttgaaattcaattatttggactcttgtttatagtttgcttttgttgtgtgattcataagaggttgacaattttatgttgggttagatttttagaatgtatttacccaaagctctggtatttgatagaactatttttgtcttacagattatttgccctacctgaaaactgcttactgcaaaactctgatgttatatctaaatctcaggtctcattcagcagctattgcaatgttaactttgttttcttctttattttgcagatgtatgtccatccctgtgacgatgagggctattcggaggaaagctgaaaccattcaagccgacaccccagcactgtccctcattgcagagacagttgaagacatggtgaaaaagaacctgcccccggctagcagcccagggtatggcatgaccacaggcaacaacccaatgagtggtaccactacaccaaccaacacctttccggggggtcccattaccaccttgtttaatatgagcatgagcatcaaagatcggcatgagtcggtgggccatggggaggacttcagcaaggtgtctcagaacccaattcttaccagtttgttgcaaatcacagggaacggggggtctaccattggctcgagtccgacccctcctcatcacacgccgccacctgtctcttcgatggccggcaacaccaagaaccacccgatgctcatgaaccttcttaaagataatcctgcccaggatttctcaaccctttatggaagcagccctttagaaaggcagaactcctcttccggctcaccccgcatggaaatatgctcggggagcaacaagaccaagaaaaagaagtcatcaagattaccacctgagaaaccaaagcaccagactgaagatgactttcagagggagctattttcaatggatgttgactcacagaaccctatctttgatgtcaacatgacagctgacacgctggatacgccacacatcactccagctccaagccagtgtagcactcccccaaca

SEQ ID NO: 86334 - DNA, 1099 bp, Homo sapiens
cctaacctcatgatccacccaccttggcctcccaaagtgctgggattacaggcgcgaggactgtgcctggcccttcctaatttattttcttcttattatctctgcaatcaaaagttttatttttgttgacatccaaattcagttacatatttggaggaaaggagctgggtgtggtggtgcacacctgttgttgaaggtgagaggttgaagtgagagcattgctgaagtcctggagttagagtctggcctgggcaacatcgggaaaccccgtctctacaaaaaaattaataaaaagggaaaagaaaggaaagttgttaatgattgatttaaatcaggtttcattgcttgggagctaataaaacacctggtaaagagattttgcccaccttccttttaactttcacactgcttattagcaccttctccagaaaaaatggaggagggagacaaaggaaaatattttcttttcttttgctgctttacattgatgctagaaaacttttgaggaaaatggttaaagctgattattaaaatcagttttatatagctgtgatttttggcactttgttgtaagattgagtagtaattttatgttttattttcctctctttcccctcttccctgaactccttatagggaaaaaaattttgatgaattttctaagcaccttaagggccttgttaatctgtataaccttccaggggacaagtaagtatttttaatatttttgcttttgtttgtaaaaatcagtataaatctataagccaccttatgcctagaaatttgccacctcttctgctgtttgtcactcctagtttctacttatactgcaatctgtagctcagcttccaacattgggcctttcaaagatatcttcaataggcagcacctgcattaatcgatcataatgctggaagacagaatataatctttgagatgtccaacattccaatttctaggctgaaaggaattagttgctgtggaactggctttaattctatttttaacctacctgggattctattaacgtatttggctttttaaaacagagataaaaataagctttgaagtgctaaaaataggctttaatagtagtgaa

SEQ ID NO: 86335 - DNA, 1036 bp, Homo sapiens
ttcgacctcccaggctgaggtgatccttctgcctcagcctccagagtagctggggactgactacaggcacatgccaggaggcttggctaatttttttctttctttttttttttgagacagtgtttcgctctgttgcccatgctggagtgcaatagtgtgatctcggctcactgcaacctctgcctcctggattcaagcaattctcctcccttagcctcccaagtagctgggattacaggcatgcaccaccacatctggctaattttgtattttcggtagagacagggtttgacactccagcctggtcatcaagagtgaaacttagtctttaaaaaaaaaaaaaaaaaggtggatagataacagtccagtggtatggtattccttacatcagacccataacttgtgtgtcatcttgccattaaaaatgtcttctttggatgttttgaagtaaaatgattttggaaaatattttaactgaattcttactgtgatgaagtgtgggaatttattttgcaaggaaaactgtggatggtcttgatagaacagttactgataacgttttctgatttaaatcatagagtcagaaaagctgagtaagatgagttctctcctggaacggctccatgcaaaatttaaccaaaatagaccctggagtgaaaccattaagcttgtgcgtcaagtcatggtaaggattgtggtgaagtgggtaaagtgttttgcttagataattattcttaatacgctaagctccccatgtagatgtgttcatactatcttcataaaacatctgaatacatggtggtttcaactttaggagtctattgtatctatactacaggttgaatatcccttatatgaaatgcttgggaccggaagtgttttagattttggattgttttggattttggaatatttgcaaatatataatgagatatcttggggatgggacccaagtctaaacacataatttatttatgtttcataaacaccttatagatatagcctgaaggtaattttatacaacatatttaataat

SEQ ID NO: 86336 - DNA, 3893 bp, Homo sapiens
tttgttaaaaaggatgttgaaattattttgtcacggagcctgggagtgtttgtttaatcagttaccgataaagttttggttaaaaaaaaaaaactcggtttgttccgtttcaataaagctttgctcaaacggggagctccgggagctcatcgcgagactcaggtgaaacgcgtttctagtttgggacctgatctcgcgttgtttgataagcaggggaatgaggtgaaagcgaagcacgaaacatcgcgagaggctactggactctcgcgacgatttctgggattgcccctccccccttccccaagtgccgtttcggtttaatctagtgtgtgactgggtctgtgtgagggagagagtgtgtgtggtgtggaggtgaaacggaggcaagaaagggggctacctcaggagcgagggacaaagggggcgtgaggcacctaggccgcggcaccccggcgacaggaagccgtcctgaaccgggctaccgggtaggggaagggcccgcgtagtcctcgcagggccccagagctggagtcggctccacagccccgggccgtcggcttctcacttcctggacctccccggcgcccgggcctgaggactggctcggcggagggagaagaggaaacagacttgagcagctccccgttgtctcgcaactccactgccgaggaactctcatttcttccctcgctccttcaccccccacctcatgtagaagggtgctgaggcgtcgggagggaggaggagcctgggctaccgtccctgccctccccacccccttcccggggcgctttggtgggcgtggagttggggttgggggggtgggtgggggttgctttttggagtgctggggaacttttttcccttcttcaggtcaggggaaagggaatgcccaattcagagagacatgggggcaagaaggacgggagtggaggagcttctggaactttgcagccgtcatcgggaggcggcagctctaacagcagagagcgtcaccgcttggtatcgaagcacaagcggcataagtccaaacactccaaagacatggggttggtgacccccgaagcagcatccctgggcacagttatcaaacctttggtggagtatgatgatatcagctctgattccgacaccttctccgatgacatggccttcaaactagaccgaagggagaacgacgaacgtcgtggatcagatcggagcgaccgcctgcacaaacatcgtcaccaccagcacaggcgttcccgggacttactaaaagctaaacagaccgaaaaagaaaaaagccaagaagtctccagcaagtcgggatcgatgaaggaccggatatcgggaagttcaaagcgttcgaatgaggagactgatgactatgggaaggcgcaggtagccaaaagcagcagcaaggaatccaggtcatccaagctccacaaggagaagaccaggaaagaacgggagctgaagtctgggcacaaagaccggagtaaaagtcatcgaaaaagggaaacacccaaaagttacaaaacagtggacagcccaaaacggagatccaggagcccccacaggaagtggtctgacagctccaaacaagatgatagcccctcgggagcttcttatggccaagattatgaccttagtccctcacgatctcatacctcgagcaattatgactcctacaagaaaagtcctggaagtacctcgagaaggcagtcggtcagtcccccttacaaggagccttcggcctaccagtccagcacccggtcaccgagcccctacagtaggcgacagagatctgtcagtccctatagcaggagacggtcgtccagctacgaaagaagtggctcttacagcgggcgatcgcccagtccctatggtcgaaggcggtccagcagccctttcctgagcaagcggtctctgagtcggagtccactccccaggtgagctatttgtctaacagtccttcctcatttagggtgggttgcgaggaattggcattcagcgtgttaacattgtctggaagcccgcagtgttcatcattgactagaacactttgctgttggctagtcattccagtgtgtgaatctgtctccccttaacccagaattcgagaagtgaagagtacataggcctcaaaccgccaaaggtaggtacttccagtggtggggtcttcagttgtaagcttctgagtgagaaacgtcaaaggcttctgcttagtgagtggatggagttgatactagttcccagagcatgtctagctatttctgttgcttagttttatatttttaaaaatcacattggtatttgtgctttagactctatgggacctggttgaagacttaagaaattggtatggaagttacttgcctagtttatcctatttgtgttgtccactgaatccccaaacctgtacatttattcatttcctacttggcactgttttaattatttacaaaagattcctgtcttttaactgatgttttagtggaaattcagctgattagtctgttacccttttaatggtataacctagcagaaattggttccaaggacaatttggttttctttacagcatcatcactgacctaccttgtgaccgctgacaattttcaaaatctttctctaaaacacatagtaataatgccttctttatatttttgcgagaaaggcatgctagtttgaaattttgttgttagagtgaattatttggaaaactgtgttcttgttcctaggtaatgagatgtatctcctttgtggcctcacttctgttcacaaaaacagaatgtgggctttagttagacctttgtggaatcctaatgttgctttgtgacctttagcaaatgagttaatttctccttgcctgagttgcttcaggtgtaaaatgggaataataaatacctacttttaagggttgtgatgattaaattagtcaatttgaagtgcatagcacagtgccttgtacataatatcactcagtaaattatgagtgaggatgttgaacactggtagagaaattgtgctaatttgaaaaaaattcatgcatgactttttttttttttgaaagacaagatcttgccctgttgcctaggctggagtgcagtggcatcatcttggctcactgcagccttgacttcccaggctcaagcaatccgtccacctcagcctcctgagtagctgggattacaggttcatgccaccatgcctggctaattttttttttctttttcttttttttttttgtagagactgggttttgccctgttgcccaggatggtcttgaactcctgagctcaagcaatcctcctgcctcccaaagtgctgggattacaggcatgagccaccacgcctggctcatgcatggcttttgtatttcagtgtaatttttgctgacttaaagttacaattcataaatggtgtgagtacatcaagctgcagagtgttcctagctgtcaagggctggagttcttaatgtttcctcctccattttattataaaaaattttccagcacagaaaggttgtagtgaacacccatatatgtaacagcaagattctacaataaatatttgctgtatccaggctgggcaacatagtgaggccccgttctctacaggaaaaaaaaaaaaattagctggtcgcggtggtgcacatctgtagtccccactgcctgggaggctgaggtgggaggattgcttgagcctaggaagtcaaggctgcagtgagctgtgatcacaccactgcactccagcctgagcaacagagtgagaccctgtctcaaaaaaaaaaaaaattgggccaggagtggctcacacctgtaatctcagcactttgggaggccgaggtgggcggatcacgaggtagggagtttgagaccagcgtggccaatgtggtgaaatgctgt

SEQ ID NO: 86337 - DNA, 1742 bp, Homo sapiens
gggtgcctcttgattgggctggtttctcagactgtcctcgtttttgatggcacttaatctattttacaattgataagttacagttcttcatagtttgttttattgatctgttttcctccatatactactgtagtccattcatttaaaactggctttttatttttccagtaggaaatccatgaagtccagaagtagaagtcctgcatattcaagacattcatcttctcatagtaaaaagaagagatccagttcacgcagtcgtcattccagtatctcacctgtcaggcttccacttaattccagtctgggagctgaactcagtaggaaaaagaaggaaagagcagctgctgctgctgcagcaaagatggatggaaaggagtccaagggttcacctgtatttttgcctagaaaagagaacagttcagtagaggctaaggattcaggtttggagtctaaaaagttacccagaagtgtaaaattggaaaaatctgccccagatactgaactggtgaatgtaacacatctaaacacagaggtaaaaaattcttcagatacagggaaagtaaagttggatgagaactccgagaagcatcttgttaaagatttgaaagcacagggaacaagagactctaaacccatagcactgaaagaggagattgttactccaaaggagacagaaacatcagaaaaggagacccctccacctcttcccacaattgcttctcccccaccccctctaccaactactacccctccacctcagacaccccctttgccacctttgcctccaataccagctcttccacagcaaccacctctgcctccttctcagccagcatttagtcaggttcctgcttccagtacttcaactttgcccccttctactcactcaaagacatctgctgtgtcctctcaggcaaattctcagccccctgtacaggtttctgtgaagactcaagtatctgtaacagctgctattccacacctgaaaacttcaacgttgcctcctttgcccctcccacccttattacctggagatgatgacatggataggtaagtcctatagtgaactggaaaaaacccccttgatctaaacataaagcattttctgttttaatctttgtcaacactaccctcatggttttatgaacaggaaatgtctttgatattttcagtgggaaagtctgtaattatgacattattacttgggaagagagaattagaatttgaggcctggttaacccattttatcattaagtttattttatttattttgtattttttgtattttgagacatggtcttgctctgtcgcccaggctgtaatgcagtggcgtcatctcagcttactgcaacatctgcctcacaggttcaagcgattctcccacctcaccctccccagcagctgggactacaggcatgcaccaccatgcctggctaatttttgtgtttttagtagagatggggtttcaacatgttggccatactggtctggaactcctgacctcaagtgattttcccacctgggcctgccaaagtgctgggattacaggcatgagccaccatccctagcctaagtttattgataatgctaattttgattaaaattttaaaaaaatcgagttttcccttaaatttttgttgaaaatattaatacctatagaaaaattaaaagaataataggctgtatgcagtgactcatgcctgtaatcccagcactttgggaggctagggcaggcagat

SEQ ID NO: 86338 - DNA, 1050 bp, Homo sapiens
ctcaaactcctggccttaagtgatatgcctacctcggcattccaaagagctgggactacaggccgtagtcaccattcctggtctatattctttttttattaacagtatttttattagaagtgtttccattacacccacagattcagttcagattccaaaatactattcatattctaaaagtttggcagtcctagagcttggtaggtttttaaattacacatgtattatgaaacctaattaccacatgtgaatttgtgtataggtataaatggggaactaggaaatactgatatagttagggtacatcagcgcttcctggtagtgacttttcaagtaatgactgtgatgtatagtatctgctcccctatgatagactcactttgcatgtaccacatgtccgcaaccctttataatactgagtgtcctatgctaaaggtgataatgttaagcattgtagttttgaggctgtcattaaattttcaaggtttttagtacattggaatttactgaaacaggatttgacctctattcaaattgtatatcctgaactggtaggacataacctatcaaatactcattctgtcttgaaataaacatgctaaaaatgtaatattttagaagcagtatacatttttcatacatgttcaatatccctaatccaaaaatctagaaatcctccaaaatcaggaacatttttagcgctgacatgatactcaaaggaaatgctcattggagcatttcagtattcagatttttgcattgaatatgctcatccagtataatgcaaataatccaaaatctaaaaattttaaaaatttgaaacactcaggccgggtgcggtggctcacgcctgtaatcccagaactttgggaggccgaggcgggcggatcacgaggtcaggagatcgagaccatcctggctaacatggtgaaaccccgtctctactaaaaatacaaaaaattagccaggcgtgatggtgggtgcctgtggtcccagctactcgggaggctgaggcaggagaatggcgtgaacccaggaggcggagcttgc

SEQ ID NO: 86339 - DNA, 1063 bp, Homo sapiens
ccaggcatggtggctcacgcctgtaatcccagcattttgggaggccgaggcacgtggatcatttgagaccaggagttcaagaccagcctggcaaacatggtgaaaccccatctctactaaaaatacaaaaattagtctggcatggtggcacacgcctgtaatcccagctacttgggaagctgaggtaggagaatcacttgaacccaggaggcagaggttgtagtgagccaagatcacgccactgcattctagcctgggcgacagagtgatactctgtctcaaaaaaaaaagaaaaaaattaagtatctttagttgtgattaattatttttttttatgttatagtacaggtttttttccttaaaaattagatctttctaaccttttcgtaaccaggcattatgatctttgaaaatttttatttgcgtatctttaattgtaattttgtcatctcttctcatttattgtttagtccaaaagaaactcttccttcaaaacctgtgaagaaagagaaggaacagaggacacgtcacttactcacagaccttcctctccctccagagctccctggtggagatctgtctcccccagactctccagaaccaaaggcaatcacaccacctcagcaaccatataaaaagagaccaaagtgagtttttggaggaatctgtctttcatgatagttttctcccttccttttgaactaaatctctcatgtttcttctataacccacaccagtaagatcgtagaagtttggtcccaaagtattttttaattttattttaatggacaaaagcctttcttggagactcaggtcattcatctatgccctcagatacccagctatgtttttagaacaacagaaaattcccaaatccagatatactatgaatgtttatctcattatgtcttttttattcataatatttagagtactaaggaagaataaaagctttttaaattcaggatgtgtcaatcgtgtacacattaaccaaaaattaatagatatgggatttttcttcctgaaagcatataaattgtcatgccataaattgagtataaat

SEQ ID NO: 86340 - DNA, 1019 bp, Homo sapiens
gaggtttcattcaccatgttggacaggttggtctcgaactcctgacctcaagtgacccgccctcctcggcctcccaaagtgctggggttacaggcatcagccactgcgcccagccacagaagattaattcaaatattagctccgttgtttattattaggaaggactaattattcaactactcttcgtttcagtttcttcatctgtaaaattcaagggttttttctagagaacctgtggtcaactccaaaattatattaggacttgaggcattgttatttcagcattcttttttttttcttgcttttaattttttttcgtctttatgtaggtgccttttaccttgtatttgagtatatggaccatgacttaatgggactgctagaatctggtttggtgcacttttctgaggaccatatcaagtcgttcatgaaacagctaatggaaggattggaatactgtcacaaaaagaatttcctgcatcgggatattaagtgttctaacattttgctgaataacaggtaacatagtaaccaaataagattaagcactttcctcttctcctctgacctttttagtttcaaatggttaattggtattataattagacctaatagtgcagtattcacacactatttagtgatatttcctacgttcagtgtgggagaaacatacctgctcctttagctgttcttgagccttttctcagttaccagctttctgagtaaacattgatgtgcagttggtgattggccttttctgcctagtacttactcctaggttttaatagcgtaaacaaacaggaatctggttatgaacaggtgttaattcatcagaagtttttatcatttgctttcttcttttctgtttatttgcctatactgcattggtaatatcagatgtattatgcacactaggttttttgttttgttttttttttttgaagatggaatttcgctcttcttgcccaggctggagtgcagtggcgtgatctcgtctcactgcaacctccacctcccag

SEQ ID NO: 86341 - DNA, 1041 bp, Homo sapiens
ggtcttgctctattgcccaggctggagtgcagtggcctcccaaaattctgggactacaggtgtgagccaccatgcccagactgttggccctcttaagtctttctcaatctagagcaaatcatttcttttttttcccaacaataagtatttaatctagcacgttctaggtactgttgtttaccatgaaataaatttagctaaggagtcaaattcagaaaatgtaataatagtttttttttgttttttaagtgtaaggcattataattgaagtagtcaaaaaaggtttaattagggggattgagtgttaagagtagaagtaatcatgaactgggtattgtataaaattttttaaaaagaaagagaaaagagtagaacaaagagagcagaagttaaaatttatttttgtaattcctttacccctaacttggcgcatgacttttcaggtgtattttggaggccactgctatggcttatgaaaataattgttttttgttttacagtgggcaaatcaaactagcagattttggacttgctcggctctataactctgaagagaggtaaggcattaattaaaattacatgtgggaaataaggtttgttttgttttgtttttttgaggcaggatcttattctgttgctcaggctggagtgcgtggcttgatctcagctcgctgcagcctcaacctctgtgggctcaggtgattctcccaccttagtctcacaagtagctggaaccacaggtgggtgccatcacacctggctaatttttgtatttttagtagagacggggttttgctatgttgcctaggttagtcttgaactcctgggctcaagctgtctacctgcctcagcctcccaaagtgccgggattacagacatgagccaccgcacctgggcaacaatctctctcttttttttttttttttttttttgaagacggagtctcaatctgtcacctgggctggagtgcagtggcgtgatctcggctcactgcaacctccgcctcttgggttcaagaaattctcctgcctcagcctcccg

SEQ ID NO: 86342 - DNA, 1001 bp, Homo sapiens
aatccagtacaaactagtcagctttttattatggccttattagggcagttctaaatgagcagatttatacacacataccactttacataatacgtaattgtctttttttgggatgttaacagttacttggccattgcccacatctgttaattaatttgtggttattttatgatggtcacattctaattatatcatttcttattggaatacttatataaagatatcctcccatctgtttggctgaactcaggtctaaataatatagaaaaggtaggataaaagttaattctttcattttatataacggttttcaaaataatgaagtagtttcctagtatccttcaaagatgaccaatgaaaaatgtttttgttttttggttttattatgaattcttggatttaaacttatttcatgtattttaatccattgtggttattatccttattcttgttcaaactgtccagtctttggccagtgggagcttattcaggttatattttgagtccttttggcacaccatagtagtgttacagtagaaaacatcttgtttttggttccaagcttgtcctgttcatttcctgccccaaacctggaatcatccatttctctaaggagtcttagttccttttactggaaaatgatatttagaaactacagtttgtgtgttggggcatggatgttttaaattggccatgtttgttaattgtatcttatgttgtatgatttatgcccagtcacacactgtccttgacctttatactttacaattctgacatatatacttcccagtggagcaaatcacttctttccattcttttccttcctctattaatgtcagtctttaagaggagcactacaggggttttattttaaaattcaacagaatgatggagaaagagcataatttctgtggtagcctacccaaataaaataaagctttagttaaattttactgactcaagctgggtgtgtttttgttctggacaatttgctttaacag

SEQ ID NO: 86343 - DNA, 1050 bp, Homo sapiens
tgatcatgatacatggttccatggtttaagtcaccgcctttcctcgaccttctgtatacattaacaagccagccattactgtcctcgtctttattccctactgaaacttgaccaatactgttctccttttttgttgttatgccaaggaaagacagtatttatatgggaatttatatagctggtctgtacctagtattagcaagatcctcctttctcactatgtaactttcgtacttttatttcctcagactaccatctgccatgatttattttacactgctgttacctacttttactaacttttttggttatttttgttttccttattctttacatttcccacagtctttgccttcccattttaatcctttgctcctccattcattcactgctgcattcccttacatatttcccctttgctttgtctttttccagcctcccccactggcaggattgccatgagttgtggagtaagaaacggcgacgtcagcgacaaagtggtgttgtagtcgaagagccacctccatccaaaacttctcgaaaagaaactacctcagggacaagtactgagcctgtgaagaacagcagcccagcaccacctcagcctgctcctggcaaggtggagtctggggctggggatgcaataggtcagtgccagaatggggcctttgtgcttttgctaagcgtatttggcaggttttgaaggtcaagtgtaaggagtttgtgtgtgtgtctgttttttagtttttggtccagtgaaccattaggaaagaggttaatgtcctcattatggtgagaaggagattaaccaagtttcgtacatatggtccagaaagtctacaatagatcattttcctttcctgaaatatgtacggaacactgtatctcaattagatgtgtggcataaatcagtgaattaggtaagccaaatttaatttaaggttagttcacccatgactttatgaaacacataatttggagccttgtttatattagatttgataagaccttcatagaatctagtagtgttaaattacaattgctaaatgt

SEQ ID NO: 86344 - DNA, 1168 bp, Homo sapiens
cagaacttgaaaaatacagataaagtgaagtcacttttatgcacaatccagagatgttttagttattagtgcctgtatttcttaagcgaaagcataaagagtaacaaaatgtgtcatgacattttgaggcatgaaaaaatgagacatttaaaatgaaatttcattttttggatattgtaagttgctgttgccagttgaagaaggcaaagggcccttggcctatctcatcgtcttatattggcttcactgtctttcaacaggccttgctgacatcacacaacagctgaatcaaagtgaattggcagtgttattaaacctgctgcagagccaaaccgacctgagcatccctcaaatggcacagctgcttaacatccactccaacccagagatgcagcagcagctggaagccctgaaccaatccatcagtgccctgacggaagctacttcccagcagcaggactcagagaccatggccccagaggagtctttgaaggaagcaccctctgccccagtgatcctgccttcagcagaacagacgacccttgaagcttcaagcacaccagctgacatgcagaatatattggcagttctcttgagtcagctgatgaaaacccaagagccagcaggcagtctggaggaaaacaacagtgacaagaacagtgggccacaggggccccgaagaactcccacaatgccacaggaggaggcagcaggtaaacagaccggtcatgaatctcattgagctcaggtgctgttgataccctcttaaaaatctcttaacattttttttcccccacatcaatggccttggtttcagttattctgtaacctagtctacaggagaacatagcaccaagtaatgtatttcttgcttggcttcttttatttaagtctcaaagcttcccaaagcacctttcctatactgattgtttttccacctcctaggagataggtaagtaaagcccctgtgttctaaccaaggaaaccacaaccatagctagtgatgcatcttgaaccacacatcttgaactgtgtgtggtggccaactagtcctagcacttggaaatctgacttccaaacaaaccattatcagactatacttctttacctctagtggagtggatgctgaatgccagtctttcctggaagatacaatcaagaaaaccct

SEQ ID NO: 86345 - DNA, 2047 bp, Homo sapiens
ccctgcttggatgttacatgtaacacctgaccatcttttgtactgtacaaccttacaattttgtagtgttttcagagtgctttcatctgcatgctaagggaatacaaacttaattactgattgtctttgcaaaatataattaaggtaaatatgctacaaaaatatctaattataactaaaaactgtttttggcttgttttgagtaatgactttacatcacagcttagataattgaagaatgactatatatatattttaaaatatgcttccatagggaaaagaaaaatcggtcatttggaagatatcccaaaacattaaatcttttcttcagcaggatgactctcaattttctaaaggcattgttctaccatacttctgtctcagtggttttctttgtcctcaaactcataccattttacatctctcctctcctgccttggcaggagttcattatcagacaatgtttatcatgcttaagcacatttaggcagcagtggaaaaaagaaagtctggtggaagtagttcaagaaagacaaaagatctttgtaaagacagagtatagtatgaatttaatatatttctaaatatttagttcttgtcaccgtctccaagataaacagatgtttatcaacagttcattctgcatgacactgctatagtgatttttttttcatagcatggaaaaaaatgcagtagttaggaaaacaaaatagaaaattatgatagaaattagtctttaaaattactgtaacataggaagctgaatgataatatggtagttacaatcctttcagactatgattttggggagacgtgactaaagtttggagaagcaagtgtatttttatacatgacagtaatgaaaactttttactttattttatctctcctatatattctttaagttttatttcaggttaacctatgtcatcaaacattctgtaaaatgtgttagccaagtccatgcaaggtctctgttgtagagcaagattatgtcctagaaatgtgaccacagcatgtatattgttccctctcatcttccttccttctgctttgttttaatgtttccatctaacagcaaaaaggggcagggagtctgccaacagcctgcatgttagaacagttctttaaaggaaggaaatggaggaaatcttagaccaaaatcaggataatcatttgaaacatatgatatttttacactagctgttagatccaggatgcaactgttttacttttaatcacttgatttatttataattgcaattttctgatcccaagattttattctttatatatctggttacttatattgatatttgtttatgttgcacagtgtgtgtgtttgtgtttataatcacatgtgctttttaagatggtgtttaaaagaagtaacccttccacagcatgtcctcctcacattcttccaccagagaagaggccccctgagccccccggacctccaccgccgccacctccaccccctctggttgaaggcgatctttccagcgccccccaggagttgaacccagccgtgacagccgccttgctgcaacttttatcccagcctgaagcagagcctcctggccacctgccacatgagcaccaggccttgagaccaatggagtactccacccgaccccgtccaaacaggacttatggaaacactgatgggcctgaaacagggttcagtgccattgacactgatgaacgaaactctggtccagccttgacagaatccttggtccagaccctggtgaagaacaggaccttctcaggctctctgagccaccttggggagtccagcagttaccagggcacagggtcagtgcagtttccaggggaccaggacctccgttttgccagggtccccttagcgttacacccggtggtcgggcaaccattcctgaaggctgagggaagcagcaattctgtggtacatgcagagaccaaattgcaaaactatggggagctggggccaggaaccactggggccagcagctcaggagcaggccttcactgggggggcccaactcagtcttctgcttat

SEQ ID NO: 86346 - DNA, 3030 bp, Homo sapiens
ggagaggagttccttactaacccagagacttcagtgtcctgaaagattcctttcctatccatccttccatccagttctctgaatctttaatgaaatcatttgccagagcgaggtaatcatctgcatttggctactgcaaagctgtccgttgtattccttgctcacttgctactagcaggcgacttacgaaataatgatgttggcaccagttccccctggatgggctatagccagaacatttacttcaactctaccttagtagatacaagtagagaatatggagaggatcattacattgaaaagtaaatgttttattagttcattgcctgcacttactgatcggaagagagaaagaacagtttcagtattgagatggctcaggagaggctctttgatttttaaagttttggggtgggggattgtgtgtggtttctttcttttgaattttaatttaggtgttttgggtttttttcctttaaagagaatagtgttcacaaaatttgagctgctctttggcttttgctataagggaaacagagtggcctggctgatttgaataaatgtttctttcctctccaccatctcacattttgcttttaagtgaacactttttccccattgagcatcttgaacatactttttttccaaataaattactcatccttaaagtttactccactttgacaaaagatacgcccttctccctgcacataaagcaggttgtagaacgtggcattcttgggcaagtaggtagactttacccagtctctttccttttttgctgatgtgtgctctctctctctctttctctctctctctctctctctctctctctctctctctctctgtctcgcttgctcgctctcgctgtttctctctctttgaggcatttgtttggaaaaaatcgttgagatgcccaagaacctgggataattctttactttttttgaaataaaggaaaggaaattcagactcttacattgttctctgtaactcttcaattctaaaatgttttgttttttaaaccatgttctgatggggaagttgatttgtaagtgtggacagcttggacattgctgctgagctgtggttagagatgatgcctccattcctagagggctaataacagcatttagcatattgtttacacatatatttttatgtcaaaaaaaaaacaaaaacctttcaaacagagcattgtgatattgtcaaagagaaaaacaaatcctgaagatacatggaaatgtaacctagtttagggtgggtatttttctgaagatacatcaatacctgaccttttttaaaaaaataattttaaaacagcatactgtgaggaagaacagtattgacatacccacatcccagcatgtgtaccctgccagttcttttagggatttttcctccaaagagatttggatttggttttggtaaaaggggttaaattgtgcttccaggcaagaactttgccttatcataaacaggaaatgaaaaagggaagggctgtcaggatgggataatttgggaggcttctcattctggcttctatttctatgtgagtaccagcatatagagtgttttaaaaacagatacatgtcatataatttatctgcacagacttagaccttcaggaaacataggttaagcccccttttacaaagaaaaagtaaacatacttcagcatcttggagggtagttttcaaaactcaagtttcatgtttcaatgccaagttcttattttaaaaaataaaatctacttataagagaaaggtgcattacttaaaaaaaaaaaactttaaagaaatgaaagaagaaccctcttcagatacttacttgaagactgttttcccctgttaatgagatatagctagatatcggtgtgtgtatttctttattattctctggtttttgatctggccttgcctccagggccaaacactgatttagaaagagagccttctagctattttggcattgatggctttttataccagtgtgtccagttagatttactaggcttactgacatgctattggtaaatcgcattaaagttcatctgaaccttctgtctgttgacttcttagtcctcagacatgggcctttgtgttttagaatatttgaatttgagttattgggccccactccctgttttttattaaagaacgtgagcctgggatactttcagaagtatctgttcaatgaaaaaaagttggtttcccatcaaatatgaataaaattctctatatatttcattgtattttggttatcagcagtcatcaataatgtttttccctcccctctcccacctcttatttttaattatgccaaatatcctaaataatatacttaagcctccattccctcatccctactagggaagggggtgagtgtatgtgtgagtgtatgtgtatgtatgatcccatctcacccccacccccattttgggagtcttttaaaatgaaaacaaagtttggtagttttgactatttctaaaagcagaggagaaaaaaaaacttatttaaatatcctggaatctgtatggaggaagaaaaggtatttgttaatttttcagttacgttatctataaacatgatggaagtaaaggtttggcagaatttcaccttgactatttgaaaattacagacccaattaattccattcaaaagtggttttcgttttgttttaattattgtacaatgagagatattgtctattaaatacattattttgaacagatgagaaatctgattctgttcatgagtgggaggcaaaactggtttgaccgtgatcatttttgtggttttgaaaacaaatatacttgacccagtttccttagttttttcttcaactgtccataggaacgataagtatttgaaagcaacatcaaatctatacgtttaaagcagggcagttagcacaaatttgcaagtagaacttctattagcttatgccatagacatcacccaaccacttgtatgtgtgtgtgtatatataatatgcatatatagttaccgtgctaaaatggttaccagc

SEQ ID NO: 86347 - DNA, 3011 bp, Homo sapiens
cctgagcatatctaatcatgtataaaggacgtttttcctccactttatcttaggggttctctgtctcagaatcattatagactcattaactccccctcccagcaaaaggttatcaggatttgaagaggtgcttgaaaacgctagactaggaactagagaataaatgagttgggaaaaaccatgaaatgtgatttttttaaagtagaaaagttatacaaataatggtaccaaaccatcaaaagagttgagcttcatgtaccctgactcctcctgacaggagaggtaagtgggtttgagctcaactgtcatcaagggaagttggtaagaggctgtttagacccaaaggatagtcttaaaccagacttcaccacccaccctacctcagttcccatgttattacatgcagagtcagcatggggattagtgtacctacctttgctgagatttcccgatgcgttgccaatccagaaagtgaatcaaaaagttgtttaaaagttaaaatctctattgtttccaaaatctttcccatctccacctgaagacagaattgcttccccttctctttcatggcttagaacacaggataaatttgcccctgtggtatgtgctgcaatcctgctagttatgacaaatgggcagagggcagataaagtccactaggagaaagaaagaagggcgataggtatctgaagttgtaaatggggtgagcaagtcatacaggaaggttaagggatacaccagagcaagggaaattagaaggaagttgagttcaaaaactggtgatgatgagagttgctaacctgtttttgaatcctcaaaagtttaagtggtgttccctttcctgtgggctaagtcacatcttataaggagaatggagagctcaagattgttccaatttctggaattatgtgttcctggttgcaagttcatgattggggtataaacttcaacctactagaaaatactgttttcacttcatagcagtgaaaattgaagcagtgtcttttcaattctgggcctaaaggctgaggaccttactaacctagatttttctgtcatacccaaggccatttctaaccagaaaccatgctgttcagtacctcaatttcttaggcactgttctttcctagataggcatccttaactgtatggttaatgcctcaaagaagtaaacagttaatgctcttggtgctgatcttgggatttccattgttattaaagattgcctcatagcttgactgttttttaactatggagtgacttttcatatcctaatcatccataagggctaagtggaatgggaatggggaattcctcaagggaggaagcactcaaccattccaagggagaggtggaactgctgagtcttctggttgtcctgagaggcaaggtgagcattcctggacactttggttaattttactgtccaggtgtgacagttcttatctgtaggaacacctccagtgttcctaattaggaattctctcaagtaggagattactccaagccagagttgaaagactgggggagtacgacacctgaaggaattactggtggtactccttactgtacgcaactgtctctccatctcctatccacccacttcttttccctatttctctttctccccactcaccattcaactggaataatttaggcctaccatcggtattgattgcttaaccctaccaggtatttagagttactgctatttcattgttttgaaaggtaatgagagtcaattcagaagacaaatgtctatctggatcctcaacctactgtagtggaaagtgaaggagaaagtaaactaaccatactttcttattgctaggagctatgaaaggagcttttcatttgtgttatgtagggtacaaaagattattttgtaccctggccaggaaaggcagggagtcatctttctgtcttcctgcttcccctctttcaaccttcacctttttatcctcttcttccatatcctgagattgttgcttttgctgatgacatttctaagctcagttgcagatggtgtctgtgggaagtaaagcttggtgagaagagggctctctggtatctaagagaaagcagataagagttgctttaatgtcctggtgattaatcactggggtgccaaaacactttgaccactggatttctctcatatctcttatctcaaaaaattagtactccaaggctgagagaaagagactgatactgagtttgtctttcataccctctaagtgggtagtttgttagtggaccattctcaatttgcaaccttcagctacagcatacttctgtggaataagaaggtatagccatgaaataaatttacttagacccaggttctctaggacctgtaaatggatggactttttgatatcttgctctggcatgtttgtaaactacagatagtattgacagctctaaaggaatgaagggcattttatccaggccaaaccaaccctgagggaggcagcatgaagaaacctttaagaagtccaccatatagcagtcagagctaagtaaagaacaaagtctgagtcttggaggatgtcttttctctacctaaggggcctatctgatggactctctaggaggggatccttctccctcctcagtctcagaactacaatagtgcctaatgagggacacccttggtgaggatcagcttgtagatgaccctcctcaccaaggctaatgcaattttgaatgcatttggacctggagaaaacaggctgaattcaaagacctaaagaaagcttagtagcctggtcccttttttaaagtctggaactttttagtttggccttatactagtgttaatatttataatttctgttaggggaccaaaagtctcagaaaatgaagcaatataagaggtggaaataagggtaagaagggagaactagaagagtctggtagctgggctgcagaaagagacttggggtataattccttatttttatttatttatttatttatttatttatttatttatttatttttgagat

SEQ ID NO: 86348 - DNA, 1063 bp, Homo sapiens
gcccagcttggatataattgcttataaagaagagagggatacaggatggaaggaaaaattatggttgagttagtgaaatttataggataattttcttagagattcacagttcatttcaggaagaccccattaaagcaccaatactgagtaaagaattccccttaattacagtagtcttacctttagggttggaggatgggccaagaacccctaggatactatgaagacattttctgtagggaaactagaaaagatgggcaaatatgttaagcaatatgtaaggacatttacttaacactgttatctacatagttcaagagagtaattcaagaataaggaggaatgacatggatgcatcacattaaacagttatttgtattgtttgaatttcaaaactcctgcaagtggttttaggtatgctaagtcaacctagagactagtagtattcctctgccactcattttagatccaaatgatggcagtgcatagaagaacaaacgagaatatgcgaattagagtcacagaatgttagagctacaaaagaagattagtttgtttggttcagtaccatctttaaccagtaaaaaatgcccagaaaggccgaggaacatgtatggtgttgcgagaaagaagggagagaaagggaactaacattgttgggtacctgctatgtgtcaggcgctgcctaagtgctttgtttttatcttgattgattagcaccttgaggctaagggatagaatgaataaatggcaaaccccggctacctgggagcggtggctcacgcctgtaatcccagcactttgggaggccaaggtgggtggatcacgaggtcaggagatcgagaccattctggcttacacggtgaaaccccatctctactaaaaatacaaaaaattagccaggcgtggtggcacaagcctgtagtcccagcttcccgggaggctgaggcaggagaatttgcttgaacccaggaggtggaggttgcagtgagtgaagattgcgccacttcactccagcctaggcgacagaatgagactccatctcaaataaatacatacatac

SEQ ID NO: 86349 - DNA, 1047 bp, Homo sapiens
aaaactattataataagaggaaaccaaaggaaagaaataatcggagaaagtggacttattcagaaacaattatttgaaaataaagaagataggggacatagaacagaagaggaaggtgagcagtgggaggaatctcatggaagagggctcatgtatgttttgtgcagaggctgtgaattggctgaccagaatggtacaggaaaggagtattaggaaatgaagttggaggagcaatctcattggcttgaatgaggaatttgagttgttaagcagtagcagggaacagagcatgatgagatgaaaatcacattgaggacttttgtagcagtacttggtcaaggaagcaggaaagttcactaaaatattattgttcttgccaagacatgaagcactgagagtttacagtagagtaagacaaggagaatcagaggaaagaaagtgggtccataggaattagcaaggcttggtcacagcttggatgtgaggagagggataaaagcctcaggatgatgatcccaagacacatttgtgctgttggtggtgatgaaagcttgataagagggaactgctttgtttttaagtaggaagtgttttgtcttattaaccaattgataggatgtgtcaatgttcagtattgcagagtctaggagggggcactgcccctggaggatagtggagcatgcaccatgtgtccagatgataacctgcatgcaccctgcccttttcaggttgaagaaccaggcaagagggagtctgttgctagggtgtgcccatagacttcaagaatgctatcctactctggatctgggaaagaaaatagtatttttgccagtttcttcccctttaatgctttgaaaatgggatatgactagcctgtggcagcatgtgcctgtggatgcacaattctctagcttgattcttggaaggcctttttctgtccctccctagggatcatttgtatctctgattcctgctcccagagccataaagtgggagcccccatttattaattgggctgggactggggcgggggtcggcgggggactc

SEQ ID NO: 86350 - DNA, 2179 bp, Homo sapiens
ccatacctgctctcagtctcccatttgctttatcaaaattcagggttagagttagactgcctcaacttcttttcctcttaatgggaggagtttgagtttggctctttttttttttttttttttttttgagacagagtctcgctctgtcacccaggctggagtgcagtggcgcgatctcggctcactgcaagctccgcctcctgggttcatgccattctgcctcagcctcccaagtagctgggactacaggcacccgccaccatgcctggctaatttttttgtatttttagtagagacagggtttcaccatgttagccaggatgatctcgatctccagacctcgtgatcagcctcccaaagtgctgggattacaggcgtgagccaccgcatccggccccgagtttggctcttaaaggaaggcctccttctgaaacatacttgtccctttggttaagccagcaagggaaaggtaggcatctataggggagtttctctgcagtggcccagagagaagctgtaaagggcaggaatgaatgtatcacttcctgatggaatgacacgtcttctcccttagggaatcatagattgccagggctaggaaagaggtcaggtaatctaacctctccctttacagagcaggaaactgaggcttaaggaaggaaagtgccttgcccacgcagtcgcacagcgagttaatggcagccagccagaactagatccaagaggccagaatcttgacttctgcgagtagagtgcccccaactttaagatgaccctttcctgagagccctgagcttcttcaggaaaggaaggatggactgtgagatttgaggagggagagagagattgagggggaaaggtagatctagaaagactgggaaattatatatacatatatatatgtgtgtgtgtgtgtatcttaaagaataatctttttttttttttgagacggagtttcgctcttgtcactcaggctggagtgcaatggcgcgatctcggctcactgcaacctccaccttctgggttcaagcgattctcctgcctcagcctcccgagtaactaatggctaatttttttgtattatgtagcctggctaatttttttgtatttttagtagagacggggtttcaccatgttggccagtctgatctcaaactcctgacctcaggtgatctgcctgcctcggcctcccaaagtgctgggattacaggcgtgagccaccgcgcccagcctcttattttctttttctttttcttttctttttttttgaaacggcgtttcattcttgttgcccaggctggagtgcaatggtacgatcttggctcaccacaacctctggcctcccgggtttgagcaactctcctgcctcagcctcccaagtagctgggattacaggcatgtgccaccatgcccggctaattttgtatttttagtagagatggggtttcaccatgttggtcaggctggtcttgaactcctgacctcaggtgatccacccacctgagcctcccaaagtgctgagattacaggcgtgagccactgcacccagtctaagaataatctttcaatgacatgcagattatacaagtgtaatttttatttaaagtcaagaggctggttcattgggaagcagatggcagccacagccaaagatcctgatgccctcagagttaacccaaacttcaaagagcattttgcaactatctctggaggttggatagcaggaaaagatccttagaggcaatgtgaggaattcaccctaaatctcaactgaagctcttttgctatattgaaaagaaaaagggaatggagaaagaaaacacatcggctagaaaactatggtggcggaagggggtccctgaatgatagatgagatgatagaactcagcaaaaagaggtatgctctgagattacaggaaaatggtaaggggaccttctcctctcctttattttagtttttaaagttttgagttgtttgatattctcctttgatgaggcagaaggaaggtggtatgtggtgatccacagtggcctaaataccctaaatagtgtgttcagttggctgacacgcattgctggttctgtaagtcatctcagtctggtgccaagatgcctttccctctttagacccctcctggatgtatctacagtcccttccagtgtttgctttctctgagca

SEQ ID NO: 86351 - DNA, 1279 bp, Homo sapiens
ggtgaagggaggagggcatcattgggcagattagaaagagttaatgggtctaggggagaggtactggggatctgcaaagtgaatattgtctgctgctgatgaagaaatagatcccagtacatatcctttacgttttgttcatcaactttgatagacagcatagaggaaatgtggaactggtctccatgtaaatttgtctctagggaatgtatgatagacctacttgtccagattacattaagtttgctgtcctgcaaacctcctttctcacagtcaggatccttttttgccttagagtccttcctgaaggagctgttatggatgagagagccacaagtccaacctcatgatctgatctaaaactgggtggcctcctcccagtcaccttcttttattagccttatattaaccattaaccttcattgatctttatgattctgggtttcacagcttctgtttctgttgaattccctaactttaagaaccatgtttttgcttttatcagcctgggagctaggtccctggagacaagaattttagaacagttatgactctctctgggagtgtactaaggttagtctgaatccttctggggaattcaggtttgaaggagttagaagagtgctaacatcaccgtcactgttacctaccaatggatgcttcctgggtgcaagaccaaagatgttctttggtgtctagtcccttgtctcatgtctaatgtaacctgccattttcctttacaggtaggagcaacggtgggaatgccctctgaggaatgcagtgatgtccatcagtcacctctcacccagagcctggcaaattcagtctctttcacagaacctaaagccaagccaggtaggggcctaaagccaatcagaggtcactggcctgcttttgtgtgggatgaccctactcccatcccaccccaccccacccctggtcttagagaagtttctttcttttttttttcttttttaatttttattttttgagacagagtctcactctgccgcccaagctggagtgcagtggcgcaatctcagctcacttcaacctgcgcctccggggttcaagtgattctcgtgcctcagcctcttgagtagctgggtaacaggcgatcttttttttttttttttttttttttatggagttttgctcttgttgcccaggccggagtgcagtggcatgatctcggctcaccgcaacctccgcctcccggggttcaagcgattctcctgccttagcctcctgagtagctgcggttacaggcatgcaccac

SEQ ID NO: 86352 - DNA, 1050 bp, Homo sapiens
ccaatttttttagtatatgtgctgccaaagcaagcaccaaaaagctattttctatttctttcttctcagtcaagatagggcagttctgtcccttctcactacctctaatcagcttcttcacttcctttccaggttcagtgggaaatcccacctgtccaaacactgtgtgagacaccagaattagaggcctgcaagcctgcttccttcatccccaatgcccagatgggacaggtcaccagcctcctgtgtctacccccacctttcttgcttgctggtaggtgtgctgctccccctacccatcaaccccaaacagggttatgtttctctctcggagtatttttctctgttattaaatgtctccaacaaggggaaggccttggtgactcgcctgtatgtcttcgtaacttccagcccgaatctgtaaagagccgctaacctcctggtatcaaatgtccatccctttttctatagttcatgaccatttttcccatttagtgggtgtgggaatggaccagtaaacagatggtatttggtactggagagggagagtctaatgacaggtagcctttcttctgggggctagaaatctgaagccacagatgtgcattcttcctagttgcttgctatcctgggagagtactaggatttttttttttttttttttttttgagacggagtttcgcttttgttgcccaagctggagtgcaatggcacgatcttggctcactgcaacctctgcctcccggattcaagctatactcctgcctcagcctcctgagtagctgggattacaggcatgcgccactatgccaggctaatttttgtatttttattagagatggggtttctccatgatgatgaggctggtctcgaactcccgacctcaggtgatccgcctgccttggcctcccaaagtgctgggattacaggtgtgagccactgcgcctggcctacctggatcttttgagcgaatggttttatgtgtgcatttgtttttaataatatccagactgttccgaaaggaaagatgatttatctagtgtctatttc

SEQ ID NO: 86353 - DNA, 1020 bp, Homo sapiens
aggtgggctgaggtagacagagggatagagcaagtgttagcaagaaacgtccctggatgtagtcaagcagtaagtatgcatggggtaccttgagcaccagcatttataacttatcttcatgtcttctgtctaccaggttatctgatcacacagaacaggcctgccagttgggcagctgcagtcatggtttctgccacacgagggcgctgctggccaattaaaactcatgccccttagcagacagtttggggatgagggcaccctttctccaaaacaggggtcagaaactctggggctctctgggccccagagagcatgggcccaaaaagtgagacaaatatttggtaccacttgttcttccttgaaaatggcctgagacccctaaacactttgctctagtggcctgacatctcaatgtgcttccagctgaacttgggaagccccctctttccaggcacttaacaccttgcacaggtgcatctctcccttaaggtgtagcaggttccagctgtatgccccgttgtccccctgccttaatggcagtcactttccgacccagatggtggaggtgcctgtggtttttagggggaaaaaatctcttataattgttctaagaaaagtgttttgttagtgagaaagtgttaggggtgactgaagcctgggagagttagtctccccgtcacctactccagcacaaacctatagaattcaagatggtctagtggatgtttgcagcctcagtggctggaatacaccccaggacattccagggccctgagccaaaaatggtgtcagaaagctggataggagtgtgggctgctttgggccatgagcctcatacccaccctgtatcaggcagtgtttctgctaggggtgccaaatggccctggggcctctatgggactgaggactccacaattgaccctccatctccatgaagcccttccaggctgaacaggctaagggacatgacagaggttctcctcctccttcctacccccatgcctgagggcccctccc

SEQ ID NO: 86354 - DNA, 1019 bp, Homo sapiens
tgctcctcgttatagtcttcccagtttggggaagagcagtgatatgccaagaatggaggcctcagactctcccaatccctgatttttacatgtccccctataaggcccctctgccatctacacttttgcccttcatccacaaagcccaaaaggaaggcattatagctagccatgccctctgactgccctctgcccctttaagggaaatggaaatgggtacccagctgactgaacctactcaacacctccagaaattagacactagggcatggtgccaccctcccaggctggcacatgctaccctggcagaggatcaaataacccccccatcataccctgccccatgtcttcctctactctctccctcatgctttctctctctctctctctctctgtctctctctctctctctctctcagctcaaagcacagctgagccttaaaaggggggttgagggggtggagagaccaagctggggcaggggggtatagagctccaatagcacgttttcacctgccatttaattggatgtatttttaattaatgggacctcagggaccaacatgagacaatctgatatctgaatagggacaggggagggattgggtaagggaggaggattgggccactgggtgcggttaccgggaacccaggcccatcaatcactggccactttgcgttctggcatggagaatagcgaggtggaggaagggaggcactggggagaggtgccaggatttccccccaactgccaggacctccaaacggattggaactatactggttgactcaggtctggagcccaaaatcacagccagaatataaggtgaggctgttttcttgctcctggggttttgtctggttgggcttgtcccagggagtgctgtaaaattgtgaaaggaaggtggggacagagctttgaggtccttgtagagagaagacaagagctatggaccatagaaccagagactatggagagacggaggagaagggcagggttcagaggtatttctgtatgt

SEQ ID NO: 86355 - DNA, 1051 bp, Homo sapiens
gtcttataagatctacagggaaggaaatgcattatttaccccacctccttaaccaagaagcaaatcccccaatcaagactaaatgctgagcttttttttttgaaatcttaccacatatttccctgctgcaatataataagccactggagaaacttatgccaacaaatgtgttaaggagtagtcttatacgtcttgtcccatggcaaagcctagaacagagatagaatttaaattcaaggccctgaaggctgaattagaaatgctcctgaattcatgtggtgccatggccttagagctcttagacccctctgactcttgtagtgttgatgtacactggagaaaggggcaagtttccagctgtacccatccccaaccccttgcttccttcagtgttcacatgctagggttaggagggaagaaatgaaggagaaagggggttctcccactaggttgccaaggtggcatttcttgccatcctcctccttcctcagaaaattcaacatttttagttccatgcttcatgagactaagttaggttagggacaaggataggcacagagcttggaaagcagtgccagtaaaaactttatcacactccccaggcccccaacacccttcccccacccaagagttgccttctcttccccattttatatccccaaatcccctgagaagagcaagatctgcctaagtgccccccagcctcacccagcccttccttcagactgtgagtcatctccttggctgtctcattgcctgccttcttaactgcagacaggatgagaagagctctcctcagatccctccaaaacagtttggaaagaatttatctaggaccccgtgcctacttctaagggccccaggggtgtcagcaggggaggaaggctgtgccaaggggctggaaaggaagattctcttgttgggagagcagataaaaacctgaaagtggtgacaaggcagagggcgaagtttgggaactgagacctgtagtcccacctgtggggctggctgcctaatgtgtggcaggacatttagagcaagtatggtttgt

SEQ ID NO: 86356 - DNA, 1890 bp, Homo sapiens
taggtgcgcaccaccatgcctggctaatttttgtatttttagtagagacgtggtttcaccatgttggccaggctggtctcaaactcctgacctcaagtgatccgcctgcctcggcctcccaaagtactgggattacaggagtgtggctcagcctctcatttctaaggtttagccaagggtgccagatctttgcggggaagagggatgacttgaagtgagtggaagttaaaaatggtagtacccagaatttcctgcactttggagaaaagagactaggtggggtactcaatgttagcctacggctcaactcttactctaataggatctctttcctccttctcccctaaatttttcccactggttgaagagagatctggatgactaaacctcccatcttgacaccttggagtttgttaagcaggtcccctctctgtagcttccaaagccatgaagaaggggaaggaaggccaagacaggggtagatagaggtggcagtgccatggtgtccatcagcacccaaggagaaaggccaaggagaagaaggtaactagagaggaagccaggaggagatgtctgctcctgaaacagcattcttaccccatcctctcctgcttccttgatcacatgccgacagggctgtttgcccaagtgtgccagctcgcctggctagtgatcctgctctgctgtgcaggcagccagctctctgccccagcacagagcacatgctgaggtctctcacactcctttgctcactcatttccatgtgtctatgttgtggattcctagaaatgaaggaggggactgtgggcttgaagataggaagatggcaggctctggggcccattgggcacatatctgcctggctggaggaaggaaagagggagaaggctgctggtagctcagcaagctcaaggttctggtgactcatagcagtggaggtggctcacaaaaacaacagaggggaagggatccaggcctattagagctctcttttgccccatatctccccactctgagctctgtgaatgaaggtccctcatctggattgtggagcaggggaggccccaactataaaaaaaacagggaaatgggagagaagagagcaggggaagctgagcattcccagtgagaggtatctcagtgaggaaaggataggagaggccagttattcttgccctactgtattcattgggtgcacaggaggtacggggcatccatctgtgctagggtagctcagtgcccctgggcactttccagaagaggggtttctaggcaaacacagttactcctccctaccctcacttgcctgcccagaactctaggtacccagctgacactaaatttttagaagtaaaacaagctgtgttataacaccagaacctggaaggataactgctgggtctcagtcctctcctttctggaaacagacacctgggacaagagagaagcagctagggactcctatgctggctgaaccaaggtagtggtgcaggctgtggaggtgggtgcagaaccatagatcttcagaagtgtcgatttcctcctcccttgtgtgccaggtgggcagtatgcatcgtctccatttttctgatagaggggataatagggtaacggggtttgaggtcacaccaggagaaagaggccagaaagtggaccaggagaaccattcatgccttggactccagtcccaggggcctatactggatctggtaaagagtaacagctaggatagccgggcacggcaaatcacacctgtaatcccagcactctgggaggctgaggcgggtggatcacgaggtcaggagatagagaccctcctgaccaacatggtgaaacgccgtctctactaaaagtacaaaaatgagccaggcgtggtggcgtgcacctgta

SEQ ID NO: 86357 - DNA, 1642 bp, Homo sapiens
agagtaagtgtaacagctgctccttgcttgcagtgtttattgttacctagagacaacctcctggctttttcccagctccccctccccgctagcccaaccccctccctgccaacaatcctgctctctccacactgatgggaaatttatagcttgcccataccatgcctttaaccctctcctatccatagggtagatgggctgagggaagccaagtgagcagcaggcatgcttgggcaccagcagggtagaataatgtgtggaggagggagggggcaatgacacccctcccctccattctatgtgtccagtcttaggcccctgctgccctcctggctctcagtggagagaaaagaggaaataaatttggacccagccttgagatcctggaagagctcctttggatttagccttgggatcctagcatctcctcacaaaattatgatcttccctgggcatctctaagccaccaattgggttgcctgcacctgagcaaatacagcaaggtagtattgaaacagaagggtaaatacagagtggcagaaccctcagatccctcctttatgtctgagagagaggtagctgtagagatgtcttatcaagacaagaggtgctggcttgagaaatgctggctggacttctacagctgggtagatgttagacatgaagccggccgctgagtctggtgggagaaactgcccgccttaacatcaccctgagcgcagcactaagatcctgagagacccctgggtcattctctaagctggtctttttgatctggttatgctgctgctttttacttttccttcctgggtcattttctcctacacatcttctagtttgacaccttggggtagatccaagagactgagaagatggaggcatcctagtcatggcctcaacaaagctggggaaagaaaaactccttctgtcctctcttgacctttcatggaggggcactgtgtgttctactcaccatcctcactggaaacagaagagaggaaaaagcatcagattttagcagaaaggatagagggaagacatatggaaaaacttactcatgggatgaaagacttcagattggacctgcttctcttctgagatttttcttctgcctgccggtttgtttttgtgtctacctaagaggcattggatgaagcacagttacttttccaggcctcttccagacagcctcagcacagtttccatacagtgcactgcttcttggttcttctaaatgtcatgtagtatgtgtggtggttagatcacaagttttggagacagacagccctgggttccagtgccatctctgccacttaccagctgtgctaccttggtaattcacttaacctctttgagtcctagtttccttgtaaaatgcagaaaaacaactactccttaagtttgttgtgagaatttcgtgaaataatgtgtgtaaagcacctacaacagtgcctgatactcagtaggtgctcactcaacagtggctggtgcaagagtactactacttttatgaagttagcagggctgatattgcttcaaagactttgtgagtcccctgagattaaaggccaaatgtatgtgcacatgctgggggagaatgtagttttctacacgatgtggagtaggggtggccatcctctgg

SEQ ID NO: 86358 - DNA, 1044 bp, Homo sapiens
ttagctgggcgtggtggcgggcgcctatagttccagctactcaggaggctgaggcaggagaatggcgtgaacccagtaggcagagcttgcagtgagccgagattacaccactgcactccagcctgggcgacagagcgagactgtctcaaaacaaacaagcaaacaaacaaacaaaagaaatatgagagggacatagactggaagtggccaggaagcaggggcagggaagggcgtggggagtggcaaatgccagcctggaagcagctgttagggtccactccaggacctggagctgtcccttaagaatccctgtggatatccccttcccgcattccaagttctaaatattttgtttcccctctctacctgtacttaagaaaatatatttccacagcttcccttgatgctctacgtactgcagtcttttcttccactcttccctgttcagaagttcttcctcagttgtaaccttctttcttcaggctgcggataatccctctaagagctctctaaggcaggtgctaagggaacccaagacagggtttcagttattaaatataaatagacaggggaggggaactgaatatagacacagatattttatctctccgtccgtgttagttattaagaagaaagcactagtggttgctaagcaacaggtctctatagaggacaaggtaccagaggaaaaagcctcctttgactgaatatagaggtgggagggtaggaaaggtgggggtcaaagacctctgaatagcaggccagctatagggaatggttggtttgtcctccaagaccagccctttccccaggccttagcaaactccgcctttacaaccctcaggattggtggtaggaggaaggccttaggcactcctccattcctgccaggaggagggaacctggtttccatagcaacccagaaacaatcctggccttgttttgcttatggcttctctgtaaccccctcttgggacacacactatcatagactcccttctctgaccctcaacttctgatttgagggagagagcccatagaaag

SEQ ID NO: 86359 - DNA, 1119 bp, Homo sapiens
gtctgtcggcctccattgggttctccctgctgccaaaaagtcctcctcctggaaaagcaggtctggggttggggttttcagttggagctcatcaggatccccagaggcaaagctattgtcatctgccttcctcctcctcacccatctgccaggcaagtcgcaggtgagcccccaccaccatggcccctgccctagccccaggtgccagcactgctttgcctggctcccaccctctccctggtgcccccaaggtggctctgaggtcaccccacaccccagtgcctccattctgcatttctacatctccgaatgcttgggaaaaacagaaggagagaggaggtcaattgaaggttggaaatgtggactctgactataggtagagcattcgggggcctggttatcttcctcagttcaaatgaaccctttccccaactcccaccccctcacccccagagacagccagagctttgcttagttaatgaaatacaaaagaaggaatcaggggtggggggtggctccagagccctggaaagcgagggagagagaaaaagttgggtctcttccaaagagttaatgttccacagtatgatcgattaggtgtcagatgtaatttcaaaccaatacaagatgaatggcataattttccctctctcattttagacagaattaagaatccattagctaacacaaatttttggcaagtttaataggagctcaaatctacattcggaggaaatgctccccaaagcctgtttcaagcttttacttctcaggccccctgcctccaacgtcctcttaccaactcactgttgtctgtccacccaccaacccctcctcccccgccgcatgcagcccccactcccttcctctggtccccctacatgcccctccccaagccagcccaagattaactggcctgacctctctcacaaaggccgggcctgcccaccattgtctttcagtggcaatgggtgggggaaatgggtggaggggctggcagtgggcccaggagaggggagaggttgctgaattggccctaggctgcagacaaaccctagggagaggggtatattggggccttgggcagtttgagtctcagctactcctcagtttcacctc

SEQ ID NO: 86360 - DNA, 1063 bp, Homo sapiens
acggccgtgaataacttcctaattggtattaaaagggccctttgaagtcttgagttcttagaggtgcatagtaccattgacactcatttctaatgacacgttccctcaccccgcatttttgggttagtcaatgtctcctggttttcttcgtaccgctctgacagtcggtcaaagtcccgcttcacgttttcctctgtcgcccaacccctcgctctgtacactgaatctcagtggtcttattttcccccacggcttcagctttacaccaactaaatacccagatccacatcttcagcgcagcccttccctggagctccacgcttgcccatccagcggccattgggacagctctgcttcacatggagctcactgggtccaaacttgaactggtcttttccttgcagattaattcttcctctaccccaacccagccggaagtctggtaatttccttacactttctcctctctttcaagtcccacatcttaaaagtgacctagtactgccaacttcctgaacatccttcaaacctgggccagctccatctcttctgttaccacgctgttgatgtattgtcaattcccaacagtccagccctggcagcttgcaacccagtctccaaactgtaactcttgtgatccttttagaacacaagtcttacggtgccagttccttgctgataacctttttctggctttctattgcctatgtgctgaacccctagcacaatttacacagctctctgtgatctgacctagcagtctcctgtgtgcaccctaaggtccaataatacggcactgcagcatgcgccatgcctacccttgctgttcgtatcttcatgactttgcacacaccagcccccgctgcttggaaacctcctccttctcttgtctgctgggctaccttctacatgtttttcagcgcaggcagcgctgcctccgcctaacccccaaggttaattgcccttctgtgtcctgtagcaccctgtccataatagcatagtagctgagaatacagactcctggatcagactgcctgggttctgacctgtttggtaaccttga

SEQ ID NO: 86361 - DNA, 1074 bp, Homo sapiens
gaggctgaggcaggaggatcacttgagcccaggaggtcaaagctacagtgagccatgttcacgcctctggactccagcctggatgacagagtgagatcctctctttaaaaaaaggcagagggagatgattgaaaaaaaccactgactttcccccagataaacagaggcttggtgagaaggacttgcccagagttaggcggaattactggttgcccggagactggggtacaggttccttaactctgggccagtgctctgcctactgtacaggctgtcatttggactttgagctgctttcggtgggagggtgatatcaaaccccctttctttgactcttggccaactgtccccgcccctgccttcgagcccccatgcttggctcccacactccctggcatatttcaactctcccgggctcccgcaacacctctgctctagccccatctgcgtctctcgcttcgacagggacgtctgggcatgtgagtgtcagtgtggttgccactccaagtgcgtctcacacccaagctgctgccatccaagtcctgtccccaaggagagagaaagtcagagggaaagacagacagacacagaagtagactggagtaggcgagcgacagcacctggaagtgaggcaaggaccaaggagggagggagggaggagagaggcagatagagaagagagagagaaatgtggagaaagtgggagagactgatgggagtggagagaaagactcataaatgggagatagattgagaggaagacccagatggggaaaaataaagacagacatggatgacgatatgttctgtgggctgtggggaaacaggcattcttgtacattgctagtgggagtgcaaactgcaaagggaacttggcaatacctcacaaaaccacatatgcaatttgacccagcaataccacttctaggaatctgtcttgaagatgtatttccaacaacgggaatatatatatgcgctcaaggttattcactgcagcatttctggaattacaaatctaagtgctcattcatgggagactgaataaactatggtttgtctataaaatggagtacc

SEQ ID NO: 86362 - DNA, 1065 bp, Homo sapiens
gaatgctagcctcaaggaagcttctggaaaaaaagcctagggtgaatgtctcccctacccggacactcagatctctgggcccttgctgcttcccaggagagccacacacagcactgaccgcagcggcagggtattatttctttattaggtgccacttcaaagaacagggaatccaggtgggtgggggccacagggcaccaggtacagccctcacagcccaaccttctgagcccaggcgaagaagacgcccttgacatcatctacgcctgtctgaaggtgggcaggcatgatataggtgcggaggtcccggaccttgtagccactacgcaccagggcctccctcacctcctcctcagacactggcaccaccgtcagcctggcctccccagccaggtaccacgactcctccagggccccgatgaggaggaggtgccccccaggcctcagcagcgtggtgatgtggtccagggcccgctgaaagctggcaagatctgggctcacagcctccaagcagaaggcagagaccagggcgtcagcaggcaggggagctgggctcccagcacccaggggctggggctggtgcacgtcgatgggcaggacccgtttcaccctggctcgcagctggcgctccttatcctgccagcattccctgtgcaggaggcacaaggcagggctcaaggctgttctacgctcaggcctctgttgccccaaccagccactctatgggaagcctcctccccaaccctcaccccccagtccttaccccttgccctcaatgaggcaggcatgttggctgtacatgctccagttgaaggcccccggctcctcctgcagccagcgccccagctcctggcggttgacctccaggaaatctgtcatggtgatgtcctcaaagtggctgcaggcactgagcagctggtacacggtggggcctgaaccaatgtcgatgagggtgcgtccggacacttcacctgggcagggcagaggaagagggtcctggtgccagccagcccaggcagcccctgcctccttacccttccctcccctgcatctccctgcctctct

SEQ ID NO: 86363 - DNA, 1104 bp, Homo sapiens
ggtagaggaggggttgggacctgtgtcttctggatggcaactctgtgctgtttccaccaggccatactgagtcatctaccctgacccatctggtcttcccagagatcagggcttacagtgctgtgcctgctggccaggatgggggtataactcttaactaggcactggagggtggctcattagtctgaagaggtactgaacctgaggctttggccaaactccagagctgaggactcagctgaggacctgttgcttcagcatgtcaagaataggtggactgggccagttgagggttgcctgcccttcaaacctccttcatctgctcctttttcagtggcccttctcccggttcctgttctttcaagagccggcatcggccgtggcctcgtttctcaatggcctggccagcctggtgatgctctgccgctaccgcaccttcgtgccagcctcctcccccatgtaccacacctgtgtggccttcgcctgggtaggtaacctagcaggactcctgctgtctcctcttatctaggaaggtggagctctacatccctattaacacccaacagggcttctacttaccagcttcccctctgtttcccagggctaaagttgcagctgcagggtggtaaagcctggggagaaaacagggagggtgctgaatcgggccttacctttccagcagagccctaggtcaggctgtttgggaaggagagaggaaagaagggcatttttcttgtcctgaagaaggaagccactaaaagacccagtaggacagtttacaaacacagaggggagatggggggctaaagaggatgctgggaccacaggtctttccaagggcccttctggaggacttggagcaatctcaattccagcccaggcctggtggggagtcacagccatagtctctgtgtagagctcagcctagtctttttttttttttttttttttttttttttgagacagagtctcactgtgtcacccaggctggagtgcaaatggcgcaatcttggctcactgcaacctccacctcctgggttcaagcaattctcctgcctcagcctcccaagtagctgggatgataggcgcgtgccaccacacctg

SEQ ID NO: 86364 - DNA, 1070 bp, Homo sapiens
tgtcagttccggctttgaagacgtgggggcagggatcatcttggaacgttttgtttgaaggagggactttggactggtacattcgatttggaccatagtgggcaaagaaccaacgtattgagcactcactgtgtgacaggtgtcacaatatgtcaagtaatttttatcacaccctttgagatagtttctctaatcccagttttacagatggggattagagagattaaatgccctgcccaaggtcacacagccagtatgtagtaaagtggagtttccagttctggcctgtttgaccacaagcttgtcctctttactattataccactttgcattccagacagagggaacagagagaatggatgccctgggcagatgtgggcacatccaggagctttatttactcagggagcagggtacatgaacaggagtagtgaccaatacggttggaaaggcaatttggagcctcaaaagtcaggttgaagaatttgggcttcattttcataggaagggagtaagatagcaagaactccttccaggagagtaagagcaaatcctatattcaggaaggacaaatataaacccaggtttccatagatgagttcatcagatgccaacatcttgatggacttgagcaaaaggagaggaaatgtctgccaaggtagaaagatcatctgagccctggagttcaagactagcctaggcaacatgacaagatgccttctctacaaaaaataaaagaattagccagacattgtggtctcgctacttgggaggctgaggtgggaggatcgtttgagcccaggaggtcaaggctgtggtgagccatgctctccccactgcactccagcctggatgaaagagcgagaccctgtctcaaaaaaaaaaaaaaaaaaaaaatgccgggtgcggtggctcgtgcctgcaatccccgcactttaggtggcagaggcaggcagataacctgaggttgggagttcaagaccaccctgaccaacatggagaaaccccatctctactaaaaatacaaaattagttgggtgtggtggtgcatgcctgtaatcccagctact

SEQ ID NO: 86365 - DNA, 1377 bp, Homo sapiens
ccgcggacgcctgggctcccaggacctgctgaactggtgtatgcagattgccaaggtatgcacctgggctctttgcaggtctctccggagcaaacccctatgtccacaaggggctaggatggggactcttgctgggcatgtggccaggcccaggccctcccagaaggtctacatgggtgcttcccattccaggggatgagctacctggaggatgtgcggctcgtacacagggacttggccgctcggaacgtgctggtcaagagtcccaaccatgtcaaaattacagacttcgggctggctcggctgctggacattgacgagacagagtaccatgcagatgggggcaaggttaggtgaaggaccaaggagcagaggaggctgggtggagtggtgtctagcccatgggagaactctgagtggccacctccccacaacacacagttggaggacttcctcttctgccctcccaggtgcccatcaagtggatggcgctggagtccattctccgccggcggttcacccaccagagtgatgtgtggagttatggtgtgtgatggggggtgttgggaggggtgggtgaggagccatggctggagggaggatgagagctgggatggggagaattacggggccacctcagcatgtgaagggagggaaggggctgcctgtgccccaccttgcagggtctgtgcacttcccaggattagggaaagaccgggtagggtctgtctcctggcatcacatctccccctgctacctgccatgatgctagactcctgagcagaacctctggctcagtacactaaagctccctctggccctcccactcctgaccctgtctctgccttaggtgtgactgtgtgggagctgatgacttttggggccaaaccttacgatgggatcccagcccgggagatccctgacctgctggaaaagggggagcggctgccccagccccccatctgcaccattgatgtctacatgatcatggtcaaatgtgcgtggctgagctgtgctggctgcctggaggagggtgggaggtcctgggtggaggagcccacaaggggcatgaaaggggaccaggatgtatgtagacccaggagccctagtatgttaggagcctcaaaaccttcttgtatcccttttacagtcaaagtccaaagccactcttgaggaacactcttgtacaaaattaagctgggcacagtggctcatgcctgtaatcccagtacttttggaggctgaggtgggaggatcccttgaagccaggagttcaagaccagcctgggcaacatagtgagatcctatctctacaaaaaataaaaaaattatctgggtgtggtggtgtgtgccagtagtcccagctactcaggagag

SEQ ID NO: 86366 - DNA, 1062 bp, Homo sapiens
aaaattaaaagggaaactagaagagatgccaaaggttctggctgaagaccccagagtctggtgctacttctctaccacctgagggctttgggctgtcccttgggactgtctagaccagactggagggggagtgggaggggagaggcagcaagcacacagggcctgggactagcatgctgacctccctcctgccccaggttggatgattgactctgaatgtcggccaagattccgggagttggtgtctgaattctcccgcatggccagggacccccagcgctttgtggtcatccaggtactgggcctctgtgccccatccctgcctgtggctaagagcaccctcctgcagagggtgggaaggagagatgagtccagtatgccaggcccctcacggaaggctgcatgctgggctggggaggggccaccatcctgcctctccttcctccacagaatgaggacttgggcccagccagtcccttggacagcaccttctaccgctcactgctggaggacgatgacatgggggacctggtggatgctgaggagtatctggtaccccagcagggcttcttctgtccagaccctgccccgggcgctgggggcatggtccaccacaggcaccgcagctcatctaccagggtcagtgccctcggtcacactgtgtggctgtctgcttacctcccccaaccccggtggactagggtccctttctctgatgttccctcaactgtcacctctcaaggaaaccccattatccctacaaaaaattcttactgccttccaacccctgtgaccccattctctccacggtgactgtgtcataccccaaaggtgacctctgtttttctcctgtgaccctgtcaccttccatggagtccccatcccagatccgtgagtgacccccatcatgactttctttcttgtccccagagtggcggtggggacctgacactagggctggagccctctgaagaggaggcccccaggtctccactggcaccctccgaaggggctggctccgatgtatttgatggtgacctgggaatgggggcagccaagggg

SEQ ID NO: 86367 - DNA, 1128 bp, Homo sapiens
gtgcggtggctcacacctgtaatcccagcacttaggacggccaaggtgggagaatggcttgagcccaggagttcgagaccagcctgggcaacacagggagaccccatctctacaaataatttaaaaatgagccaggcatggtggtgcacacctgtagtccagctactcaggaggctgaggtgggagcattgcttgagcccagagggtcaaggctgcagtgagccatggtggcaccaccacactccagcctggatgacacagtgagaaaactgtctcaaaaaaaaaaaaagaaagaaaaagaaaaagaaaaaagaaaagaataaaaggaaatggtggggccctggcccaggagggagcttcccaagcctcgggcccctccctgaacttccaccccctttactgtaccccagagcgaggaggagggccgcctgtacttcagcatggatgatggccagacccgcttcactgacctgctgcagctcgtggagttccaccagctgaaccgcggcatcctgccgtgcttgctgcgccattgctgcacgcgggtggccctctgaccaggccgtggactggctcatgcctcagcccgccttcaggctgcccgccgcccctccacccatccagtggactctggggcgcggccacaggggacgggatgaggagcgggagggttccgccactccagttttctcctctgcttctttgcctccctcagatagaaaacagcccccactccagtccactcctgacccctctcctcaagggaaggccttgggtggccccctctccttctcctagctctggaggtgctgctctagggcagggaattatgggagaagtgggggcagcccaggcggtttcacgccccacactttgtacagaccgagaggccagttgatctgctctgttttatactagtgacaataaagattattttttgatacacctatgagttctgtctggcaaggcctggctggctgaatcaagaagggaaccagagctggacgtggtggctcatgcctgtaatcccagcactttgggaggccaaggtaggagaattgcttgagtccaggagtttgagaccagcctgggcaacatggcaagaccctgtccctacaaaaaataaaa

SEQ ID NO: 86368 - DNA, 1049 bp, Homo sapiens
ccctctaaagatttttaatttcactcagagtaaaagccaaagcctttacaatggcctgcaaggcctgagaagatctggtttcccatttcctctctggcttcaggtcccattactcactgtgttccagacacacagaactacgtacacttcttcaaatttgtgccccagggcctttgctcttgctgttccctagttatctgcagggcttactcaccctgttaagaagtctgttaaaatgttacctcgttgaagccttccctgattctcaccctcactcctcagcaactgcttcatttttctcaatagcacttaccacccgctaaccttccaacttacagtttgctcatttactttctttataatctgtctgcccccagtaaaatataaactccacgagtctttttacttactattgtatctcaccacctaggacagcagatgctcactaaacgtgtgttgcgtgaactcaccagtgtcccctgggtcagtgctctgaagaaatgtacggcagcgctccttgtgctcctcaagggaacttctctgcttgtaactccttccacaaaactcacatttgtagggtttctccactagaaggagaacataaggggcactcagtgaccctcaggggttccacacaggtcaggtattggggctctgtgacaactgttcactagaaatgagactgctgagtgaagccagagtatttggatacttttgaatctatattttaaatttggtaagcttaaataaggttatggtctatgattaattattacgtcagagtattcttcaaaaggatcgcctcctatcacaaatggaagaatttggatttagtgattaccatttcgcatactgttttggctccaggtcaaattttgttttctttgggaaaaagaaaatagggcccttttattcttcaaggaggttaatgtggtataagcaatgaaataggaaaggattctttattttggacatccatctggctgtaagtaaagattgctgtagtttgtgggagttagccattcggctagaaactgatggccttttca

SEQ ID NO: 86369 - DNA, 2133 bp, Homo sapiens
ctggtgtagggatgaacagaggaagttggaatattcctgggtcttacactggactcaggctttgggcctccctggccccatctttcctccattggagcttccttcctgctagtgagataggcctacaggcttggggtgaagctgggaggtgggggcggtactgggccaggaggggcccctttagcctgagagctcttgcttcttacgctggtctgggaacctcttctgtaactccttagctgttgggattctgcctttcccctcccaggaagtgagggaggaaggggtcctcccaacagtcttttatatctctccccacccttcccctcccaggtacttcctcaccagcttctacactaagtacgaccagatccattttgtgctcaacaccgtgtccctgatgagcgtgcttatccccaagctgccccagctccacggagtccggatttttggaatcaataagtactgagagtgcagccccttcccctgcccagggtggcaggggaggggtagggtaaaaggcatgtgctgcaacactgaagacagaaagaagaagcctctggacactgccagagatgggggttgagcctctggcctaatttcccccctcgcttcccccagtagccaacttggagtagcttgtagtggggttggggtaggccccctgggctctgaccttttctgaattttttgatcttttccttttgctttttgaatagagactccatggagttggtcatggaatgggctgggctcctgggctgaacatggaccacgcagttgcgacaggaggccaggggaaaaacccctgctcacttgtttgccctcaggcagccaaagcactttaacccctgcatagggagcagagggcggtacggcttctggattgtttcactgtgattcctaggttttttcgatgccacgcagtgtgtgcttttgtgtatggaagcaagtgtgggatgggtctttgcctttctgggtagggagctgtctaatccaagtcccaggcttttggcagcttctctgcaacccaccgtgggtcctggttgggagtggggagggtcaggttggggaaagatggggtagagtgtagatggcttggttccagaggtgagggggccagggctgctgccatcctggcctggtggaggttggggagctgtaggagagctagtgagtcgagacttagaagaatggggccacatagcagcagaggactggtgtaagggagggaggggtagggacagaagctagacccaatctcctttgggatgtgggcagggagggaagcaggcttggagggttaatttacccacagaatgtgatagtaataggggagggaggctgctgtgggtttaactcctgggttggctgttgggtagacaggtggggaaaaggcccgtgagtcattgtaagcacaggtccaacttggccctgactcctgcgggggtatggggaagctgtgacagaaacgatgggtgctgtggtcctctgcaggccctcaccccttaacttcctcatacagactggcactgggcagggcctctcatgtggcagccacatgtggcgttgtgaggccaccccatgtggggtctgtggtgagagtcctgtaggatccctgctcaagcagcacagaggaaggggcaagacgtggcctgtaggcactgtctcagcctgcagagaagaaagtgaggccgggagcctgagcctgggctggagccttctcccctccccagttggactaggggcagtgttaattttgaaaaggtgtgggtccctgtgtcctcttccaggggtccaagggaacgggagaggtcactgggcctgttttctccctcctgaccctgcatctcccaccccgtgtatcatagggaactttcaccttaaaatctttctaagcaaagtgtgaataggatttttactccctttgtacagtattctgagaaacgcaaataaaagggcaacatgtttctgtttccctgtgtctggccttcgcttcctggaaggctgaggggagggggcaggggtgtgggcagcggctcccgctgaggtgctggtggggcatcagtgcagctctgacggtggcaggaggggcgctgggactgctgggctttctgctggcttcagcaggga

SEQ ID NO: 86370 - DNA, 1007 bp, Homo sapiens
tctctccctggggctttgtcggcagagggtcctcatgggagtgccatagggggtgaggctgggggatgggccttgacttctctgccctggggctgcgtgcctcttgatgacctgtcctccgatgccctgccagggccctgtcccaatgggatgatgcatggggcagcctgttgtttatcccagcccagcagcaggaaatgagtagagctaagtccacatggactttctccactttccatgcttcagaatcaaaagagtggaactgcctggagttctcagggaaacaagggcctgcctcccagcgggatccgagggtgagagggggcagggaaagcagtgtgacctgtctgacctgtgctgcttgtttgcagaacagcagagaggggcagcaggatgaatgtgggcacagcgcacagcgaggtgaaccccaacacgcgggtgatgaacagccgtggcatctggctctcctacgtgctggccatcggtctcctccacatcgtgctgctgagcatcccgtttgtgagtgtccctgtcgtctggaccctcaccaacctcattcacaacatggtgagagcctgtctgctgcctgcccctgcccctgcccctgccctgtgggctgccctttggcagggctgagggataggaggagcctgtcgggcctggcccaggtgtcagggtgatgtactgacgacatctgcctccagagcccaggcctagcccttacctctctgccttgctcccccttctgggttcctgccctgtgtaccatgacaggaatcaaatctgcagatttttccacatctctagggtggggtggctgttggcctggaagatgtgctcctgagagctgaacaaagggctccagagagttcccaggacccgagagtcctggtgcctaggctgatacagaaatgcccctttctcaagttagcttctcgaaccgtcttccacttttgcccttctctgctccctcaccacttgctaccttgcactctttgtcgggtaag

SEQ ID NO: 86371 - DNA, 1033 bp, Homo sapiens
tactctataatttttttttttttttgagacggagtctcgctctgttgcccaggctggagtgcaatggcgcgatctcggctcactgcaacctctgcctcccaagttcaagcgattctcctgcctcagcttcccgagtagctgggattacggtcacccaccaccacgcccggctaatttttttatttttagtagagactgggtttcaccatgttggccaggctggtctccaactgctacccttaatgatccgccctcctcagcctcccaaagtactgggattacaggcgtgagccactgtgccccacctataatttttttaatgttacaaatttggtagtttaaaaatgtttccatttgcaattactcaaatactaatggaatataatttttgtctgttagctatttttcctctttgtatgttagttcgtctccatttttgttttgaaattgtggcaatataatcattataccattatatctcttaaccatttatacaagctctttatagaataaaaatatgaatctttgatcacatttgttgaaaatatttttcttttgtatacacagttatctaaaagggtttttttaaatgaagtcaagcccattaatcttttgtgcgtatgtgatttctcccattgttcacatttagaaagtcttttccattaagatctgataaatctggactccaggtttctgtagttaattggtttttcttttcttcctctgtcatcctctaccccatcctgcacccccactgtatgtttttcttgccacttggttatgtcttaaaatcagtgtgtggaatctgtaaatattatggaccccattagggcagaaaaggtgagtggtcgcattttgcccctctgtgagaggctccttagaactccttgcctggccggcacggtggctcacgcctataatcccagcactttgggaggccaaggcgggcagatcacgaggtcaggagatcgagaccatcctggctaacacggtgaaaccccgtctctactaaaaatacaaaaaatttagccag

SEQ ID NO: 86372 - DNA, 1025 bp, Homo sapiens
actcctggtatcaagcagtcctcctgcctcagcctcctgagtagctgggaatacaggtgcatgccaccatgcctggctagttcttttttattttttgagagatggggtctcactgtgttgcccagactggtctcaaattcctggcctcaagcattctcctgcctcagccttccaggtagctggcactaccggcgtgagccaccacacccagctcctccttgatttctttgggaaagactgtaatctttatttttttatccctagcacctaacaaaatcttggcacatggtagacactcaataaatatgttgaaatacatagtggatgctcaataaattcttggttacttgatcagactgagcttttccatggtaacttctgtcctctcctagcccatggacacagaggctgatttacagttccgtccccgcacgggaaaagctgcgtcgacacccctcctgcctgaagtggaagcctatctccaactcctcgtggtcatcttcatgatgaacagcaagcgctacaaagaggtatccaggatgcagtgagagcgattcataagccccaagtgatgcaaggggtttggcggggagatggtccctggtgaagaaatggaaataatcattgattcttaagaactgtcccccacactctttccccatagaggtatgcgtttgatcccacatcccaggagaacccactcttgctctgggcactgtgggacagggcttgcagtggtcatgctgtaccggtctgtgggggataccagcgtagtacattcttggggaaaagtaggggcatttggagacagaaagacctgggttccaatcccagccataccctaggcaaattaatttctcccagctatatgtaagatggggataatagtgcctaccttacaagatggttagcgttacataaaataatttgtttagaaatacttagcgcaatgatctgcatatagtaagctttcgtgatattttcataaatggtagctgttattatggactaatagctccatttgc

SEQ ID NO: 86373 - DNA, 1052 bp, Homo sapiens
ttttccccttacccagcccctggccgctactaatctgccctgtctctattgaggatttacttactctggacatttcatgtaaatggaattacacaccgtgtgcccttggtttctggcttttttcacttagcatcatgttttcaaggttgacccatgttgtagtgtgtgtcagtacttccttcctttttaaggctgagtaatattccctcgtgtggatgtgccacattttgtttatctgttcatcagctgacgggcacctgggttgtttctactctttggttatgaataatgcttctgtgaacattcgtgtacatgcttttatgtgagcctaagtttccagttctcttggcttgcatacctaggataggaattgctggctcaaatgacaactccatgtttatccttttgaggaactgccacttgattctcttttggcttcctccccaggcacagaagatctctgatgatctgatgcagaagatcagtactcagaaccgccgggccctagaccttgtagccgcaaagtgttactattatcacgcccgggtctatgagttcctggacaagctggatgtggtgcgcaggtacaggcagccaagcatctcacttggggtccgtggggtcagagacttggtcagtcacaagcacacagctgtggatctgcagagggcgaagaacctgtagatgtaagcagggaagaggggcagtggttcccatgccctgcgccacgtgaggggtgtgggagagagactggtgctagatgaagaagtgggtcactgctgggctgtaaagaactgtccccaggttcttcccttcaccccacatcaaggtaggactgagggtgggttaggggtggagggacaggctagaaaacattttacttctttgctcaaaacctgcagtggcttcccgtctcaaggaaagacaaagtccttacaatacctcataaggcctgacgtgatctgctccattttgacctcccagacttcacctcctcctgctcctcagccccactggcctgcctttcctctggtgtgcccggcacactcttc

SEQ ID NO: 86374 - DNA, 1475 bp, Homo sapiens
attcactgaagccaggccccttcctgcacttatgcctctacccagataatgagttctacccactgatgacctcctctcctctagtaacagtccgcctccctaatgagcatctctggctgacacacgttccgttctccaggcctgtgagccctggtccctcgctgttgctgagccacagcacccgcccttctggcctcactttagagcactgtcatttcagagcagactacgcgcggggtggccaggtgaaatgcagctgacggctctgcgaccaaatgtgaccaaagggccacattcccagcacccggctccaaaggcagagcttggattctatgcccagcacaggttttcagggcttcctcctctctctgggcctaaacagtgatccctttccctgtttcccactacatctggcagaatttaggccacatttcattttcttcttccgcccatggggctccctgcccactgtgttcccctgtcactctgtccaggtgcacaagcttctcatcgtggtggagctgttgctgggggagatccctgaccggctgcagttccgccagccctccctcaagcgctcactcatgccctatttccttctgactcaaggtaaggctggcttccccaccccagagcccactaggcccccttcagtggggcctcttacatgcctgtgcctatttgcatcatccaatctactcctgttctgcctgcagctgtcaggacaggaaacctagccaagttcaaccaggtcctggatcagtttggggagaagtttcaagcagatgggacctacaccctaattatccggctgcggcacaacgtgattaagacaggtgtggatcaggatctgaggggctgttggaggagcagaagccaggccagggcaaacctagtgggtatccttgggcaagtgaagggtctgtgtccactctgcccaccccatcgctccttcctctcccaggtgtacgcatgatcagcctctcctattcccgaatctccttggctgacatcgcccagaagctgcagttggatagccccgaagatgcagagttcattgttgccaaggtggggctggttcaggaaccacagtgaccaggttgtcactttcctgccaatctcaggaggcaggagtgggaggagtttggccaaggaggggaataggtaaagcaatggcatagtcatttcagggcgtgcccgtcatttgcagtgaagccaagaagttgccagagagagcatggatgtgcatgtgagtgtgtgagtgtaggtgtgtgcacatgttgagtttatgatagtgcctgtgagtgtgagaatataaggagggcagaggaatgggatggaacaagatgttctctgacttagaagatgggcgtgctgggccaggcgcagtggctcatgcctgtaatcccagcactttgggaggctgacatgggcagatcacctgaggtcaggagtttgagacaagcctggccaac

SEQ ID NO: 86375 - DNA, 1014 bp, Homo sapiens
ggccaggcccctcccacatggaatcctccaccgggaaggcctctccccgttgccacatccactgtgttcctccttttcctcctccctgcccagtcaagagagttggtcgtttattcctcttttttcagcatttcccacagggcactgtaataattcctttgatgcctagccccccactagactaactggagaggggcccgccgcttcctgcctggtgtctagctcacagaggggacgcagggagtgcaggttgcgtgagtgcctcacctgcttccttccctcgctcatctcctctctttgctgtgccccaggccatgaggtttcctcccaaatcgtacaacaaggacttggagtctgcagaggtaagctctctgctttctgggtgagaccgaaaggtcaaacttccacacagaaggggagtcgggcgagtgtctggaagggctgagctgctctgaagctttggcctcacttgcctctctccccaggaacggcgtgagcgagaacagcaggacttggagtttgccaaggagatggcagaagatgatgatgacagcttcccttgagctggggggctggggaggggtagggggaatggggacaggctctttcccccttgggggtcccctgcccagggcactgtccccattttcccacacacagctcatatgctgcattcgtgcagggggtgggggtgctgggagccagccaccctgacctcccccagggctcctccccagccggtgacttactgtacagcaggcaggagggtgggcaggcaacctccccgggcagggtcctggccagcagtgtgggagcaggaggggaaggatagttctgtgtactcctttagggagtgggggactagaactgggatgtcttggcttgtatgttttttgaagcttcgattatgatttttaaacaataaaaagttctccacagtgctttgtgcatcagttactatacttcactgcagtattggcaggctcagattttgggttttttggccttagagta

SEQ ID NO: 86376 - DNA, 1089 bp, Homo sapiens
ggcagcgtcctgcagttcatgcccttcaccaccgtgagtaccaccttcccggctctcctgctggtgctggggcctcggggcagcccttagagcagggaggggcctccttccccctgggacagcacacccaccaccagccgtcccgcaagcagcatctgtctgtccgtggcaggtgtcggaactggtgaaggtgtcagccatgtccagccccaaggtggttctggccatcacggacctcagcctgcccctgggccgccaggtggctgctaaagccattgctgcactctgaggggcttggcatggccgcagtgggggctggggactggcgcagccccaggcgcctccaagggaagcagtgaggaaagatgaggcatcgtgcctcacatccgctccacatggtgcaagagcctctagcggcttccagttccccgctcctgactcctgacctccaggatgtctcccggtttcttctttcaaaatttcctctccatctgctggcacctgaggagagtgagcagcctggaccacaagcccagtggtcacccctgtgtgcgcccgccccagcccaggagtagtcttacctctgaggaactttctagatgcaaagtgtgtatgtgtgtgtgtgtgtgtgtgtgtgtgtgtttgtgtgtattttgtaatatgtgagggaaatctaccttcgttcatgtataaataaagctcctcgtggctccctttgtgactgtgtgtgctgttggtattggtgccacccggggcagggcatagtgtcctctccctggactcctgtgctgtggccagggaacggctcactcctgtggtgaggaggaggaggaagaggagcagaggcggcagggctcagggtcctatgtgggcttgctcagctggggaagggccaggggaaagcagcttcccttccttggagccaagttggctggcctgctgccccctcccccaaagccagctgtaccctgaaaggggagaggctttggctcagggccccacagtgctggggcagggtggcctgctctgctgtctcccgaacctggtccaacaccacccacactctgactagcctgggatttgatctgt

SEQ ID NO: 86377 - DNA, 1049 bp, Homo sapiens
tctccttccccccctcatccctttacgacttggttaggtatgccaggagagggtgctgggggtctttggtctcaaggaagggatgatgttccagttgagactcaagaaaaggattctgagcctcagagctttgaaggagccacttggtccctgaccttcctagaggcaaatcccgatccctgtcaacccagacacgggctcccccctgccctcgtctgggagctcagccttcccgtccttccacagccaaaccggcctccgtccgggccctgctgtttgacatctccttcctcatgctgtgccatgtggcccagacctatggttcagaggtgagagaggggagcgaccgggacgggggctcaagggaaggaggtaacccggaactctccccacctcactgcctgcgcccccgcagcctctcagccagttagttctgtgggcctcagaaaccaggtgcccacccgggctggagtccgtagaggcaccttcagccctatgttcacattgaccactaggtggcagcattgcccccgtctggctcccttagaccagttcgtccccagtctttgggctgggctggagcagcagcctggcgggaaacagtgcagccccaggtccagcgctggcaggcgccgcgccctccccactcggctggtgccccccttcccctttcccaggtgattctgtccgagtcgcgcacaggagctgaggtgcccttcttcgagacctggatgcagacctgcatgcctgaggagggcaagatcctgaaccctgaccacccctgcttccgccccgactccaccaaagtggagtccctggtggccctgctcaacaactcctcggagatgaagctagtgtcagtggcccgggcgcccactccaagggtggcggtgggggcagggtcaagacccgctccctgagcccgttccttgctcccctgtgctgacttctctgcacacccgcaggcagatgaagtggcatgaggcctgtctcagcatctcagccgccatcttggaaatcctcaatgcctgggagaatggggtcctggc

SEQ ID NO: 86378 - DNA, 1429 bp, Homo sapiens
cccatgtctatgcgccaccttgtggctatctctaggactacactcagaggctgtgagtctggtggtaactgctgaagccgctagctcaactggggcctaggtgggctgagttcccctgcacccaaccctctgggaggcgtgagggagacctgacctttcagcctcataggaagtagaccggagtaatccccacggggcgtggagcatagggttgtctgtgactgtgaccctggccaaggtcactgtgtcagtgtgttgggagctgcatccggctccaggaggaaggggcctgcaacatgccacacgcagggtgggtgcgggaggttatacaatccttgcatgcatgtagagggcttatgtaacctgtgtgcaccgaggttatgcaacatgtatgtggagagcctggcaacatatatgtgcagtggctgagggttgctaataatacgctgcacagaggggctcagtcccggctctgactctagctcatggtgtcaccaggcacaagcagggtctcagtttgctgctctgttaaatggaggctgtgcagagggtgtagtgttttctattgctgtgggttatttagcatgtgtgtatgacctggagctcaagcaacacgtgcacactggagggatgagggtggttttatgaggtgcctgtgcagagtgttgtgtaacacatgggcatatcctagaggttgtatagcacatttaagaatgccctgaaaatttcacaggtatgttggccctggtgcatactcaccatccatgggtttatagtgaaggttgcatggttattcatctgtgccggtgttatgttgcatatgtatgtgtgtgttctaaaggctacatagctttaagcatatcctgagaattcttccagcgtattcgtcatgtactgaaagatgaggatgtcctgcagattatgggtgcttcaggtcttctggcgggtgaatgtgtgtgtgttggggctctagaatatgcttgtgccacagccaagccccttatctctctcccctgcaacttccagataactggacccttttaagcattgtcagctgaccctggggggtgggaggtagaatgaggacacaaaatggaaagaatcaggccttgggggattgcataagcctctcggatgagaaaggggctactcgaagactgctctgtgattctgcccactttgcctccatccagtgccaggtcaccagatggaaagcgaaaaagaaagaacggccaatgttccctgaaaaccagcatgtcaggtgaggctggctgtgcgtgccccttctccacgtccccaaccccaccaaacccagccagggctcctctggacctggatgtggaacagtaattcatgtgttccctggggggagcctcctagagggcttgggatggacttgtctgggggtgagaaaggtaatgtgggatgt

SEQ ID NO: 86379 - DNA, 1904 bp, Homo sapiens
gttcgagcactacgtcaaccaccgcaaacacaacattccgcacttctggcccaagctgctgatgaaggtgactgacctccgcatgatcggggcctgccacgccagccgcttcctccacatgaaagtcgagtgccccaccgaactcttccccccactcttcctcgaggtctttgaggatcaggaagtctaaagcctcaggcggccagagggtgtgcggagctggtggggaggagcctggagagaaggggcagagctgggggctgagggagacccccccacaccccttctctccttcctctcgtccttggatagattcagctcccacacacacacccgcactgcccaggtccctcctcagacctccagccctgggacagggcaaacaactgaacttgctatggaaaggacagtgtgggaggctgggggagctgtgtcctgcagttcccaggaccccatcctctcagaaggtaggggaagggcgggaggattgagaagggacaagccaccttgaccgtaggggaaggaggaatgtgggctgggggaagatgccctcaactcaccccctacacacacatgagagagagcccccacccagttccttggcctaggtctcccctccaggctgagggcctctctacttccccagatgcctgggtgcaaagaacggcttggcttggctcctcctctggaggttaaaatttatagtcattctaactgcactttggaaaccaagcaaggggagaagacaaatgaagaaaaactagacagagagaaaaatacaaaaaagagagagcgagcgatagagagagatgatattaagttattaactgaggctgaccagaggggaggaccccccctttaccaccccatgcactttgcgagctgccccttcttcccccacatcagagagaaatgcccccacaccagagccccaagggtagggctgccgatcagagctgtgagttaacacaacagggtcctggccaccccccttgccataccccgccctctgtgcccctttggcaccccccaaccctagtatgtcctctgctttctgccactcgtgcccgctgagttccatctacctctcatgctggatgccagctggcccctcaccagcctgccctgctgcccacacagctcccctttaagtgcccagccctaggggcctctccccatccacctcctccttccacaccttggcacccacccaggaaaaaactgtggctccaactcctaccctccttatatcctgcagtattagctagaaaccggatgctgctgcattggttgggtcgggggtaggagggctgtgcgtgagcgtctcccagaaccctccacccctttagcactctgtttccctgtttcccatctgtcttctgggctctctctaacctctgccctcctccccagctcctactcactgcactaactctgggcgggcaggtaccagaatgggggtgtttagataagtgacacttagttggggccccaggggaggggtggtcggtgctcctttttctttaaagctcttttggccagctgcccctctgccccgggaccccttcccctcttcttttctctaattcagggactttggcttgagcccctctcgccctcctggtgagggtgctctgttggtctgcacttgggtgagctgtcctcctccccctccctgtggctgccgcccactcctcaggggagagagggagagaggaggtggtcctcccatgggagcaggaggtggggtgggacagagcagaccagagggtgctgggctcagggctgcatgtcggcagggatggatgggtggacacagatgcccccggaagccatggggattggggcagggggtggggggaggggtgccagggcttcctgcgctttgcactattggggcaaaa

SEQ ID NO: 86380 - DNA, 1155 bp, Homo sapiens
gccccaatagtgcaaagcgcaggaagccctggcacccctccccccaccccctgccccaatccccatggcttccgggggcatctgtgtccacccatccatccctgccgacatgcagccctgagcccagcaccctctggtctgctctgtcccaccccacctcctgctcccatgggaggaccacctcctctctccctctctcccctgaggagtgggcggcagccacagggagggggaggaggacagctcacccaagtgcagaccaacagagcaccctcaccaggagggcgagaggggctcaagccaaagtccctgaattagagaaaagaagaggggaaggggtcccggggcagaggggcagctggccaaaagagctttaaagaaaaaggagcaccgaccacccctcccctggggccccaactaagtgtcacttatctaaacacccccattctggtacctgcccgcccagagttagtgcagtgagtaggagctggggaggagggcagaggttagagagagcccagaagacagatgggaaacagggaaacagagtgctaaaggggtggagggttctgggagacgctcacgcacagccctcctacccccgacccaaccaatgcagcagcatccggtttctagctaatactgcaggatataaggagggtaggagttggagccacagttttttcctgggtgggtgccaaggtgtggaaggaggaggtggatggggagaggcccctagggctgggcacttaaaggggagctgtgtgggcagcagggcaggctggtgaggggccagctggcatccagcatgagaggtagatggaactcagcgggcacgagtggcagaaagcagaggacatactagggttggggggtgccaaaggggcacagagggcggggtatggcaaggggggtggccaggaccctgttgtgttaactcacagctctgatcggcagccctacccttggggctctggtgtgggggcatttctctctgatgtgggggaagaaggggcagctcgcaaagtgcatggggtggtaaagggggggtcctcccctctggtcagcctcagttaataacttaatatcatctctctctatcgctcgctctctcttttttgtatttttctctctgtctagtttttcttcatttgt

SEQ ID NO: 86381 - DNA, 1231 bp, Homo sapiens
aaggccggccgggcgggtcactgggcgtccacccggaaggacagcagcttctcggaatgcatgttgttcagggtccgcaggtccggcagcttgagcagcagcttggtgaagcgggaagtctccaagggccggttcttcagcaccagagcccgaagagcccgcagcagcgtctcctggagctgctccaccgaagcggaattctccatgcccgagcggtctgtggggaagacgacagcagtgaggcggactccccgagctcctctgaggaggaaccggaggtctgcgaggacctggcaggcaatgcagcctctccctgaagccccccagaaggccgatggggaaggagaaggagtgccataccttctcccaggcctctgccccaagagcaggaggtgcctgaaagctgggagcgtgggctcagcagggctggtcacctcccatcccgtaagaccaccttcccttcctcagcaggccaaacatggccagactcccttgctttttgctgtgtagttccctctgcctgggatgcccttccccctttctctgcctggcaacatcttacttgtcctttgaggccccaactcaagtgtcacctccttccccagctcccccaggcagaaatagttgtctgtgcttccttggttcatgcttctactgtgacacttatctcactgttttataattagtcgggcatgagtctgtttcccaagctagactgtgtctgaatcatgtctgtatccccagtgcccggtgcagggcctggcatagagtaggtactccataaaaggtgtgttgaattgaactgcgtctgcctcctcccccgggtcaggcgagagcctgacctacctgcagagacaagcaccaccgcggtgaagaggcccagctcctcctcggtaagcgccagggagttgagcttctcgctgaagtcgaacatggcactgagcaggtctcccatgcccatggcaccaagctcctgcaggctgtaggtggtgcggcttaggaacatcactgtctggtccttcacgttgaacaacgaagcaaagcgcaccatcagcacctaggagggaaggggaacagtcatcctgggtgtggtgggaggagcactgaccaaatcgcccctgtagtttgccagagggtttagcggtgctgccttcgatttctcagtagagtgggggttgtttctgaatggccaatgagggagcccaggtggaaggatggctttgggatccaa

SEQ ID NO: 86382 - DNA, 1041 bp, Homo sapiens
tccccggcttctctctctcccggtcaccagtaacctcaggacgaggtcagtcctgcaatcacgtgaagccctcacgtttgcaaggtttgcagaaagggcctcttagctttgatctcccagacagcaaacaagcttgccagtccctccccagaaattcacatgcccctgccatacaggctttctaaacacgccaccctgactcttcagcgcaccccaccccaccccactctcagctcctcccaggtcccggcaagcgctttgccaggcagaaaggggaaaggcacgcagtccgcccactttgtcggtggactacaaatcccgacagtcttgtcgttgcgcaggcgcgcaagagctcaacgtgccggctgttggaaaagtgtgtcactggggcacgaggcgctccctgggatcacatggtacctgctccagtgccgcgtgcggcccgggaaccctgggctgctggcgcctgcgcagagccctctgtcccagggaaaggctcgggcaaaaggcggctgagattggcagagtgaaatattactgccgagggaacgtagcagggcacacgtctcgcctctttgcgactcggtgccccgtttctccccatcacctacttacttcctggttgcaacctctcttcctctgggacttttgcaccgggagctccagattcgccaccccgcagcgctgcggagccggcaggcagaggcaccccgtacactgcagagacccgaccctccttgctaccttctagccagaactactgcaggctgattccccctacacactctctctgctcttcccatgcaaagcagaactccgttgcctcaacgtccaacccttctgcagggctgcagtccggccaccccaagaccttgctgcagggtgcttcggatcctgatcgtgagtcgcggggtccactccccgcccttagccagtgcccagggggcaacagcggcgatcgcaacctctagtttgagtcaaggtccagtttgaatgaccgctctcagctggtgaagacatgacgaccctggactccaacaa

SEQ ID NO: 86383 - DNA, 1109 bp, Homo sapiens
ccttggtcttcattcccttttttttttctttatggcttccacacagagatgctcccctatcttctacatcaaccagtaactggaatgtgccttcaatcatgtaatattagtctatgtcagtcactgcggttactctggggtaatggttggggaggccttctaggatagagccgcagtcccaagtttctaccactgtgtcttgcctagcaggatggggatagaaatccattccagtgagacaagagcgttctccaggctttgtttggctgttctggtgacaaaattaagtgggaaagctagattagtcgtcttaatgatctaacctctattaggcctcacacttgagtacatgagatagatcaggatcctgatctaggttcagatttttgttggttcagtcagttgaacaggttcttccttaatggttaacctcttttgctgccatggcaatgctgcgtaacaacttaagagaaacgtgaagcaacttcccatccgggattgggtaatggcttggtccagagctgttctgtgtgactggctatttttgaaaatcctttcttccctagtacagacaatttcaaacacctctgagattgtgggcatagtgaaacaaaggagtctaattggggagatcccagccccttgaggagcctgagttgtgaataaacatgtgaatccttattcttgatgcccctatctcaagaggaaggctcaatggcttgttctaggggagccaaagtctttgtgcatgttgttcaggctggaccagcaaggtagtttgtttggagggaggagggagctgtttaagaagactacatatgtaagttttgagaacactgatcttttatttgaaaaatagggtcaacttttactcacctgccatgttctgagtttaaggtttgatatccttggccatcaactgttgcagggaaaccaccctaaataatgaagaaaagaagtcgtctcagtgtaaaaaaaaaaagtggtgggcttattttcttttcttttgtctgttgttccctcttcccctcccccagagagaaattctcaaaagaacaactcaaaaaacaaaatggcttcctagtgagaacttcagtgatgatcctttc

SEQ ID NO: 86384 - DNA, 1034 bp, Homo sapiens
acattttttttctccccttccaggtaacctgcacatccttttcagacttcatggaagcctagatatgaggtggaaccaggtggcttagggatagccatgggtctttgacagaaatgaggctacctgggcaactagcttttgtaataagattcccaagccaataattaggagtattgctttttgagttagaaatagatgattccatcactttaatggtacacagttgctctggctttgaggcaggaaagacactccaaactagtcagggataggagtggtaagggacatagtgacttttttgtagttgctatcatgtccacactgaatcccttctagtcttgcaagttgatttcctcatccttttttgccaggaattttgagctaccctggttggatgagcgtagccgatgcagattggagatccagaagaagcaaacacctcaccggacgtgtaggaaatagctgtgctggcaagaaccctgtcttcagatagttgtagcatgccattcccgagagtggcagagacctgtatatgtgacctttgtcctcacatatgttatcactcgctgataataccctttcatacttccttgactttgttttcattactctgatttcacaaaaactctttcattcggctaattgtgagttatggagggtgattgggatttcttttcccttttttgggaaatgggctctcaagctaaagctataggatggcagattcagaagtttcaggggtctgtttctatacatttgcctatgttaaaggggtaaaagggctctcttcattagacatgtggaagatgaagcagccccttcctttagagctgtgcctgcatggcactcttctcaccctggtacaccctccttatagtgggtatagtgatttttaaccctaaaataaaacaaacaacctcaccatgagctttaggaccagaagaggaatgacaagtgaagcgatgaagcaagccatcttcacagagtagaaaagacatcggagagttggtagataactgtctgaaaagatagtt

SEQ ID NO: 86385 - DNA, 1069 bp, Homo sapiens
agaagtgatgtgatacaaggacatttatacaggttttggcatgccatcccaaatactaagtgcttttgtttacagctgtaacttgttctgaaactaaccatccccactttcttttccaaagattttggtttttgagcagtaaagaaattgttatccattaactgaaaaaataatcacagccaaacatcccttcccacatgactgtatcacagaatagtttcaaatgaacaactatcttttcagacagttatctaccaactctccgatgtcttttctactctgtgaagatggcttgcttcatcgcttcacttgtcattcctcttctggtcctaaagctcatggtgaggttgtttgttttattttagggttaaaaatcactatacccactataaggagggtgtaccagggtgagaagagtgccatgcaggcacagctctaaaggaaggggctgcttcatcttccacatgtctaatgaagagagcccttttacccctttaacataggcaaatgtatagaaacagacccctgaaacttctgaatctgccatcctatagctttagcttgagagcccatttcccaaaaaagggaaaagaaatcccaatcaccctccataactcacaattagccgaatgaaagagtttttgtgaaatcagagtaatgaaaacaaagtcaaggaagtatgaaagggtattatcagcgagtgataacatatgtgaggacaaaggtcacatatacaggtctctgccactctcgggaatggcatgctacaactatctgaagacagggttcttgccagcacagctatttcctacacgtccggtgaggtgtttgcttcttctggatctccaatctgcatcggctacgctcatccaaccagggtagctcaaaattcctggcaaaaaaggatgaggaaatcaacttgcaagactagaagggattcagtgtggacatgatagcaactacaaaaaagtcactatgtcccttaccactcctatccctgactagtttggagtgtctttcctgcctcaaagccagagcaactgtgtaccattaaagtgatggaatcatc

SEQ ID NO: 86386 - DNA, 1638 bp, Homo sapiens
ttaaagagaatatgtccccagattattagcacttttagaggagaagccaaggtatgtagggtgtgtggctggcccatcagtggagcacgaagagagaatgggataccattgtgggaagagaagaaaagttcctcaggggcctcccactgctaaagttttttgtgagatgttgatctgtgcttcctggatttgacttttaaaggaattattctggcagcacatgtagtattcttggatgatcttgctgctcttatttctccttttgtgtgtgtgtgtgtgtgtgtgtggctatgggttttcatttgtaactccatctgcttaggagagtgggctctctataagggaacctgctgtaaacttcattgcagcaaggatgtagagagaaataggacttaattccactaggggctctcatctcacaccttaaggaggagatttctagaaaaactgggccagattttctttgttctccatcattttaatgtggcaggctgttcagttttcttactcttacctatgtgatatttcttcgtaacgtgtccaaaaagaaaaaagacccaatcagtgtctcttgactttgttctttgatccctcagtttcttcttgatttcagcatgtgtcgggttcctaattttgggtatgagttagcaaatttaaccattgtgtttgtgccctacccaggggactccccagtttctgacttgaagtagactgagaagaatccacgaggtgctatctggccagatttaagtagattctatttccttggttctccctctccctgaggacctcttattttattgtcccctcttctaggttaattctcctttgatttgactttgttgagaaggaggttggacagtagattagcaaagttccaagtgcaaaattacagtgtgttagagtgtggggggaaaattagtcttatttttccctacatgggatacaacactgtgaattcaatcttcaactgaaggccctgcagttctcctaaaacatagttgtttgtttttctttaacaaagtttaagctagtgttaataaattaaaaaaaattgcttgtctgtctacttcagctttgttttatgcccatttcatattgttgtctgtgttgtaattcataacttttgataccatttctgatgtgtaaaattggttgtcttgtaaatatcttataaagagttcaattgtaaataaactattgtggctgttaatttttgaacttctgcttcaatttattatatttattggcaaacaaacaattctgcttgtatatttgaaacattggaaaaagaaatccattttctcaataaaaaagaataacacattattttcccctttataataaggtactcacttccatttgtgtataagtataatgtatgtttcatccctctttgtccagtgtacttccttaagtataatcagcaacttggctgggcgcagtggctcacacctgtgatcccagcactttggtggctgaggtgggcagatcacttgtggtcagaggttcaagaccagcctggccaacacagtaaaacatggtaaaaccccatctactaaaaatacaaaaattatccagatgtggtggcatgcacctgttatcccagttacttgggaggctgaggcaggaaaatct

SEQ ID NO: 86387 - DNA, 1019 bp, Homo sapiens
gcctttttgtaacatagtggttaagagcataggctttagcagtatagtcttcagcaagttaccctctgagcctgtttctccttttgtaagtggggactataattttatccacgttgtaggttgatgtcagaattaaatgagactcttagtctgacctgtaataagcagccaaaaaatgtttctgggtttctttttttccacatatttctgttttatttcagctgttctctcggattatgaaagtgcagaagactcggaagtgagtatgacaggttttttcctatggtatagatcagaaatgctttttaaaaacgtgtacacaccttcgttgcaaacgtaccatgacctccgtgtttatcctcttgtgtattcttcatttatgcttctgaaaaagtgttacagaaggtcttgttcactttagacctagggaaaacttggggcacgccgtctcaagccacaggtgttatactgttagttggcttctcttcctgtctgaagaatatgaggttctaaataagagagtgaggatatcttgaagtcctctgaaagatgtttgacagtttgttttatgcagtgtaggttgagaagccagccaattggttatttttttccaaatctatctgaagactttgaaagggtaggattcggaatgttttgtgccaagagcatccatcattttataggtggggatttttctgtttttaggagaaagtttcctgtcttttggataaactactagagatgccatcagagtaagtgtttgtttcctgggttgttgagtggactcctgagttctggtaatgggattatatatagggggaattggatggtggatcaaagattttgtctatacatttttagaactgttactacattttagaatctgttaagcccttgaggatggaatagtgaacactataacaaaattcctatctttagagatcttacaactcaataaggaagtcagacaaacattcaagcaattgtaccacttgctgataggggatagcactgggata

SEQ ID NO: 86388 - DNA, 1356 bp, Homo sapiens
gagtctcactctgtcgcccagactggagtgcagtggcgcaatctcagctaactgcaatctccgtctcctgggttcaagcgattctcctgccttagcctcctgagtagctgggacctcgtgtgtcaccgtgcccagctaatttttgtatttttagtagagatgaggtttcaccatgttttccaggctggtctcgaactcctgactcagatgatccacccaccttggcctcccaaagtgatgggattacaggcatgagccaccgtgtgtggcccccttgctagttgtaagtgctgttctcagttttgactgttgtgctttcccttgactgcctgttgattatttcagtgttctcctgttctcaggtccatttgctttctctctgctttctcctgcgtggacaccagtactatacaggtcctacagctgttggtgctttgttatgcacttacattttgggtcttgggggatacctggtaacttaactttgttgcagtgttgtctgaaggttttggtttcttttttattttttgagacagagtcttgctgtcgcccaggctggagtgcagtggctttgccttccagattcaagctattcttgtgcctcagcctcctgcgtagctgggattacaggtgcgtgccaccatgcctggctaatttttgcatttttagtagagacgcggttttaccatgttggccaggctggtctcgaactcctggtctcaggtgatccacccacctcggcttcccaaagtgttgggattatggacgtgagccactgtgtctggccagggttttggtttgggtctcggttttgctgtccagagctctcattccatgtggagatttgaagagagataaaactgtgccactgccattttctgagagtcttccaagaattcttttttttttttttttggcaaatgggtctccttattttgcccaagctgagcttgaacttgaacttacaatcctcatcagcctcttgaatagctgagacaataggttcatgccactgtgcctggccaaaaaaacttgttaaagaaatttgactgagggaaggctgaagagatggtagttggagaggtagctttgagatcaagaggtgatttggatgttttttaaaaagttaggagagtatcaaataaggtcaaagattgaaaaaaagaaaagaaagggggaaaaaagagagggaatagataatgatattgagtactggtatttttgactgagtatatgagaaaaagtaggaaccagacaagattaacatcttccattgtaattacagagaagtgggaaggaaaggtatgtgcaaaggaagattagaaaggagggaaaagctgggtgcggtggctcacg

SEQ ID NO: 86389 - DNA, 1080 bp, Homo sapiens
taagaatattgatttgtttgcttttcagttctatgttgtactaaaaatttattgataaatgtattcctaaagagtagaaaattgaaatgcagccaggcacggtggctcacgcctataaacccagcactttgggcggccaaggcaggcagatcacgaaatcaggagttcaagaccagcctggccaacatggtgaaacctggtctctactaaacatacaaaaattagccaggcgcggtagtgggcgcctataatcccagctatttaggaggctgaggcaggagaattgcttgacccctggaggcagaggttacagtgagctgagattgtgccactgtattccagcctgggtgacagagactttgttttggggttgggggcaggggtgggaattaaaatgcaccgttcagatcttatatgcatcgctgacagggaaacttttttcagggtgaagaaggtgaatacagtgaagaggaaaactccaaagtggagctgaaatcagaagctaatgatgctgttaattcttcaacaaaagaagagaagggagaagaaaagcctgacaccaaaagcactgtgactggagagaggcaaagtggggacggacaggttagtacattccacagtcctccattttagaggctggaatagagattcttgaggcttggaagagtaaggatccctttatctgtcctctaggagagcacagagcctgtggagaacaaagtgggtaaaaagggccctaagcatttggatgatgatgaagatcggaagaatccagcatacatacctcggaaagggctcttctttgagcatgatcttcgagggcaaactcaggaggaggaagtcaggtaaaagccacttgctgctgctgctgtctaacatgtattttacacatgtaggccaggtacttcgatttgcctgtatttcatttattacagcattttaagataagtattatgattatccttatcgtacaaatgaggaaagtaggcttagaatatttggtaactcttggtgaggcagctaagatacagacctaggacagtttgtttccagaactcatcttctcttaattattatact

SEQ ID NO: 86390 - DNA, 1335 bp, Homo sapiens
tcctgcttcagcctcctgagtagccaggattacaggcgcgtactatcgcgatcggctaatttttgtatttttagtagaaatgaggtttcgctatgttggccaggctggtcttgaactcctggcctcaagtgatctgcccgtctcgatctcccaaagtgctgggattacaggcctgagccaccgcgcgtagcctccttttgttaatttcctaacagtttcttcattccattttttgtagatatgggagtcctccacaaagagatccaaactggaacggtgagcggctaaacaagtctcatcgccaccagggtcttgggggcaccctaccaccaaggacatttattaacaggaatgctgcaggtaccggccgtatgtctgcacccaggaattattctcgatctgggggcttcaaggaaggtcgtgctggttttaggcctgtggaagctggtgggcagcatggtggccggtctggtgagactgttaagcatgagattagttaccggtcacggcgcctagagcagacttctgtgagggatccatctccagaagcagatgctccagtgcttggcagtcctgagaaggaagaggcagcctcagagccaccagctgctgctcctgatgctgcaccaccaccccctgataggcccattgagaagaaatcctattcccgggcaagaagaactcgaaccaaagttggagatgcagtcaagcttgcagaggaggtgccccctcctcctgaaggactgattccagcacctccagtcccagaaaccaccccaactccacctactaagactgggacctgggaagctccggtggattctagtacaagtggacttgagcaagatgtggcacaactaaatatagcagaacagaattggagtccggggcagccttctttcctgcaaccacgggaacttcgaggtaggtatcataggattggtggctagctttttcccctttgcatcatcaggtttaggggcatgggacttctgtctcaggaaggtggtgtctgacaaatgtctacttctttttttttgagacagagtctcactcttttgcccaggctggagtgcagtggcgcgattttggctcactgcaaccttcgcctcccaggttcaagtgattctcctgcctcagcctcctgagtagctggggttacaggcgcacaccaccacgcccagctaatttttttttttgtatttttatttatttatttgttttgagatggagtcttgctctgttgcctaagctagatgcagtggcacgatctcggctcactgtaatgtccacctccgggttcaagtgattctcctgcctcagcctcccgagtag

SEQ ID NO: 86391 - DNA, 1502 bp, Homo sapiens
agaactcagaagagaaatacagctggctatctactaccagaagggcttcaaagatatagggtgtggctcctaccagcaaacagctgaaagaggaggacccctgccttcctctgaggacaggctctagagagagggagaaacaagtggacctcgtcccatcttcactcttcacttgagttggctgtgttcgggggagcagagagagccagacagccccaagcttctgagtctagatacagaagcccatgtcttctgctgttcttcacttctgggaaattgaagtgtcttctgttcccaaggaagctccttcctgtttgttttgttttctaagatgttcatttttaaagcctggcttcttatccttaatattattttaattttttctctttgtttctgtttcttgctctctctccctgcctttaaatgaaacaagtctagtcttctggttttctagcccctctggattcccttttgactcttccgtgcatcccagataatggagaatgtatcagccagccttccccaccaagtctaaaaagacctggcctttcacttttagttggcatttgttatcctcttgtatacttgtattcccttaactctaaccctgtggaagcatggctgtctgcacagagggtcccattgtgcagaaaagctcagagtaggtgggtaggagcccttctctttgacttaggtttttaggagtctgagcatccatcaatacctgtactatgatgggcttctgttctctgctgagggccaataccctactgtggggagagatggcacaccagatgcttttgtgagaaagggatggtggagtgagagcctttgcctttaggggtgtgtattcacatagtcctcagggctcagtcttttgaggtaagtggaattagagggccttgcttctcttctttccattcttcttgctacaccccttttccagttgctgtggaccaatgcatctctttaaaggcaaatattatccagcaagcagtctaccctgtcctttgcaattgctcttctccacgtctttcctgctacaagtgttttagatgttactaccttattttccccgaattctatttttgtccttgcagacagaatataaaaactcctgggcttaaggcctaaggaagccagtcaccttctgggcaagggctcctatctttcctccctatccatggcactaaaccacttctctgctgcctctgtggaagagattcctattactgcagtacatacgtctgccaggggtaacctggccactgtccctgtccttctacagaacctgagggcaaagatggtggctgtgtctctccccggtaatgtcactgtttttattccttccatctagcagctggcctaatcactctgagtcacaggtgtgggatggagagtggggagaggcacttaatctgtaacccccaaggaggaaataactaagagattcttctaggggtagctggtggttgtgccttttgtaggctgttccctttgcc

SEQ ID NO: 86392 - DNA, 1043 bp, Homo sapiens
cctcatcgccttgcactgccatcttcccacccactcccctcaccccctggcgccctggccgcccctccgctgccgtgggtgcagctggagttcgtggactacgtgttccacggggagcgcggccgccgggagacggccaacttggagctgctgctgcagcgctgcagcgaggtcacgcactgggtggccaccgaagtgctgctctgcgaggccccgggcaagcgcgcgcagctgctcaagaagttcatcaagatcgcggccctgtgagtgcggccgtcggcgggatggggggccggaggccggaggcccgcgccgccgcccgcccctgaccccgcctcccacccccgcagctgcaagcagaaccaggacctgctgtctttctacgccgtggtcatggggctggacaacgccgctgtcagccgccttcgactcacctgggaggtgatgagacccctcccgttcctacctgggaatctgggcatcccgggctccccgaagtgcgtcctcccgggacggccgccggcctggagggagtctttgcgccagttggagggaggcgccctcttctggcatacgcaaccccagggcgcacagcttggctaatggaccctgtctttgtgcaaattagtgaaaagcccggatcccgcctgagtcacggcaggcagcccttggccaggtcaggtcgcagacttggctgtgggagttgggctgattttcatccacactcagtgggggcatctttatacaaagcacctgcataagacagacctggccttccccagaataatgaattcctctgggctgtttcaagcctctagacttagccaaggcctgacttcatttccccacccaccagcttcccagccccctacaagccatgcaggcccttttgccctccaacagggagaattaatccgaggctcccatgtaacccaaggagctccactctgatatcccttctccttccttcaaactctgcagaagctgccagggaaattcaagaacttgtttcgcaaatttgagaacctgacggtgagtgggtt

SEQ ID NO: 86393 - DNA, 1095 bp, Homo sapiens
gcctaacgctaggctctctgcaccctataatcttagtaggattgggccaggcgcagtggctcaagcctgtaatcccagcactttgggaggccgaggtgggcagatcacgaggtcaggagatccagaccatcctggctaacacagtgaaacctcatctctactaaaaatattaaaaaaaaaattagcccggcatggtggtgggcacctgtagtcccagctacttgggaggctgaggcaggagaatggcatgaacctgggaggcagagcttgcagtgagcagacatcacgccactgcactccagcctgggcaacagagcaagactccgtctcaaaaaaaacaaaacaaaacaaaacttagtagaactggtaaatattggttgtgtgaacagtacatgctgtcttcaggggacagacctgggttaggggaccagtgccctcactagtaattattctgggactgctgtgcctcaatcttctaccttagcattagaattaaatgtgatctcatatttatgccacctggaacatgtatgaacgaaaacatcccatcccctcttctgagttccaggcattatgtgacatgtcttgtgaggttggcatcttttcctctcatccacattttcttttttggcagagtcttgctctgttgcccaggctggagagccactgcgccttgcaacctccgcctcctgagttcaagctactctcctgactcagcctcccaagtagctgggattacaggcatgcaccaccacacctggctaatttttgtatttttagtagagacagggtttcaccatgttggccaggctggtctcgaactcccgccctcaggtgatctgcccgcctcggcctcccaaagtgctgggattacaagcatgagccactgtaccccgccacccacattttcaaagtcactccagaacagccctgctcctgacagcactgggcggccatcccctctcccctccctcagcacttccacagcctcaaagaaaacagaatggagaacaacaggcaggttgattcatagactttatcggcttcttctccacccagcggtttctgcaatgacaaccgcgcctgtacaataca

SEQ ID NO: 86394 - DNA, 1012 bp, Homo sapiens
attttttgtattttttttttttttttttttgtagtagagacggggtttcaacttgttagcgaggatgtcttgatctcctgaccttgtgatccacccgcctcggcctcccaaagtgctgaaattacgggcgtgagccaccgcgcccggcccagcctgcttctttaacataatgattttccatttttcctatcctgtcacagttttccgttgctctgcttgagccagtcctatgtagaaagtggcaaattacacattttttctccccttttagtctctggtggacatcttgtctgtgtcacagtttgatactaccaaattgaaaggattcttcactgcttcagatggggagggtgacagaagctgagctgtttcctgggtcagataatggcctctgtcaaagcaaagaatagttgtagagacacaaactgggcccttgaagctgtgactaacattttggcaacatgcatccctttgccaaataacttcttttcttcttgagtgtgattgttgatctccttctcaaagtaggctcttgttgctactattcttcacacaactcccaagcaaaagttggcagagttccggttgactgactgtgtcttgagggatatgccccggattagagtggatggggcgttccatgtcaaaatgaggttcattggcagatcctgagagctgctttgcaaagaaatagaggcagtactctttactgaatgttcttgcggtcctttatctttcttctaaattcaagtctgtttcttattcatctagtgattaaatgcagaatcattgcctttgcctagcttcgtgggcattgtggaagagaagacagtatttccaactttttttttttttttcttttctcacaagccattgagcctgaggaactacaggctaaatttatgagcatttcttgatatctacagagggctactaaaaaaaaaatgctgaatagacctttatggggaacaacaatgttaataggaaaaaaaggtgatatgtttgctaatgt

SEQ ID NO: 86395 - DNA, 1024 bp, Homo sapiens
cattctcaggtgaagcctggcttggtcccgttcctcaggaaaaggatggaccttctcttcttctcagatggtcccttccattcccctgaaacctgcatgagagctcctaacatgtttctccaatgcaatcaagccctagactccaaatgtcctcccagctcacctccatctatgcatctcatctctggatttggtgatcagactctatattgacagtaggatctcaaaccctgcatccatccttcctccagcaagccctgctagccacatgaggaacaagtttccgtgtcttctgccttcctcttggggaaaggtgccttgttgtgatgaattaactcactgttagggcagggtggagaatggtactccttccttctcctgtccactgtgggggaagcttggcaggtatattatatttcatcatttaggaggctggcatgaccaggacttatgggtgggaggggagcatttttagtgaagcaagaaaggagtttgccaagaagtgatctgttttaaaggtcatatttggagaaagggcaaggaattgggtctgctttatttttgggggtattttgtttttgttctcacctgctgcccccccaccccaccaccccagggataaattggatataaacactaaatactaatcagttgaacttaacatttaataaaaagaaagggtgaaataaactgaagaccattttagaactagtcagttctctgcagcaaagggaacaggagccatttgaaccctctgggacccctcaccccactgcttcagggtgctaggctgagggatgtttttcctcccccttaccgcccatgcccttgaaagaaaagtcactttttgtggagggcatcattcattcctgattcacaaaccccaaaaacctctggtgggagataggaagatagggcgtgggcctgggccttaacctcaatcttgtgtctgcctcagtcttttctgactggccctgaagttgtcagtggctctttctgtccttcagcccctggaaggtgctcc

SEQ ID NO: 86396 - DNA, 1050 bp, Homo sapiens
acagaagggtgaagaagtgagcagaggcttatgaagatattcagatactcttctatgccaggaagcacaaagactttgttgagatttgcctcagttcagtagatcttccttggcagccagccataggttgtttctttgtcttccgggtcctaaagagcacagagaaaatggaggtccccagtctaggtaggaagctgattggatgaggacttctttttttccgacagcaggatggggctcttgggctccacacaccagatgctttggttttctacaactgttgctatgtgtagagggtgctcagagcgtggcatgagagcaaggagaccatggctactctttgaaatggatggggaaaattagcttaaaaatttaatcacgagattgcgccactgcactccagcctgggcgacagagccagactccgtctcaaaaaaaaaaaaaaaaaaaaaatttaatcacacacatcacaggcttaaactgtcttagagacctttccagttgattggatcacaggctagggatctgtgcatggtgccaggtgaaacccaagtctccccagtgctaggtgagggagggctcaacgggggtaatgtgtatggggtctgctgtcctttgccatcccctggaccatattaactctgggacagaccatgattaggtctgtcaccaaacttttcctaatcattttttatgtatcattcttctttctaatctgttagcagttatctcccagaagtatccctagcatcctgaagcaaacagaactgccgggcgctgtggcttatgcctgtaatctcagcaatttgggaggccgaggcgggcggatcacctgaggtcagaagttcgagaccagcctgtccaacatggtgaaaccccgtctccactaaaaacacaaaaattatctgggcgtggtggcatgtgcctgtagtcccagctactggggaggctgaggcaggagaatcgcttgaatccaggaggtggaggttgcagtgagtggagatggcgccactgcgctccagcccgggtgacagagtgaaactccatctc

SEQ ID NO: 86397 - DNA, 2194 bp, Homo sapiens
agagtacaagagttgatactgcatcagagttccagggcagatactgacaagtgactgaactttgactgtgaagtcttcccatttatttttgaaatgggagtcgatgccttttgtacgttatcaaagtgtttttttttttttcctcctttactcagacatagagcatcaaaatatcacgagtaaagccaaaccccagcttttcactggggctgatatcttcctccccatggcccactgccccctcatattccccagcacttggactgtgtcacatgggtattgattgtatacttgttgtcttggcctcatgcaaaaaggcctgggtctagatctagtcagatgagttttttttagagcatgttgatgatacaacacctgtttaaatgtctgccttatatgttatttggtcccactgttaataatagatttattactatgtatatttactattgaagatgggaatgtgatctgcatagttatcagtctattttgtatgttgtaaaaagcttctaatttaggtttaaggtgggctggctacaagagcactaaaactcctcaccttttaaactgctctttttatctgcttgtgggaatgtcgtctctttcgtggaagattgggtggtctcatgttgaggctgttgcccagtcccattaactcccttgtccccccacagaaggaagagacattgcccagctaagcatcaggaagctgtgttaaaagcccttctatgggtttggttttgtgatgtttttccctaatgggaaaaacgttatagttgtttcttactgccctgtctgggaagcagggcaaacctccaggtttttaaatgagctagatgcccctcttcctcttctctggtcactgaacctggaccaaagcactttgatattccaggtgtgattttctctgtcatggggatttgctccactgcagagccccatcattttcacagcgtaggccaacagagtgagaacctagggctaccctagctgatggatgtgaggctgctgtctacaggagctcatcccagccctgttaactggcagtggcaaggatactcgtcatcggccattgcactggggaactccctcaccccatggcttcccaacttgaaacccagatttacctccagggagaggtgagaaaaaaattgtaaatagacttgctaaagagcaactcagggttggggtgtgttttaattctcctgatcacttgaaataatctgtaggctgagtgcttatgggggtgggggagaagggtgactccagggtccttccattttgtgaagctctgggggtggagtgtgggcatctgaggccctatgatggcactacattgagctgtctgcccttccggaaacccaacctgcaatcaactgcaaatcaaattcttcacattccagctacagtctttctttccccattgaatctcagtccctggccatgtggtcaaggtggctttctgttaagctaccctaatttcgggaatgggaggggagagaggagggccattacaactctgccttcaagactcatctcttaaaaacaaaacgaaacaaaactacaaccaccatcaaaaccacacgcaaaaaaaaaaaaaaaaaaaaaaaggataactttaaccgaaggaagggtttggttccattcaactccacattcattgtgcctttacttgcattagatttctgtgctttcttcctttccctctttgaagcaattaaaatcttccttgataactgctgtttctttctactcttgtttctggcaatttagtgggttccttctctagtggtcttaaatctcattccactggtggcaagatggggcctagccttcttttcacatgtctaatcttttcctttctcatggtgccctccatggaagtcacagtcaacactgaataaatgactagaatgacacgtgtgcgtgcgcacgcgtgtgcgtgtgtgtgttcatctgtctgcatgtggatcaatttcttttagaaaataatttattgtatgatttattttggagttatattctgattacagtgctccctctcccaaatagcattgattttttcccccctctaaaatgtataatctggtctcaggttggattctttggtacatttctctcttctggatgccatgcagcttaattaaaaccttgcttaaaaacaaaaagtgaaaattgtgtactcttgtctgga

SEQ ID NO: 86398 - DNA, 1032 bp, Homo sapiens
ttctcagattgaggctaaagaaaagaagggtggggacaaagcatacagaatgtgtgtatctgtttttatgtgggtgttggctgtttttcgtcactgctttttaagctgaatcttagctggttttcttgaactttgactttaggtgtaaaaattcaaccagacattctctccttactgtggtcagctgacatcataaccactaaggcttaatgagcttaacttgcactttcatcactagcaaaggtcttgaagttatttctcttactgattcataatgggtgtgtgtatgaatcactctcacataatttagatataaaaacctatgaggatgagggagggaggggaagaaaaaaaaggactcctttcattttcatccgtacttcccagatgggctgaatctccgattatttgacccatcattgttattaatatggttaataaactacctatttattgattgaattgttcctcctgacttgaaatagcctgcaaatggagcttgcctaaatgaccttcgacttcctaaccctataattcattctgtcttcttgtgatggtattgctagtgtgtgtgtgtgtgtgtgtgtgtgtgtctacacacacagtcacacaaaaggatgccagacaggttcttccagtgtgatttgattccttctccatgatactgtgtatgagttagcaggtgataaggacactagttttccttccattactgaggcagagctgcttgccatgaatgtacctcttaagtatttcccaacccaatctaaccatgaactaaacgacccactggaagaaagctgcctgtctccaacttcctagtactctgcaaagagaggtaaaggaactatggaaaatgaattagaactagaaatatgtcagcctcaggattctgactgccccagaggacaactggggaaatgctttgcctctgacatcactggagcccagtctggatcattttcacacataattgaattcattctccattcctaggcttaggggtgtgagacttaaaagactgtatgctct

SEQ ID NO: 86399 - DNA, 1026 bp, Homo sapiens
tcagcctcccaaagtgctgggattacaggcgtgggccaccgcgcccggcccatttcaggtaacttgttattgcatcgctcaattggttaagaacttgggctctggcaccagatgcccggggttacattcctgtttttctgtgactttgggccactgtttatctcagttttctcatgtgtaaaataaaggctaataatagtacctactcctaagatcgttgttaaacgagttggtacctaaagtgtttataacagcgcccttccacgtagtaggtagacaacaaatgtcagctgttcttgcatagatttggatgtgaagcaaaagtgaatgctaaaataagtgtgataacataattaggaaataagtgttaatcatcagtataaataaattccatgttagttattttctcttcactttcacatattgactagttgtcctcttattttttttaatctagctgtgctgtcgtcatgcctcaaacccgatcccaggcacaggctacaatcagttttccaaaaaggaagctgtctcgggcattgaacaaagctaaaaactccagtgatgccaaactagaaccaacaaatgtccaaaccgtaacctgttctcctcgtgtaaaagccctgcctctcagccccaggaaacgtctgggtaaaccatccattatatcactttttcactagcagctcgtgacctttcttttcttggtaagatgtgtgtcctttgaaggagctttctaagttcagttaagacttctttttttttttttttttttttttgagacagagtctcgctccatctcccaggctggagtgcaatagtgcgatcttggctcactgcaacctccgcctcctgggttcaagcgattctcctgcctcagcctcccaagtagctgggattacaggcgcccaccaccaagcctggctaattttttttttttttttttttggatttttagttgagacagggttttgccatattggccaatctggtctctgaactcctgacctcaggtgatccaactgcctc

SEQ ID NO: 86400 - DNA, 1900 bp, Homo sapiens
ccaatgtggcgaaaccccatctctactaaaaatataaaaattagctgggtgtggtggtgcatccttgtaatcccagctacttgggaggctgaggcaggagaatcacttcaacccgggaggcagaggttgcaatgagttgagattgtggcattgcatttcagcctgggcaacagagtgagactccgtctcaaagaaaaaaaaaagaaagaaagaaaagaaagagtagaagtttagaagattgagggtttcttcaaaataaaacatttgtaatttcattgtttaaatctttccaaatgaaagtagagcttccttacgtgctgttagctcttcaaagacattttaggctctatcagatctttattttctgaggccaaaataactcccatatttgcatttttttttccagaaggaactgaaaggctttaaaactatcatgctgaattgcatgtccttgaggactgcccaggctgtattcccagctattgctcaggagatttgtcaggaagaggtatccaggccagctgggaaggacatgatgaggaaattggaaaaacatatgactgcagagaagggccccatgatgtaagtattgttctgcttcatgttgctctgtgaaaatctgcaaggtctgttgcccataaaaagtacattttgtatattttctctctgaaggatagttacataaacttaaagggaaagaagagaaggaagatacacctaattttaaattggattacttatagatgatgtggggtatccttgtagcagtaactagagataggttagattatgatctttaaactggtctcagctttaggaaagtgacctgaagtcagcctatatcaaacattagagggttaagaaggtgaatatggatactaactgtttctctttttatagtgtgttggtattggacgagatggatcaactggacagcaaaggccaggatgtattgtacacgctatttgaatggccatggctaagcaattctcacttggtgctgattggttagtgctcaattgttaatgttacatggtggttctaaagtattttttaagaatatatattcagcttatttatcagctattttatcttaaaccagctttctgccgtgtcaaaataagaaagttaaatgactatgtacatcttacctaatagatacatcttatctattgggatggggtaggagacaagtggcaagcaacaattagaatgctagattctataactggagatttatttagctttcagaagatttagttttccctttaggataatttgaccaatgatcaatgttgttgatctcctccttaggtattgctaataccctggatctcacagatagaattctacctaggcttcaagctagagaaaaatgtaagccacagctgttgaacttcccaccttataccagaaatcagatagtcactattttgcaagatcgacttaatcaggtcagtgccaactattttgccaaattatgtgttccttggatcacctgtgctaggaaaatttaacaatagttctaaaatatttttgccttgattgctttattaatggagcaaggagttcctatggaccatagtgagaacatttttatgtgaatttcagcttcattcatttactgggtgtctcagtgttgaaataaaagcaggagttagaggaatcacccaagcgcttttttttttttttttagatgagttttgctcttatcgcccaggctggagtgcaatggcgtgatctcggctctctacagcctctgcctcacgggttcaagcgattctcctgcctcagcctccccagtagctaggactacaggcacctgccaccacgcccagctaattgttgtatttttagtagagctggggtttcaccgtcttggccaggctggtctcgaact

SEQ ID NO: 86401 - DNA, 3405 bp, Homo sapiens
tcaggtttcttaaatgattaaaggctataagcaatgtgacttttaagcagcgtttgttctcccttgtttcctaccagttatatgaagcctacagtaaagtctgtcgcaaacagcaggtggcggctgtggaccagtcagagtgtttgtcactttcagggctcttggaagccaggggcattttaggattaaagagaaacaaggaaacccgtttgacaaaggtacaactgcttttttgtgacagtgtttttaattgtcctattttgtagagtgatgctaaagtaaaggtttattgttaaacaagatgaccacagttagttaaacaagtcgttttttgttaggtaaggtttaaggtgtgtaaagatgggagtgtgatatgaatattttttcaagccattggaaaaaaaagtgtttaacttgcttgccttttgtgagaaaaagtttaatatggtagaagtttgtatactgacaactttgcttttgtgagttccccagtgtgaaaaatccttttctcttctttccaggtgtttttcaagattgaagagaaagaaatagaacatgctctgaaagataaagctttaattggaaatatcttagctactggattgccttaaattcttctcttacaccccacccgaaagtattcagctggcatttagagagctacagtcttcattttagtgctttacacattcgggcctgaaaacaaatatgaccttttttacttgaagccaatgaattttaatctatagattctttaatattagcacagaataatatctttgggtcttactatttttacccataaaagtgaccaggtagaccctttttaattacattcactacttctaccacttgtgtatctctagccaatgtgcttgcaagtgtacagatctgtgtagaggaatgtgtgtatatttacctcttcgtttgctcaaacatgagtgggtatttttttgtttgttttttttgttgttgttgtttttgaggcgcgtctcaccctgttgcccaggctggagtgcaatggcgcgttctctgctcactacagcacccgcttcccaggttgaagtgattctcttgcctcagcctcccgagtagctgggattacaggtgcccaccaccgcgcccagctaattttttaatttttagtagagacagggttttaccatgttggccaggctggtcttgaactcctgaccctcaagtgatctgcccaccttggcctccctaagtgctgggattataggcgtgagccaccatgctcagccattaaggtattttgttaagaactttaagtttagggtaagaagaatgaaaatgatccagaaaaatgcaagcaagtccacatggagatttggaggacactggttaaagaatttatttctttgtatagtatactatgttcatggtgcagatactacaacattgtggcattttagactcgttgagtttcttgggcactcccaagggcgttggggtcataaggagactataactctacagattgtgaatatatttattttcaagttgcattctttgtctttttaagcaatcagatttcaagagagctcaagctttcagaagtcaatgtgaaaattccttcctaggctgtcccacagtctttgctgcccttagatgaagccacttgtttcaagatgactactttggggttgggttttcatctaaacacatttttccagtcttattagataaattagtccatatggttggttaatcaagagccttctgggtttggtttggtggcattaaatggcaatttgtgactgagacaccagagggcacccttataacattgactactttgaaaggggatgcttgaggctgaggtagttttgagggaaagggggaagttctagtttgatttgtttgggagattgctgtcctttcataactgaagcaaatgcttgaaatgtaaaccatgtgtgatacgaatgatctgagagccagtgaccaagtctgcttttccctgagctctcctgctgccgcctctacctttctgacatggccttccatttggaacttgatatgtgtacaagtgatctgttggccactgtttcattcatcctgaccactgtatccgtgtaatgtgatctgagctacaacaggtggtatgggatagaggcaaggaaagcagagagagccctctgaaatgaacactacccactggtgtgtgtagcacatgatagtctgtaggcatgagtctgaatgttgttctcacactcctttactagagtattcgttccctctgaaggtagtttgaacatggaaacacagttctatacctagaaggttggaaagtgtctgggactataagggttaacatgcataattgcaaagattgtccgaaggctgatggaaagcagagactgaatgggattgagaacagatgcgaagcttgatttaaattacattttattggatgctgcagccttaagagacgtgactgctttacagtttgtttccacactgtgggcagctgctgtctgttctgtgtccacagtaggatcctgcccaataaggagcagcctccccacctcattgtgtttgaggcttggcgccttcctcttaactgtagggcttgagtcaggaacatggcttgactcgcagtggggctgctatgtatcctccctggcttccagccaaaatcacattggtagattcaaaggggccaaatttctttcccctctatctttccctttcccctggttttggaaatagagttttctgtctactgatttgttagtttccttttcttctcccctcactgtcaatttctaggtcattgctgctcttaagactttagcagttggaacagggttggttctgtcaatgatgcatgaagcagacttagtgtccctgcttggcttctgctgcccttgtgggagcaaaagctgatatatgtttgtcagtaaagtcttaagtgtaattcagactgctgaggaagaaagccctttccttgctggcttttctccctgaagctgagagcttcaggaaggtggtaggagttttagtgggatgggatgggatgggcttgtggttagcagtttttgccaggatcataggctgcttcacttagagtagtggcaaagatgctgacctacattcttccttttgaaggtgatggagtgtgtgtctatatcctggtttatctctctcccccaccccaaggaagctgattaagcttccatagagtgttgggtgttgccatggaaagagcatagacaaaataaattgtgtgtttcaaccccagagctgccacagatgtttctggctcaatggagacttgcctgtggctagctaactctgcaagaatgtgtgaggtccaggctgggggtggtggctcacgcctgtaatccagcactttgggaggccgaggcgggcggatca

SEQ ID NO: 86402 - DNA, 1043 bp, Homo sapiens
ttttggatcttccagtaggggcgcccaggagcacccctccgtgctcaaagactcacactcaagcttctctctcccgaacaagtctggagaagccaggaaagctctttttcatgttccagctggacaggatctgaatcaccctccatctgagagacccccagtccccaatacagtcatgacccccctcccagcctgcagctctgtttgggaggatcctgtccccatcgctagcagtccactggcgggcttagggggaagcagaattgcttagaatactcccctctcgccctgttcccaggcagagaagtggccacaagtgcccccacagaacttcccactggaaggggaagtgctgcactcccaggcctccagcccagtgaggagactctcagcctgacccggtggcagagctctcaaacccactggtccgacggaccccgctttacaaacaaggaaagagagtccaagagcaggcactgggttttgtgcacagtcgcaccggttgcagagccgggtctagaattgaagtatctgattgtccctggctttagcccaagagccatggtaaggtaggacaagccaggatggcgggaccctttgccctgagggccggcgcacgggaaactgccccagcagtgctgggccgcgcttccccaggccccttcccgcctgctgggccggagctgtctcccgctcccgtctggatttccgtccgccggtgcgaacctcccgcccagcccctcccgccctgtcctgtccagattcatccgcaaacatgcgctcagccggcaggaatgcgccaatggctcccagatgtggacgccaccgcttaaccccttaccccccagccgcgctcccccaagggccttccagcctgagccccgccaacagcagggagctctgcccaggtgagaaccagcccaggactggagtcagcgccagcccgcccctagtgcccacggacacctcccaacctagatcctacctgtcttccttccttgaggctggaggggaaggctcatggacacaagaatgcaagcatg

SEQ ID NO: 86403 - DNA, 1042 bp, Homo sapiens
ggcctgagggacagggcctccccctacctctgctccgtaccctccgccccttcagtctggggctccgggtaaagtttcagcctccgcacgtgactcgctatggccgctgccatcgccccgcgcccctgagccgcggccccctggacggctcctctcccgggaccccgcaccctgatgccgagcagcaccagggcgccgggttagggcagacgctgtgctcgctggcaccccgaacgggttgcttcccccgctgcgaggtaattcctcccctggggattttggggagcccctggttcccgcaggcgtcggggccccatgtcctgccccagattggtgctgcgggaggggactgggtaccgggaggcttccgacgggaacccggggtttcctgggcttcccaactcgctgccgccgtgtccagggtgggggagccccgtctgtgagtctgcctgcgccgtgtcttcgcgcgcagccttgaggcgtctggggccgtctgctgcgcgtgtcccccgcgctcgagctgttgcagaaccgccgctgggaacttctgttctttttctctttaatgataagcaaaacaaaaagacttgaattcaaacctgtttggggagagatcggatgctcaacggactagccccctctctttttccctcctgttatctgagctgccctgtggtttggggagaatcagccagggggcccactcccaccagagggagccggccgggggccgggccggttcagctggtgtcccccgtggagtgaggggaaccgtcagaattgggtgcgggagccaatgcagtatgtgtgtaggggtgttcctgggtcttgtgccaccatggggtgtgggaactttttggggtgaggggaagacggaatagactgacttgtcgactttgctctgctgagggtgtctgggacctggtgccacccacgaggcttggaagctgctggccagatgtgtgtgtgagcctgttgtggggttggggggacggctgggaaatgagcttggctatgtcccctcatctcctctctgggcact

SEQ ID NO: 86404 - DNA, 1020 bp, Homo sapiens
ctcccccgctgggcacagtcacccacacatgccatgacgtggttcctgccaccccatctaagtatgggggagaggacattgtctgagtggcccctcaggtctgttttggggacattcacccagaccccagctaatgcgcgccccttcccctaaaccatttagtcttggaagctgactctgccctctgggaccttttcttccaggccactccttgctcagactccagtctcaggtgggatggtcctcagaaccgtgtgatgtgacggtggggcctgtcccaaaatacaaaccccaatgcccagtttccagtcctcttggaagcatgggcaggacaggacttaggctaggctggaggggtggtttcttttgacctctgtggggtctattaatatttgggagcactgcctgggatctggggtgataggcatctggggatggtaatcctgtccctgcgacaaataagcggggtaatctccgcttgctcagtacccacacccatcttgtgtcggtagttttgggagtgtgggaagctggcagggcccctggcaagatgaccagtgttgtcttgacttactgggttttgggaaaggagtatggcaactgataccccggctcccagggctttggctgaacattctctctgacgcctgctgtctttcctccctctactcccctctccaccctctggctgctgtctggagcccacacagtttgtggggggatgcacggtggggggcagggcctggatctccgtgtgtgtccagggagtattctgggaattggcaggattggctgagggtgtcttggtgtccccgcagggtgggcggcatgtggggacctagtgtgagaatgtgtcagcgttggtgtgtctgtccccagtctggctcgggtgtgggtgtctcgggtgtgggtgtctcttgcttcgtctggatcttgcctcccgctccagtcccgccctcccctcgctcccccctagctgggaccgcctgcttgctttccctctctccccacaactggagc

SEQ ID NO: 86405 - DNA, 1097 bp, Homo sapiens
aagaaaaaaaatgtcttcctgtcacgtggctgtcacttcctgtcccactgtggttcctgggatgtttgttgttggttgccatggtgatgtctgccgtgggcactacccctggttcttgtggggaaggagctacccctccccaccaggctgggggggtacttgggggacttgactagggggtcctttcaggctgagtgtgtgtggtctctgatgccccagattccccaggaccccccagacttctgtctgtggggaggagtcactgccacctactcagactgagtgctggggagactgtgaccgcatctggctgtgcctgaccgtggctgtgactttgtgagtctgactgattttgcagcccttgtcccctctggccggggttcctctcgctcatagagatgcccattcagggaacctctgtgctccctatctgtcctcatatacagttctggagcctgctcccatcctgtgttctgatggaaaccaccttccccagggagtttctgtggcttcctggactccaggctggagtgtcaaggggctgtggggcagggtcctaggttgcatgtgtttggggctggggaggtgggggctctgcagactatgccttcccctgcacacacagcctgcacccgcttctcccttgtctggcaggcgctcttctctaaggggaaggccatggggatctgtgacctattatccctatccacctgtgggcttccctgttcagctggggatggtgaggggaagagattccccctagttctagccccaactgagtaggcgggtgtggagtaggaagttgcttgggggggggtcaatgggtcggagggggggtatggggcagggcacagtctgactcaggcctggtctggggtcagagccaaaaggatatcctgaggcaggacttggtgggggggtgtattcctggattccctgcagcgtgggtccccagggtgggatgctgagagggggctggtaccatctagtcctgctggcagtttgccctgggactcagaatatggcatacgcagggttgggctgagctgaggggaggggtgagggctgctgcagcctatctccccaccctggccctg

SEQ ID NO: 86406 - DNA, 1030 bp, Homo sapiens
ggtgaggcaagggaaagcaggccgactgctgaggggcaccaaggtggtggcaagaggcatggggatggagggctccagttgcccgggcctcccctgtgccaagctctggtctgggtgctttccaggacttcctgtctgaaatcgcacagctcgttgttgaggtaggcagttcacaggcgagtaaacagatgcttagagaggttaagtgacttgcgtaaggtcacccagagtggcagagctgagatttgacccttccgacttctggttctttctcccatcttcgtggctcagaaagctctcacctttttctctaggtgtgtgactctggggtgtaacgcgtgggcagctagggatgctgatgctggagaagggatcctggcaccttctgagggtgagagcggccccagtgggcaggagtgtggggctggttgcaggtgctctagccccctacccctttttctgctgtgcttaggctaggctccatatattggaggtgtgggcctgtggttttctctctctcaggggagggtgcccgtgggcagtggaggtggctggcatagggtggaggttggatgtgggtagtttgttttccctctctttggtactggtttcgattctctgccgaggccttctccacccctggggtgtagggggctggggcccaggtgtctctctgagggtcatagcttctgatggaccttctgaggcagagtctgtgcccttttgggcccaccctggtcatccctacccttgcccatccctgttctctggtctttctggcccttggcctatttctgtgacctttagccctcctgcggctcaaggccctccccagggagctgagtaaatttgcactgaaatttgcaggcagagctgggttaggctttttggaggctctgataggggtctggggaggccttccagccttgccctgtagtgtgtgtgggtggtgggctgggggtgaggtgggggtagtggggattgaagtttgattcaatttcaaactccactggggcagagttgaggtggc

SEQ ID NO: 86407 - DNA, 1030 bp, Homo sapiens
ccctccttcccccagtgagggttacctgaggtcaagatgcagagaacgtgtgctgggggggaagagggagggggaggaaaagccgcttccctaaagcattggcacttctcagaaaaatgactcctaagccagggggcccctcttacaccacttcccccccagatccaagccccagcaccccagacgggtttgtcccacaggccctgggaggaggcccatttacgtacacactaataggaaaatgggaaccaaggactcctaggtatcacctccaatgcttaacagcatggatggtccaggggtaggcgatgtgtaggagggcaaggaccgcccaggaagcctcctacccccaggcaatgaaggagagattgatctcaaggttcacccacatacttctgtctgcagaagcaaaacacatgaactggggtgggaggtgggcagaagatgaaaggccagatgcccccttcaccagtgtgaatacagatccacaccctgtttgaacagctggcaccagaggatatgcacagataataccatggggtagagacagagacagagatgaacccagagattccataacacagtgagacagataggcagcaacaagagcaaagagagagaacacgaagaacatatccatacgaggacaagaggatgtttcaaatccattttgggtacaggttatatataaatacatatgcatgtatttatatatgaaaaatacatatatgaaagacaaaagaaaagagacagacaaaaagaaacatggccaatcaaaagcacaatgaggctgggggcggtggctcacgcctgtaatcccaccactttgggaggctaaggcaggtagatcacctaagtcaggagttcaagaccagcctggccaacatggcaaaatcctgtctctactaaaaatacgaaagtcagttgggtgcggtggctcacacctataatcccagcactttgggaggctgaggcaggtggatcacctgaggtcaggagtttgagaccagcctgaccaacatgccgaaac

SEQ ID NO: 86408 - DNA, 1067 bp, Homo sapiens
tagctaattttttttgtatttttagtagagatggggttttgccatgttggccaggccagtcttggactcctggcctcaagtcatctgcccgcctcagcctcccaaagtgttgggattacaggcatgagccactgtgcctggctttctttcttttttttttttctcatagggtctcactctgtctcccaggctggagtgcagtggcatgatcatagctcagtgcaggcttgaactcttgggctcaaggcgttctactgcctcagcctctcgagtagctgggactacaggtgcgtgccaccacaccaggctgattttttgatttttcatagagacaaggtctcaccatgttgcccaggctggtctcaaactcctgagctcaagcagtcctcctatcttggcctcccaaagtgctggagatatgggcatgtaccactgcacccagctcagggtaggatttttgacgggggaggagttagggacctgcgacctggtgcctgtggacaacttgtcctaacccaggtgatggcaacagagttcccagacactctgtccatctggagcctgggctcattggagggttggaggtgggggctggggcctggccccatccttgcccatcctggccagagggagcaaatgctttgccttcccctcccctcaatgttgcaagcttcttcctctttcttagaggtgggtggggaaggcttcccatcctggtaaccttctccccaaatgtgggtggggtgcccacatttcaggcaagtgtagccttcttcggctttctccacccaggttaggcaatgcccccttcctgccccctccctctgtgagccttttggtttccctgcccctcccctctccctagtaaacaacaacaacttctctccctgcccagacccttagcttctgagcttctcactgaccttcctcttctctgggacaaggtgtggccatgggtctgagggagcctggcatctccctccttctgcagagccagggctgcctggtggacagagctcctgagctctgagtaggaaagcatggcagataaaattatcacatgcctg

SEQ ID NO: 86409 - DNA, 1031 bp, Homo sapiens
ggtcagcgcctgtgagggctgcaaggtgagttgaaggggtcattgggaaggacagcttgatgaggtcaatgggatgtccccacttctgtgtcctgggagtgtgcagttggggggtgtccctgaagttgctgctcttctttctctgtggaagttggcagcaagcagggacacctaccacagtttccccacaggtcctcccccataaatgtgcagggctccctcaaaccagaggtcccctcctgcctcagctcctttccctgtctctatcctccagctggcagggcgtacgcctgctctgccaccgctgcccaggttgccatggtgagctggctgccgactggctcttggctggggacccaggaggcctcccccggcggccctgcctgaacctcaccatggcagcctggcaggaggcagttaggagcaggcaccctgccttagcttccccttcaggtgcccgggctgtgggctccccagtgtctggctggatttccccatcctcacgttaggtgccagggtgcaggtatacctggtccttagcagccctgcgcccggcttctcctcctttccctggggcctgagcctctgtgtgcgtttcttcctccagagattggggctcagaatcttcacagctttgggccttgcagctctgggctgctcttcagcctggagtagctatccccagatgtgggacggaggtcaagggcaaagcacaaggactcaggctgtgtgtctgcctgtcctgtctggttgttcctggtctgttcttcctctgtccgcctgtccctctggtcagcctgtatgtggagcccctggccagcctgggtctgtgtctgtgatgggtcggtgcacacctgtcttggtgaactcacatctttctgccttgctcctgagtgcatgtgtgtgttcgcctccatttctctggccagcccgtgtatctgcctcctggcctcttcgggcttgtcttcttttcctgtgttctgagttcaggggtgtgggttccagatccctggctgttgcccagttagccc

SEQ ID NO: 86410 - DNA, 1066 bp, Homo sapiens
acccagccatccatccatttagccagtaataaagattcacgtaggagccaggtgcagtggctcatacctgtaatcccagcactttgggaggccgagcgaggcaggaggatcacttgaggctggaagttcaagaccaccctgggcaacatagtgagaccttatttctgcaaaaaactaaaaagattcacctaggatcctctggccagtgttcgagctgggtgtcaggaacccagcggtgaatgcaccaccatcccctctcttgaaaaccttccatgtgaggcaagagataagtcaacagaggttgcaaaactgtgatcaatgcttcctggagattgggggagggcttgtgactgcttgggcctgaaggatgatgtctcagaggaggtgacatctaggggtttgtagagggggaggtgagagggtagccctaactcaggagcaggaagtgaaagacttgctgctgtgaggccatgctgagctcaggggactgccgggcactcggtgaggtgagcccgagggtagactgggctggaggctggatgcagggggtgggggcaggaagaggtggtgggaactgccaaagcctaggctggagggagcactctccttcctgctgtccctgacaagggctcggtccacctgttccctcttggtcacctccagggtggggaacctgggatttgacgagactgtcatttctttttatgtttttcttttttgagatggagtttcactcttgtcacccaggctggagtgcagtagtatgatcttggctcactgcagcctgcaactgctgcctcccgggttcaagcgattctcctgcctcagcctcctgagtagctgggattacaggcacccgccaccacacccggctaatttttgtatttttgtagagacggggtttcaccatgttggccaggccggtctcgaactcctgacctcaggtgatcctcccgcgtgagccggcagactgtcatttctccatgggcacctctgaatgttgaggcgggtgatgggtgggaggtttagattgtgctgcctgcaggggctcccatccccatgccgt

SEQ ID NO: 86411 - DNA, 1061 bp, Homo sapiens
caaccagctgctgcccctggagatggatgatgcggagacggggctgctcagcgccatctgcctcatctgcggaggtgggcagggggcctgggtctgggggctgggctgggacgggggtgcagccctggagtctcttccagggagctctttcaggccacctctgttaggtatctctagagggcagggtctggtctgcaactacacagcaagggggccatgtggggcctggactcctgttcccgatttctgggcaacaccccttctagggaggttaagagtgagggtttgagggtcggaccaaccagggtcacctcctggccgatgcatgaccctgagcaggttgctgaacttctctgggcctccgtttctgtacagtgggggcggtaacggtctctagctcatgaagttgatgggaggattacggtggtaacagatactgtgcaggtgcccagagcgagctccagtgcttgttagttgctattttattgttgtgatttctgccatttcatctggtttccagaataacaggggggagtgggagcctgcctgggaaccctctccctgcttgaggatggcactgcccatttggggtcccatcccactaactgggctcagggagggtttggggcaccccctcaccctcagctcccgttgctcccttttaagggcctctgtaccctgcggcagcagagaccccatgccctgccctgtgtggggaggcgcctgcgagctgccctcctccatggcctgggcaggcacgccccccggtggccgaggctgggggtgcagctgtgttcccagctgctcagggggtggttctgcttcctcagaccgccaggacctggagcagccggaccgggtggacatgctgcaggagccgctgctggaggcgctaaaggtctacgtgcggaagcggaggcccagccgcccccacatgttccccaagatgctaatgaagattactgacctgcgaagcatcagcgccaagggtgaggctcacagacctggaggggtaccggcccccgacacctggcccaggcccccacatccaagccagcacc

SEQ ID NO: 86412 - DNA, 1047 bp, Homo sapiens
tcaaagaactgaatcccaagaaagatgctaatatcagcagtattgatcttcccacctcgagccaggcttgctggggctgggggtgggagggctggcccagcgtgctgacctctgccccctcctttcctgcaggggctgagcgggtgatcacgctgaagatggagatcccgggctccatgccgcctctcatccaggaaatgttggagaactcagagggcctggacactctgagcggacagccggggggtggggggcgggacgggggtggcctggcccccccgccaggcagctgtagccccagcctcagccccagctccaacagaagcagcccggccacccactccccgtgaccgcccacgccacatggacacagccctcgccctccgccccggcttttctctgcctttctaccgaccatgtgaccccgcaccagccctgcccccacctgccctcccgggcagtactggggaccttccctgggggacggggagggaggaggcagcgactccttggacagaggcctgggccctcagtggactgcctgctcccacagcctgggctgacgtcagaggccgaggccaggaactgagtgaggcccctggtcctgggtctcaggatgggtcctgggggcctcgtgttcatcaagacacccctctgcccagctcaccacatcttcatcaccagcaaacgccaggacttggctcccccatcctcagaactcacaagccattgctccccagctggggaacctcaacctcccccctgcctcggttggtgacagagggggtgggacaggggcggggggttccccctgtacataccctgccataccaaccccaggtattaattctcgctggttttgtttttattttaatttttttgttttgatttttttaataagaattttcattttaagcacatttatactgaaggaatttgtgctgtgtattggggggagctggatccagagctggagggggtgggtccgggggagggagtggctcggaaggggcccccactctcctttcatgtccctgtgccccccag

SEQ ID NO: 86413 - DNA, 2525 bp, Homo sapiens
atacagtcatcacattgctgaagaaagttcgcaatgagaacaattcatctaagagtggctgtgactaggtcaggcgcggttgctcatgcctgtaatcccagcactttgggaggccgaggcgagtggatcacctgaggtcaggagtttgagaccagcttgaccaacatggtggaatcccatctctactaaaaatacaaaaaattagccgggtgtggtggcacacgcctgtaatcccagctactcaggaggctgaggcaggagaatcgcttgaacccaggaggcagaggttgcagtgagccgagataacaccactgcactccagcctggacgatagagtgagaccccatctcaaaaaaagagcagctgtgacaaatgcctgtattgaattgcaggtcagtcttccacctccactaccggtgccaaaaaaagggctgccccaaaaggaactaaaagggatccagctttgaattctggtgtctctcaaaagcctgatcctgccaaaaccaagaatcgccgcaaaaggaagccatccacttctgatgattctgactctaattttgagaaaattgtttcgaaagcagtcacaagcaaggtgagtgttgatcctagtcagtccttttgctgtagatgttctgaaacacgtaactaagccattgctcttaaaaatttggcatatctttaagaaaattaactctcatattctgttagcttttactgtacatatttagttttaacaaagttaaatatgccacttatttgggcaatggaagagttggccttagatctgcttcttattacttggtagaaaatagaaaactccttgaatatagtgtcttgatacatttttttacattacaattatgttgtcagatttacaatgtgcaagttacctgggcttttctcttttagaaatccaagggggagagtgatgacttccatatggactttgactcagctgtggctcctcgggcaaaatctgtacgggcaaagaaacctataaagtacctggaagagtcagatgaagatgatctgttttaaaatgtgaggcgattattttaagtaattatcttaccaagcccaagactggttttaaagttacctgaagctcttaacttcctcccctctgaatttagtttggggaaggtgtttttagtacaagacatcaaagtgaagtaaagcccaagtgttctttagctttttataatactgtctaaatagtgaccatctcatgggcattgttttcttctctgctttgtctgtgttttgagtctgctttcttttgtctttaaaacctgatttttaagttcttctgaactgtagaaatagctatctgatcacttcagcgtaaagcagtgtgtttattaaccatccactaagctaaaactagagcagtttgatttaaaagtgtcactcttcctccttttctactttcagtagatatgagatagagcataattatctgttttatcttagttttatacataatttaccatcagatagaactttatggttctagtacagatactctactacactcagcctcttatgtgccaagtttttctttaagcaatgagaaattgctcatgttcttcatcttctcaaatcatcagaggccgaagaaaaacactttggctgtgtctataacttgacacagtcaatagaatgaagaaaattagagtagttatgtgattatttcagctcttgacctgtcccctctggctgcctctgagtctgaatctcccaaagagagaaaccaatttctaagaggactggattgcagaagactcggggacaacatttgatccaagatcttaaatgttatattgataaccatgctcagcaatgagctattagattcattttgggaaatctccataatttcaatttgtaaactttgttaagacctgtctacattgttatatgtgtgtgacttgagtaatgttatcaacgtttttgtaaatatttactatgtttttctattagctaaattccaacaattttgtactttaataaaatgttctaaacattgcaacccatagaatgcctcttttaaaacacacactacacccttttccttattctaaaatatagtcttcacttccctttcagaagcattccaatcatattgtgacagaccttacagcctctggctaaggtgataagtccaagagataggcattaagacctaattaaggccaaagactctttattgagattttatacatgaggactaagttcttcatctccaccacacttgatcagtaaatatgcatgtatcttttttttttaatgataccttcctttaacaactattttgataacctagtcaactacttgatggtatcagtaagatatattgaggcaactggctaatccatttagaaaaaaaatcagataaatctctttcacaccttacaccaaaattaagttcaaatagatgaaatatttaaatgtcaaaaactatttaaaaagtaactataaaaaaagtaatcttgagttacagagggataaactgaacaaaaccc

SEQ ID NO: 86414 - DNA, 1468 bp, Homo sapiens
ctcctgcctctgcctccgcctccctagtggctggaaccacaggcgcactccaccatgcccattaatttctgtattttttgtagagatggggttttgccatgttgaccaggctggtctttagctcctgagctcaagcgatccgcctacctcaccctcccaaagtgctgagattacaggtgtgagccaccgcacccagccaagacagggtcttatatcttaccccagctgatctcaaacccctgggctcaagtaatcctcccgccccagcctccctaagtgctgggattacaggcatgagccactgtgcccggccacatttatttatgagattaagtgaccaagctatatgcaccacaaaaacagagaccatatctgtctcttttcacgattgtattctcagaactatcacaggagttaataaatttgaaggatggatggatgatagatggagaaaagtgggtctaatatataaaggtgattaatttctatctcccctctaggtacaaagacaaagaaacaaactacattggcatttaagccaatcaaaaaaggaaagaagagaaatccctggtctgattcagaatcagataggagcagtgacgaaagtaattttgatgtccctccacgagaaacagagccacggagagcagcaagtaaggaaaactaaagaacattatagataaactgtaagagtggaatggccaatatacttcagggtactttgccccagaaattactgtgtcttaatagagcagtaaattatgttaaagctttgaaacactgaagcatctttcaggagatttaaaaactaaaatattcatgaaatgttatgtcaacctatgaattgtttctcctactaccctctttgatttttttgtatatggtttttttactagcaaaaacaaaattcacaatggatttggattcagatgaagatttctcagattttgatgaaaaaactgatgatgaagattttgtcccatcagatgctagtccacctaagaccaaaacttccccaaagcaagtatcttatctaatatgggttttgtcatgattgtttctaatatattgttttttgcttgacacatttagaattggttgtcaggatttttttttttaattctagacttagtaacaaagaactgaaaccacagaaaagtgtcgtgtcaggtatgtatttaagtaaaagtagtgagacatctgccttactgggacactcagatccaactgggttctaatcctggctacattatccaagtacttcctttggaaataaatttgagttcttattaacattatgttgatactgttcactgggtttagtttcacatgtaaataggtactgcattcagtatactaaaagtaatcatagtgcttgccaggtactttgctaggtgctagagatacaaaaaataaaaactgttcttgctgataaaaaattcagaaattagaacaaagttttaagagt

SEQ ID NO: 86415 - DNA, 2005 bp, Homo sapiens
ctatgatcatgtaccattgtactcagcctgcgtgtctcttaaaaaaaaaaaaacaaaaaaaaaaccaccaaaagctttatttcttaaatttaacatgcaaatttgtattactgcacttcagtatagatgcctagctcattgtaatcagttggttggataagtgtgcatcacttcctttcatattttgtatgtgagtttacaaatatatatgtatatacatgttttatttttagtttctcccttgttttcctcaaaaaggttaagtggtagaatcaggaataaaacccagtccttctgtctccacaccttccttttcaaggtgtgttttaattacatcttcactattgttgatagtatactaggttatggagcaatttatcactagtttttaagatgtaacaaaatgaaatcagtttaactgttgggtgtttagatattgtaatgtttttgttaacatttaaacttgctttcttatatcccttctgtaggctgttgaagccaaggaaaaacaagatgaacaagtcggacttcctgggaaaggggggaaggccaaggggaaaaaaacacaaatggctgaagttttgccttctccgcgtggtcaaagagtcattccacgaataaccatagaaatgaaagcagaggcagaaaagaaaaataaaaagaaaattaaggtaatactcttgtggtggctcacacctataatcccagcactttgggggccaaggtgggtggatcacttgaggtcagtggttcaagaccagcctcccaacatggttgaaaccctgtctctactaaaaattaaaaaaattaggcgggcatggtggcaggcgcctgtaatcccagctactcgggagactgaggcagaagaatcgcttgaacccgggaggcagaggttgcagtgagccaaggtcacaccactgcactccagcctggccaacagagcaaaactccatctcaaaaaaaaaaaagaggtaatactcttaaaaatattatgcataaaatattgatgcatatgtccacttaaaattgaaaaaaaaatgtataaaatttttttgttgttgttgttgagatggagtctcgctgtgttacccaggctggagtgcaatggcaggatctcagctcacagcaacctccgcctcccgtattcaagcgattctcgtgcctcagcctcccaagtagttgggggcacatcaccacacccagctaatttttgtatttttagtagagatggggtttcaccatcttggccaggctggtctcgaactcctgacctcaagagatctgcccaccacggcctcccaaagtgctgggattacaggcgtgagccaccgctcccagccaaaaatgtataaaatctctaatcccatagttcagaatttattctatatccaaccctaactttgctatcttttagaatgaaaatactgaaggaagccctcaagaagatggtgtggaactagaaggcctaaaacaaagattagaaaagaaacagaaaagagaaccaggtattacaacatttttagaaaaatggtataaagtgaagattaaattgtgtttgttacctagtacattccacatagatgttcaaaacctttttgttgaattgagaaacgtgaaagaggactgtatctcaattctacttggacctctttttttttttttttttttttttgagacagtttcactcttgttgcccaggctggagtgcaatagcacaatctcggctcactgcaatcttcacctcctgggttcaagcgattctcctgcctcagcttcctgagtagctgggattataggtgcatgccaccacgcctggctgctttttgtatttttagtagagacggggtttcaccatgttagtcaggctggtctcaaactcctgaccttgtgatttgcccgccttggcctcccaaagtgctgggattacaggcgtgagccactgcccctggcctggacctctttaatatcgtccttgggatttgattcattatagaaaatattttgt

SEQ ID NO: 86416 - DNA, 3431 bp, Homo sapiens
ggtgatctgcctccctcagcctcccaaagtgctgggattacaggcgcgagttactgcacctggcgccctcagtgtcttttctctgctcaaatgttttcctatcagaaacggcttaactttccttagcacctcttcagtcactttcccactttttcttctcttgtttatcccaccacctaacaaaatatgtgttaattgcaaacttctactggactgtgagctccttgaggattgagactttatgtccatgtgcgtgacacatagcaagtgctcaataaatattgttaaatgtatattagtcagcaagtaaaaccaagataattttcatgtataatacatgtcctttccataaaagttaagtgtgaaattcagtatttttgtaaaataacattctttgtttcttttctttagctctttggctcgattgttatttccaccaaaagatgatcacacgttgaagtttttatatgatgacaaccagcgtgttgagcctgaatggtacattcctattattcccatggtgctgataaatggtgctgaaggaatcggtactgggtggtcctgcaaaatccccaactttgatgtgcgtgaaattgtaaataacatcaggcgtttgatggatggagaagaacctttgccaatggtaagtattctgtgtgtgttaagagccttaacttttccttgggtttcagttgaatagattgtatgattaaagatgatgcaaacataaaatttaatttcatactttagatttattgttaaacgctgttgtgatttccgtctagtatcacatttagaaaacatactgtttttttaaatgccaatttagcttccaagttacaagaacttcaagggtactattgaagaactggctccaaatcaatatgtgattagtggtgaagtagctattcttaattctacaaccattgaaatctcagagcttcccgtcagaacatggacccaggtaaataattatggatttcttttttaggtttgtgatcaaaagaaataccttttgtactattgctgttgactattcagaagcctatattttagaaacttcaggattatttctttctttagacatacaaagaacaagttctagaacccatgttgaatggcaccgagaagacacctcctctcataacagactatagggaataccatacagataccactgtgaaatttgttgtgaagatgactgaagaaaaactggcagaggcagagagagttggactacacaaagtcttcaaactccaaactagtctcacatgcaactctatggtatgtatttgttttgtgagatgtacacgtttcaatttatattaaagattaatatcaattttaaaagtatatcttagtctacctttataaagtttagccaatttgtctattcttggctctaatcttgttttcctttttcaggtgctttttgaccacgtaggctgtttaaagaaatatgacacggtgttggatattctaagagacttttttgaactcagacttaaatattatggattaagaaaagaatggctcctaggaatgcttggtgctgaatctgctaaactgaataatcaggctcgctttatcttagagaaaatagatggcaaaataatcattggtatgttttgggaataataactgcttactaaaactctagttacgccaaactttctttaaacatttttggtgagagtaatggtggagaaagaggcaaaatccatttaattcacctggtcacttatacacgcatttctttaaaatatctgattaggtatttatagtttgaaagagatgatgtttccttgactgagcatcttgagaaatcaagatttagttgacaattagacatgaggagaatagagagctagaagaccttgcataaactgattgaccaagagaatagatacactaatcatgtctacaggaacagaaaataaaagagacagagaagagataataaatctgatggtaaaaaaaaaaaaaggcaggaagattacgaatggcttctactctctgggtgtggtggcgcatgcctgtaatctcagcacttgagctggggaggtcaaggctgcagtgagcctaggtagtgccactgcactccagcctggacacaagagtgagagagaccctgtctccaaaaaaaaatgatttgatcatatatgatttgactgcccccttgtggtaatttacatttgtcaatggtttagggagacttgcctgtataccgggatatacaaatttatgcaagcacgaagacagtttaatttccagttttaaacttttgacttgtgtaaaaccttatccccttcctaaaatattactcaaaatcattatctctgtttacttttttaaaaatagaaaataagcctaagaaagaattaattaaagttctgattcagaggggatatgattcggatcctgtgaaggcctggaaagaagcccagcaaaaggtaatcttgggtggcacttttctatattgttaaagactatgtattgtacaatgtttatgtttcacattttctaataaagctagattttaattaatcctttaggttccagatgaagaagaaaatgaagagagtgacaacgaaaaggaaactgaaaagagtgactccgtaacagattctggaccaaccttcaactatcttcttgatatgcccctttggtatttaaccaaggaaaagaaagatgaactctgcaggctaagaaatgaaaaagtgagttgatagtaggatggtacatgctgcttagttttgttctattctaatggtaaaagtaaaattgtgtgttgcatgaaaatgctgcttgtatacatatattaactcaattttgtaattatcttatgaaggaacaagagctggacacattaaaaagaaagagtccatcagatttgtggaaagaagacttggctacatttattgaagaattggaggtatgtagtttataatgcccatgttagaatttttattaatgaaataatatattccagcagtatacctttgtcaagatagttcacaattggcaataaaaagaaaataagaggcataaggataaattccaaatagcgtataaaagaacagattattggccaggtgcagtggctcacgctggtaatcccagcattttggaaggctgagttgggtggatcacttgaggtcaggggttcaagaccagcctggccaacatggtaaaaccccatttctactaaaaacacaaaaattagccaggcatgatggtgcataccagttactcaggaggctgaggcaggagaattgcttgaaccgagaggcagaggttgcagtgaaccgagatcacaccactgcactccagcctaggcaacacagcaagactccgtctcaaaaaaaaaaaaaaaaaaaaagggacagattattaaatactacttagaatacaaggccgggtgcggtggc

SEQ ID NO: 86417 - DNA, 1540 bp, Homo sapiens
tcgggagttcaagaccagcctgaccaacatggtgaaaccccatctctactaaaaatacaaaatattagctgggtgtggtggcacgtgcctgtaatcccagctacacgggaggctgaggcaggagaatcacttgaacttgggaagtggaggttgtgggagccgaaatcgtgccatcacattccacaagagtgaaactccatttcaaaaaaaaaaaaatacaaaaattagctgggcgtggtggcgggcgcctttaatcccaggggctcaggaggctgaggcaggagaatcgcttgaacctaggacgcagaggttgcagtgagccaagatgacaccattgcactccaggctgggcaagagaacagtaactcccgtctcaaaaaaaaaaaaaaaggaaaacagtatttttgtttttctgttgttcgttctttgtagaaggatattttggaacctattagcctattagtaccagtgacatcttttcatcctttaatttataggcctttagcaaaaaacagatagatgatcgaaaggaatggttaactaatttcatggaggatagaagacaacgaaagttacttgggcttcctgaggtaaaagttttaaatatatgccacaaaatggattgttagactgaccttttggtattgatactatagcaaattaaacttactgaatagttattttagtaaaaaatttgatatgatagagttgtgcagcagttaaatttgctttatctttaaaacatataaaatatttctgtattattcaatattttttaaagacttaagaattacagaaataattcttagttctgaaaggtttctgtttgatttttgtgttgagcattgtttagaccggtagactcatgtaatactatttggtccttcaggattacttgtatggacaaactaccacatatctgacatataatgacttcatcaacaaggaacttatcttgttctcaaattctgataacgagagatctatcccttctatggtggatggtgagttccaatttgttagtctgttttcattgtaagatggaaatcaaattccaaaattggttaaattgaggatacttacgtttgctcttatttcattttaaaggtttgaaaccaggtcagagaaaggttttgtttacttgcttcaaacggaatgacaagcgagaagtaaaggttgcccaattagctggatcagtggctgaaatgtcttcttatcatcatggtgaggtaaacacacaatccatgtttccagaaagcattatatcagaaatccctgcagagtcattctcaaaacagatttggtgaaagtataagctcatatattcatagtaaagaacaagttggtaaaacctgtgaaagaataaaactgcttgccctttgatttctgaaagtaatattcctgcagggatattcataagtctgcaaaggtctacattaaaaaatgcttagtatgtttattataactttgtgatgtcaaaatttagacctccactgatttgaaaattgttataataaattgtgacacatgtatgcatgga

SEQ ID NO: 86418 - DNA, 3409 bp, Homo sapiens
acctctacctcctgggttcaagcgattctcctgcctcagcctcccgagtagctggaattacaggtgcccaccaccacgccagctaatttttgtatttttagtagagccggggtttcgccatgttggccaggccggtctcaaactcctgacctcaggtgttctgcccaccttggcctcctaaagtgctgggattataggcgtgagccaccgtgcctggtctaatttgttttaaccactatatctccaacaagtagctcagtgctagcacaatataattatatagtaaatatttattgaacgaatgaaccaaaaggagcagctccctcagtggtgataacctgacatgggaagatgtgccaccctctatccagaaattattgttctacatctttttaatttttgaatcatttttatttgtattaaggctcatttgtattctagatttctgatagatcccttcttccctaatatgatccctaatatgaatcttctcgttttcaggccattggctgtggtattgtagaaagcatactaaactgggtgaagtttaaggcccaagtccagttaaacaagaagtgttcagctgtaaaacataatagaatcaagggaattcccaaactcgatgatgccaatgatgcaggtatatatttaataatgtttccaaacttttaagtcttatagttgttattttattcattaatggcataccacggatatttatttttcccttgacagaataactatattcaacagaataacttgttaaaaatcggcccgtttcctattatggaagatttaggtcatttccatgttataaataatattgaggtgattattttggagtataaaacaagaatgtttatattatgatctattacctaacaaataattttgctcattatatagtaaattgtgttttatcacaaggctataaacagcatgttcaagttagtatatttgaggttgaactaaatgtgctaatattaatatgtatatttttattttagggggccgaaactccactgagtgtacgcttatcctgactgagggagattcagccaaaactttggctgtttcaggccttggtgtggttgggagagacaaatatggggttttccctcttagaggaaaaatactcaatgttcgagaagcttctcataagcaggtagaatataagacgatcttcagaatctaaatctaatttataatacaagactttatgcttatatttaattccctcattaggcattttaaaatatattttagacaatttgtgcttattttgagaaattaggtacattgtagcctattttaacagacctttctgatgtagtaaattataagctaatagctcaaaatactggagctcaagaaaatccaagcaacatatactgttaaatttctttgttcttttcaaatttataaacgatgctttttttggtatatgtccatttcagatcatggaaaatgctgagattaacaatatcatcaagattgtgggtcttcagtacaagaaaaactatgaagatgaagattcattgaagacgcttcgttatgggaagataatgattatgacagatcaggtcagatttgttattaaatttttagattgttcaactaaattaagcatgtcttaatttaatttcattgttttttgccatgaaaataaattagttaaataggagctttattcatcatctctaatcaacatctaatcagatatgcttatatcatatgtatgttgcaaatacaggttaagtgagtctggatttgaacagaccttttttgattcccatagaaaatttgacaaattgccagtaggtcagtcataatatttttttatttctaaacaattctttgtttgtttgagatggagtttcgcccttgtcgcccaggctggagtgcaatggtgcaatcttggctcactgcaacctccgcctcatgggttcaagcgattctcctgcctcagcctcccgagtagctgggattgcaggcggatgccaccacacccaactaatttttgtatttttagtggagacagggtttcaccatgttggccaggctggtctcgaacgcctgacctcaggcgatccgcctgcctcggcctcccaaagttctgggattacagatgttagctaccacgcccagcctaacagttcttttgaactttggctttcaaatctttctaggaccaagatggttcccacatcaaaggcttgctgattaattttatccatcacaactggccctctcttctgcgacatcgttttctggaggaatttatcactcccattgtaaaggtacgctaatttctaagtaccatcatggatattttaagaccctactcctcaaacctggatatacatataagccccgtcacatgtagtggtatacaggggaccccacagtgtacaaagccacagtcattgttttttatcacaggtatctaaaaacaagcaagaaatggcattttacagccttcctgaatttgaagagtggaagagttctactccaaatcataaaaaatggaaagtcaaatattacaaaggtttgtaatgaaacccatatagaacttctcattttattatacaccctgtacaagactatatgaaggaacttggtatttttggttttataggtttgggcaccagcacatcaaaggaagctaaagaatactttgcagatatgaaaagacatcgtatccagttcaaatattctggtcctgaagatgatgctgctatcagcctggtaggtttgagttgtattttatatacattctaattttagaaatcactactttagccagttgaaacatttacatttttgtataagactccgtatcaaaaaaaaaagaatgttttatagaatagaatgtttccagtaagcatatcccagagaaggaatcagatattttagaaaattttgatttttggctgggcttggtggctcatgcctataattctaggactttgggaggccaaggcaggtggatcacctgagatcaagagttggagaccaacctgtccaacatggtgaaaccccctctctactaaaaatacgaaaattggccgagcgtagtggctcacgcctgtaatcccagcactttgggaggcagaggcgagcagatcacaaggtcaggagatcaagaccatcctggctaacaaggtgaaaccccatctctgctaaaaatacaaaaaattagccggccgtggtggcacgcagctatagtcccagctacttgggaagctgaggcaggagaatcgcttgaacccgagaggcagaggttgcagtgagccgagatcaggccactgctctccagcctgggcaacagagtgagactccatctcaaaaaaaaaggaaaaaggccaggcgtggtggctcacgcctgtaatgccagtactttggaagg

SEQ ID NO: 86419 - DNA, 3883 bp, Homo sapiens
atgtcaggaactaagcatggtgggaaatgttcctgctgaatttcagaaggtatatatgaaaagtgccaaaaaaattgagggctgggtatggtggctcacatctataaccccaacactttgagcagttctcctgcttcagcctcccaagtagctggaatcacaggcatgcgctaccatgcctggctaattttttttatttttagtagagacggtttcaacatgttggccagaactcctggcctcaagtgatctgccctcctcagcctcccaaagtgctgggattacaggcacaggccaccgcgcccagcctgaatatacatattttagaaataatagtatttaaatatttttaaatgttaagcattcgtttaatgtgttgtaaaatacaattttcaatctttttttcttagggaaaacaatttaattagtatatggaataatggaaaaggtattcctgttgttgaacacaaagttgaaaagatgtatgtcccagctctcatatttggacagctcctaacttctagtaactatgatgatgatgaaaagaaagtgacaggtagagtattgaggggaaataacatatttgttgctaaaaatatatatatttaaatgactgtctgtggcatgagggttaaagatatggaaataaatctctataattgaatagctctgccagtgattaagaaataaagctgtcaatgagatagtaacaataaaatagtgtttcatatttatttgcccaggtggtcgaaatggctatggagccaaattgtgtaacatattcagtaccaaatttactgtggaaacagccagtagagaatacaagaaaatgttcaaacaggcaagtaaataagtgtcttgtaccttaatgataaatggtagtagtatagccatttataatggcattaatgattggtttaatttaacataatttataagctattgaagtatggaaaattataagcatatatattaggttattaggactcataaatttatgttatttacttccagtttgtgagatgacttgaatttttcatgtttcctattctttacttccatagacatggatggataatatgggaagagctggtgagatggaactcaagcccttcaatggagaagattatacatgtatcacctttcagcctgatttgtctaagtttaaaatgcaaagcctggacaaagatattgttgcactaatggtcagaagagcatatgatattgctggatccaccaaagatgtcaaagtctttcttaatggaaataaactgccagtgagtattttcctggatgttaaggataataagggattttgtaatcattgtcaagtgcaaaattgaattttttcccctcccatatgtttttgtttgtttgtttgtttgtttgtttgagacagagtctcacactgttgcccgggctggagtgcagtggcacgatctcggctcaccgcaacctccacctcccaggttcacgcaattctcctgcctcagcctcccaagtagctgggattacaggtgcctgccaccacacctggctaattttttgtatttttagtagagacaggtttcactatgttggccaggctggtctcgaacaccagacctcatgatccacccgtcttggcctcccaaagtgctgggattacaggcatgagccactgcacctggcccaaccatatgtattttcttaccacttctcacatatgttcttgaaaagagaatggtatgccacattttttaatcagctcattttaaacttaccgaaggaatttctttctcaaagaaacacctaaaataaatatttcatgtcctttttttattttcctttttctttcttttcttgataacctcgctgtgtcacccaggctggagtacagtgatgcaatcacggctcactacagcctggacctcccaggctcaagcgatcatcccacctcagcttctggagtagctggaaatgcaggcagcaccaccatgcccagctaatttttttttttctttttaatagaggtggggatctcactatgttgcccagggtggtcttgaactcctgggctcaagtgatccacccacctcggcctgtgtcctttaatgaccattcccttatgcctatcagtgaacatcattgcattggttttggaaagtcctcatagtctatcattgaacctattttttaataactttcttaatactgttacctttaattcctgtacaggtaaaaggatttcgtagttatgtggacatgtatttgaaggacaagttggatgaaactggtaactccttgaaagtaatacatgaacaagtaaaccacaggtgggaagtgtgtttaactatgagtgaaaaaggctttcagcaaattagctttgtcaacagcattgctacatccaaggtaattttattcttaaattattaatcatgatttatctttacatatatgtgttcttattgtttttaatatataaagtggacttgaatattgggctagcttagtataaaggaggttaaattagtttttaatgtttgattattataattttgaggatactgagttttacagtttggtatttttccttattagggtggcagacatgttgattatgtagctgatcagattgtgactaaacttgttgatgttgtgaagaagaagaacaagggtggtgttgcagtaaaagcacatcaggtatgtgcttttggcagttttctttttctaaagtcaaggaagaagagaaaggctataaataaagcatgagtacatttttagtggcttaatatcaacttctattgcaggtgaaaaatcacatgtggatttttgtaaatgccttaattgaaaacccaacctttgactctcagacaaaagaaaacatgactttacaacccaagagctttggatcaacatgccaattgagtgaaaaatttatcaaagctgtgagtacttagaggaaaataaaaatagaaacacctgactttattttccattgcacttcttagctctgcagaaacaatgattcttctcatagtgagcttctccaagtcttcccaatctgaaaaggaagtaaaaaagggctttactttaactgatttaccaaagacttaatgaccgtctatatttcagtatttcccaattacattttaccattaagcttagatcacttttgaattaatctagctgtttaacaaacaccctcacttaaatgcctaagacttgctttcagtcaacacatccaaaattgaatttgttacctccatactcactgatttgcccatacaagcagccccccactctccaacaaaaaaacaacttcctatcttagtaaaaagccccaaccaacctctaggttgtataaacaagaaagctgggagccttcctttatttcccctcctctctaatccggtcaataagaatcatctcttggatgctgcagtagcttctcaccattatctcttttttggtttactacaataggttcttaaccttcatactggttaagtcctttccttggaatgcttttgagtgacttttgtgttaaaacacccatttttatcttcactctcatttgaaatctttcaatgacttccactcagggaaagtccaaattccataatttggccaacaagaaagatctgctgtaatctaattacacctacttctccaactcatctcagtgccagtttttcgtatattgtcctgttgcttttaaattactgaaaagcacagtgctcttcccctcctcagagtttattcacatgctaatccctctgcatgaaatacatccttttcacctggctactttaggtcttgtcctttcctcaggaaagcctttactttctacccttccccccacctaagttggttccaatataatattgaacataccttatta

SEQ ID NO: 86420 - DNA, 2983 bp, Homo sapiens
ctcccattcccctcgctaacaacgtcagaacagaggacagtttttagatttcagggatcttaaatagattggcagttcctggagaataaacatcctttgcttttctcctgcacacttttgcctcaggccaccccttcccgcttccaaagcccatctcttccaagctttccgcacgagaaaacaagtgagcccttctcattggccagattccctgtcaatctctccgctatgacgccgagtggtgccttttgaagcctctctagtcccgcctccctaacctgattggtttattcaaacaaaccccggccaactcagccgttcataggtggatataaaaggcaagctacgattggttcttctggacggagacggtgagagcgagtcagggattggctggtctgcttcgggcgggctaaaggaaggttcaagtggagctctcctaaccgacgcgcgtctgtggagaagcggcttggtcgggggtggtctcgtggggtcctgcctgtttagtcgctttcagggttcttgagccccttcacgaccgtcaccatggaagtgtcaccattgcaggtacggctcgcgggggggactggcggtggagcctccgcgcggcccgggcatctctctggccgcccgtgacgggtgaagctctggggctgcggtcaggccggcgaccggcttgggagcccatattctccattcccggttccggggtgatcgtggagaggcggaagccccttctggtgctagtagtgaagtatgacccggcttccagggtgtcgtgcgttgttgccctgtttctaggggcaggagtccgttggtcccgtagtggatccatgttacagcggcccgggtgcgacgttattgagtcgcgcgtacagatgctttcccctcctgcccgctgcttgaaaacggtcttgaatgtccccgatcttggaaagggcagagcctagcacagtgtttctctggagcagctggccagcttacaaaagcgcccccttcctgagttcacaacgctcaggtggccaagggattgaacggatagccgcccaaactgctgctgccgaactagaattatttacggtgtcgtgtgctcgggacaccgtaaataatttataataataggcactcggtaaataatgtatgcaggaactgaaagaagtgggtgtattttattgatgacatctaccatgttgctcaagaaaagaggtttccagacagacccacttggtgagataatatgtgtctgtttaacctgacacctggggacctggccgcagcgaatttaaattgtcctatttgtacaaaactggcaactccaccactgcctactaacagattgcaatgcatgttgacatctcactatggtaggcattttgttcctagtttagggtaaacttatgattaaaaattcccttctttctctctttttttttaattgctagcctgtaaatgaaaatatgcaagtcaacaaaataaagaaaaatgaagatgctaagaaaagactgtctgttgaaagaatctatcaaaagaaaacacaattggaacatattttgctccgcccagacacctacattggttctgtggaattagtgacccaggtaaaatcaagctcatcaaaggcagttaacctagtagttgaaatggatactcttctttctgtacctttcatgtactgagtgtgacctttctgtatctctcatgtactgagtgtcactggaactggcctaaatatggtaatacttaatatgaacactttatggtaatcatgataacagaacaatgaatatagaataaaaataacagtatttctttgccttatttctagcaaatgtgggtttacgatgaagatgttggcattaactatagggaagtcacttttgttcctggtttgtacaaaatctttgatgagattctaggtgagtaaatcctttaatataaagatctggtcaaatctttcataagaagtatcattccaaataaaaatttaaaaaagataaaagtaaaaacaaaaagtatcatttctaccaaacctgctgtagccagggctcctgtcatttcaatcagttgataaaggtgagctggtttcctggagcccaggaggttgagcttctcgtagaaacagtactatggacaaaaattgctaaattaacaccttgttaatgccactcctgtgctgtttgggaacttttttttctatatcttacttagagttacagaatgtttcttaaaacactaatttcttacaaatgtatattttattttctttcagttaatgctgcggacaacaaacaaagggacccaaaaatgtcttgtattagagtcacaattgatccgtacgtcttttgcttagtttttgttatgtagctcgttgctattgttagctgcatgtattttgattactggtgaagttggcttttcctaaacagaagttgagaaaagtacacaaaagcagaatgctaaaatgaaaaacctatggatacccaccacctagatccaacagttgccaacgtttttccatattttctccatcttttttttaattagttaatttttttagaggaaggggtcttgctattttgcctgggctggtcttagaactcctggcctgaagcaatcctccagtgttggcattatgggtgtgtgccatggcacgcggcctatttgctctggatcatttcaaaataaattacaggacttatgacacctaatccctaaatatttgagcaagcaccttcagtaattgctttaagtattctggcatctggagttttaactttttctcatgatgctattcaaacagtaaaccagtaggtggtggtagagaataatttgatctgacatttctgcttataaatgcggggtgtcccttagtgggtgatcagggtgcttatttcacttttttgttagtctgattgattatgacaaagtatacctggattttcctaaggactcaatatcatagtctttaaaaaatgttgagcta

SEQ ID NO: 86421 - DNA, 1569 bp, Homo sapiens
ggggtgggtcacttggggtctcttttcctgcgtcggaactgacccctcatgtccttctcttggcagtgtcacccagctctggatgggcagcgtggcaagtgctggtgtgtggaccggaagacgggggtgaagcttccggggggcctggagccaaagggggagctggactgccaccagctggctgacagctttcgagagtgaggcctgccagcaggccagggactcagcgtcccctgctactcctgtgctctggaggctgcagagctgacccagagtggagtctgagtctgagtcctgtctctgcctgcggcccagaagtttccctcaaatgcgcgtgtgcacgtgtgcgtgtgcgtgcgtgtgtgtgtgtttgtgagcatgggtgtgcccttggggtaagccagagcctggggtgttctctttggtgttacacagcccaagaggactgagactggcacttagcccaagaggtctgagccctggtgtgtttccagatcgatcctggattcactcactcactcattccttcactcatccagccacctaaaaacatttactgaccatgtactacgtgccagctctagttttcagccttgggaggttttattctgacttcctctgattttggcatgtggagacactcctataaggagagttcaagcctgtgggagtagaaaaatctcattcccagagtcagaggagaagagacatgtaccttgaccatcgtccttcctctcaagctagccagagggtgggagcctaaggaagcgtggggtagcagatggagtaatggtcacgaggtccagacccactcccaaagctcagacttgccaggctccctttctcttcttccccaggtccttcctttaggtctggttgttgcaccatctgcttggttggctggcagctgagagccctgctgtgggagagcgaagggggtcaaaggaagacttgaagcacagagggctagggaggtggggtacatttctctgagcagtcagggtgggaagaaagaatgcaagagtggactgaatgtgcctaatggagaagacccacgtgctaggggatgaggggcttcctgggtcctgttccctaccccatttgtggtcacagccatgaagtcaccgggatgaacctatccttccagtggctcgctccctgtagctctgcctccctctccatatctccttcccctacacctccctccccacacctccctactcccctgggcatcttctggcttgactggatggaaggagacttaggaacctaccagttggccatgatgtcttttcttctttttcttttttttaacaaaacagaacaaaaccaaaaaatgtccagatgattgtgtttggttgatttattctcagttagacacagggatgcaccaggggtggagagacggggacagattttgggaggtgagtattgtgtggtccccagacctgtctgtatggtaagggactgcagaaggacggccaatccaccttcctcttccctgcaacggaagtttcctagggaactccttggcttcaaagtctgcgctgtctttacttagactcctgg

SEQ ID NO: 86422 - DNA, 1036 bp, Homo sapiens
atgtagaattggctatcccattccacaaaggaggaagctgaggcccggagttacacggcgtgcccaaggctgtgtagctagtaagaagggaggtgggcatcctctgactgactctgagggcgggaccgccctgtgcttgcggggagcacaggggcattgttcttactgctttgggtccaagaccttctgagctcttatgagaccactgctggggccagctcacctggggactcagttcctgcccccactccccacccgttctttcttgccctctctctctccctctccacctccatccctgtcccctttccgtccatgcgcccacctccctggctctccctttcttctggtcccagccgctgagtggggtgggtgagcccagggccgaagagagaggtgggagatgtttgcaggtggaggacatgaacctgttttctctccaagccccttcccttcacattgttctgctgcccccaatgttaagtcaattgaattgtgtcagcaggctgcagggcataggctgcatgttgtagcgttgcttgtgagcgtctggaccccttctgggtatcaatgtgtgtgctttggcgcgtgaacatggggggctattgctgtttgtgtgggtgttgcatttgtggcatgcatgtgtttgtgcatctgtgtgtatgtgtgtagcggatgcactcttgtctatataggtaggatttttttttttttaattttactttaaggtccaggatacatgtgcggaatgtgcaggtttgtaacataggtatacatgtgtcatggtggtttgctgtacctatcaacctatcatctaagttttaagtccctcgtgcattaggtatttgtcctaatgctctcccttcccttgccccctactacccgctgacaggccccagtgtgtgatgttcccctccctgtgtccatgtgttctcattgttcaactcccacttatgagtgagaacatgtggtgtttggttttctgttcctgtgttattttgctgagaatgatggtttccagcttcatccatgtcct

SEQ ID NO: 86423 - DNA, 1035 bp, Homo sapiens
cggaagtatttgatctgcatttatttaataaatttcattcatttacagctaaaaagtagattttcatacccaaattgttccaacattcttaaaagttctttagtcacactggttcatttcaggggtttaataaccacatgtggctagtggcttctatattggacagcacagctgtatactgtcagcataactagagtaaaatttcatcttggaactgacagtgacaaatgtgtgattacagaggagacacaccttgaagaaacaacagagagccaacagaatggtgaagaaggcacgtctactcctgaggacaaggagagtgggcaggagggggtcgacagtatggcagaggaaggaaccagtgatagtaacactggctcggagagcaacagtgcaacagtggaggagccaccaacagatcccataccagaagatgagaaaaaagaataagtgttgccttgttttgtgtgttctaaatactttttttaatgaaaaaatgttttttggttttaatggtgttacgtggtttgtgtattaattttttttcttgtccatatcacaccaccaaaggcttttggaccatttagcatcatgagcctaatggctcagtcagtcacctttcttaagtgttgtgaagatggctcttttctttggatcttgtttctagccctcaactgctgaaagcctcagaatttagattaattgagaaaacacccacctcttttagagaattatcctttgatgctgcagaatctactcttacaatgccttcctacagctcactggggtgcttaccaaagccatagctttaaaccttcccagtccccatcagtagcttcctgaaagtctcctctcttgtttacttctgcaaagggtagcttcttaaaaacgtgatcatgtatgagtatgtatttgttcacttacccttttttacttttaatcaatgtcagataccaagagttgtgttaagctgagtgtagtgtgtaactaactacacttggatcttactgatccagaaatagtccccatagttag

SEQ ID NO: 86424 - DNA, 1052 bp, Homo sapiens
tgatgaagaaaaacaagaatatttaaacgaatacgaagcagaaaaggtagggtaggggctcacagtgggatagataatgtgtaaagtacataaaacattggcttactatttataaaagtaacataagatttggtcagaacactgatgcagtactgaggctctgtctacctgagtcaagtcagtttctcaaggcctcagatttcttgcctgtaaaaaggagataattatcccaacaccctgtttacatcatatcttttgatattcaagtgagataacataggtctgcattataacctgcaaaatgttaattataaaaccaaaaaacatttgaatttcagatagagtacaatgaatctatgaaggcctatcataattcccccgcgtaccttgcttacataaatgcaaaaagtcgtgcagaagctgctttagaggaagaaagtcgacagagacaatctcgcatggagaaaggagaaccgtacatgagcattcagcctgctgaagatccagatggtaaaagaaaaaaagtggggttttgtttatgctttctctgtgagttaagatatgagaaatctcttaagtataagtttttatttcttatcctaaatggaaaagaaagtataatttaagtatcgtcttagtattttggttatattgagtaagatttgtatgtgaatttcccacaagaaaaagaaatatccttttcagtgcagaaaatagcaaaaattattgattgtttatcaaaatctttgtactcaaaatgcacgaaaggtttttaaatcacaatcaggattttgcctcatctgcttttaaaaagctaaatgcattctaattatatcttgttttcttattggttcactaaattcgctgaattaaaggctcttaagggagaagctaatgagtatgtggaaacatgaagtttcctttccatttaattcagaaatccaataagaatgtataaatatagctcatgctactatttgtatgggtgtacatgagggtatacccatacaaattgtatacatgcacacgaatggcagagcttcctaattgcc

SEQ ID NO: 86425 - DNA, 1105 bp, Homo sapiens
caggaaaaactgatcactttatctttctctttccttctttttttattttttctttcacctatttttgctttacctttttaaaaaatatttttcagtcttccctccgcctccttttcttctgtctctcttttcctgtacatcacatctttccttttcctctgtctttcccataaaactgaacatttttaatggaatggagcttcttgatataagacctcaaaaataacgtaatcaggcccgatatctgccacttctctgttcctgataaacttgtttgcttttacactgtgattaggactcaggacaaaacaatgtgtgacttttaattcacacttctcattcccctttacaagaaaaccactaggtaacagacagaaccttaagagaaataaaatctctagcctggcaaaggaggtaaggtggtttgttatttcactaattgtttttgtttttgaacctgggaagttgtttttgtggtggtgttgggagtacattcctagtgctaataggttaaggcccctgtagacagtgtgagaatggtaagtgttaagggttcagatcctgctgcagataatcaagtgttgactgtatgtgtaatggtaattgagcagaataagagggtaccaggtaatgtcctgaacttgagacggttgatatataaccatatattttcaatgtatgggttactgtgtaatattttatttgttcttgcagccaggttgtcaaagcattggcaataaactgctaagtaaaacatttaaaaattatgtgcttaaagtcattttcttttgaacatttctgaatttgcagtgatagctattttcagtgaagaaaatatttggacgaatagaagaaaggcgcattagaattttttaagggactctcttttcagtttgccagtgaactccttacagttgaataatgaatgtatttaactctttcgtaggcatcctctggtatcacgattccaaaacccccaaagccaccagataagccgctgatgccctacatgaggtacagcagaaaggtaggtgcttaggacctggtaaggagtgaggacactgtctttgctgcttctttgcttaacatccaactttagatcggc

SEQ ID NO: 86426 - DNA, 1608 bp, Homo sapiens
aacacattgagacaaaaatgtctttaaaaacagcctatttctgtacattaatagaaattctgccccagaagaaagctcttaaataagttcttgctagagaaacagctgagaattgcaaaagaaacaacaacaaaaaactgagtaaccaagataaatttcacaaaaccatgaactttattcataggagatttcctaggaccttgctcttctgtaagcacagttctacccgcctccccattggaaattgaaagcagaaaattggaaagagagttgctgctagaggtgggtttcctgatagtagcaaggaaagaaacagttcaaaaatggaaacacattctccaaaagcatagcccctaggccgttgaaagagtcaacaacagattttgacatctgacagagggttacagcacagcaaaacagtggttgtttctaattgaatcttatccagaaagggtctaaagtatgttcagctttttttaaagaaatgtttaagacattgtagaaagatgtctgtctgagacgttaaataaattggaggtgtgtaatgatataaatctttactatcctgaaaaccatctggaatttaactttattattgttttggggtgtttttttagtttgggtttttgttgttgttgttgtaagttgactggtctcaatatacagatgatttgtgtacctttctttgggagaaaggaggggaaatagcaattccattaatataaaatgtgattctttgaaaaatatcaaagagcaaatactactgtgtttttaaagtgttttaattcatattaaagctcggaagcataggcattttagaattctttacctctttaatttcaaaaaattttgacagtggtcttaccacctcagttatgggcacaattccaactttatttgtaatccatttcatggaattctgaaggtttgtgttggatatgagttggaaatactttctagtaactttatgtgtgaagaagcagacttgtgtgtgtctgttcctctgaatccataaggttagtcttataggaattctctttccccttgaaagaactatagaccctgatacaggtttccctgtattggctgcccatcctaccacttttgacagtttccatgcccctggccatctcactctcttacccactgctggccaaaaacagtgtctgtctacctgggcactagcatgaggtgtgacaagaatgcatgggaggaatggaaagagaggaaatactgcttccaaggcgaaatgctttgaagaagtagagttatagggatggagagagacccttgtaggaagaggaaacatttcttgatcatagtggaaaaggacacaaacatgctaatccctgagccctcaaatgaaaaataaggttatgattggggtcccagcccagagtggaggagtatctctggggttttatcatagcaacaacagaaggggaagcgaacaaaatgttactttagttttcctataaggatttgccaatcctgtctttcgataattaaaataaagccaacacttcatttctccagcctagcagggagagtcaatatcagagatctcctgaaaatttgcaaattgtctgaaatagcaatgatttttct

SEQ ID NO: 86427 - DNA, 1946 bp, Homo sapiens
gacactgcagacaggtttctcaatgaaagaaaaatatttaatttcctcagtggaaaaaaagaacaattacaacacatcattgcttgtttaaattcaggttgcttttgcatgccatatgcagatcatttttcatttctgtgttttcctcgtttgagctcatttctcattcgtgtttttgtctcatttgtttccatcagcaaatgcccagcacaccagggtttgtgggatacaatccatacagtcatctcgcctacaacaactacaggctgggagggaacccgggcaccaacagccgggtcacggtaggagaatcaactattacagcatccggcaaacaactggaattgaccagaaatgccttcagaattaggtctttttgaatcataagcacagccatttaaaaaaaattttttaacctagctttttgagtattttcaacattcgttgtagcatctcacactgaaaaaataaatagtgagatctggaatgtatatagaagaaaagaaaaatccattctgtttggtggttggtagggttaaagccttgagcacttgatgcttatactgtatgtaaacaaacagaatttcttaaggtaaaaatatcctttttgacataaagagtatttttcatttttataaggtgattggcattagtctcaaggattgagtttctagtagaggctggtctttcagacctggctttttcagggctggaaagcttttggctggtacaccagtttgaatcgctacccatagttatttgtcttttggatttagtagttgaccttctaactaagactcatttctctacagtgaaaaagagaaaaacgttttaatgtcacctcaaagaaatgcagagtgaaggttgaatgaaattaatttgaagtatcagactagatatgtacaacgagaagtgcatttctaatccttagtataagagataggatttctgaaacttagcatgtttcatttaagtgatcagcctaagatatcaaaattggatgatacacttcaaatcttttagtttagaatcatcttaaatttcattcaaaaaagtttaagcaccaaaaaatgccaataattataaaaatgacttactaaagataaaaaatccaaaagtcaaatactacattggaatgtagtgttggtgagaatttatacaacccagaatggctgtaaagtttttaatacctggtttttgtttgctgtattcataaataacaagtgccttctattaatgtaacttcaaaaaagccctctcaccctgtagtcaagctggaactgaaagcttgtagctatcaaatgaatgtctatcttgataagcatattgcttagcttgataggttttgtttgtctaaatttttcattgtttctgcataatatgtacttcataagcatatcaagttttatgtgccatgcatatttcatggtatctgaaaaagaattctgacaaagtgtgtgtatgtatgcatttcacaatgcatacaatttttatgtgcatcaatacatgtttttccctggcctaaacatgttgtttcacaagtgtaatggatggcaaggttttcaaatgataaagaacatttcagtttaaacaatgaacggaatcaatcatggatcttaatgttaatgcagcaattttttcacgggcagtaaacaagaatgattgcatttaatagctctatacagtcacctcttgattatctatgttaatggaatagaaatgataactataatattacagtaatttgtcttttggttttgtgtaagtattttgctcttaacttggatgtagctgtgggggattctcagttaaaaaagtgagattgttcgatggagactaggaagagaaagtgtactccctatctgaagtcactcatctgtttcttcccattccttcttggcgaatgttaagaactgaacatttggcgtggacactagctacatagt

SEQ ID NO: 86428 - DNA, 1043 bp, Homo sapiens
acagctctgagcaaattgttcaacatttctgagtctcagttgccctgaactgccaaataaggggctaaattaggtgatgtctaaggctctttgcaactctaaaaatatcctacaactttgtccagaaaatgcatcttagaggccacacgcgagccaccctcagcaccagctaatcaggctccagactgtttaggccaaggcaattccaggagaccacccctgactattctggtggcaaaacaattttatacttgtcatcactccctgaacccagtcaaatccaaccaagtggactcaaaaccagtcacgtccaaccaagtgtctcctgtcccttgtccctcctttttcctgccctgccaaccctcttcatccccaccctccacagccatggcctcaagaggaaggaggcttctccttggtcacctctccttcccttccagcctgatgtcccagccctccacactcacacacccagttaggaacaacaccaatagtaataataatggcttccattcattgacagttttccatttgccaggcaccgcactaagcatgatctcatttagtttttcaacaagcttatgaggtggaaactctttttacccacactttgacaattacatgaaccttttctgcagacctctctgcaaaatagttcaactgaaatgattctttaatagcattaaccactttctgctgaattgtcctaacaactttttctatcagaaacttatccttcatcctcgatctccattcccatctctctcccctttcctctcattttctcccacatcttttcctctcattttctcccacatcttttcttgtcatctcctctccatcctccttcttcacttccatctcctcttctgctcccacttccacacacctaacataaggacttcaaggcagagtctgtgttctctagatccccaatgccacatctagctttgtgccacttaattcttatgctaagactcctcttttgaggcaaatgccatccaatggcccctcaccacatacactcccctctgcctcatcat

SEQ ID NO: 86429 - DNA, 1007 bp, Homo sapiens
ctgagacagtacctggcacagagtaggtgctcaactaacaggagataaagaaatgcgtttctttgcaagatccattttccatagcactcctactgcatccccctggaaatgctgatgcagctatgggtctctgggtgttccccaaacacaccaggtgcattcccgtgtctacctggacgattttccaccttgtcttctcagcctggcaaagtgctgccctggcttcgaaacccagctttgctgtccctccctgtgaaactatcctccgaggcctggtctgaatgagttgctccctccctgggcctcccaaggtgcctgtacacacatacctttgtcactgcacgagtaacattgcgctgcactgaactgttttgtgtgtgtctcactcacggcctgctctcactaagggcagggcttggctgactcagtactgaattctgagcacccagctctgtgactgcacacaatgaacccaacaattaggtgctgaatgaaatccaactctgggctcttactgcctgcgtccattcagcaagcatcaatagggcaactactgtgtacgaagcactgagtcagaccttgtagtaggtccaaagatgaacagaaaaccaccttttggctgtaaaggattatcaattgagaaggggagcagatccgcctctcagtaattctttttttttgttgctgttgttgagatggagttttgctttgttgcccagactggagtgcagtggcacaatctcagctcactgtaacctccgcctcctgggttcaagtgattctcctgcctcagcctcccaagtagctgggattacaggctcttgccatcacacctggctaatttttttttttttttgagacggggtcttgctctgtctcccaggcaggagtgcagtggcgcgatctcggctcactgcaagctccgcctcccaggttcatgccattctcctgcctcaggctcctgagtagctgggactacaggcgcccgccaccatgcccggctaatt

SEQ ID NO: 86430 - DNA, 3239 bp, Homo sapiens
ccaaaccaattggaagcggcgccgcctgggcgcttggggcacgacgctgtgggtggggtcaggacgtgagggcagcgcgctggcgtcagaggcgcggctatataactaaacacaggcaccgcccctctgccccagtcactgagccgccgccgaggattcagcagcctcccccttgagccccctcgcttcccgacgttccgttcccccctgcccgccttctcccgccaccgccgccgccgccttccgcaggccgtttccaccgaggaaaaggaatcgtatcgtatgtccgctatccagaacctccactctttcggtaagctatgggaaaggtcgcgggcccgggtggggcagcggggccttccgggcccggagacgtgttccgggaagttgccaagcgctccgggccttcgtaagctcgggcaggggaaacttgaccagggtcgcagggcagcgggatcaaggcctgggccccggggtcggaccctgagcgcgaccggaaggagcaggcggtaggtcagcccttgggcgggcccggcgtctcagtggcgcatttactaatggctcctgggcctcctcgggccacacccgcccctcccgtcaccattgcgtcacgtccgttacgtcaccacccgttgtcacggatccggagggaaaggcggtgccagccctaagtggcaagcgggtgcaccaatgggggtgggaggcttagccccgcctcgggagctcgggttccggcgggttgcatcagctgggtggggcaccgcctggcagcccggactcccccgacatgtgatcggcttcccagggagggcgggaggcccgggcgttccccgagcctggggaagctggccgtcccggactgacctgctcggggagagccagcaaaggacacattcggcctggcccaagccctgacgatttcagtgttgttttctgcacgcgcaaaacacctggggaccgaggggatggcagtggcatcctatctttgacagctctgaacgagcttaaccttttttttcagacccctttgctgatgcaagtaagggtgatgacctgcttcctgctggcactgaggattatatccatataagaattcaacagagaaacggcaggaagacccttactactgtccaagggatcgctgatgattacgataaaaagaaactagtgaaggcgtttaagaaagtaggtcttcagtgagattttgggaaagtcataatggatttgtccacaagggggtgccagctgtgttgtatgtattgttagcggaaggggtgataaatgcgttcatgctcttgctaggcctaattcgttttcctttgtgcttgcagaagtttgcctgcaatggtactgtaattgagcatccggaatatggagaagtaattcagctacagggtgaccaacgcaagaacatatgccagttcctcgtagaggtgagttcagtcactacttgatttgtgcctctctgctggcaaatctcagatcctgtctgttagcttctgctggggacataaaagttggctttgtaaggctgagcaaaacctcagttgggttttaaagtacatagacttatttctgttttataggaaaaagcagaagggacttgtctacctttggtttactgtttctgtggatctacttcacagatgcaaatttgaatagcatatagatgcattgtaaaataagccaaatgctgggttgttcctgtatttgtaaggacatgagtttttaaaaatgaatttcctgagtattaatactaaaatactgttacatgatcagctcttgatataattgaagagatttcagatacctgatgagtctcattctcacactaattcagaaccttggaaggcactgagtgttcaaaaaaggtagctcttaactgaggaccctctgttgaaccattgtgcgcacccctggctcttgggcagtgtagtagcaggaagacagggttgttgccattagaaatggaggctttaactctccctgtcccccatttaaaactttgcccttttgtcttttcagattggactggctaaggacgatcagctgaaggttcatgggttttaagtgcttgtggctcactgaagcttaagtgaggatttccttgcaatgagtagaatttcccttctctcccttgtcacaggtttaaaaacctcacagcttgtataatgtaaccatttggggtccgcttttaacttggactagtgtaactccttcatgcaataaactgaaaagagccatgctgtctagtcttgaagtccctcatttaaacagaggtcaagcaataggcgcctggcagtgtcaagcctgaaaccaagcaataccgtcatgtttcagccaagcccagagccctaagattacaaacaactatggccggaacctcctcagctctccctctgcagagttccctaccctaagagaatgttaccacctgaacagtcctcggtgaatctgagaggagaggatggggtaaggcagaagcaccagctgtactactagaagggagcttttggtggtagatcccctggtgtctccaacctgactaggtggacagagctcaaagaggccctcttaccgctagcgaggtgataggacatctggcttgccacaaaggtctgttcgaccagacatatcctagctaagggatgtccaaacatcagaatgtgaggccaaccttctatcagagttaaacttttgacaagggaacaaatctcaaactgatccatcagtcatgtagctagctgtagagcttgcaacttaatagcagcagctgcccaatgccatgtgaagtaacaaactggtttttggtttttttttccccttcagttttaatgttatgtgtaatgtatttaaacccttatttaaataaaacttgttttcagaaatacctgacttgcagattatttatatatagtcgatcttgtgcatataaaggaaccatagaaatgggcagtggaggattcgtccacacccacagcttctcaacgggcctgaatttggccaagaaaaacctttatgagcttgtccctctctggtcaactggttttttgttcgtttgttttttgagacaggtttgcccttgttgcccaggctggagtgcagtggcacaatctcggctcactgcaacctccacctcaggttcaagcaattgtcgtgcctcagcctccctagtagctgggattacaggcaccatgcccagctaacttttgtatttttagtagagacagggtttctcc

SEQ ID NO: 86431 - DNA, 1050 bp, Homo sapiens
tttgagatttgttcccttgtcaaaagtttaactctgatagaaggttggcctcacattctgatgtttggacatcccttagctaggatatgtctggtcgaacagacctttgtggcaagccagatgtcctatcacctcgctagcggtaagagggcctctttgagctctgtccacctagtcaggttggagacaccaggggatctaccaccaaaagctcccttctagtagtacagctggtgcttctgccttaccccatcctctcctctcagattcaccgaggactgttcaggtggtaacattctcttagggtagggaactctgcagagggagagctgaggaggttccggccatagttgtttgtaatcttagggctctgggcttggctgaaacatgacggtattgcttggtttcaggcttgacactgccaggcgcctattgcttgacctctgtttaaatgagggacttcaagactagacagcatggctcttttcagtttattgcatgaaggagttacactagtccaagttaaaagcggaccccaaatggttacattatacaagctgtgaggtttttaaacctgtgacaagggagagaagggaaattctactcattgcaaggaaatcctcacttaagcttcagtgagccacaagcacttaaaacccatgaaccttcagctgatcgtccttagccagtccaatctgaaaagacaaaagggcaaagttttaaatgggggacagggagagttaaagcctccatttctaatggcaacaaccctgtcttcctgctactacactgcccaagagccaggggtgcgcacaatggttcaacagagggtcctcagttaagagctaccttttttgaacactcagtgccttccaaggttctgaattagtgtgagaatgagactcatcaggtatctgaaatctcttcaattatatcaagagctgatcatgtaacagtattttagtattaatactcaggaaattcatttttaaaaactcatgtccttacaaatacaggaacaacccagcatttggcttattttacaatgca

SEQ ID NO: 86432 - DNA, 1305 bp, Homo sapiens
agttcacatccacctgcttctcttccaggctttgctgttccccagcagcctgcagaggccccacagacagcttgaggcccctccttctgctgcctggccaagccccacacccgcagaccctccttcccatcctctgaaatgggaccctgtgtctgtcaccagcccaccctctgtgttcatgaacctgggctggagcttggggacccctccctgcccctggcttcctcttccatgttctgccctttcccacatgttggaggcttttccaacgtcttcagggacaggcggtaggaaccccggccctcgctctgcagctggtgcaaaagctgtggctgccaggtctgggccacatggcagcccagggggcaggagaagcccgggagaggcccactggctaccagactcagccctgagcagggaacagggcccagcttccaccggcagggagttgtgagcgccttcccaacaatgtgcccctcaccccttgatgcccatgctaatggtagccaccctggttcttgttgacttgagggacctggctgtcttccctgttcttcatcctttcttctcagtccctacctactgtttgtaaccacaagtgtctctgtgtgtgggtgggtgagggcccctctgcccagtggtgtgtctcctctccctccctccctcttctgccagtggcctgggggtgtccaggctcccatccgtggcccagcccctctcccctctgtcttgatccccccctccctgcccctggcttcctcttccatgttctgccctttcccacacctttgttcctcaatagctgggggctgggactgaggcctcctgcaggtacctgccccccttcacacagcacctctcaatctcctattgcttgtcagcctgtgtgcgtgtggtgcaggaaataaaggatctataccctcctggcccagcctccagctgtctctctagggagtgtgtgtgtgcacttggcagggcgaagttgtagagaaagggtggatgctaatattgaagtatgtgccgaggactcctattaaatacgccgtttaatcatagcagcagctcctagagggcggtgggtgatgtcataagtgtctgttggatggagaaactcaggccagagtaggttaagtgatgccctcaccagcagatcatggctagtgtggagctgggatttgagctcatgcttccctgatcctttcaccccagagactgactcagtggcctggctgtgaaagataggatgggagagagtcacccactgtcttagggtgaagtccccagagcagacctggaacagggttt

SEQ ID NO: 86433 - DNA, 2070 bp, Homo sapiens
ctgctcatggccactacctaaggttcttcagcttgaccaagccccagggactgcagtttcggcttccattgtctcataatgaaggtccttttctctttgaaggaattatgagatgcccagaggggacacatccagcctaaggtaagcctgccaggggctcccctacaacctgccctcagctttcagcagccagacagcccacctgcctctggttctgccaccctgcaactccggagaaggccctgctatctcggctggctgaactgagaactgttctgggaaggagctgccccacttttccttcaaatcttgccccctgggtggccgtctgattccaggcagctctgagtggggactgaagctttcttttcaactgactatgggctgagaggtgacaggcactggcttaggagctgggaacacctgggactaaggcccagcgtggtccctttcctgactgtgtgtccttgggcaagtcatttgacctgtctgagcctgtctagaatggatttgttcctatggcaagtagctgtggggtgggctatgaaggttaaatcatgcaggagggaggcagaagtgggtgttaaccctgttggtgtattccgtgcagggtcagggacataaaagaagatggggcctatgcagtgttggtgaccattcttcctccctcccaccagggggatgggctgggtatttgaagccttggagctggtacctagctcccctctcccctggctgggacagaaccaggaggaaccatcaggatctgtgtggagacgggtgggggtgggcctggggggttggactttccagcccctcaaaagatgtcgctatctcccgcccaggtatgattttcgctacagtgaggatcgagagcaggtgcgggggtttgaggctgaggaagggttgatgctggcagcggatatcatgcggggggaagatttcacgcctgcggaggagttcgtgccccaggaggagctgggggctgccaagaaggtgccggctgaggaaggggtgatggaagaggcagagctggtgtcagaggagaccgagggctgggaggaggtggaactggagctggatgaggcaacgcggatgaacgtggtgacatcagccctggaggccagcggcttgggcccttcacacctggacatgaattatgtcctccagcagctggccaactggcaagatgcccattacaggcggcagctgaggtggaagatgctccagaaaggtgagtgcccccacggggccctccctgccgccagccggacaagctgcagatcgtcgtgccgatgaaaagagagggtggataagctccccgagtgctcacctgccccagcctggctctacctgctgtgcttatttgcatggactttgcatatcatttgcatagacacctctgatccccttcagtgggaaccgtagtgtcagtgctcatttatgtggcatttgcttaggattccagatctccatccacttttctcctgggggctgggctgggggttagggctgggactgtgcccccacactgcgcctcagcttcccatctctgcccgcttgcttcccctgcccccaacccctgcctcctctatcccccaggctctccaactctgcagcagtggcagcagcagtcaaaacaaacacggggggcggtgggtgggatggtggagcagcccgggggctgacccaggctggaggacagggccagccaccctcccacggcctgggaggaagagaggccttctgggactgcccaggctatggggacaaaggccttcaccagcaagggccacagttggaacagtcccctgggtgtcagaaggtgggctagggcctcctgcagggttgtggggtggaacagggtctcctctccccagccagaaaccccaaagtctgggagctgcaccttccgagtgcaggccatgtgagccctgcctctttaaggagccgcaggacatgaaagatgaccttgtgacactcatgcacagcagccattgcacgtgcatcagctcccatcagcctcattccgtggcaggtgatgtgtccccattggttaggtgaggaggg

SEQ ID NO: 86434 - DNA, 1050 bp, Homo sapiens
ctgttctgggccctccccgtcccagtgtcttatgatggcctctgggcctttccagtcagcttggacccatgtttttccttctttgcctgggtgagcttcacttgccctgtggtcttagcttagtggttcctttttccaggaatccttccttaccttgcaggtcgggttgggtgctgtagctgtgatgcccctgccctgtacacccttgacatttgcccatcatggcctgtatgatgtgtgactgtggtctgtctccccaccaactttacctcagtgtggcggctgggtcttactgaccactcaccctggtgccctgctcagtatcagtcaatgaacatttcttgaatggaagacctgagtgaggaatgcaaagccctgcaggacccactggcacagcgcagcagccgagggtgggggagacagaggcatctgggagggccagagctggtccctgaaggccaggggagccagggctgacctgtcctctgccctccccagcggaggccagccaacagatggctgagctgtcggaggtgctggtgctcaggctggaaaactatgaacggcagcagcaggaggtcgctcggctgcaggcccaggtgctgaagctgcagcagcgctgccggatggtgagtcgggtgtgtgtggaaccctcttgtcgtggccccatgggaccctagcttccttcttcctgcctccactcggctccaccaggcctgaggtccctttctgtgtcagagtcagagacctcagagagccccttatcttgaccccttgttatcttgaggagaccaaggcccagagagggtcctggagtcttctaggaaccaggctgcgtgactcccctgccttctttgccctccttccgtgtgacttgtcatttcatgggctgccaaggactcactgatgtgcctgggaagacttgctggaagcagggggtgccctgagtgggtaggcctcagatgggggttcactggttttgggtccttccagtatggggctgagactgaaaagttgcagaagcagctggcttcggagaaggaaatccag

SEQ ID NO: 86435 - DNA, 1050 bp, Homo sapiens
aggaggatgaggatgaagaagaggaggaggaagaaaaggaggcagaagaggaacaggaagaagaagaagcagaggaagacctgcagtgtgctcatccctgtgatgcccctaagctgtgagttcctgcctttgcacctgcaagtcctttctctgagcctcaatttcctcatttgttaagagggacacaggtgatgtgcttgctggcagggttgctggaactaattgagaacactgcccttagccctggtgggctgggaactgggaagccccactccctgcaccctgactcccattcctccctcccctaggatttcgcaggaggcattgctgcaccagcaccactgcccacagctggaagccttgcaggagaagctgaggctgctggaggaggagaatcatcagctgagagaagaggtgagaatgggggaggagggcgtccctgctagcagggggtgttgacttccctgtcccttcctctttgtctccctccaggcctctcaactcgacactcttgaggatgaggaacagatgctcattctggagtgtgtggagcagttttgtacgtaatgttgtcactcggggtggggggttgtcccaaggagcagagaaaagaactcaagatgtggagtatggagatccaagttcaagtcccagatctggcactcctagctgtgtgaacttggatacattccttgacctctctgaacctttgtctttagaatggggattaattttctcagccccactgatctctccagggtttatgaagattaagagtgtcaacagctgaggaagtactttgtgcaaactataaagagctatacagaaattgtgggtctcaggccaggcacggtggctcatgcctgtaatcccaacagtttgggaggctgaggccggcggatcacctgaggtcaggagtttgagaccagcctaaccaacttagagaaaccctatctctactaaaaatacaaaaattagccagatgcagtggcacaagcctgtagtcccagctccttgggaggctgaggtgggagaattgcttgaacctgg

SEQ ID NO: 86436 - DNA, 1096 bp, Homo sapiens
cggctttgggcagaaccattctccggagatggagagggcagaaaaaatctttcgctcccatcccaactcggagccatccggaacttgcactcgcccttcttgccctgcttttcttactgtgctctgttccgtcaccactagctcccctcccgcgcggctctgagtcccgcttgccactagttgcttctcggcagcccccacccctacgcgtggtccggcccggcggctggcgcaggttataaaggtcccgccgcagcagcggacggcagactcgagatgcgcccgaagaggttgggccggtgctgcgcggggagccggctcggacccggggacccagcagcactcacctgtgcaccttcgccctcagccagtcccgctccggagccctctgcgcagccgcaggcacggggcactggacagagagtaggatcccgagccacctctggatcccagttcctctcggaagcccgcaccggagctcgcccggcctcggaggctggagccaaggcaggagcccggcgcccgtccgcattctcggccatccaaggggatgtccggtctatgcccgacaattcggacgcgccgtggacccgcttcgtattccaagggccgtttggttcccgggccactggccgggggactggaaaggcagcgggcatctggaagacgccagccgcctacgttggccggcgacccggggtgtccggccctgagcgcgccgcctttattcgggagctggaggaaggtaaatcgggcccccggggtcctggaccgggtggggactggggcaactccagggaggaagtggccccatcgggtccaggcaccccgccccctctagcactcagtgtcacccgtccaccacccccgcgatgtcactgcggtgtctgtctggtcgccccttctccatctcctcctctgctcttgtcccctggtttgtgcccgtgagtcaggttctggggcctgcacgctcgcccacccacctccacgcgcctcttgctgcggcagatctgcaccccttcagcgcccctctcctgggtctaccgcagtgccaggagaggggcggggggctgcgggagggcgctgtcccgcgcgc

SEQ ID NO: 86437 - DNA, 1057 bp, Homo sapiens
gcaatcttggctcaccgcaacctccacctcccgggttcaagagatcctcctgcttcagcctcctgagtagctgggattacaggcatgcaccaccttgcccagctaattttgtatcgttagtagagacaggttttcttcatgttgatcagactggtcccaaactcccaacctcaggttatctgcctgcctcggcctgccaaagtgctgggattgcaggtgtgagccaccgtgcccggccaggccagttcatttcaatgcagtgagttggccacttcagttttcatggaagagctagctgagccttgcaaccttgagaaagtcagttcgcttctctgaacgtcagtttcctcacatgtaaaatgaggatgatcccttctccatgtacctaatgtgaggatgaaatgagaaagcacagggattccaggtaggcagaagggaggaaagggcaatgggctatatcccggaaaggttatgcctttttgattttcagaagggacatctaccctggggacttatctggaccttggcctgagctatgtcgcatgcccatcctttgctgcaaagacagctgggaaatggagactattttagctgcacacagtgcccccttgataagaatcagggttttttgtttgtttgttttatttttaagagacagggtcttgctctgttgcccaggctggagtgcagtggcatgatcacagctcactgcagcctcgaactcctgggttcaggtgatcctcctgcgtcagcctcatgcgtaattgggattacagactacaggtacacaccacaatgcctggctagtttttttttttttttgtaaatgatttgtaaagatggagtctggctatgttggccaggctggccttgaactcatggtctctagcaatccttccaccttggcctcctaaggttctgggattacaggtgtgagccactgcacctggcataaaactcagggttctgacagtaggaaagaaaaagatggataaggcattgggtacatcaccacagggggctgccacagctaggaacaagtctccccagactaacc

SEQ ID NO: 86438 - DNA, 1050 bp, Homo sapiens
catggctttctaagcttcaaagcaaggaaagagatcacaaatggaaaaaaaaaacaaaaaacaaaaaaacttgagattcaaccatataaacatgaaaaccatctgtatttcagaaagaacctaaaaaagcatttttaaaaaatcagcaaactgggagaatatgtgcaagtaccataacagacaagaagagtctaacatctttcacatcagtgagctcattaacactagattccaatggttagatgaggcagagtcacaggtaatttcaaggtagctcatgaacaatgctcagcccagtttaaagcagtaacacttactccccagtgacggcccattttccactatggaattgctacagggtggaggtgggcagtgctgtggggtgtgttgtccggcctgcctcacccctttccacctctcccctgcttcccacgtcccctctccccagctcctgtactcgtcggtggagaacatccagcgcgtggctgccggggtgctgtgtgagctggcccaggacaaggaggcggccgacgccattgatgcagagggggcctcggccccactcatggagttgctgcactcccgcaacgagggcactggtgagctgggggagggcaggaggctgggtcccactcccccagccacgatggaggctggccgacgtttaacctggcttttcctttcctctctgctcagccacctacgctgctgccgtcctgttccgcatctccgaggacaagaacccagactaccggaagcgcgtgtccgtggagctcaccaactccctcttcaagcatgacccggctgcctgggaggctgtgagtatcctaggttggaccacagtagttggttgtgcaagttgggcactgcccatgggcaacacttttgggggtctcctactactgtcaacttcatagatttttattttgtaattggatcatttataacaattcctagcagatggaagtagtgggttgaatcatatatccacaaaatgccaatttttattttgcccaaatgagtatacagtgtttgaggtgggggtgcctt

SEQ ID NO: 86439 - DNA, 1056 bp, Homo sapiens
ttgggcaaaaataacctgctttccctcttctctgtgccaaggtggaggaggggagggcattgtaattatgttggctacatgattagtttagctaatctggtttgtggctgtgatgaaaagataatactgaggaagtactgctaggaggtgcttggtgaaaactggccactgactggactgggggatgcgggggaggaggagaaggtaggacccagttagtcatttcttgctagatcaagccccagcttgggtgacttgagccctcccacccccactccacccctcccttgcaccctggctccaccccattccctctggagcctctgtttgggctgccagggccgaggctttgagaatgcagtgcataggaacgaaaaaggtcgggctagggctgccaacctttttcccatcctggagccaccttagagtgagatgggtcaattgactagtctacagaaggactgtttatttggagagatgggacagtggggcagttctgagcacagggctttgggcttgaactgagctgggtttgagacccagctctgtctctcattacctgagcctcagtgacctctttggcaaaatgggaatactaatacctatctacccagtaagtacttgacaaacggtaactcaagatcaaggtaagactttacagaaaccaagcactttcttttttttttttttttttttttttgagatggagtctcgctctgtcacccaggctcactgcaacctccgcctcctgggttcaagtgattctcctgcctcagcctcctgagtagccaggattacaggcgtgtgccaccacccccggctgatttttgtatttttagtagagacagggtttcaccatgttgcgcaggctggtcttgatctcctgacctcgtgattcgcccgccccggcctcccaaagtgctgggattacaggcgtgagccacctcacctggcccaaaccaagcactttcattaactatttttacttaatccttatggctggccaggctggatggctcagacctgcaatcccagcacgttaggaggcccagaagg

SEQ ID NO: 86440 - DNA, 1050 bp, Homo sapiens
gcaagggctcagcctggaactgatgcctggctttggagggattagtgcgggctacgcaggcacaggggacagcagtagttcctggcagggaaacagtatgagcaaatattatgcatggactagcaatattcttgccagggtctttatgcttaaaaggtggggctgtgcaggggcgatgtttatgctgacaccaaattctgctggtggtgccctatgcagccactcagggaggggcagtttgggaaaaatcctcaggactgtctcattagatcttgagactggggagggggaggggctttggggaccgagagatgggatgggaagtcccattggccaggaagggagcccatatgggtttgggcgtactgtgacccggtttctcccacaaccgtggcgctactctagatggagctggaggagacagaaccgcccctggagcctgaggatgccctatctgacgccgagtttgagggggagggtgactacgaggagggcatgtatgctgactggtggcaggagccggatgccaagggtgacgaggccgaggctggtcagtgacacgagtccttggggggtggggatgcagcctgggatggaggttggggacagatgcattcacccgctgggctccggagcccagggtgtgtgtgggtgctggggcccatcctccaggggcctccagcctgttggcaacccctgtcccgcttgggggtggtggtgcagcatctcccctggagctgggaccagctgagacctgtccgggggagcctcaccccacctcccatcaggacagcacctggacacccattgggagtgggtgggggagcaaccccagtgctttctcctttccttttcagagccagagcctgaactcgcatgagaaggggacaccccacaccgctcaagcttgggaagcctggtgccgatggccccaccctcaccagcctgggcagcagcaagaactatttattaaaaacttaagatgggccaggtgcggtggctcacacctgtaatcccagcattttgggaggccaaggtgggtggatcact

SEQ ID NO: 86441 - DNA, 1030 bp, Homo sapiens
tgcctcacctgcaaaatggcagtgatactgccacctcaccagcagtgtccagacgagggaggtatgaaggtacacatccactcctacctgctcccctccctaccttcattaccctcactgctgacctttgtccctctttcccaggaacaccctaggtaaccaatggaggaaatctgttggagttgagggccaggctggcaaatatggggcacatggtgccactcctgccttccttgtcagtggcagacattgctaatcgattgagggactctttgtcaccaaactctcagaatccttaacccagtgttccaagcagccacgatgatctgatgagcttgtgagctgatacctattctctgatccttgagctagaagagggccagtgggcccagatcctaggagccctggcttcttgccatctggcaacagggtatggctcaccccccaccccgtccttccctccttccaggaggccatgctctaccacaaccagaccgccgagctgcgggagctgctggagttcacccacatgtacctgcagtcagatgatgaggtgagtgcctcctgctttccaggattgggctgtgatggggacaccttggaccttttcctggggccaccagtgtgccagaattcagccccagcccctggtggtcagctgtcgtgaagaagagaggtttgcctgttccttgtctagactgtccgttccttccccagccttagtattctcatgtcctccttttgtacatgtctcaatcctgttcctcccaggcccagctcacatggtgcctcctccaggaagcccttgctgcatgccctggctctttgttctgggctagcagtgcccactctgacctgtgtgcctccctggccacctgtggcctggacctgggtgattgcagccctcgtccatctcagccctgggccccttctccagccagtatccaggagaaccgcactgcaggacacagggccacattattccctgttctcccacatcctgcacagagcctgggctcagaaactgagt

SEQ ID NO: 86442 - DNA, 1105 bp, Homo sapiens
ccggccctgtccccttccgtccgcggggcagccagctcagctccggagagccggcggcgcggcgggcatggctcgggtggcgtgggggctgctgtggttgctgctgggcagcgccggggcgcagtacgagaagtacagcttccggggcttcccgcccgaggacctgatgccgctggccgcggcgtacgggcacgctctggagcagtacgagggagagagctggcgcgagagcgcgcgctacctggaggcggcgctgcggctgcaccggctcctgcgcgacagcgaggccttctgccacgccaactgcagcggccccgcgcccgcggccaagcccgatcccgacggcggccgcgcagacgagtgggcctgcgagctgcggctcttcggccgcgtcctggagcgagccgcctgcctgcggcgctgcaagcggacgctgcccgccttccaggtgccctacccgccgcggcagctgctgcgtgacttccagagccgcctgccctaccagtacctgcactacgcgctgttcaaggtgggagcccgcccccacccggggacctgtctcgggctgggcgtcgtggctccccacagatcggtcgaaggagcgttatcttcacccaaggcacgaagcccgccgtgcgctcggggccgcgagctccggtcttgctgacccgctcccccaccccctaccccccgaccaggctaaccggctggagaaggcggtggcggcggcctacaccttcctccagaggaacccgaagcacgagctgaccgccaagtatctcaactactatcaggggatgctggacgtcgccgacgagtccctcacggacctagaggcccagccctacgaggtggggtggagggtcaggaggaggcttgtagaggagggctagtagaggaggggagatgttgggggcgccctgactccccctgccacgccccttccaggccgtgttcctccgggctgtgaagctctacaacagcggggatttccgcagcagcacggaggacatggagcgggccttgtcagagtacctggcagtctttgcccggtgcctggccggctgtgaaggggcccatgagcaggtggacttcaaggacttct

SEQ ID NO: 86443 - DNA, 1999 bp, Homo sapiens
ctaatttttatttttgaattcacatgtgtaatttcacatcaataacttgtgtttctgaaatatcctaactaacttgttaataaggaaagaaaccagatttgcttaaatctgttcaaggctgacattctgaaattctaaactggaaataacttcccagagtatttggaaaggttctaagtacaaggatcaggcctaaaatagctccttgggaaagaaatttcctttttgatgagaaaacttaaaatattgtttttggtaatgtaagcagttaaaaacatgactttagaaagacagcttaatgcgtattcaagcaaacctttgttttgttgcttttgcttttgtttgtagaagagagaggaagttattataccaaaaagtaatagtatatgtaactttgagtgaggctacttatatcttagaatgggtatccttgaactatatctaccccaccatggcttaaaaaaatcagtggtatatattgagaatgtcagtcatgagcttagtgtttaagtaacacatcccacttacagttgtttgcatgattagtcttgtgtatcatgatgttcaactttgcttttgctgtgccagttcaaaaatatcttttttgctaaaaactcttaaaattcatgacataagttttgttttgatcacccggttttatatagtatttctgggaccaaaaaatttaaatatacctttttaatataaaacagaagtttgaagctggaaagatagtgtttatggaagatttgtgtgcttttgtgttttttaaacccgtcaggctgctggtaaggcagtttctagggctcacttttcctccttacctcttgactagtgtagcatgtggtatgtttaaaatatttcattttctgctttgtaattctaaagtcaacactatactgtatgtagacaggagagctgatttgtatattttagttatttggtctaatcaagcataactaaagggacttcttttttgatacttttctcaaattaagtttaaatatagtatacgggccacatttcatgtctttgaaagtgttgtacattactgtaaaccaagtactctgtctacaccagagggtgctttaactgcaaaatatttgagaaacaattcagtctctcaaacattttggcacagttcatcactccagtttgttactttcttgagaatagtccattttttgtttttgttattgtaccgtatgttctggtcattggaaacagaacagctcatagttgggtgatgtaatataataacagtaatataacctagtagtcattttgcttcaagtaatttaattagatagcaaaatcactgcggtttgtttattacacttgtagggctttttatcttactcagtgaccatcactacgaatgtcttacattgaagcacagactgcagagcacttgttaacttagtcctcctgcataatgcactcgtgaaaagtagtgcttgctaggtgtttgaagattttatgatccgtgtgcttgggctcgttgagttatttgtaaaataaacatttagtttgagttgatgcagtaagttttttggactagtagtatccaggtccctactctactgaaaatataatcttcactatctccccttaactcagaggagatgtagcatttagaacaccttgagacatgacattgtaaaatagcttgttttatgttcctgaagctatcttgttctctgttaaagctactaattgtctcagtgtaagttttaaataaacatatttctttaaagctggtttgtactgtgtgacttttttttcttatttatgcactgtcggatataattgctttcttccatccctcctactccctcattcatccagccattggctctcttaagttgaacattttccagtactcttcaaagtttaaacactgcatttttttaaaaaaagaattaattcttattgcttagactttttattagctaaatgaagaggctcatacaggtagggtacttgtcgaagcagaata

SEQ ID NO: 86444 - DNA, 1203 bp, Homo sapiens
caaacttttatcagacagcatcatgttgtcccaagagttattgtttagaaaacgaagaggcagtaagaaaaattgccagccaagtgtctgatgagatccttgaaagcttgcctccagaagtcctaagcatcgaaggagcagccatttgctattacaaagatgatgtcttcattataggaggctggaaaaacagtgatgatattgataaacagtatcggaaagaagcctaccgatattgtgcggagaggaagaggtggatgcttcttcctcctatgccacaacctcgttgtagagccactgcttgtcacgtgaggatcccataccggtacttgcatggcacacagagataccctatgcctcaaaacctgatgtggcagaaggaccgcatcagacagatgcaagagatacatcgtcacgccctgaacatgaggcgagtgccaagctctcagattgaatgctaggttctctcaagcgtgccgattaaaactgttacacccgtttcgtgaagctgaagatacccaggctgttatttaaaaaagtatgtcgataacttattttctacatgaactgattattaccccatataaaggaaatagagttaaaaactaaagaatgggagactcagttcaatacatggtcattttgttagcttgcaatttttgtctttggtttgtttgtttgtgctagctaaataagatcttattaaggacaagtggaaaaatcaggtgtagttgcttagctgttttcctgccaacgagttatgactcctttgtcttgaggacttacgttttgaacatgctttaagcaccaattttatttgcacatttactttgatattctttttcattttttattaaatgattggttttggcaagatctgacttctgcattgagccctcatctgcaggaggcatgtgcaatagtgagactgaaatttgaatgaaaacactcaatatttcagcaagataatttgagaatgtttgcattgatattttcttatgtttatctagaaatgccagtttccttcctagaagatgtgactgatgagaaattttttactggctcatgcattttttgaatatttttcattagcagctgtttatagactttaagccttcaatctgaggtgacggtagttggcaaaagtatagatctttagctaattgactaaatacagagcaagttacatgtgtgaactttgtt

SEQ ID NO: 86445 - DNA, 1101 bp, Homo sapiens
cccagcactttgggaggccaaggcgggcggatcactttgaggtcaggagtttgagaccagcctggccaatatggtgaaaccctgtctctactaaaaatacaaaaattagctggacatggtggtatgccccaactactcaggaagctgaggcaggagaatcgctggaacccaggaggtagaggttgcagtgagccgagatcacgccactgcactccaacctgggtggcagagtgagaccctgtctcaaaaaaaagaaaaaagtaaccacataaaatatgcacatttgaaaaattaatcttttctctttttcttgattttaggttcctactcattcgtttaaaagaattttgtggagaatttctcaagaaaaaacttcatctctcaaattgtgtggcaattcatagcttagcacacatgtacaccctgagccaacttgctctgaaggctgctgatatgatacggagaaatttccacaaagtgattcaggatgaagaattttatacgttacctttccatctcattagagactggctttcagatttggaaattacagttgattctgaagaggttctctttgaaaccgttttgaaatgggttcagagaaatgctgaagagagagagagatactttgaagaactttttaaattgctcaggttgtcccagatgaaacctacctaccttactcgacatgtcaaaccagagaggctggtagccaataatgaagtttgtgtcaagttggtcgctgacgcagtggagagacatgctctgagagctgagaatatacaatctggcacatgccagcaccccacttctcatgtgtcactattgcctcgttatgggcaaaacatggatgtgatcatggttattggaggtgtgtcagaaggaggggactatttaagtgaatgtgtgggatactttgttgatgaggacagatgggtaaatctgccacatattcataatcacctcgatggacatgctgttgcagtaacagaatcctacgtgtatgttgctggatcaatggagccagggtttgctaaaactgtagaaaggtataacccaaatttgaatacatgggaacatgtttgtagtctgatgacaaga

SEQ ID NO: 86446 - DNA, 1031 bp, Homo sapiens
cgccccgcgcgcactatttaatcccagaatccctctgtgtcgtaccaacagccgcatcgttccgaggctgtggaggccgggcgcagcggcgtcaagatggcggctgcggcagtggcggcggcggcggcggcggccgcggctgcatctcttcaggtactggagatggagagcatggagacggccgccgccggctcggcaggactggccgccgaggtccgaggcagcggcacggtggacttcgggcctgggccggggatctctgcaatggaggcgagcgggggcgatccgggcccagaagccgaggatttcgagtgcagctctcactgctcagagctgtcctggcggcagaacgagcagcggcgccagggcctcttctgcgacattaccctgtgcttcggcggggctggaggccgcgagttccgggcccaccgctcggtactggctgccgccaccgagtacttcacgcccctgctctcgggccagttttccgagtcccgctcgggacgggtggagatgcgcaagtggagctccgagccggggcccgaacccgacacagtggaagccgtaatcgagtacatgtacaccgggcgcatccgcgtcagcacgggcagcgtgcacgaggtgctggagttggccgacaggtaggcgagggaggcgggagcgcggagggcggcgggcgcggagagggggagatgctcgctggcggaggggagggcagtgcctgccacggcagctcgcgagtcctgagtgaatgcattggtttcacactcgctgagcgcctgcttgggggcagccaccgcggtgggcgaggaggatgcaccatcaggtccggcgagggcgccccgcgcccaaggagctcagatactaggtgatgggacaaaagtgatgaaaaggaaagtcagtatgtggtaactgttgtgctgacgttcaaaaggaatgaaaggctagggattgaataaagatctttctgaagaggtgaagtttagatcgacctctgaatgtcaaaaaataactgaccgtgcaaagatggg

SEQ ID NO: 86447 - DNA, 1082 bp, Homo sapiens
gcctcccaaagtgctgggattacaggcatgagccaccacgcctgaccgtagatgagcatttttaaaaccatatatactgaaactattagtacagttcaggccaggccaggcacagtggctcacgcctgtaacagcactttgggaggccaaggaggatggattgcttgagtccatgagttccagaagagcctgggaaatacagcagaaccttatctccacaaaaaatacaaaagttagcctggagtggtggcatgctcctgtagtcccagctacttgggaggctggagtgggaggactgcttgagcccaggagatggaggctgcagtgagctgtgatggtgccactgtactccagccctggggcgacagagtgataccctgtctggaaaaaagtacagttacaaaggaatacagatcaaaggatatggatgccaggagccagcagtatgccttcattgttactatatagtttatttaaaccagactatgataatacagagaagagactgaggtggcagctgcccagaatctttgtggattacagatgcaaagtagttaggagtccttggacccacacttcagttacagacagacaaatcagctgcataaatacagagaacataagacacaagacatttcacagctttctgcatttccattttaaatgtatgtatgttacaactttacatattaagttactactccacatattttgtgacaatggctaaggatgcaatggccccatccccctgacataaacagactctggtctgcaacacagaacatttcagtgggataccaaacaagcccttaacacgtaacatacaaaaagatctttaaaaatcagattaatacaatgttcttcatgttatataaggaagaagaaagggaagtaaaaaaaaaaaaagagagacattggggtgctttaaatgtatagtatcttgaggccataaatgtttcattcccttcctccaaaggagaaaaaaatgtttaactaatggaaaaagaaagcaacatcctaacgccctacaatgaggaagaccccatcctgacagtacttagatgcttccatataataaatac

SEQ ID NO: 86448 - DNA, 1932 bp, Homo sapiens
ttagaaatgattgctagcccaggaaaatttttttttttttttttgagactgagtcttgctctgtcaccaggctggagtgcagtggcgcggtctcagctcactgcaacctctgcctcccgggttcaagcgattctcctgcctcagcctcccaagcagctgggactacaggcgcatgccaccacgcctggctaattttttgtatttttagtagagacggggtttcaccatgttagccaggatggtctcgatctcccaacctcgtgatctgcccacctcggcctcccaaagtgctgggattacaggcgtgaaccaccgtgcccggcctatttttattatttattttattttattttttccctttaaaattttgttttaatttaaaggaaaatagaatcagatccagcagctcccttgtacaaagtccgcctcatctacctatacagtggatttggactaaacttcccactgctttgtgtctactttttttgtgtgttagaaagatttcccttccttagcctcttcctctcaccaggcttatgaagctctaataaaaaagatgtgtttgcttcattttaggacactatcttgatcagaagaggctgaagcaggggctgtatcgtcatccgtgggatgatatttcatatgttcttccggaacacatgagcatgtaacagagccaggaaccctactgcagtaaactgaagacaagatctcttcccccaagaaaaagtgtacagacagctggcagtggagcctgctttatttagcaggggcctggaatgtaaacagccactggggtacaggcaccgaagaccaacatccacaggctaacaccccttcagtccacacaaagaagcttcatattttttttataagcatagaaataaaaaccaagccaatatttgtgactttgctctgctacctgctgtatttattatatggaagcatctaagtactgtcaggatggggtcttcctcattgtagggcgttaggatgttgctttctttttccattagttaaacatttttttctcctttggaggaagggaatgaaacatttatggcctcaagatactatacatttaaagcaccccaatgtctctctttttttttttttacttccctttcttcttccttatataacatgaagaacattgtattaatctgatttttaaagatctttttgtatgttacgtgttaagggcttgtttggtatcccactgaaatgttctgtgttgcagaccagagtctgtttatgtcagggggatggggccattgcatccttagccattgtcacaaaatatgtggagtagtaacttaatatgtaaagttgtaacatacatacatttaaaatggaaatgcagaaagctgtgaaatgtcttgtgtcttatgttctctgtatttatgcagctgatttgtctgtctgtaactgaagtgtgggtccaaggactcctaactactttgcatctgtaatccacaaagattctgggcagctgccacctcagtctcttctctgtattatcatagtctggtttaaataaactatatagtaacaatgaaggcatactgctggctcctggcatccatatcctttgatctgtattcctttgtaactgtacttttttccagacagggtatcactctgtcgccccagggctggagtacagtggcaccatcacagctcactgcagcctccatctcctgggctcaagcagtcctcccactccagcctcccaagtagctgggactacaggagcatgccaccactccaggctaacttttgtattttttgtggagataaggttctgctgtatttcccaggctcttctggaactcatggactcaagcaatccatcctccttggcctcccaaagtgctgttacaggcgtgagccactgtgcctggcctggcctgaactgtactaatagtttca

SEQ ID NO: 86449 - DNA, 1149 bp, Homo sapiens
ctgtgttgctggagtgcagtggcttttcacaggtgcagttataacacacttcagcagccccgaactcctaagctcaagcaatctccctgcctcagcctcctgagtagctgggattccagaagtgttctccacacctggcttatttttacttcttactgtattaaaaaaatggagctagtatttatttccaaagagctgagattacagacctgagccactgtgccgggccaagtatacgtatctgaacctgaattagtgagccatgctttacaaataaggctctcttttgttctgtatgtctcttgagagagagaggagactttcctaagcaggaaacccagtgggcaagtgtgatttctcttggtcattctctccccagcctggccagaaggggctgggcagtaatgcaggggctttgtgattctttgtggtgaatctggaagtcaccttcctccctgattgtggtttctgcccccacaggttggaggcatcaagcctgggtgctttaagattggcaacacaggtgggatgctggacaacatcctggcctccaaactgtaccgcccaggcagcgtggcctatgtctcacgttccggaggcatgtccaacgagctcaacaatatcatctctcggaccacggatggcgtctatgagggcgtggccattggtggggacaggtaatcagctgggaagccaaggaggggcttcctgctttgagagcagtgggctaggagacgatgctgtgtcctgcaggctgcttgctgcccctgagttccaggcccgcaggaatgctgctgaagtctaaacaatggggcatcactgctcttgtctcaggactgacagagcatgaaatcggaaaacacagaacagggcaacaatgtgcaggaggggcgactgggctttggggataattctgtttgttgtgattggccatagggaggcagcagagtacagtggttaggagggccagttctgaaattggactaaagaggttcaaatcccattttccctctttagtagggggtgggtggcaggggccatcctggtccggttacttaacctccctagacctccatcatttttacacatcaaatgggtaaataatacccccacctcatggggctactggaggaataaatgaattgtaat

SEQ ID NO: 86450 - DNA, 1021 bp, Homo sapiens
taattttgtatttttaggagagatgggttttctccatgttggtcaggctggtctcaaactcccaatctcaaatgatctgcccaccttggccttgcagattgctgggattatagatgtgagccaccgcgcacagccaggggtttttgtttggttttaaagagacacacatactgctctgtagcccaggctggagtgcagtgatgcaatcatgcaactcactgtagcctcaacctcctgggttcaattgatcctcctaccgggtctccctgtgttgcccaggctggccttgaactcttgggctcaagggatccacctgccttagactcccaaagtgctgggattacaggcatgagccactctacctggcccctacaatactatcttgaccctttacagaagtttgctggccctggtttagagccaaagagaagtgattcctggatctgtcccatgcccctcccaccccgcctctgggctgagtgtagaagcagctcatttctcttaaacgctgaccctgtcctgtggggatggtgacaagactcggagggtcccatgaagaaaagccttagatagctgctttatgagcaggcacaggaacaggtagacaacaggagggtgtgagcttttgggtgagagtgaacgtagctgctatgactgtagcagggcttccgaaatacctgcctctcttgggtggatcactgtggtgttagctagtggagatcagtttcggctatccaccacttgtgttttcaggagatggttagagtgattacgagcagaggcctgtgggaagaatgagatgcatattggttttgttttttcgttttgttttgtttttgtttttgagatggagtctcgctctgtcacccaggctggagtgcagtggtgccgtctcagctcactgcaacctccacctcccgggctcaagcagttctcctgcctcagcctccctagtagctgggattataggcgcgcaccaccatacccagctaatttttgtatttttagtagagacggggtt

SEQ ID NO: 86451 - DNA, 1082 bp, Homo sapiens
cagagtttcactctttttgcccaggctggagtgcaatggtgcaatctcggctcaccgcaacctccgcctcccgggttcaagtgattcttctgcctcagcctcccaagtagctgggattacaggcgcctgccaccatgcccggctaattttttttttgtatttttagtagagacggagtttcaccatgttggccagggtggtctcgatctctcgacctcgtgatccgcccgcctcggcctcccaaagtgctgggattacaggcgtgagccaccgcgcccggcaaattttttttttttttttcaatcggtcagcttcccaagccagaggaggctcagaaagactccaacatttcattataaaaatattacatatttattatagaacagtttcaaaatactgataaatactgttttgttgaaaataaatacttgaggtcccatttcagaaaaacatgactgctgctatgacggtatgtccttatctacccccttttctagatttgagcaaagggaataatactgtatgccactcatataatctgctttcttcagttgctctttccacatcagtaagcactaactggcagcatcacttttgcttttgcaaatcttgtgatgggcaatctcggattaacatttgcctatatccttaattattccctaagcataaatttctagaagttgaactactgcatcagaaggtgcaggtttgaggctgggtgcggtgactcacatctggaatcccaggactttgggaggccaaggtgggtggatcatttgaggtcaggagttcgagaccagcctggccaccgcctctactaaaaataaaaaaaatagctgggtatggtggcagacacctgtagtgccagctacttgggaggctgaggcaagagaatcacttgaatccgggaggtggaagttgcagtgagccaaggtcgtgctattgtactccagcctgggcgacgagagactccatctcaaaaaaaataaaattaggatattgattattttgttgaaaattatcatctgatcccagactggcttatttcagtttatgactggagaatataaaattgtcttgat

SEQ ID NO: 86452 - DNA, 2038 bp, Homo sapiens
gtcctgagcaggaaagagccacctggtagaagggagaaggacaggaaaaacaggagagcaggttgagggcactggccctgtgtaactagcttgctgctcctgccttgtgcagagccctggccagaaccacagttagcgataaggctgctgtgtcctcagccccggctgcacaaacctcttctttggacctacactgacctagaattcatgctgattcaaaccctgactggagctggttttatgtccagatttacagggtaataagcattgttggaacataagtcctgaacccaccaaaattgggcgagctaagcatttttttccaatgactttaaaaataatttgttaagacctcatttgcatataagctgatgacacaccttgcctgggaaatgaagcaggtcctataggaattatcctgggcatctttgactgtggggcccttctttctccattctttgcagagctacttaccagctagcaggccctcttagcttgatttgctctttctgccaccttcttccagaaaaatcgaggcacctcctccccaagttctcagaattctgtcctcttgacattcctttacggttgtgatgaggcatcaccctgtggacatggggcgtggaggggtctgtcaggcagccctggcccctgcaggtctcctgggggtatgtgttctgggtgcactctctgtgtctttgcccaccaggaaagagcaccaccctcttcagccgccacaccaaggccattgtgtggggcatgcagacccgggccgtgcaaggcatgctggactttgactatgtctgctcccgagacgagccctcagtggctgccatggtctaccctttcacgtgagttaccccatggcgggaaatatctccttcctctgctaagacaaagcttggggctgggcacagtggctcatgcctgtaatcctagcgctttgggaggtcgaggtgggagaactgcttgagcccaggagtttgagaccagccctgggcaacatagggagacccccatctctacagataatttaaaaattagccggatatggtggtgtgcacctgtagtcccagctacttgggagggtgaggcaggaggattgcctgagccttggaggttgaggctgcagtgaactctaattatgccactgcactccagcccgggtgacagagcaagaacctgtctcaaaagaaaaaaaaaaggcaaggcttgaggagtcagtgagctcattccctttgctggggaaggctttgcccatcctagagacagaggcagtcagtattcctgggggatctttgtcccttagatgaaaattctttgagggcacagaccatgccttttctatcttctaggtgaaattcctcccctcagcttccccttccccagtcctgacaggttgaggatatcctaattcttcttttactttctcacagtggggaccacaagcagaagttttactgggggcacaaagagatcctgatccctgtcttcaagaacatggctgatgccatgaggaagcatccggaggtagatgtgctcatcaactttgcctctctccgctctgcctatgacagcaccatggagaccatgaactatgcccaggtagatcactgggctctggagggtggggggtggggaccatgaactatgcgcaggtagatcactgggctctaggggacagagggtggggaagcaggaatggctcctggttgatgtcccgtcactgctgcctgggacaaagggctggggatttgggagtagccagtggtttaggtggaaatggttggagacacatgatcttcagaagtcaggatagtgacttagggcaggtcagtctgggcagaggctgcttatctgggcttacaaagaggctgctcaggcctgggacagtgacttatgcctgtaatcctaggactttggaaggcagaggcaggaagattgcttgaagccaagagttcaagaccagcctaagcaataaagcgagacccattctctacaaaaagcttaaaaattagtcaagccaggcatggtgact

SEQ ID NO: 86453 - DNA, 2632 bp, Homo sapiens
ctaacagacattccctcctttgaatccccagcaagaaaagcccccgcctgtcagcccatctgtatttcaactaatttttctctccgtgtagatgtgattcctgccggccagcccttgcagccagctctacataagtggtgttagttacccctgggctggtatacctgtgcagcctcttcctgggacacactttgctatggcattttggaaaatagtgacactgtcccaaatcagcatccttgtccatggcacgggtcaaccccatgctggccaatcatctcatagtgtttcatggagacaaaaagggattggcattaagagggtgggactgcgccagctagagagcccagagttcaagtcatccagctgtccctgcagagggcctgggggaggcgctggtgttgagcacatctgcccagcctttgtcctcctcctgccccctctctgcccgtttggtctttgctctttcttgcttccattctgctcatcggtgctttcacctcttctgctggccttactccgttgtccattgcagaacaggagagggatgatgagggctttagccctgaaaggcttgtccatgggacccttccctgttcccaccctctccctccaaagcctccagccatcagtgggtcactcagttgccttggtcattttctttgacagattcagtcccaagtccaagatccctgcaaggtaggatgcccccaccctgcccccactccgcgtgtggctttgttagcgggtgacagttttactgtgtgctctgtttccccctcccctggtgggttgcagtgtcgtctggtctattttctgtccctgccttgatgtggcctgaccccaagtcctaagtcttcgctcttcctcccctcctatccgtgctcagtacgcgccccactcagtcctctcctcactgtgtggctgtttctggctccaagcttgggaaggggtagagattttggaaggagcaagagccagacccacagccctggagagtgtagtggtgtcaaggagagagtgtcgcctgggaaggagggagccatccaactaaatggggagtggcagagagtcgtgggcgtctgtcactgctggggtgcagaaggggagccacaagtcacccctgcttctcatttacatctcctgatgtcattttcccacctttcctgcctcggcttcaccactgccagcttcatcctcaagctccagggaccagtttatctttttctggggttgtggtggaggaacaaaagaggtgaagaaggaggtagacggaagcgcagaagggtgtgcagcggatctagtgactgggtaattggaaggggtatgagctttgtctggtgtatgaggtcacattttacagtggatacttctgtgcatgcgcattcacccaccagcctagctgagtagattaattggttcatggcatcagagcgtccatttaactttgacattcacagccgtggaggcggggaagtctttgttgtccccttgctaaggggaggggaaggagtaattggcagggtcgataaccagctggaaaggcctggaatgcagcactgtggccacctggctttaatcctgatgtttttgcctctggaaaaagttaagagcagagtgagcccagtgtggaaagaacagggaccagccctggttctccaggagctctctgtgctctgaaggggaggagggttatgaggaggggggttatccttgttactttctggagtgagagaaataaaaggagggtgtgtcagggagaacagattatggctgagcgagccctcccctcagcgaggccagaggaggcctggtgtagggggcatagcccctggcacagaggttctctctggagcctctctgctgctggtgggctgaggatacacccttcagctttggtttctctgtgcttgaggaagggccactttacctccacccttcctgctggagatgctggtaggttggtagattccaggctttgtcttgatttctgtagctggcagggtagatagatcagaggcatgtgcacgtgcgtcacctggcgggggtgacatgatgcaggcttcccctgaggatggcgggtcatgaactcacacttatattctccctcctcactttcacagttgagctgcattttaagtgattgtgtaatcctggctctgatgctggatgacctcggacctcaatcatttggcatctctgggcttcagtttcctaggactgggaagtgggagaactggattaggtggctccccttgttctgtgatctcatgtctcagcagaacccggggggtctaggtgacagtaaatcccaggtatttgcaacatcaggaaccttctgtcatgagaagctgtaaggctgtgatggaagaggcaggcctgtacagggatttaatgagaccatgaacttggttagccaagcctgctctagtacagtaggttaattaatacgagatgccactgggctagatgcatcattcttcctaggggagctcagaacctccctgagggctgctttcctcctcttggacttgcagggacccagaggggaaagtcaactgcctgaagcgtggtaaaagtcctttccctttaggctaaggactgcacttttttctttttttttttaaatata

SEQ ID NO: 86454 - DNA, 1047 bp, Homo sapiens
agggccagagccctgggggaatgggctcagggtgtttaggaacagagaccaagcactggtggatgcatgcgatgagggctaaggaaagctggagagctggggtccagactgcgaacaggaggaatatgggctctgataatttggttacttgaatcttgccagtaaatatgtttcttatgtggttttttttttttggagacaagagtctcactctgtcacccaggctggagtgcagtggcgcaatctcagcttactttgcaacctctgcctcccagtttcaagggatcctcctgcctgagcctccgagtagctgggattacaggcacacgccaccacgcctggctaattttttgtgtttttagtagagacagggtttcaccacgttggccaggctggtctcaaactcctgacctcaagtgatctgcccgcctcggcctcccaaattgctgggattacaggtgtgagccactgcacctggcctgtttcttgttcttgttatcagcaagtggcctttagaaagatttgtctggtggtgaaattatgacagctgatttgtcctggatattggtcttgcactgaatgcgccaaacactgatcatggctgtaaaaggccctttgcagggtcacatggacttgggcccttatctgcagacttgaattatggatttttttttccttcccttgcagggaagaccactgggatccccatccatgtctttggcacagagactcacatgacggccattgtgggcatggccctgggccaccggcccatccccaaccagccacccacagcggcccacactgcaaacttcctcctcaacgccagcgggagcacatcggtaggttccagcctccccaaaccttacaggaaggaaccatctcatcttttccactaggatacagtcttcttcctctgttccctgggggcatagaggaaatacagcgggagttagtgcatggttggtttgtggatctctgccaatttttttcctgtcctgattaaagtagtataatggaaggacaaaggattttaaaattggatcc

SEQ ID NO: 86455 - DNA, 1033 bp, Homo sapiens
tttttttttttgagacagagtctcgctctgttgcccaggctggcgtgcagtggcgcaatctcggctcactgcaacctccgcctcccggattcatgccattctcctgcctcagtcctccaagtagctgggactacaggtgcccgccaccacacccggctaattttttttgtatttttagtagagacggggtttcaccatgttagccaggatggtctcgacctcctgacctcatgatctgcccgcctcggcctcccaaagagctgggattactgacttgagccactgtgcccggccatcctggtcttatatctttctgtcatgagccctttttccaaaagattggaatgaagaaagtgctttgatgatccggggctcctctcatcctactggggtcttctcaacctgggtgcctgttcacgagtcagggctgtgtgtgcacatgctttaaagcacatgtgactgctgtcaacaaggaagacagagctaacgtgtctcaagagtcatccctttcaagatagccacccaaggaggccatttattaatattccatgctgtcagatgctcagtgagtgtattcaaaagagtgtgtgccacatctggtggtggatccatgtgagttttgagaataatgactagataagtgtcaaacttgaaagtctgaggtctcaagaagtgagaggctgggcgtggtggcttataactataattctagcactttgagaggctgaggcaggcagatcacttgagctcagaagttcaagacaaggctgggcaacataatgagatctcatctctactaaaatttaaaaaaaattagtgggttgagctaggaggattgcttgagccccggaggttgaggctgcagtgagccgtgatcgtgccactgtgcttcagcctgggcgacaatgagaccctgtctcaaaacataaataaaatgtggggccagaccccatcagtcctgcccaaaacagggtgtccataactggacctgatttaacagacaaatctgggacaggggagcctcagcagcttt

SEQ ID NO: 86456 - DNA, 1001 bp, Homo sapiens
ctttaagcatggtagacacctgctcacttctagatgtgcaatctgccattcccttctgtgtgtgactggcactatttcctctggctgcagcacactttctcttgggtagcccgtcagggactcctgcagtgtgtgattttgcttgtctttgtgttagggaggtgctcattgttcattttacctgccattgtctgtccagggctccccagtgccttagggctggcagagtgcactgcccagaagagtctgatgtagcaccattaacctgcaggccagacttgcatgggaattgggggctggagatccaagaggccggttccacaggctaactccagtgttttgagggatccgtgtgtcctcccaggcaccaggctgccactccctgccccaagtgtgagagccatcactgacttctgtctccttggcagcgataccatctgtgatctagggggtgtcaacgagctggcaaactatggggagtactcaggcgcccccagcgagcagcagacctatgactatgccaagactatcctctccctcatgacccgagagaagcacccagatggtgagatacttgcacacacacatacctgtccccacttccccaggacagcccagcaggctgcaatgggacagcttcgtctgaggagtcaccaaggctgtgtgtggtcctttgcaacttgaggctaatcattgaactttggctctcagtttctctgactgcacagagggcagggaccacatctatcagtgggaggggactgagagggcaagaggtgatgtgtgataaagcccttcaaacaagtgcaggggaggaggtggctgtggcatgctcctgctacaattgcagtaaactcagtttatccgattgcgataaactctgattgcaataaactcagtgaccctcttatattacctggcctctgtgagtctcagtgcccctttaccacctgtgttttggagctctgcataccagttcttctttccttgagccagagagg

SEQ ID NO: 86457 - DNA, 1582 bp, Homo sapiens
gaggatctgagggtgctgcggactcgggagtccagaggggaaggaaagggcttggtctacagcagagaggagttaggactggtaacaaaggggacttccaagtgcagggatgagaacgacctgcaggcaggccccacccctcagctggggttggtcatactgattcagtctggaccaccagccagtggggtagaggcttcttcctcttgtcctcggggaaaagatggtggacaagtctctggatgaatggttttcactgggttttagaaaatgagaccgtggggattggtttcctctcccagtacatggtagaccatcttccccagttcagcgcccctcaccagcttcgcccccacaaccccaatcccactgtcctgtctcttcacctgcaaggctgaggagttctatgtctgcatctatgccacccgagaaggggactacgtcctgttccaccacgaggggggtgtggacgtgggtgatgtggacgccaaggcccagaagctgcttgttggcgtggatgagaaactgaatcctgaggacatcaaaaaacacctgttggtccacgcccctgaagacaagaaagagttgagtgagagggacggtagggaggtggcagttcggatgagaagaccgacaggctctgggcacagactggggagagcagagcggtctcctctctgggagccaggtggtagacacggccctgtcctgaggaagacagctgggtgcagggcggggactggcttggaaccagactgaaatatgccgccagcatccctcacctccttgcccctgtctgtctgacacctctgcctccagcttctcgcctgacagctcctttccgcctcagtggctgaagagctatgtccagggagcaggggttgcagaggagatggaagggccagtggggtgcgtttagggaaatggagctgtcggtggcagtgagagattgctgcggggcgcctggggtgctgccgagctgctccctgatggatgaactgtccctctctccctcccacctctagaattctggccagttttatctccggcctcttcaatttctacgaggacttgtacttcacctacctcgagatcaatccccttggtaactgggtgtgcttggctgggagggggcaagggtcccagtgcctatgacagccctggccttggcattcagagaaccagactcccacttgccagagggtaacacaagacagatgtgcacaagcagaggggtccccatgcaggtttagtgccagttcctgtttctgagctctcagaagactgtagttcttctcttagtcaactccaacctctctctttggtcttagagacagagtcttgccctgtcgcccaggctggagtacagtggcacaatctcagctcactgcaatctccgcctcctggtctcaagcaatttttctgcctcagccttccgagtagctgggattacaggtgcccgccaccacgccaggctaattttttatttttagtagagacggggtttcaccatgttggccaaggctggtctcgaactcctgacctcaggtaatctgtccacctcggcctctcaaagtgctga

SEQ ID NO: 86458 - DNA, 1094 bp, Homo sapiens
tcctcctgcctcagcctcccatgtagctggaaccacagatgtgtgccaccaagcccaaattcaattattaacttctcccagcttggtgatgaatttcaaccacgtagatgagagagttaaagtgaaacatggtttaggaagggtaagagatgcctggaataaaattatgtttcttcttattccccaggggagctggaggactaagggagggagtggagctgaggcctggcctagcctgggaagaatgtgccatccacacctggctctgtagagcacgtggctctgaagggcctggtgctcatctggggtgaaactgtaccagggatgagctgttctcttccttggctgcctcgagaatagcaatgaaggtggtgatggagatgtcttcctccctcattgggcttcctcagagtagcccttaaatgttaatttcccagtttctggccctcatgggtaaagcgggatccttgaagttgcacatggacccaggcgtgaagcgacctgtcccttgagttcccaggcctttggagagaggatggtgggattggagggagggatgctgagcatgtccccagggagcacatcctgcttccttctgctggcctctgggaggggaaggtgggacatcagacatctgagctggcagcagcgttgggccagcaggagtggctcattacctcttatggattgctgtctggtccctgactcagcagtgacgcacaggccaggcgggggttttgggacttactaggatgagggctgtctcgccacagccgccgccagggaatcactcgaactgattagctctgcaggcctgtggtcctcagccaggagagtctgcgtggagaagtttccctgattaagccctggctccccacttctccacccattccctgcgcccggacccatgtcctgaggctgagtcactgtgccttcctcaaggctcatgaagcagaatggttacctcccttctacccggtttcccctccccgtcaagctctgccacagccgtgacttgttggagccctttcacttgcgcaggtcctgtgtcaccctccagaggaggccaagagtgggcaaggtcggtgcctgtt

SEQ ID NO: 86459 - DNA, 1026 bp, Homo sapiens
cctggccctggagatgtatgagcagtggttaggggctgcttattgggcctgttgtagacagggttcaagcacagggatggggttgaccagatgacctctaaggttccttgctgcctcaaggctctgtctctctgttttcctctttggaacacatgttctggtccatattctgaggggcttactgttgaatgaagaagctaatgtatcacatagggagggtagagaatcacttattcactcagcaggtatttgctgagcgcctactctgtgccaggctccatctgggcacaaatgcctctagatacctggttgtcaaaagcaagatattggctagggtaggtggaggaagcatccaggagttgactctgaaggatggttagggctggctttggagcagagtgaatgggaagtcaatccctgctgtcctctatttggatccccaaaatactacggtttatctaattcttcctcactctaaatacaaaccgcttttgttccagaacttggtagtcaagccagaccagctgatcaaacgtcgtggaaaacttggtctcgttggggtcaacctcactctggatggggtcaagtcctggctgaagccacggctgggacaggaagccacagtgagtgggcatggggtcaggatgaacgtgtgtggtaacagaagcaaatatggtcacctccaggtcagcagctctgtggatcacccccacagccagtctcattgtagctcagggaaggcaggagtcctgtggcgctgacccactcaggtggctgccagcagtaggctcagtcttgatgcccattcccagctccctcatcatccaaacttctttgttttattggtttgggcaagatgtgctgcagaggtaacctcaatataattcaagagccaggtggaaatggtctgattctttttttttttttttttgacagggtcttgctctgtagcccaggctggagtgcagtggcgtgatcttggctcactgcaacctccgcctcctgggttcaagcgattttctagcc

SEQ ID NO: 86460 - DNA, 1145 bp, Homo sapiens
ttgcaatttcagccgtactctgcactggtcagagaacagaaaggtgtttcagtgtctgcccacctcagatgggaccagcactcagatttgggtcaaagcaccggttttcttggccttctagccagctgccttttgctccaggatgagtgtggttgtggatcagctagtttgcctagagggaatggggcagggtaaggcaagagtcccaggggaaatggcacttttgtttttctctatcttccctcacccattatctctggatcttcttcctctgctggcaaaagtgctgcttgatatctctcttccatccctcccgctgggacagcattttttccttcctcttgagaaaagctgagatctggttttattgtctgggggcaactgggagtgggtctgccctgctggggaagatagtgcctccacacgcctgcccccttctgaccagcttctctctcccagacaggtagagcaggtctctctgcagccatgtcggccaaggcaatttcagagcagacgggcaaagaactcctttacaagttcatctgtaccacctcagccatccagaatcggttcaagtatgctcgggtcactcctgacacagactgggcccgcttgctgcaggaccacccctggctgctcagccaggtgagccctgcctccactttgggcctttcttccaggcccggggtctgaggaagagaaagccattggtttgttggtgatgccgatagggtcatggggttggaggctgccagcagcagctgtgggaagcatgccatgggctgagcagggtttgtgttcatgctgagccctgcatgttgaggtaccccagcatggtataccctgccatgggcttgaaactggacaaactggtgtccaaatcaaagctgtgtttattaaccatgtggcctggggcaagccatttcacctcttttgagttttagattccccatctctccaatgggataatactcactttgagctgtaaagattagcaagaagcatttagcgtgcttggtgcctggcacatggtagatgctcagtaaaaagtagggatgtgccctctcctcccctaagtggagtatatcaggaatgtatcaaggcaattaggaagtgtgatgttgtactttgtgaagaatggcccc

SEQ ID NO: 86461 - DNA, 1047 bp, Homo sapiens
agaggctcacaggggctccaggcccctgtggatcatgcactcgagttggggaaactgcagacattctggaaggcccttctgaaggcaggccagcccccagcctgtccccttggtgtgtttctgggtcttttcagtgctgccttgctgagtgcttgcaggtttggattgtctttttgcattgactgaagccaaaagcagctttaggtagttcatctaaaggtagaaatgagtagatagacacaactcccaatacatgcctaagccaaagagaaatgcatttgactgactcgcagtcatgtatctcccagacacaatttgtgtggatcattctgagtcagtaagtgtagattaacctgagggtaggggtcattggaggggccagagggaaaccaagggtggcaggttcccaccagagccctgccttctgggattgatctgggtggggaaaattaatggtgtaggtgccaaacacaggggctaagctccctctaccatccacaggccttggacgatgccaacaagggtatcatcagagaactgaggaaaaccaactacgtggagaatctcaaagaaaaaagcgagggaggtgagttcctgaaactctgaaaaggcaacttcagcattctccctctgctttcttttcctctagtccgagacacatgcgacagcagctccccaatctgggggcttggcactgcccatcgtgcattctaatttcagtgccaccagcagccctagcctatctctggggcagtagagggtgaggattcagcccaccatgggctggactgtctggccccagagcgcactcatttctctcttcaattgattcatcaagtatatggtgagcacttgtcatgtacctggaaggtgttagattctggggagagaggcccatccctgccctggaggagcccatggccctttgggcaaggctgaccagtggagttgtcagctgctgggatcctgcacacaggtgctacaccgaggtggaggtgtgctgccatgagggtgcatgcaacggggcgtgggctcctctggggaggc

SEQ ID NO: 86462 - DNA, 1121 bp, Homo sapiens
gccacacattcctgcccaagatcttcttccgcaagatgtcatcctcaggggccaaggacaagcctgagctgcagtttcccttccttcaggatgaggacacagtggccacgctgctagagtgcaagacgctcttcatcttgcgcggcctgccaggaagcggcaagtccacgctggcacgggtcatcgtggacaagtaccgtgatggcaccaagatggtgtcggctgacgcttacaagatcacccccggcgctcgaggagccttctccgaggagtacaagcggctcgatgaggacctggctgcctactgccgccgccgggacatcagaattcttgtgcttgatgacaccaaccacgaacgggaacggctggagcagctctttgaaatggccgaccagtaccagtaccaggtggtgctggtggagcccaagacggcgtggcggctggactgtgcccagctcaaggagaagaaccagtggcagctgtcggctgatgacctgaagaagctgaagcctgggctggagaaggacttcctgccgctctacttcggctggttcctgaccaagaagagctctgagaccctccgcaaagccggccaggtcttcctggaagagctggggaaccacaaggccttcaagaaggagctgcgacaatgtaggtggcaggttggggccttataagcccaccttgctgggcacagggtgctgcgggcaaaggaccatcattgtactcaaaggatggagcacgaagcagcaggaggcagagagaggctcacctcagcgggggcaggggcaagcggtgcgtcccagtggtagccttggggagttggcagcacattgggaacacgggggcttcccagagcgcctttcctcccaccacacctatccttctagccctcttctctccgacacccttttcccagcctgaatgtagaccactgtcccttgtcttggaggtgggaaaaacaaattactgtagtaacaggaaacatgtcctcttctaatgtaaccttagagggggaatcaagcccagtgttttccaacgcatttttagcagcagaatcatgttccaaaaaataataataataatcacatgaaattgtaagctgcaaaaaaattaaaact

SEQ ID NO: 86463 - DNA, 1037 bp, Homo sapiens
tttagcaaaagcccctggccttctctgctccctttctgcatgcaggagacacactgctcacggatgcagcggcatgcaccatgctgtcctgtcaagcgtggtgttcaaggtgagtagccttcccaggagctccaggcacagacttgaagctctagctgaagttcagagatggccagggacaggccttgacctagaaaggtaacttaggatttctcttcatctgagctcctgcccctttctttcaagtcttccccggctggtgccttagccatggtggaatgatgcctgagtcaggtcttggaagtttcccatgtggctgactaggcctctgatggcctggaagggactcaaatgttagatcttccctggtgcttgaagtttcagtgacctgcaggtggccttccctagagaactgggagaaacccataccaggagcttccggtcttactgaactctttctgatccagtgggctggggacacctgtgggcttggtgccctggttaatgggggatgagaggcttttgtgctccacatccctcgtacccagccaacccccaccttctgtatgagtctgaggccagcctctgctttctgcctcctcatgaaagccaacactgttcagctgcccaacctcaccacagctgtgcccggccagcagaggggagacaggaccgatggccccaagctgtgggacaaagccagtcctaatacacccagccctagggaagactgagctgggcacagaagggtaagagagactgcacacagctaggattaacatgatttatttcattatcagtcttacaggttgctgaggttgggcaaagccaggatagtaacttaaatccaaagcacttttgttgagtgacaacccgattagcaaggccctgttactgaacagagggcagtggagggcaccccaggaaccacagcacacagactagtgttagaaaccccttcccagaagcaaccggtgggacttggcccttaccagccaggggtctactccattggctcttggtgcccaccagcccct

SEQ ID NO: 86464 - DNA, 1131 bp, Homo sapiens
ctaaggatgaagacaggaaggttcccaggcaccccttgccttgggacctttagccaccgcatctctgcagggtcagggaggcatctctaactgcctagtaccaaggcttctctgcaagagcaaaggtactatatagataatgctgaggtcagaagctacccatgtataatacagtcacgtgctccctcttgcacccaaaaacagcctgagctgtttgatacccatagagtttctctctgtgtttgagtttgaagcagcccttgaagacttttccataatcagagcaaagtgatcttccttagaaaatccatagccaactaccaacccctcttttctctttcagcatctggtccagggaatttcttttttcaatttggctaatgaagggcaaccacccagaacccagaaaatgcagattcactcagtttaatcttgaatgtggaaacagttcacctcctcccttcatcacgtctccgtgtgcttagagcagtttcgttttctcagttggatgccctgtgtctctgtgagtggggtggagcaaagggaaccaatgccgaagaccgagggcaggggagggaggcgggggtggacagggaggcagcttgtgaatttttgttttactgtttaactttattaaaaaagaaaaaaaaaagagaataaaatgttttgacccttcctggccctttgctctggcatctgcattgtctccagtctgtgagccagagctgagcccgacctggacttggggtgcagcaagctgctgcatgcgggctgtgggcacccagcctagtggcaggtggggcactctgcctctcccagacctgtccagcatgtgagtgctaggcaggccccggctgtgcctctgggcccagcctaacatcagtcacagagaagcgagttcagaaagcatgctcactttacggtggggccccagaaatcactagaagctgtgtgtgtccaaagctcaggtgggtactaaaagctgtgtgcgtccaaagctcaggtgggtactgacctagacagggcagtttacttacaaagactctcacagttcctgttgcagtgtgggttcgagggagatggtagacagagataaaaccctgcctcctgacccccagacccatttgaggt

SEQ ID NO: 86465 - DNA, 1101 bp, Homo sapiens
acaattatcctgcctcagcctcccgaataactgggattacaggcacatggtaccacgcctggctaattttttgtatttttagtagggatggggtttcaccatgttggacaggctagtcccgaactcctgacctcgggtgatccattctgtcaagcttgattcctcccatcttgggccaagggcccctcctttctttcgtgctaccgaaatagaagcaaacctgtgtttagagttcccttttctgtctcatttacctgcatctctcattgatgcaggcctcccaaagtgctgcgattacaggcatgagtcaccgtgcctggccgagtagattttttttctaatctccagaagaaagcaccgtaaaagtccctggcatggttaacaaggcctctaactcccaggcagctgggctgagacctggtgaggaaaaaaccagagtcagatttgtccactgatgccagatgtcttcctgtagaacacaaacagctcctaaaaaatgcgcagctggaactgaagaagagtaagaggaaagattactacaagattctaggagtggacaagaatgcctctgaggacgagatcaagaaagcttatcggaaacgggccttgatgcaccatccaggtagagtaggtgcggggagtgggctcagtgggaagaacccgcagggcaggccaactgccacactcagtccagaggggaccccttggagaggtccttcagctgagaataaggtgttgcagacttgtggaccctccaaattttgggaagtgccaaattccaaaattagacagaaagtagtttttctcttaaactttgttttcttgaaactttgatttccactgagttgttcttttactccccactttagatcggcatagtggagccagtgctgaggttcagaaggaggaggagaagaagttcaaggaagttggagaggcctttactatcctctctgatcccaagaaaaagactcgctatgacagtggacaggacctagatgaggagggcatgaatatgggtggtgagttggctggggcagcctgggatgaatttgacagctgtagaatgttagaattttttccaaagatgctccagaggga

SEQ ID NO: 86466 - DNA, 5778 bp, Homo sapiens
tgtttggcatgtgtgtgtttggaaagcaattctgcctactgtcagttttctgaggtttacataggcaaaagctttgtcttgagaggtggtcttttgggtttcttttctctcttgcctactccagagccagaatcctgagtttgtgacagaatcctctgtttgtgacatcccagcccccccactgtagctcacggtgatgtcacaaatgaagaattatgatcctggcaggggaaacagatgaacttggaagaaacaaaagatcttctttgcctgcagctgtccctagtcatggggaggttggggggtgggaagtgaagcactgacgatccccatgattagcagaaccagctctgcataaaacggggtccttgtgaaggcaacagggtgtggctgctgacattttgactgactttttcctgccccctcattccttttccatctgggggggcaggacagttagcacaactctacctacataatgcttaagttttcatattgtccttagaactttcaggacatgccgagtgcggtggctcatggctgtaatcccagcactttgggaggccgaggtgggcggatcacctgaggtcgggagttagagaccagcctgaccaacatggagaaaccctgtctttactaaaaatacaaaaaattagccaggcctggtggcgcatgtctgtaatcccagctactcagagggcaaaggcaggagaattgcttgaacccgggaggcagaggttgcagtgagccaagatcatgccattgcactgcagcctgggcaacaagaacgaaactccatctcaaaaaaaacaaaaaacaaaaaaacagaaaactttcaggacagtaaacctgtgccactgaaggagaggcattcctgtcactgctgtgtgacactgcagaaagtcttctcagtgaaacagctggtaatgtggtagtgtttactgacttgctcatattttaaatttcagttttggaataggtgctattcatggttcaaaaactagaaagtgttgccagatgcagtggcttatgcttgtaatcccagcactttgggaggccaaggcaggaggatcacttgaggcgaggagttcgagaccaacctgggcaacttattgagaccctgtctctacagataatttaaaattttagctgagtgtggtgacgtgtgcctgcagtcccaactactcatgaggctgaggcaggagaatcactggagtctgggaagtcgaggctgcagtgagccatgattgtgccactgatactccagcctgaacagcagagcaagaccccatctcaaaaacaaaacaaacaaaagttagaaagtatgaaaaatattcagtgatgagtgtcccctcaaacttgtcctctctccgcccagttctcactcccctaagctaaccactgttcttatgtcttctattttcttccttagttttgttgtacttatataaaataaagatccttgattttctccctttatttagcgtgaaaggtagtatgctttatggcaggtctgcacctttaaaaaaaaatcactgagtagctcttggaagtctttccatattagtacatgaagagcttcttcattctattttagaactatatagtattccattatatgaatgtccatgttaactaaccagtctcctgtggatggaatttgaatttttctgcttgtaagttttcagagtttatctcttcctgacccccatggccaaattcttagagggaataggtgtcccttaactccagatttgtccttcggttcatttattctcggcgtgaatgtgattcagcaaggctctcccaggaataaatagcagctaaaccaaaactgaaagctcagaggacaaactagtaaaaagagaaaaacagaatatatggagatgctttatgaggctgaaagagtaaattaatccccacctttttgtgtgtgtgattgctccttggcttgtggtttgtatagtggcatgttgggaatagtaatctgatgtagcctatttagagccatttaaaataactattttaaggctgggtgtggtggctcacgcctgtaatcctagcacttcgggaggctgaggaggacggatcacgaggatcaagaccatcatggctaacatggtgaaaccctgtgtttactaaaaatacaaaaaaaaattagcttgggcgtggtggcgggcgcctgtagtcccagctactcgggaggctgaggcaggagaatggcgtgaacccaggaggcagaggtggcagtgagccaagatcctgccactgcactccagcctgggtgacagagtgagactccatctcaaaaaaaaaaaaaaaagtgataatattgcctatttcataaaattcttgtgaggattaaatgggttcatatatgaaagtacccagtaaatgtttactgtcctcattatcatctggagcctttgctgtcctcatttcagtgcttttatttaatgaattaggtatgtttttaaactttgatattacttagaagtggacccaaagacctcattgagttttgagtctgttacctgtgactaaactaaagtgaagatgtttctggagtccctgatgaagagccttatttgttttcttcttccctacaggttgttttctgcatggaccgtgccctagaatttgcccctgcctgccatcgcttcaaaatcctcaaggcagaatgtttagcaatgctgggtcgttatccagaagcacagtctgtggctaggtatgcagtcaggctagctggacattaaaatgccagataccattggactgatggtgtccggcagcttcaccacaggatatggtccccagagtaggccagctagggctgatcagaccctcttgggacttaaagtcaaagattagaccagctttgaaaacccgtagggtatacaggagtatagtagtatagcaggtacttgagctatatatgaaagaacagattgtgtttttgtggttttgtttgtttgtttaaggtagtccttttccttctactccactggttggcacactttctgcaaagggccagattttagcctttgcaggccacagggtctctgttgcaactaactcaactctgccattgcagtgcaaaggttgccctagataatagatgaaccaatgggtgtggctgtttgaatagtgttttatttacaaaaaccagtggcagaaaggatttggccctgtgggctgtagtttgccaaaccctgttctagtttaataaggattgtaagacacaagatgtgtattaaagataattataggtggtttatttggggaaagtttgggaacagttcttgggaatctgtctacctttggatattttgaatgctagacacatggtcaaggaggaaaactggccacaaatggtagtaatggtggggacattctaaagcacagctcaatgtgcccttttctgactattgcagtgacattctacgaatggattccaccaatgcagatgctctgtatgtacgaggtctttgcctttattacgaagattgtattgagaaggcagttcagtttttcgtacaggctctcaggatggctcctgaccacgagaaggcctgcattgcctgcagagtaagttctagtcaccagacctaactgggaaagagcttccttttgggacctttaagatggctagagtggaaggttttagaatcacaaggaatgtgatagcttttcctcctgctttgcaaggatgcttggtctttattagaaatggtttcaggactacttgtatttacctaaaggtagatgtgatcatatagggtcggatgcctttaatatctaagagggtttttttgttttgtttttcccctcagtgaagatagatagtaatacttgtcctgagaagtgaaggcagacccagtaacataggtctcattggtatttttggtaactcttttcctgtccactctgtaggaagctcaaatgagcaacagatagcccagattgggggttggcggggctctgtgatgctgaactgctggaagcaaagaacttgaaaatagagtctggcctctctgtgcaatggtctgaggctttgtggatatgaaccgatcctccccttgcttttttctgtagaatgccaaagcactcaaagcaaagaaagaagatgggaataaagcatttaaggaaggaaattacaaactagcatatgaactgtacacagaagccctggggatagaccccaacaatataaaaacaaatgctaaactctactgtaatcggggtacggttaattccaaggtaagctcttgatctagatcttggggcctatagaaatatttttaagggacatcaaagggtcttgggaaatctgcctagtgagggtaagcaagatgaaagagggaaagttgttatggttaatagtttgttaggaactcccttccaagaggcaagcttttgtcatctctatggaatttgagggcagttggacaatttgcaaggatattctcacctgttcattaaggtccctttcctccagtaagagaatggctagggtctgtgggataatcttaagcacctactgttgcttttttgttgttttgcttatgcaagtgatcatttattttttaggagtgatttggaggaagagtatgaggcaagcttgtttttctccagtgtaattgatggtcaccatgcatggttgaaaatggcctgagtgcttttgtggccctacccaacatcagaaacaaaaagtagactccttgcccttgcagaattctagcagttaaaaatcagagtgatttctgatccctgcaggtgacctctggaaaaaaggagggcaggaaccagccttactattttcatgttttcattgggcactaacatggaatggtaaaggtagtttatccttgaagacagatgtgcctggcttgtatcatatacaagagaaatcaattttgaagttgctgtccatagccctggtgacaaagaactagaacttaatatgacatttaaggggccagcatgactgatcctcttagagttttgaagccatgctcacagcttctgggctccctcagtcaccaaaggtgtgaagtatgattgctctctctctcctgaagcttaggaaactagatgatgcaatagaagactgcacaaatgcagtgaagcttgatgacacttacataaaagcctacttgagaagagctcagtggtaagtgcctctgatgggtagggggaagagggagttgccgctggcctcaggggaattgccttgtggatgacgaagcagacccagagatgttgtgaggtcatttggtccttccccctgcctctaggtgggattgttccagccctagactatctttatagacctccagcggaggagattgcacaagctccctcagtctcccatgcctgtgtctaacgcccctcacggtcagtaagtttcctctgatgcctgacccaaattccttttgttaaaaagtttaaatccatttcctttggagattttattttgtgttgtacacttatgctctaccctggcacagtgcttgacacataggtgctcactgaataaatgttttgttgaatgaatgtatggtgcttggaagagaaaacaactcttggagacagttgagagttgtacttcatcctgtttgttctgggcgagggaagacaatcttagagttggaagagatgtaatccggctcagcctcccaggataaaggaacttccttttgaaacaccctggatggctactctctgcttgagtgttttgagtggagggcactctgtgtctgacagggtgattatgag

SEQ ID NO: 86467 - DNA, 2067 bp, Homo sapiens
gaaaaaagagtttatgagcgttacagatagattcccttaacattgtttggagggagatgccctctaagtttttgtttatttgtttgtttgttttttgagacagggtcttcctctgtcgcccaggctggagtgcagtgatgtgctcttgggtcactgcaacctccacttcccagattcaagcaattcttatgcttcagcctcctgagtagctggaattacaggggcccaccaccacgcccagctattttttttttttttttgtattttagtagagatggggttgtgccatgttgactaggctggtcttgaactcctgacctcaagtggtctcccctcttggcctcccaaagtactgggattatgggcatgagccactgcgcccagccccctctaagttttcaaagcagggacctgttctaaactttgttttacgttcttctgcctttcctatagatatgtgtcctaaaaatgctagctattatggtaatcgagcagccaccttgatgatgcttggaaggttccgggaagctcttggagatgcacaacagtcagtgaggttggatgacagttttgtccgggtatgtatgtaatggggctgtttggggaaggctgggttgctacagttgagtttctctagccccgtatttctcaaccttgacactactgacatttgggaccagattattctttgttgtgggggactttactgtgcactgtgggttgtttagcagcatctctgacttttaatcactgagtatgagtagcaccccctctgcccagttgtaacaaccaaaaatgtctcttaacattgctaaatgtcccctggagggcacattgcccaggttgagaactactgctgtagtcattttcattttgtgttagttttgttcgtttgtttgtttttgtttttgagatggagtctagctctgtcgcccaggctggagtgcagtggcgcgatctcggcttcaggcaattctcctgcctcagcctccagagtagctgggaccacaggcatatgccaccacacccggctaatttttgtatttttagtaagagacggagttttgtcatgttggccaggctagtctcaaactcctgaccccaagtgagtgatctgcccgcctcagcttcccaaagtgctgggattacaggtgtgagtcaccgcgcctggcctctgtgttggttttgtgtgggtgtctgttgctgctgttgatttctttccacttggccaatcatgcttcttttcttccctcttggtgttcttttagggacatctacgagagggcaagtgccacctctctctggggaatgccatggcagcatgtcgcagcttccagagagccctagaactggatcataaaaatgctcaggcacaacaagaggtacgggtctgatcctgtttctgtcaaaagaggcagtatggtatatttgggaggagtggctacttgaaagtcggaactgaggtctagtctcacttctgccatcagcacacctgggtgactttaggcgagtttcatagcctctctaagcctcagcttcctaatctgtaaaatgagttttgaatatgattgacagcttttaaaaatctgtgaaaattgaagtgtttctgagatagctggggaataggcaaatgcttccagggactgatttgagtgaggttaaagaatttaagagtttgggacttagtgagaccctgtctccacaaaaaaattttttacattagccaggcctggtgccatgcacctacctgtgctcccagccactcaggaggctcaggtgggaggattgcttgtgctcaggaggttgaggctgagccgtgatcgcaccactgcactatagcccgggcaacagagcaagaacctgtctcaaaaaaataaaaaagaatttgagtaaattcaagccttgattaaattggtagcagctaaaacatgttttagttccatctccatatatagtatgtgtcgcttaatgacaggcatacattttgttaggtgattttgtcattgtgcagaatcataaagtatacttacacaaacctgggtggcatagcctgctacacacctaggc

SEQ ID NO: 86468 - DNA, 1438 bp, Homo sapiens
ttcttttttgcatgtgaacaacaggaaaagaaagatgtttctcataacaaaaatgatcaggtacttagttaatgttgcagtaatcatttcagtaaagaattatctttatcacttgagcagtggaatgattttgagtatcttgatagaggttactagttcttttaaaacactgttggtcatgtctgatttgattctaggtacttgctcgggaatctaattcccaattatataacattgttcctttaggacaaagtttaggaaagtatactttgtctaatggcacagtttcaaaaaatagatcttagaggtagggaaaaaatactgctatcacccagttgctgaatatataaggtactggagggagtacaaagagggcagcaagtacctacattgttgtgatgggaagagggaacaccagtggatgggtgctccttatagtatggcactggcatcctgtacctcatatgtccctgtcatccacggtcttagtctctgctgtcactcagctctgttcctgtcttaaacaccaacatgctatgcttttaactcttttgccacctgcctttgctctgcttgttcttccagtgacaaatgcatgagccacttttcaggaggtgaaattattaaaactcttgaggatgtgacctatttcacattgagaaataagttgccctgaatggagtaaccatttttcctgtaagtttgcaaaagaggcagcagttgtgacactgtggaaggagatagaaaaattccttgccatgagggaatgtctaaatttgtcctgcggggaggatgactacaggcagaaatagtgaggtgaggcaggaacataagaggggttttcttgatttagtttgaatgtatctaagtgacaaaaaggagcatctgaagaacttggattctttcattagcacctccttttggtccattggcctattcaacaaatctataaatccttcaagtatcacactaactttcagctcagtgtgctgcgggctctagaccaaagattcctcctgtaagattacagaggttattccctttgtaaagtaacatgattctctttctctttcattttcagggaagcagagactttcaaggaacaaggaaatgcatactatgccaagaaagattacaatgaagcttataattattatacaaaagccataggtgagaaagaactgatacttacgctagaaaacatttacttgccaaatattattaaaagtagctgccaagtcctggtggctcacgcctgtaatcccagcactttgggaggccaaagcaggaggatcactttagatcaggggtttcagaccactctggccaacatgacgaaaccccgtctctactgaaaatacaaaaattagctgggcctggtggcgggcacctgtaatcccagctacttgggaggctgaggcaggagaattgcctgaac

SEQ ID NO: 86469 - DNA, 1044 bp, Homo sapiens
ataaattttaaaatgatgaagaatctcatccctgttttaataatctgcaaatacgtgatatgtcaagcaattccagagagaacccagccatgttaatgacattttaaaaactaccacacaattaattctgcattagtgtaggctgactaaagtttctgattgatgctttaattgctaaaagttagactagttgacccaacgcagagatcttaagtgttcaacttggaagtatttagagagaaaatggaaatttttatagggcatctaatttggggcatgttgcaatgtcaactatgatgttttaatgtgtttttaatttagttgagctgtaaatgtgcaaagttggctagcaaccataagcccaagttgtctgatttaatcacatgatgctgagccctgctaagacctgtgtgataccaaatgattcccttagcagtgtttgttggagtaattagtgtcagcaatgaatgaatgctgaattgagagagataatgtaactacatgtctaaaggatatacagattttaacgaacatttattgtagaagagcaagttttcaaagctgcagttttcttactggtgggtggttttgtttttttgagacagtcttgctctgtcattcaggctagagtgcagtggtacaatcacagctcgttacagcctcaacctcccaggctcaagtgatcctcccatcttagcctcccaagtagttgggactacagacttgcaccaccatgcccagctaatttttaaatttttgtagagacagagtctccctgtgttttccaggctgttctcaaactaactcctgcactcaagcagtcttcttgtctctgtctcctaaagtgctgggattacaggcgtgagacattgcgcccagcaaggttatttctgaaaaacaaagaaatacattttaaaatagcaaaggagaccatgaatgggatgtcttctctgaaggccagggcttccagtgtgctgatcctgttgtgagagatcctccatgcatccagagaggacagatttttttggaaaacctttcagtagc

SEQ ID NO: 86470 - DNA, 1044 bp, Homo sapiens
aggtggattgcctgagctcaagagtttgagaccagcctgggcaacatagtgaaaccccatctctactaaaatacaaaaatttagctgggcatggtggtgcgtgcctgtagtcccagctaccagggaggctgaggcacaagaatcgcttgaacctgggaggtgaagattgcagtgagccgagatctcaccactgcactctggcctgggcaatagaatgagactgtctccaaaaaaaaagaaatttttttcttaaagaagaatctaaatgatatgcttttggtaagatggaatagaagttaggctcctgggctccttttactttattttgtcatgaaggtcagggagagtgcaacatgaaacaggccctgtgacatgccattggggacaagaggtctcggactgtgggaaggaggaaagaatttctactctgactggccaagatcccgtgaattctgaagggtggagggcatttctagatcaacaggcaactagtaagtttgactgaataaaataaatggagcacaacaatcatagagtaaggcgacatttggggagtagtaaatataagaggaatgcataagggatattgactcattggcagtataaagtattattattaatagcctaaaggaaaagaaaagtatctttttctttttcttttttttttttgagacaggatcttgctctgttgcccaggctggagtgcagtggcgcgatgtcagctcaccgcaagctccatctcccgggttcacaccattctcctgcctcagcctactgagtagctgggactacaggcgcctgccaccttgcctggctaatccttttttgtacttttagtagagatggggtttcaccgtgttagccaggatggtcttgatctcctgaccttgtgatctgcctgcccagcctcccaaagtgctgggattataggcgtgagccaccgtgcctggacttttttttttttttttttttttgagacggagtcttgctctgttgcccaggctggagtgcagtggtgtaaccttggctcatcacaaccaccgt

SEQ ID NO: 86471 - DNA, 4035 bp, Homo sapiens
gtgagacttagtctctataaaaacatttaaggctgggtgcggtggctcacgcctgtaattccagcaccttgggaggctgaggccagtggattgcttgaggccaggagttcgagaccaacctgggcaacgtggtgaaacccgccccccatctctgtaaaaaaaaaatacaaaaattagcagggtgtgatggtgcatacctgtaggccctgctacttgggacgctgaggtgtaagtatcacctgagctgggggaggtcgaggctgcagtgagctgcgatcacaccactgcactgcatcctgggtgacagagtgaaaccctgtctcaaaaaaaagggttggggctaaaataaaagatatattagttggcactccaaaacagatcaggattctatgcatgaagattatttctctttgctcaccaaaacaggcaaagctatttatgagccagagggttaaacttcagatgtttcacatttcaactaacttaaggctttatattttcctgggaagttgctgactgctttacctaatatgggaatacctgtcttgaattaaggatctcttgttatatctcctgggctgggaaacagcttgatctctatagggagtctttcttatggtaaacttgagggatttcaaattgttttcttttctttttgacggagtctcgctctgtcaccaggctggagtgcagtggtgtgatctcagctcactgcaaactccgcctcctgggttcaaatgattctcctgcctcagcctcccgagtagctgggactataggcgtgtgccaccacacccagctaatttttgtatttttaatagagacggagttttaccatgttggccaggatggtctcgatctcttaacctcatgatccgcccgccttgtcctcccaaagtgctgggattacaggcgtgggccactacacccaacctcaaattgtttttcaaagagaaaacacttacgtgtctcagcatatacctagtgtgactggacaacaagatctaaaagaatcaagggatccatagacttaagagtcaggacatccttacctgattccttgagctgataaacttaacttctctgtatgttttcctgatgggcacaaataagagcaattcttattaggcccttactacctaggtattgtacactctttgcgattaggattttgccttttatttctctattcagattgttaatgggaacaactgaactctcaattcatgtcccgggtttcctgtagttgctgttcgtttgctgcagctttgcatggtgtttttgagtttgtggcctcacttaactgaagagcttgtgggcatgcctccccagctttcttccttacctggttttaaattcttaggaatgtgtccttctaatcttcctcttgaagtttcagagcaagcacctagacatttcagtaagcctccaaactgagtgggaatttatctttgacctggaacccaaatcagtgagaaacactattttccttttgctgtgcactaagtgtagtcagatgtgaagaaatgggagatgggaggagaaataagttaaggaagggataaacctaggaatacagaattctcaataccggcaaattaattgaaccctgatactaacagatggcaaagtagataatcataactggagcaaaggtagagtacagagaaaggttctctcttagtgctttagttcagatccacatgttaactagtgccagagaaacaagaattttgagaaaatatagggccaagtgagtggcagttgcttagagtccagtccactcccaacaaacagaactctgattggccgaaagcccagccttattgtacattccagccaatcagggattagtttagtcattgaagtttgtattttaatggttttgaaaagctgagtactgggcacttgcttttttgttcttcgggactttagaagtttggagaacaatagtcagcagttgcctagttgctttgtggcctgatgcagagtccctctgagagcccatttctcccttactgcactagtctttggtcccctttctccagcactgagtgatgtggaagttactcagaggtctttccaggtattcttttaaacttttgaagtaagaacaaaattcaaagtgcagttatcctaacaggctattcattttattggagtgacactgtttttccttctcccattcggatcaaaatggcaattcctatgttttaccctcaccatgggtaagaatatgagtggttgaggcttttgagaatggtaataggaggaatatatgactctcaggtcttattctgagacgtgaaattctattggcatgtgacttacaatttgtgtggggaggccagattgtcagataagcagtgttaaccatctctcttgattctaatattacttttggagagagtgtgaggggcaagcaggaccctctcttgtttttggagtttctgtcctgagagttcttccttggacagtttgccctgagacagttaaccacctgttgaactaaggaaccaagacaactttgagaagtgaaataccgttgacaatccaggctcctccccactctagttcccatctccaccccaccccactccacccaaaaaaactcaggaagcagcctttatatatatatatttttgagacagagtttcattcttgttgcccaggctggagtgcaatggcgcaatcttggctcactgcagcctccgcctcccgggttcaagcaattctcctgagtcagcttcctgagtagctggaattacaggcatgcgccaccacgcccggctaattttgtatttttttttttttttgtagagacagggtttctccatgttggtcagtctggtctcgaactcccgacctcaggtgatccacccgccttggcctcccaaagtgctgggattataggcgtgagccactgcacccggcctaggaagtagcctctttctttctctctttctgtctgtctctttctttctttctttctttgtgatggagtcttgctgtgtctccaggctggagtgtgcaatggcacgatctcggctcactgcaatctccgcttcctgggttcaagctatcctcctgcctcagcctcctgagtagctgggactacagttgcatgccaccatgcccagctaattttttatatttttagtagagacgggtttcaccatgttggccaggatggtcttgatctcatcacctcaggatctgcccgcctcggcctcccaagtgctgggattacaggcgtgagccactgcgccagggcaaagcagccttttccttaattgtagttcctcagttttaaatttttgatgggtgctggtgtccctatagtgggagatgtcacagaatagggaaccgagggatggaaaatggtgggtttggggatatgttatgaaaacaagcctctggctaatgctgaaaagccagtgacttgtatcctcagaatggtttcagagaagcatgtttcccagaagtagcttcattgttgggtctcctctccccagggataagtgaaggttaggtagatgtaatagattgtgacacctctcatttaaggacctaaaataaatttccaactcaccgttgagacaagtatttccaagtgaatatgtttctgcctgcagtgatgggatttctgtagggattgaattggttgcttgctttttcttccttactgaataaggcatagccagctgcatagccaggcacagcttgctggctggtgtccgtccctgcctgaacagtagggagtgctgctgctttgtgtagacagtctgtgactcctctggtgcattttgggtcccttctgactctgcccgtgttgaggcttctccttgaatgtccacccagaggacaatttgaactggtatgttaaggaattttcttcatcttctgccttctctttattagcggagatgtgtggagggttgttccatttgtgctttaaagtgaaaactatctattctgtaggaaattgggtaaagaaagctgagtagcagatagctttgctaaaaggtagcagtt

SEQ ID NO: 86472 - DNA, 1055 bp, Homo sapiens
tcaaagtgtctcttgactttcccgggaagaagctgtggacacactccaaggtcggaaaggtagcagtggggactccttccctacagagtcttgggtcacctggtccccacgcaacccagactccacggagcctttcaggaagactctctaggattggaagttgctatggcaatgaggctcttggaatactgaaagcagccaagccctagagaggctaccaccggtacaccccgccttcccacccacgggtaaagtggcgccgcctacgcaccggcacagcccctgggctcccgccccggcgcggagaccaccgtggacatccgggggcgggaggccgctctggccccaagcggagcctctctctggtagacgagcccgagggagcccttctgggcgcggcgccgcggagctgctctatgctccaaccggaagtgctcttcaccgccggcctcccacccagctctctggtcccggcggtaagatggcggctgccgcggagtgcgatgtggtaatggcggcgaccgagccggagctgctcgacgaccaagaggcgaagaggtaaccgggtagcagggtagtagaggaggcgacctgcagctccgtggctcagggaaactcgttcctgccatgatgcagcccccagctgttgaggcgatgccccgccctccgcaaacacccccccatctgagatcaaggccggatggaccccctgaaggggcgctcttgggggtcggccttcctctcccgcttccgcctggcgtaggagctgaggcatggccttgttctccagctgagaggacgatcgtccttataggagaggccgagtctccgagggcaatttcagaggtctggtgcgaggtgggggaagcggcgcggcgtcgatgacgacttccttacatcgcccccgacccccgcgttctcttgttaacttctgtgcattgttgcctgtctgcactttccgtctccaaaacctttgctctcctcaccccgttttcccttgtaattataccccagcgatcactagtctgggttcgaagtgattgtgtgtctccata

SEQ ID NO: 86473 - DNA, 1029 bp, Homo sapiens
tagggtgtctggcctgcctggctgagctaagcctcctgggtggaagagagctcacctgggccggaggccctggatcccactgagggacctgccaccggcttcagcccccccagtccctgccttctctctctctctcctcagcttcagcacccccgtccctgactctctctctcctcagcttcagcccccgtccctgacttctctctctctctcctcagcttcagccccccatccctgacgtctctctctctcctcagcttcagtcagtgcagcggttgttcccagcacccccatcttcagccccagcatgggtgggggcagcaacagctccctgagtctggattctgcaggggccgagcctatgccaggtggatacttgacccctgacctctgaccctcattcactccttcccaaaccttttttactgatcctgagcaaccttgcctgcctccccaataggcgagaagaggacgctcccagagaacctgaccctggaggatgccaagcggctccgtgtgatgggtgacatccccatggagctggtcaatgaggtcatgctgaccatcactgaccctgctgccatgctggggcctgaggtgggcagcccgacctgctgaccagttgggggacccccaccaacctgagaccccggctcaccacccctcttctgtgcccagacgagcctgctttcggccaatgcggcccgggatgagacagcccgcctggaggagcgccgcggcatcatcgagttccatgtcatcggcaactcactgacgcccaaggccaaccggcgggtgttgctgtggctcgtggggctgcagaatgtcttttcccaccagctgccgcgcatgcctaaggagtatatcgcccgcctcgtctttgacccgtgcgtcccccagagagcccctcccccagggcagcacacccagttcccttcctcctcggcctcttcactcctcaaaattggggatcccctgctccccacttctgaggttcatcctttgagcattcttacttctcactgccca

SEQ ID NO: 86474 - DNA, 2041 bp, Homo sapiens
cacgtatcccacttggagaatgtgtcagaggatgagataaaccgactgctggggatggtggtggatgtggagaatctcttcatgtctgttcacaaggaagaggacacagacaccaagcaggtctatttctacctcttcaaggtgagcttccactaaaggagggtgtgagtgaaggaggtggggccttgaggggttgtctgcagctctgcccccctcccctctatgcccccttcctcttctctctagctactgcggaaatgcatcctgcagatgacccggcctgtggtggaggggtccctgggcagccctccatttgagaaacctaatattgagcaggtgagataggggaattggagatagcggataggagaattggggacagcttggaggagtggggagcctgtgttctccattctcctcaagctgagaacactggggaggttcagagaaggaagggtgttttgtgctaacctcagggtgggcatggtggtagggagggggcagagcttttctatagagagcacccgagagagagaggagaaggagaaccttgtccctggccagggagcatcttcctttgtctaagaaggccctgcgggctgctcacacctcattcctggttttatcccccacccaccccttctcagggtgtgctgaactttgtgcagtacaagtttagtcacctggctccccgggagcggcagacgatgttcgagctctcaaagatgttcttgctctgccttaactactggaagcttgagacacctgcccagtttcggcagaggtctcaggctgaggacgtggctacctacaaggtcaattacaccaggtaggcccagccaggggcagcttcgggggaggcttgcaggcccagcctgggttcagtggtttccgccctcacctgtctccccctcgaccccctactccagatggctctgttactgccacgtgccccagagctgtgatagcctcccccgctacgaaaccactcatgtctttgggcgaagccttctccggtccattttcaccgttacccgccggcagctgctggaaaagttccgagtggagaaggacaaattggtgcccgagaagaggaccctcatcctcactcacttccccaagtaaggctccttctggcctaccaggatttggccccaagttcacatcctccctgttgtccccttttttccaggaaggcttcctggattggtccctcctctccctccatgggccttttgggatctgggcgtctacctggcagacttgcccatggcccagaagcaacttgctagtactagtctggggatggcaggtacatagcccaagctaacgctgcccccacccgaccctacgccccagtagatgttactaattgtttcccatgggggcctggacacagcctcagactccttccctgcacaactctccaagaaaccagaccttaagcttgaagtgaaaccaatttctactcctgttctggtcttttctgtaccattttcttctgttcggccacaccttttaaaatctaggccataactcccctgttcaaaaaaccctgactgactaatcctggctctctagtgccccctgccatcaggtgggaacaagagatggcaaggtggggtggagtctgagcccattttgatactgagggcagtgagggggctcagggtgacaaggtgccctgcctggccacacagcacaggatgacatcagctcagacctgtctccctgtgccacacagcgtggtgaaactgagcctgtttgatctctgtcctggatgtgtcctgtcctcttaccttcaattggaggctcccagaagacaggggctgtcccctctctcaggtccccagttccctaagagcagggtctgtctctgaccagcctccagtccctctgctgcctggcccaggctgcaccctggagaacagagttgtgggacagactgtgtcctccctacagattcctgtccatgctggaggaggagatctatggggcaaactctccaatctgggagtcaggcttcaccatgccaccctca

SEQ ID NO: 86475 - DNA, 1203 bp, Homo sapiens
ctgggggggcagggggaggggtccaccatgatttctccatataattttgatcataggccggagtgagtcattccacctgcacctttctgtacaaatactaattcaattttaagtcttaagtcacttttttaatatatatgatcttctgctcttcccacttcctcccctttctactgctctcccattttcccttgctgggagtagccacatgctcttgccccccaacccttgtatatggggacagtggggtcagtgcagctaccctttctttccctcctgcggaacagcggacccagcaagagcatccacatcctcactttgttcggagtggtctttggtttgggcggtggggcagaccttgggaaggggcttaggaagggagaggcagctcttccttcagctggctctcatcaggctgcagccccctccccgctcccacctccctgctgggaaaccacagcattatcacagcattattgtgacagccacgaacccattgcccacaacccctccaccctcggtcaccccaacctctggctctgagccctgttctgaccaaatcatgatgatgagtatttgggggtgggtgggtaagggggggagtgggaggggacggaaccaactttttctgtattttgtattgtatgttttcttcaacatgtaaccaatcagtatcttgtcaatatagtcagccgatcgatcgacctcacaattgtcttccttgtctttctctggcagtttatcagacagtgccctctgtagttgaagttgatttaaaatgaaccactgaatcttgttaaacaaaatcttcccctctaatgtgaggggatgctggtggtcatggtaaccaagagaaagaggctcttactgttagcagctccgatgaggtagctgacctgggctgaccaagtttgaagtttcagggcccgtgttcacttctccacctcccttcccctcccccacctaccagatcatactggggtgacatgcagtgtgtatttgatgatcattagtctctgaaacaccagaaacaacctctttgggttttttttggttggtctttaccagtgagagggtctggatcctctctcttcctgaagaggaaggaatcccaacagcccctggaacgctggactggtcttaaggccaagactgtagccactggctttcctcaccacctctgtccacgtcacccccccacac

SEQ ID NO: 86476 - DNA, 1013 bp, Homo sapiens
aaaaaaaaaaaagaaaagaataaaaaaagcatgggcctaaaaggaattgcccgtcacctgtctctccctggttctctttctttggtggtaggggtatgtgtatatatggatcactagccttctacttctcttttcttgtaagttgactttttaattaaacttattgagaaagaaatacttaagtctctgctaaccctagaaactcaacttctcttcttctaatttccccagtttcttgtccttccagaaatatgcacgtgttttttaatccctttctttacattgatggcagtgtgctatacatactgtatatgataattttttaccaatccctaataatagcaaaagactgaaaacagtgctgcagtagacatccacatacttttgtgcttttgtgcaaacatgtaagtgtatttgtaggttaactttctagaagtatttcctagcctagtgattttgaagagcaagaaggcagggtggacctggggaaacccgggtaagacatctgctagtgattgtgagctgagaggtgatatacatgagcggggaaacccagatcagggcagccttaggcctgaaaactcctgtgtgtgtccagctgatctctattatgataaggtgctcgaataaggaaggtttgtatcctgggccctgggccctggcccctgccaacatttccctctcacctcctctcacctccatccaaaccaggaagcacaagcctatgcagacgacaacagtttgctgttcatggagacatcagcaaagactgcaatgaacgtgaacgaaatcttcatggcaataggtcagttgcttctcctcccctcctctctccaccacagcaagggcatatcacctgtctgctggtctagagtgggcctgcggggtcccttcaccactctttttttttttttttttttttttttttgagatggagtctcgctctatcacccaggctggagttcagtggcacgatctcgactcactgcaagctccgccccccaggttcacgc

SEQ ID NO: 86477 - DNA, 1146 bp, Homo sapiens
tgtgtacttccccagcatagctaagtgtgtgagaatgtccttaggaaacccaaggtcagtgacacccctgggctggagcaaactgaggggtggagcggtccctagctgctggtctgttctctgagtggcggaggaggaggtctgagggcgctcacccttctgtgcttggagtaggcttcccctaggctttccctctcttgcccctgctgtgttgctcttcagagagtggtcctgagatggctcagtgcatgcaggagtcccttctcctgccgttgcctgggctgggtctgcaaagcctgtgcagaccccgtcccccagacacatacataaaaatccaaactccaccccccactcaggcctgctttggctcctggcttgagggttctctgtgcccatctcagtggtgggcttctgagtgccagagcctagaagcaacagtgggattgtgtggggtggattccaactcgctcttgcccatggacgctccttctctcttacagcggccttcctcacacagactgtctgcctggatgacacaacagtcaagtttgagatctgggacacagctggacaggagcggtatcacagcctggcccccatgtactatcggggggcccaggctgccatcgtggtctatgacatcaccaacacagtaaagatttccccttgcttcttcctttgcccttcatcttctcaaagtcccagggattgggttatcagagccctgatttcaggccgcttaaccctctgttcctgggtggggggtgggcagatttcctgtttggggacattgcatcagaatctttaggtggcaatgtcttagataatttggctgtgccagcttgagagtctctaatgggtggccctgggcagaatgccttctctgtcccttcgacattctgtccctgtctcctcaggatacatttgcacgggccaagaactgggtgaaggagctacagaggcaggccagccccaacatcgtcattgcactcgcgggtaacaaggcagacctggccagcaagagagccgtggaattccaggtggggagatgacagacttgggggaaggagtggagtaagcagctccccccggcctcgcctgggatgctcaggggctttgggaagggccatgctaggaggcaacagg

SEQ ID NO: 86478 - DNA, 1030 bp, Homo sapiens
tgggatccagaagtcaatgtgtttgctcagaaccatgagcctgaagttgggagaccattctcctctttacagctcagatggtggtagagccggtagacatctagtatagcccagtggggcctcctgacctctagtggggagggcagggaggtgaggtgaggggaagcagtcagctaggtcttcagtgaggccagagggaaagatctgtaatttaagaaggacacagcgggtgacggcctctgaactaactcagtacttctcatttctcccttacagttggaggtccccctccccactaagtgcctctttgcatagcaccagtccccacccgcacgctctctggaccactacagctggacgggcaatggcgggtcggggaggcgcagcacgacccaatggaccagctgctgggaacaagatctgtcaatttaagctggttctgctgggggagtctgcggtaggcaaatccagcctcgtcctccgctttgtcaagggacagtttcacgagtaccaggagagcacaattggaggtgagtgggcatgagggagtcggggaggggcctgaaggttgccaaagaaatgctttgaccttgaggagatgggaagctgcctgcctgcattagggactaaatgcgtctgtggtggcagccccacttcctcacctgggccctggaattgagcccagcaactggtctccatgccagagtcccctcaagcatcgctagtaagcatttgctgggagtggaaagctagcttcccatcctgtttctgccccttcttgatctgtgtggccttggctgaggccctttcactgccctggcctcatggagggagagctgactctggatctttgaggccccttcttactataatgggtggtccatgtgccctggcctttcccacttccagaagaaggaacagcctggtgagtcggagctgggtgataggtgggtgtttctgaagctgactttaccctttctggagctcacagcctgttgttgattttccagtggtcagcatttaggatgtg

SEQ ID NO: 86479 - DNA, 1033 bp, Homo sapiens
gctccccaggcgtcgggccataggaggtggggagcttctttccttagcttacctgcctttggtgagccttaaggaaaccgctatgactgtcctctggcctgtccattctagttgtgggagagaggtaccctaagttccgctccccctgcttccagaatcggaggatctttgctaggtgtgaaggaacctgtccctcttctcttttagaagtgacagggagtgctgtctgtcgccgttttccttcctcctgtcccacaaaaccagttgtcccctctagccctagaggaatatctcgatttcctttgggggaggggggtcgtctgggtgagaccgttccacacgcacagaagtgtgtgtgcgctcccgcaactccttacttcctctctttcctcaagccagagaaccaaccaggacctcagctgagtttaaagtcacttactagaaatgagctgttttcctgttttgccccttctgtctcccagccctgtcctctagttatgttgttctttgagtgtctctctctttctgcctctgaagaatttagctgaggtttgctcaatcctagctacagatcacagatcagggtggatgtgcccattcattatcttctttcccctccccccttgctccaggctcagctctgtcctcccagagcacgtgagtggtttcccagccgcctcaaagggactgcttttcttgggactgctgtccgtgtgtctatagggaggagaataagacccaaaatgaggagtctggaattgaagggccatctctttcccactcccaaacacacacacatacacctccctgagcaacaggtccacaccacgccagggtctgtctgcaatcccttcagggcttggacttattactgaggactaagtcaagatcacaatggcagttctggatttttaattgtagcctgaggaattccgatacatgccagaaagtgcaggttccctcaaccatattgactgatccttgtctgttgcttggggcttaggtgtgtgaaatagctgctgtctcagaccaa

SEQ ID NO: 86480 - DNA, 1042 bp, Homo sapiens
gagggcagaggcctgggccaggacagggcccgaagaacgactcagatcccggactgtcctccgggcgcgacggaggcggcggccggggcggaacagcggcgcccgaggcaggggcgcggcgctggctctgcgcctgcgcggcggcccatggtcaggatgcccgcggcgtggttgccgctggcctgcaggaggcgctgcagccgaccctggaggcccgggggcccggacctccgcttgcccagcgtgaggatgccggccgcgtgattgcccgcgccgtgcagcagctcgtagaggcggcaagagcaagtcttttgacgacagcagtcgggcaggggctgtgcagccgccccggacgacaacagcgcgggcggcagcagcagcagcagcagcagtagcgtcacggcggcccaggagacctagggagacggagacagggcgctgggggggtcttcccacggcgcccgccaccagctcccacgcccaggacctgcccctctggctccgcgccccctccaagcctgcactcctttctggctgtcacttagttctccttgctttgcgcccttgctggtatcggcctactttccctgctcctccttcaagacccagcagagcatctcccccaggaagccttttgagaccccctgggcagagtgaatcccccttttctctggagacttaggccactgtgccaccactagggcacttgccactccacctgaaaacaggagtgtctgtctgcagcagaagttgtaaacttgggaaaaacccgggccctactgagtccccccaacttcctctccacagcagggaaacacatggaaatcaggaactagcaagactccagaatgctctctcatctgcctgcccccttgcaggagtgactgaactccgttgctttgaaccagtttcctgccctttcagagggcacagctcccttacctgtaaactgggtatactagaaataatttctactctgcaaggctgttgggaggatgacaagagatgacaggtgcaaacggagcacctgacacatagagct

SEQ ID NO: 86481 - DNA, 1054 bp, Homo sapiens
cccatgggctctaccttctgccccctggggccccctttatcgagctgctcccagtcaaggaaggcacccaggaggaagctgcctccaccctccttttggccgaggcccagcagggcaaggagtatgagctggtgctgacggaccgcgccagcctcaccaggtgatcagctgcacagcccctgctacctggggccctatgggaccgtgctgggggcctggggcatgagctcagaagaccttgggcccgacctcactcccacttgcaccccatcaggtgccgcctgggtgatgtggtgcgagtggttggtgcctacaatcagtgtccagtcgtcaggttcatctgcaggtaggtgaccccggggagctgaagggccatccttgtgtcctgggctccactgcctctcccttcctcctcttcaggctggaccagaccctgagtgtgcgaggggaagatattggtgaagacctgttctctgaggccctgggccgggcagtggggcagtgggcgggggccaagctgctggaccatggctgtgtggagagcagcattctgggtgagcctccccaccggctcctgcctaccatccttgagctacccttcaactcctacctcccctgccaggggactgctaggaaagagataagcctcctttactactcctacaaaagtccttctctgcatctaactctcatccatcctgctgcagtctctacccattttctttcctgatctgtctcctatttaggatcaagctctaggttcctctccatttaccccactccccaccaagaaactcttttttccctatgaatctcagagtggggaagaacagatagggcagaggacactagacttggcagctgcccattcaccggaagtatgtgtgcacatggggtctattcacagattcctctgcgggctctgctccccactacgaggtgtttgtggcgctgagggggctgaggaatctgtcagaggaaaatcgagacaaggtaaaggagacgaggacagggtctgactgtagaccccttcactctgcacactcccagggtg

SEQ ID NO: 86482 - DNA, 1114 bp, Homo sapiens
ccgcctgcctcggcctcccaaaatgctaggatcacaggcgtgagccaccacgcccggccggtctcactgttttgatacacttgttggtgcctcttttttgaaattagttgctatcttcagggatttagggatggcagagccttttagctaccactatcttgtttggctccagacccagtcagcagttattgaatgttatttcagtccgacagctgtttggtttcttcagtgagtaagtaatttggtacttcccagtgtcaattgttgcctaagtagtagaaaggaaggaaggaacggaaggaaagaaggaaagaaggaaagaaaggagggagggagaccatccaacccccgtcaccagttcagtagcttgaaatcaatgcaaagtctgtagcgtggttttccttgtttactggaaaagttggcattgccttcaggtcctgggtctgcaactagtgacatgaatgtctgactcgtataaattcttgtaggcaccctctgcctgaatgtctcatttccagggcttcttagaaatagcaataacttgtttcacctgtctctacctaagaaacccacagataccaaactccttgaggctggaaaggacatgtagaagagtcttggccttgtgcctcctttacacccatgaggggtaactataaataggaaattatccaagtccttatttccttcagagtacacagaaccctttccttttccttgcatttctcggagcaaatagcataagcaccaagcacatcattgagagaaaggaagaagggcagcacattgttaaaaatttttttttttaaaagaaggaaatctactgtataatccaactatttagtaaattacaaatagattaacataggcattgagtccatttctgttgggctgtttcttaaaatttgcagtgaggattaaaaacatcactttagttgaagaaaaagtaggatgtgttgaggctgtatttatacaggctcacgtgcatgtatgtatacagattatgtaatttttttcccctagggactcagtagatcttgataatccacaggagaacattaaggccacccagctcctggagggcctggtgcaggagctgcagaagaaggcagag

SEQ ID NO: 86483 - DNA, 1037 bp, Homo sapiens
aatggcttgtgcctctaatcccagcactctgggggaggctgacttgggaggatcacttgaggtgaggagtttgagaccagcctgggcaacatagtaagaccttgtctctacaaaaaaaaaaaaaaaagtttttttctttaattagccaggtgtgatggcatgtgcccacagtcctagctacttgggtggctgaggtaggagtatccctcaagcccaggagtttgaggctgcagtgaaccatgatcacaccactgcactccagcctgagtgatggagtaagaccctgtctcggatggatggatggatggatggatggatggatggatggatggatggatggatggatagaaaagtttatactggaggatattggttaaggagaaggatagcaagagctatttgtggaggattgatttttggaaagtttattaaattgagttaaaattagagatgggagaaagaagccggttttgtaagtttaaggtaacagtaagaacagtagtgagtacttacagagcacctgctcttagctagatactgttttaggtatgtacataaaactaattcattcttacagcagccccctaaggggcataagtattattattcccattgtacaaataagaaaactgaggcacagagaggcttaacaggctgtctttggcagaaccgtatttaggtgagttcagcatcatctctaaaagtttaaccccagtttagagactttggccctgggatggggggtaggatggagaatcggaattacaaaatgctttaaattatacatatgaatccagcagaccaaatctgctggattcatattattcatattatgcataatattattcatattaaccccctactcccaccccacactagaattcattcactgagttggcagatacacagtgggccttctaatgtcagacactactctccactgcagtttagctagggcaagaccttggtcacagtgttctacaagtcttcagagagagagtaatgtttttctttgttatagtttatattttactttt

SEQ ID NO: 86484 - DNA, 1067 bp, Homo sapiens
tatatatcataaaatttaccatttttaaccttttattttgagatggagtttctctgtgtcacccaggctggaggttagctcattgcaaccttcacctcctggattcaagcaattctcctgcctcagcctcctgagtagctgggattacaggtgcacgccaccatgcctggctaattttggtatttttagtagaggtggggtttcaccatgttaaccagggtggtctggaactcctgaccttaggtgaaccgccctcggcctcccaaagtgctgggattacaggcgcgagccgctgtgcccggccattttcactgttttaaagtacagttccgtggcattaagcacattcacattgttgtgtgaccgtcagcacctggtccatctccagaattttttcatcctaaactaaaatcctgtattcattaaacagtaatgagaataaaactctccatttgcccctccccgcaggctctgacaaccgccattcattctttctgtctctatgagtttgactactccaggcatcttatatcagtggaatcatacactatctgcccctttgtgtttattcctttttttgcaacataattcttttggttggagacttcacagtttttctttcctttgattgtttagtttttgctttgtacctagacctggccagtgatgcatgtgcaatgagtatgcaaagacaagttaattcagcagcttgttgcataccactagggagttattaaagctttcaaaatgtgattcctcatctgtatgcctgtggcttatctactccaagtcttgctgataaacctgcactgagagtaatagcaaagattagtctttctccatgtttcataaaacaaattgttctcattcttacagcctgattatgaactggaaaattacaggtacattgttgtaattgtttatacagacaatgagacatactctccacaggggacctcagctgcaggggaggttctgattgcgtgtcattaagaaacgacagttaagaaacttttttttttttagacggagtctcgctccattgccaggctggagtgcagtggcac

SEQ ID NO: 86485 - DNA, 1014 bp, Homo sapiens
cgtgatccgcccacctcggcctcctaaagtgctgggattacaggcttgagccactgtgcccagcgtaggctagtttttaaaaaagaattagtggaatattttatgtgccacctgggctagaagtagctttgttctaataaagctgttgccaccaaatacacctgtctgacacccgatgtcagcttgttagtgagtgctgctgttggttcccagcctaccacccgaggttgggaagagcagggggacttgttatatcaccctccatccctgctgggctacccagcaacacaagtgagtcaaatgatgggatagtgtttgtcctcatgtgcacacacacaacagtgcctaccttcaaagatgtgaaagctgattattttgtggcccattgtgggatgaatgtgtgtgtgttctgttttaagaaataacctcttgaccccaagctgaaaatgtactacttgactctttttctttccttcaggacctggtgtgaattattcagggtgtcagatcacatgggctaaattttgcaaagtaagcaatcttgttaaattctcgtgggaatgggaatgctcacctgcacggctgtcgttgagggctctggcttgaaggccctgaactcttggtccagcggccagtaggacctgcctgaaggtagacgggcctgaggatttgggtgatgcactgcacccctaggaagggaagggctgggatggcagtagacttggctttcccattactcttttctccaggaaaacatggctggcaagggcttctccttctgggtctggctggacaatatcattgaccttgtgaaaaagtacatcctggccctttggaacgaagggtaggttggacagagtgtgcacagatgtaaccaagtcccctgctctcagcaagccagtggcaggggatggatgccctgttagcaataacaacattgttcctcctccttggctccaggtacatcatgggctttatcagtaaggagcgggagcgggccatcttgagcactaa

SEQ ID NO: 86486 - DNA, 1024 bp, Homo sapiens
tcaccaaattattggccaggctggtctcgaactcctgaccatgtgatccacctgcctcggcctcccaaaatgctgggattgtaggtgtgagccatcacgctcagcctttttttttatttaatttaatttttttttaagacagggtctcactctgtcaccccagctagagtgcagtggcacaatcatagctcgctgcagcctccatctcctaggctcaagccatcctcccacctcagcctctcgagtagctggggctataggtgtgcaccaccacacccagctaatttttgtattttttgcagagatggagttttgctgtgctgcttagactggtctcgaactcctgggctcaggcaatcctcctgccttggcctcccaaagtgctgggattacaggcatgagccaccacacctggcctaagagtgtccttctcgttactgtaggcttccctgattgtgactgaggagctgcacctgatcacctttgagaccgaggtgtatcaccaaggcctcaagattgacctagaggtaagttctgcagcagaatcggtgagaggctacgtacaggggtgactcaggacaaaaacttccactgggatttttacaagagaaggtggaatgattactgtttgcttaacactgtgtttatttttgcttacttttctccaaaaaaatccttggcatcccatctggcaataaagtcttgcttgaatgcttagaagatgtgtgtatattcagctttcagcaaacttgatatgaaaatctctatttagaaattgattggccgggcgcggtggctcacgcctgtaatcccagcactttgggaggctgaggcgggtggatcacgaggtcaggagttcgagaccagcctggccaacatgacgaaaccccgtctctactaaaatacaaaaattagctgggtatggtggcggacgcctataatcccagctactcgggaggctgaggcaggagaatcacttgaacctgggaggcagaggttgcagtgagctgagattgtgccattg

SEQ ID NO: 86487 - DNA, 1082 bp, Homo sapiens
aaaaaaaaaaaaagagaaagagagataggatctcgctctgtcatctaggctagagtgcagtggcatgatcatagatcactgtagccttgaactcctgggcacaagtgatcctcttgcctcagcctcccgagtaactgcgactacaggtacatgctaccacaccccgctaatttttaaattttttatagatgtgggctctcactttgttgcccagactgttatggaactcctgggctcaagggatcctcccagcttggcctcccacagtgctgagattatagatgtgagcctgtaattatagacagcttggcctatttacctgttggaaatgaagaattatgaattttacatttcttcaagaaaaggttatgggagagttactgactttttttccttggattttttctttttaaataggttgctggtcaaattccctgagttgaattatcagcttaaaattaaagtgtgcattgacaagtaagtactcctatcttagctctgtttttcaaatgaggaatagaaaaatgagaactttgacagacatcatttgaactagagactctgtctttattcagagatcttcattttgtggacaaaagttttcaaaagccttggggtgcattgtcatttacgtgtctgaacaaagccacaaagctgggggtacagatttgatttgtggttgctattgtgacaaccagtccctcttttccttgtttagttttttacttgtacatgtcattcatgcatattatatataagactgagatcatgtgttaattaacgactgggatacgttctgcaaaatgtatcattaggcaattttgttgtgcaaatgttgtagagtatatagtccttacacaaacctgggtggcagaacctactgcacacctacgctatgtggcagagcctactggtcgtaggctgtaaacctgtacagtatgttactgtgctgaataccgtaggcaattgtaacacatctcaatgaagtaggaatttttcagctccatgataatcttatgggaccaccatcatatatgcattttgttgttgaccgaaacgtcgttatatattctttccataca

SEQ ID NO: 86488 - DNA, 1132 bp, Homo sapiens
tgtgagggccagtggcaggcaggagcctggtgtttttgaggacctgaagaaggagcagagtgagtgccaggaacttagccaccagctggtaccagccatacgagaggggcagagccagccaggatgtcggtcatgctagtaatgagtacaaacacttacatgctgcacgctattgggctcctgagtgctacgtgttcattagctcgatgaatttgtacagcaaccctgtgaggtaagcactgttctctcccctttctatagatgaggaaattaaggcacaaagaggataaataactggcaccagctacacgctaagtgatcgaagtggtggaaccaggattcaaatccatgctattctgccttaagataacaaatcttgttttttagcctaagaacagagcagtcatcaggagggttttaagtaggggtgtggcaagatcaagtttgtgtcttgaaaaggtctctctacccacagtgtggaaaatggcctggaggcaagcacacagatgttgggagacagttaacagctcttgccatggccccctatgcattttggctctgatgtttctgcctgatttttctcttgcctctgcctcttttcctgaggggatggcaggttttaccattcagctggagtacaaaccctgaaccctttttggttaaatatctacttgcttttcctacagtattattttgagttgctgtggctgtaatgtcttgagggaatcgagcttgacagtaatttatagaacaaacagtttttagagactgtgtggcccaattgccctctcaatgttggcactcctgccatgacatttaccatgctgagcatgtgaccgccatctgaataccaaatgccacaggaacctgggaggttgtcacttactcctccctttctctgagtcacctttgcccttcagtcagtcaccaagtcccatcacatgtagctctgtaatgtcacagaagatggatgtctgcctcaaaacacttacaatgctgctacctaaattgggcagccacgacctcccaccaggattattgcagcctgagggatctttttgaaatgtaaatcaaactatcacttgtctgtttaaagcttttcaaagacttaccccattgcccttggaagaaa

SEQ ID NO: 86489 - DNA, 1077 bp, Homo sapiens
aaaatggtaatatctgttagatattacaaagtcaggcaaattatgattcatggcagccactaatgacccaaaggagagaaagaataattagcagattctaacctaatgggaaaaaaactaaatgaatagggatgggggacttacattctgttagaggaaattgaggctgtcatataaaaggaataggtaaggcaaactgtaaattcctgtttacacaaatgcccttctgataaatctctgcattgcccacagtccatgattacctctcccttattttaagtaatatttaacacattaaaaatggattaccacccaaggaattgctcccgacccagaaagtgcaggtagtgttgaaggtttgaggggaagaggaatgattagagttggttgtgtctcaggaagaagccaacaggaggaaccttattttgagtcaggtaaagaaggtgggagtgaggaggcatcccggtggccaggtatgaagctgggagctgattgctgcacattactcagctgaattaaatgtgccctcacatctgtgtgtgtgcgtacatgcaaatgtacatgtgtatgagttagttggaggggtagacctttattttcctgtcctgtaactttcctttgcaaactaatctgtattcagaacagtgttgcagttaagaaccacccagcttgtccatgaaacaggttctctcaccccatctccccagttttagagaaggcaggaaagaaaaggcagtgcttttcttttttcctggccgtatgcggggcaggaagaagccagcagagcttgaaagagaaagtaaaccttctgggaaataaacggcttggcttccctattgtggaggaggagtgcaaattattagggggatgtttgggtagtttttgtagaagccatttctgaaaactgatttggattagtgaaggtaagcccaatttaggaaaaccctgcccagtctggtgtcagccacctgtttcccgctttgtttgattgatttgattagtttgtggtattctgacctctcatttttattacaagagttggaagatttgagtctgaacttgagcacctgcttcggt

SEQ ID NO: 86490 - DNA, 1049 bp, Homo sapiens
tctgtagtcccagctactcgggaggctgaggcaggagaagagcgtgaactcgggaggcggagcttgcagtgagccgatatcgcaccactgcactccagcctgggcgacagagcgagactccgtctcaaaaaaaaaaaaaataaataaataaataaataaataaaactttggagccgaagcactgatgtttaatcatagagtgcttactatgtgttaggcacaggcctgattgcctgatgctggttaatttgtacaaagtaaatcagtgcatatgccctctgccctaggggagttattaactggagtctgacattgtacaaaggtaggtatcctgactagtttgatttggtactttgggtgaaaaaagtatagtgtgcttaagtgcagaagtgttttttgaggatttttgattggatacaaaccaccactcatattttatgtctttggcacttaaaaatttcaccataacttttgagtcatttataaaaaccactgaaagagtacttgagggacatccccgaatcctgaagaacttctggtgttctggagcagcctcagtgagatccaggaggatggcattgctgggctggcccagcccttattgattatggtgtaaagaattaatatggtggttatatactctttgttagacaccttggcttacaagacgtaagcgtaaagtgtagtgcgctttagtcagtatggccacatggtcctttggtggtaaattgtttgagatgcctccagtttttaaaaggagtagcatatcgggccaggagcagtggctcatgcctataatcccagcactttggaaggccgaggcaagaggattgcttgagcccaggagttcaagaccagcctgggcaacatagtgagaccactttgtttctttaaaaaaaaaaaaaaggcaaaaacaggctgggcatggtggctgatgcctgtaatcccagcgctttgtgaggcagaggtgagcggatcacttgaggtcaggagtttgagaccagcctggccaacatggtaaaaccccgtctctactaaaaatacaaaaa

SEQ ID NO: 86491 - DNA, 1089 bp, Homo sapiens
tgcccaggctagagtgcagtggcgcaatcttggctcactgcaacctctgcctcctgggttcaagcgattctcctgcctcagcctcccaagtagctgggactacaggcgtgcgccaccacgcccagctaatttttgtatttttagtagagaccggggttttaccatattggccaggctggtcttgaactcctgaccttgtgatttgcccacctctatctcccaaagtgctgggattacaggtgtgagccaccgcgcccagtaagtatcagtgaaattctaacatatatctgaacagtaaaataccaccaataggctgaaagacttcatgggaggtaaatattcaataaacaggtgaaaaaagaaatacaaatggagcttgcttagattatttttctaattgctatgtctaacttgggaagtgaggaactgtttttggtcagcataatttaccatcagaatttagctatttactaatgaaaagaaatactaatctaggtttgttttagattaaggacagtcatgacctaaatgtcatttaaaccagagtgcattgtggcttgatcagtggtcatttctgtctctagaaagttgctttaacttctctgcctctacgtgtctcttgacattcagatatgaggtggggtagaggtggtgaccaactttccagacgcctgagtccaaaccttcttagcttatggttttcttaggtgatgtgcaaatcaacaaatatatacttttttttttttttttttgagttggagttgcactctatcacccaggctggagtgcagtggcatgatcgtggctcactgcaacctcctcctcccgggttcaagtgattctcgcacctcagcctcctgagtagctgggattacaggtgcccgccactacgcccggctaatttttgtatttttagtagagataaggtttcactatattgaccaggctggtctcaaactcctgacctcaagagatctgcccacctcagcctcccaaagtgctgggattacaggcgtgaaccaccttgcctggccaacatatatataccttttgcaactttgtcagagttgctatgaagaataagttgta

SEQ ID NO: 86492 - DNA, 1019 bp, Homo sapiens
aaaaaggaaaaaatccttccctagagctagtatcctaaagctgcagagctagcccagacctcattggtttccttgtccttggggtgcttttcctgaatctttgcgggtgaagggagtgttgctcccagtccagaggcctgattctgtttggactgggttctcaagacacgaccaggttctcaagacacgagtccccttgttcctccccattaaagggggtttgtcagaagcaagaacagcccctctccccagtcacagcctgaagggaggccccgagagcttcctccttccccccacctgctccttaccttctctgccctgctttttagaactgcagttcattgttttaagggattgggggagggagcctggggacacaaaccttttatacaatacaaagctttgctttttttttttttttcttccttttccctttctcggttctcttctctcctctgaatggctgaagacccctctgccgagggaggttggggattgtgggacaaggtcccttggtgctgatggcctgaaggggcctgagctgtgggcagatgcagttttctgtgggcttggggaacctctcacgttgctgtgtcctggtgagcagcccgaccaataaacctgcttttctaaaaggatctgtgtttgattgtattctctgaaggcagttacatagggttacagagggcaggtgggaaggagagagaaagagagggagggagaactgttggtataaacttgtctcacgtgcctggggtgggggaaggccagggagataacaataattgccaatttattgagcccttattctctaccaggaactgttctaagcactttggtatggaattgcttatttaatctcataacagcccctctaggcagagcctatcattatcattcccagtctagatatgaggaaacagtgacttgtctaaggtgccatagctgggaagcagtggagctgggattcaaaggcacctggatcctcaatctgtttcatggttataaccctgtgtctg

SEQ ID NO: 86493 - DNA, 1136 bp, Homo sapiens
taggatagtgccagaactttgggcttttagaaatgcgcattgtcagtagaagggagaaggatagttacaaggcagacatctttatgagagggtattgaaggcctcttctgtttgtttcctgcactagcaaaaacagattgagcagtgtgaaactcactgcctcaatattgtgtcctgggtatttaaagagttgtttgaggttcccagttcctgtctttaatctggatacattcttatcagttgagttgcccaaaataattgtcatttgatcctgatgttgactggaatggaagtgacttttcatctgacactctgtgggacagaattcaggaactgcctttgcaatttctcctttccatctttctagacagggtgtcaaaaacagttgttgacctgtcctcatggggtgttagaaatgtaaatgcaagagccgtagtggggtgtcatttgctcttagccctcgtggtaatttccaaagttatgtcattttctctttgcttcaggttggagagaaatccaggtactcactagactggtaccttctgccaccatgggggagcttttccggagtgaagaaatgacactggcccagctttttctacagtcagaggctgcttattgttgtgtcagtgaattaggagaacttggaaaggttcagtttcgtgacgtaagtagttgtggggctgcgacttgattactgctgaactctattgctatcgtggtcagatgccttatgatgaatgttttgttttttatttgcaaaaataacattatagcactgacttcctattggcagaatgcacattttgagttgtctttctaaaggtgagaatgttttgtgccaatctttacatgcttttgctagctcccactttcagaacagtcctaagcattctccaggtaattgtttgggatgcagggagaggttaccaaactaacctgatcaaggctttcacttgctaaatagcaaggtatttaaaaaaatatattgcagtttttccatatagtaggacattttaaaaaaaataaaatttgaggtatccagctacagatatatagtatataaataagcatatactgaatattcattattttggaatattatactgggcacttggagaagctatctaaagaat

SEQ ID NO: 86494 - DNA, 1050 bp, Homo sapiens
ggattacaggagtgagtcaccatgcccggccaggaaagactatttatttatttatgagatggagttttgctcttgttgcccaggctgaagtacagtggtgtgatcttggcttactgcaacctccacctcccgggttcaagtgattctcctgcttcagcctcccaagtagctgggactacagtcatgcgccagcacgcccagctaattttgtatttttagtagagacgtggtttcaccattttggtcaggctggtctcgaactcctgacctcaagtgatccacccgcctcggcccaggagagattattttaagcaaaaaaatttccataaagaaaattgctctagtaaaatcacagtatttgctaggcaagtccaagttctctttgaactatcggcttggcaacagttctgtgggatgaattcatttaatgtctttcagagcaaacatattgagcttagcttaatatattttcttatttcatctaggccaattttgagaagattgaaaatgaactgaaggaaatcaacacaaaccaggaagctctgaagagaaacttcctggaactgaccgaattaaaatttatacttcgcaaaactcagcaattttttgatgaggtcagactattgtttcttttagtatttgagcagctgatattatactcacacaagtgggccatatttttattccagtaattattttaatttgctagtttggaagcaatgccatttttgcaccctgttttagttacagaaatgtgagattatgttccatttttcatgcagtacacaaccagccatggttttgcattttttcacattttcttcaatttttcatctcaatatgaggaaaagaaccctgaagtagttgtataaacatagttagtataaatttttacattatatttatacttataaggtaagtatatgcttaaggttaaagctgaggaagcaaacatttggttatagacaaaattataacaaaggtttaatcaccaaaccttttgtcatcaaatttttatttcattgtctatgtttgcttataaaccttcga

SEQ ID NO: 86495 - DNA, 1080 bp, Homo sapiens
cgagatcgcgccactgcactccagcctgggcgacagagcaagactctgtctcaaaaaaaaaaaaaaaaaatgtaggtgacttggttgggcatggtggctcacacctgtaatcccagtactttgggagggtgaagtgggcagatcacttgagcccaggagttcaggatcagcctgggcaacatggtgaaaccccgtctccacaaaaaatacaaaaattagacaggcatcgtggtgcacacctgtagttccagctactcgggaggctgaagtgaggggattgcttgagcccaggaggcagaggttgcagtgagcggagattaagccactttactccagcctgggggacagagcaagactgtctcaaaaaaaaaatgtaggtgacttagtccaggtgacaatgtgctgaggtgactccatggaaaggatctggagcaaggcttccagaatgctcccttctcctaactcagtctggggaggagtcttagctttcaacttggatgtggtttttctgatggcctaaagtacagtaactgtcttcttgacaggtgtctttgccaccagattgacaatattagacactttagggattgttacagtcactgttcaatgtgccttcccataaagttctttcattcctttgctcaacaagaaaacttggcaaagcttttaaatatagaggccctttttttttttttttttcccgagacaaagtctcactgtgttgcccaggctggagtgcagtggagtaatcttagctcactgcaacctccacctcccaagctcaagcaattctcctgcctcagcctcccgagtagctgggattacaggtgctcaccaccacccccagctaatttttgtattttcagtagagacagcgtttcaccatgttggccaggctggtctcgaacctctagcctcaagtgatccatccacctctgtctcccaaagtgctgggattacaggtgtgagccactgtgcctggtagagtcccattttagttagcatctgctgtgttctcagttgtactttaaatttatatatatagtttttatttttattttttattgtttttaggccggg

SEQ ID NO: 86496 - DNA, 1033 bp, Homo sapiens
ctagcagtctgtatttactaggtgatccggaggcatgctagtttgaaaactgctgggctagagaaggtctgctgaggatgtgatacattcctcactaatttaaggatttgactcagaagccatttaattaaaaggatctgctgggtcaagggaaaggggaaaaactcatatgaatttaattgcctggtcctttcaagagtcagaaggtacaaatatttatttagtttgctcacagagtcgagaattttgagactagtggtaacttctttcgccagtccctaatgacatcacgttagagggtgtgggacagtgtgattaactctaagtgtttaaggtcttttgcaataggcatcgccacttaagctgtatgtttttaatgaacctggaattccagcatgctcactgcccagacgttattgtatttttgttcactaattcactgagcatataatgagcacctacttattgtgagacacaagatgagtaagacatggtccctgtgtttaaggaatgtatcattcagtcttaagaaataccccagaacatgacgctttcatatgctcacagatgtgtgcttttctaaacatatccaagctgctacccacagatctgatgtaaacctggccttgtagtcagagctcagctaccttttagcattatttggagcttaattcttttaccttccctgtccccatttttttcccttttgatatactgtttagtttactgctgagatattgctatctcatatgaaaatgtctttcaagacctcgtaagtttaagaatgagagccagcttcctattatggttcatttttggagaaattccgaataaagactgatagatggattcccttaagggaaataattatttaaactattaattttctaatgaaaagaacttagtaaaaatgaaaataagaggaaccacttggaaaaatgatattttaaaatcataatttatggatttaggacttttattttgtgaataataagtctaaacactaaatgcctgttttgagaaggcagactct

SEQ ID NO: 86497 - DNA, 1048 bp, Homo sapiens
tcaaataatgcgaaagataggacacttgggaccctcaaatgttggaaacttaggatttttaatgagattttcttctgtgtctgaaattataatatttgcaaagggcctaaaacactaccagttttaaaccccttattttgtgtaatttggtgactataatcaataattcacagtaatgagttagcagaaatggctaaatcagaaaatgattctatatttaggcataggagttatgattggcagggtgtgtgtaaggtgaaaaataaacatattgaatagtcttatgattaaagatgattacaaatttgacttagtcatttcttatctagggcatttaaaatgacttgttaatgattatccttttctaagtcttcttgcttatgaagaactgtaagagctggagagatttctctgcatcttttaccataagcaccataacatatgagaacataaagaagactggaaaagtaatggttaatggcatgcagattccctgctttcctttccttctcagttttccatccatctgctttctttatttttttcccatctgccatttcctttggggcctaggtgaataccttaagtaatgaaatataatttttttctcgatgtagatggcagtaattgtttgttcttggtaattgacatagcttgaactggatgtgctatttatacttaattgctgtagaaacagaactgaagttcttctacttcctttttgtaaggcgtggttttcagtatctgaatggagaaaccagagggcatagcagtaatgtagaggcatattcacaatgttgttattagagaacccagatacccttaagacaagcttgtccagcccatggccttcaggcctcaggacagctttgaatgtggcccaacacaaattcgtaaactttctcaaaacattatgagatttttttggaatttttttttttagctcattagttatcattatagtgtattttatgtgtggcccaagacagttcttcttccaatgtggcccagggaagccaaaagatcagacacccctgctctaagattt

SEQ ID NO: 86498 - DNA, 1045 bp, Homo sapiens
agttcctgtcctttgtagggacatggatgaagctggaaaccatcattctcagcaaactatcacaaggacaaaaaaccaaacaccacatgttctcactcataggtggaaattgaacaatgagaacacttggacacaggaaggggaacatcacacaccggggcctgttgtggggtggggggaggggggagggagagcattaggagatatacctaatgtaaatgacgagttaatgggtgcagcacaccaacatggcacatgtatacatatgtaatgaacctgcacgttgtgcacatgtaccctagaacttaaagtataataaaaaaagatatatatataaatataaataaaaaagacttgtattaaaaccttccatcccatgacatggaatagagtttccaatctgcctcttctccccacagcttcgtggctggtgtcattaaccgggagcgcatccctacttttgagcgcatgctttggcgggtatgccggggaaatgtgttcctgcgacaggctgaaatcgagaaccccctggaggatcctgtgactgtaagacaaggagattgcatcctgtggagtaggtcttgtaaagggagcccagagcagtaacgtagcatggggccacctgaatccagtgcttccacagaggagccattatctttatctctgctctaattggagaatttgaagtacttcctcttagttaattcctgtcatatatacatatggatgtatgatgtatacatgacatatacatattttcaagtttacccgtgtagatgttattctgattggaaatttttattttcactcatttgccttttatgaaaattaactttaaagcaagacatctggttccaaatttggtaatttttttttttttgaggtggagtctcactctgttgtccaggctagagtgcagtggcgcgatctcggctcaccacaacctccgcttcctgggttcaagcgattctcctgcctcagcctcccgagtagctggggattacaggcatgtgccatgatgcctggctaattttttctgtatttt

SEQ ID NO: 86499 - DNA, 1039 bp, Homo sapiens
ccagtgaagataaatgtactgcaaaaattttgctttgcttttgtactagtattatttagaaacctaaagttagcttttctgttctaaattatcttgtgaatttcttaaattcgtgttctttacctaaaaagagagagattgaattgtgagatttctcagattgggtgggctgtgcagctgcaggtctttcatcctccatgccgtggaggagtgtggttacacttcaggtgaaccccctgcctaggggtgtagtttcacaatcttgccaaaggccatcaggttgtggaaacgttgtaatttgtagtcacattaatgaggaacttttctcaggaatattcagtcaagtttcctcttggcaacagaaaggttattttatcaacaaatccagaaatggggaccctggatatctgtaacagagcaggctgcacaaagaatgggttctagtttagcctacagaatttagggatttcagacccttgagcccaattttcttcactcctcatccccttttatccttctaaagttttgtttgttattataaaagctctacatgctgtgtatgactatgagaaaatacaggcaacctgagacaatcctggttaacacaccatacacctttttttctgatctttccttccagtccttgcatcatacttcaggtataaatttggtatttggaatggattaccttcctccctgccccataaagtccagattagcttgaattgtgagattctatatcagcattctttccagggactcagttccttgtagttattcagccccttttatctaagaatttctaagtcccagaacaggcagaaatggcttccttctcttttctctcctatactttcatcattcaggcaatataagatttaaagctgaattggtaaataagtctaaacagtgctaagaggagcatcatcttagcttcaagctcctggttgagtcaaaaaaacaaatagagaaagatttttgtgaattagagattatagggcagatgttcttgtagtgaagcttaggaaatggagtgagg

SEQ ID NO: 86500 - DNA, 1348 bp, Homo sapiens
ctggtattacaggtgtaagccactgtgcctggccttttttttgttttgtttttgttttgaggcagggtctcactctgttgcccaggctaaagtgcagtggcatgatcacagctcactgcagccttgacttcctgagctcagttgattctcccaccgcagccccatgagtaactgggactacaggcatgtgccaccatgcccgactaatttttgtattttttgtggagatgaggtttcaccatgttgctcaggctggtcttaaactcctagactcaagcaatccacctgcctcagcctcccaaagtgctgggattacaggcgtgagccactgcacctggtctaggggcagaattttttccatgccatcttactccgttaatttacaatataatttgctttactttttttttttaatcacaaaggaatttcatagctacagagaatgtcaagatagttcggatgctataattgctccgtctgcaggtcattttacgtaagtgttgacttaggctgggcatgatggctcatgcctgtaatctcagcactttgggaggccgaggtgggtggatcgcctaaggtcaggagttcgagatcagcctggccaacatggtgaaaccctgtctctagtaaaaatacaaaaattagccaggtgtggtggcaggcgcctataatcccaggtacttggaaggctgaggcagaagaatcacttgaacccaggggcagaggttgcagtgagctgagatcgtgccacttcactccagcctgggtgacagagtgaaactctgtctcaaaaaaaaaaaaaaaaaaaaagtgttgacttaatacatcggtctgacctaatcctgttttggtccttctggtacattaggattactttctgagattatttaaattagataagttaagaaacttcgatgttcttatattccaggttccgagcctcactctatccctgtcctgagacaccacaggagaggaaggaaatggcttctggagtgaataccaggattgatgatctccaaatggtatgcagaaggctggagggaatttgtttttgtgaaatactggaatacgagaccattatccttccttgaaatgctgatattctataaggtacctgtagcaaaccaggataccaaaaaaagaaatgtacatgggtaatatgtccttctgggagctgagaaagtatcagggaatgatggttaaaaatagcattagccatcctcaaacgagacaggaatgtaaagcatctagaatcgttgttgcctagcatattcaattcctctccacctcatgggtctgagattttttttttttttgagacagagtctcactctgtcacccaggc

SEQ ID NO: 86501 - DNA, 1755 bp, Homo sapiens
tgttgattctgccatgaaagattttctctgagagtcctatctgtctggcagctggggagtaagtcaccttatattgatcttaagattatggaagcctgggcacggtggctcacgcctgtaatgccagcactttgggaggccgaggcaggtggatcacttgaggtcagagtcggagaccagcctgggcaacatggtgaaaccctgtctctactaaaaatacaaaacttagctaggcatggtggtgggcacctgtaatcccagctactcaagaggctgaggcaggagaatcacttgaacctgggagatggaggttgcagtgagccaagattgagacattgctggctgacagagcaagactccatctcaaaaaaaaaaaggggggtgggtatggaaaagaatgtaatatttgtggaattgctatggtttaatgtactttgtatttttctttttttggtttcttcatagctccgtatactattatcacgttcccttttctatttgctgtgatgtttggagacttcggtcatggcattttaatgaccctttttgctgtgtggatggtactgagggagagccggatcctttcccagaagaatgagaatgaggtaatgtttaagttacatctgcattgaactgaaattttataatttcccaagcattcattatgaaaattatgatctggaagtcttttatccatgaatttatcaaaaggaagtagagaagttatgttcattttaacaccaaagacgacatgtgcaagctggaagtggtagtgtgtgcctgtagtcccagctacttggaggctgaggcaggagaatcacttgagcccaggaattcgagaccagcataggcaacatagtgagaccccatctctaaaaaaataaaaattatttaggtttggtgcaaaagttattgcggttttggctgccaaaagaaatggccaaaaccgcagtaacttttgtgccaacctaataaaaaaatagaggccacatcctgtgaaagtgactgtctcattagcattgtattttggtttttacttcaagctctctgaatcaggatggggtaaagtagtgctggagaaaggggcaggtatattctgaataacattgtcacaatgtgagctgcagtgagtacattctcattacttctttcttctggttcccagatgtttagcactgtgttcagtggtcgatacattattttattgatgggtgtgttctccatgtacactggcctcatctacaatgattgcttttccaagtctcttaatatctttgggtcatcctggagtgtacggccgatgtttacttataattggacgtaagttgcagaagaagctaaaattcaaagcttattcctttcatgtgcagccctgatttttaagacaagtggtaaactgacacttctttaggaagtggtgacagtgtctcctcattcatgctccacactgtgagttgctttgtgatttgttcagcaagtatccaggaactaagattagaaatgattttttttttttttggaaactaaaaccagattccccagttccctacttgattgtgtgtttgtgtgtttaatttttctttttgtcattttggatccctcagtctcagctgctagtctctcctctttatttttcccctcccattttattgaagagacaagatagctacagtaatttattttggggtcagtttctggacccttgttgtttccctctcttgttcaaaaataatgtgactttttccctgtcatggt

SEQ ID NO: 86502 - DNA, 1086 bp, Homo sapiens
tcttatggtcatccttctggaactagtctaagtcatccttctggaactagtctaaaagggctgacattttgagtcagaaaaaattttaatcttgctgcttaaaatacattttcaagtagggacttccctgtgagacatttaacaaacctttagaacacatactacctattgtcaatgtccttaacacatactcttttttctgctagtcttagcatatataagatgtgcttctgacaagatcttaatgcatttaagtcttgcgacttcttctgtgataaattctaagttaaaagttccccgtttggaaacctgcacattcatagggtcttcttaccccactggttctttagccaaacatctgttcctggagagcagcctgaaggcatcaggatgatcagtctacaagaaagtctctggatttttgaccccagagggctgaggatatgaacagtgatctggttttgttctgttctttgtccccttggttgtctgtgagtgatatatcacagtttaatttttcttttcttttttctgctgacatgtgtctctcatcccccttcctgtaactctcattcctgtgttctgaagagatcattattagtgtctggctgggagatttaacctgtctgctcctcagtttatctgctagttggagaaagcttcagaaatggccttctactttgggagccttgaaccttgaagccttcctcctatatcttataacccagccgaggttatgcaggagtcccctcctgtgcccttcgttgcattttcagtccaccttctgagggttgccaggtggaatatgtgcatgacctggaggtgtccaggctctggtggcccacaagtctgactgcacatcacagtcacctggtagactttgaatttgtttcttagggtattaaaacaaataagtggaagaagaaataaaagtggcccataatttcatggtcctgacaatcccctactgacattaaaaaaataaagcaataggtgcacttggctagagaatgcatatagtgctaactaagaagaaaaccacctgcccccactacagtcctcctcttcagggggcattgttaacag

SEQ ID NO: 86503 - DNA, 1443 bp, Homo sapiens
cactaattgggatctgtgagacttaactcatttctgcctggttttttttcccaaagagtcttttttgctttgggtttggaaaaactcaagttttttcaaatcaagttgactttaaaatctacttttggagaccctacaaaagactgtgtttgtgaactcagaagaagcaaatgccccatcagcgtctgcccacgtgcctgtggaagaattgttctaacattccagagctgtctgctgaagaaaaggagcccctactcatctttttaagctcagcattctctagccacaagtgaatgtacattaagcatttttttccttctctgaccttggaagctttttgttcctgggcagagacatggtacatttctggaagaagttgctggaattcttgggctcctgttaaaagcttatcagactagggtacaatcacaatgtcacttggccccccttcctcttagaaagtctaatcgttagggccagaaaagcttaggcccttgcagcctttacagatagagctgtacttgttgtgagaatctgttcatattaaggttttcattcaagcaggattctcaattagtgttgacccaggtgaggctggtgcctcttggcacagcagacagaactgcatatttcctctgaagcagggtaaggtggtaattgtaggttgggctggggctggggaggcggtggttggggtggaacagttgtttgattttacttagccgttcagtcagtgggttttgtttttgttgttagacatatgcttttctgaggtttgtgttactaaccatcgcccttcccacctcacagaatgtcatgttaaagcccaggcaaattctactctttctgttcatctgtgtagggaactctcaactttggtgggatcagggtgggcaacggaccgacagaggaggatgctgagattattcagcatgaccagctctccacccactcagaggacgcagacgaggtaagatcccgtggtgtgggctttctctccttccacctcgggtcagccctagtcttgtgtacctaagaggcctcactccagtcttctccttgaaaaataaaaatactaattaatattcagcctgccttctggacctcttagggcaccacagctttttccagtgggccctgccctaagctccagctgttgcccccagagcccgcagcagttttgctcctatcttgaattccagattttgcccgcagtgctctgcacgcaggtctccattactgactgctctctcacctgaggcagagcaggcctcagcatcccagctcttatgacctgaaacacaggtcactaagcacagcttcttcatccattgacccttccaaggatcgttccaattacattactgaccagctataatcactggtacttttgaagtcctacaccactgatgtgttcttgctgcagatattttgtttgagctt

SEQ ID NO: 86504 - DNA, 1038 bp, Homo sapiens
acaccagagccaggccagtggttgtctgggaaatcttcaaaggccgtgaccactcagcaagggtcagtggcacctctccccactgtctcctcaccaggtgcattcatcccatccatccatgcattcactcaccctccgtgttgtccagcactatgtatagtgctgcagaaacaagaagaatatagtgcttgccttcaaagacctcccaaagtggggagatagtctggatgacaggtgctgtaatagaagtgtgccccggatgctataggagcacagaaagagggcaactgatgaacactggggtgagagtggaagaggagaccctggaagactccctaaggaagttgtcttactctggtcaagcaggaggccctgtagagggagtggtgcagacccaccagcatatgcagcttcacaggggcaaaacacctgtaggtccatcacgtgttggggactagcaagtattcagcttggctggagcagaggcaggagtggggaactggggacaggtgagactagaggttggcagaaaccagccatagtagtttttgcctcatttggacaacaaggagccatccaagagagagcggtgaagctgatggtgacacagccatggcgcattgaaatacccccagtggctgtgttgtagggtatattgggttggggagggacaaggtcaggaggcatagactcgacatcatctgatgtgattcaggacagaatggcgagcctgaagtgaagtgtctgtaggataagttggaaaggaaggaaccaatatgagatattaaagaagtgaaagctataggtcccagtgccttaataaaggtaaggagtaagagaagattcgagattgactcccagactctccagtctgctggacatgggagatggaatagaagttgatctcggtgtggtcagaggagagcagttactgtgttgagcatggagagcctgtcgttccccaggagaaggagtacagctggctggaaataggcaaggcagagatggagagatccaccttggagtcactcctagggg

SEQ ID NO: 86505 - DNA, 1021 bp, Homo sapiens
ctcgcccttttgctcccccaaggaaaaataacaagcaaacagaggtgcttgcccagtgtctctggaggggcttcccttagaggtgggctgtgtgatcccctgccaggagggggcgatgggggccacttgttcattaacgatgttaggctcaaggtaactgaactttttttgcacatgcctctctgcagagagttgtgcataaacacactgctcggcaggacagagcaagattgggaactgagggcaaatcccttcctccgtgcgtcgaactcttgatcccaggccttaaaagtgggatctctgcactctgggctttctctagcttccccagggaagggaggctcggggtgaggtgggcacggggcatctttcctgcccaactgtgaagtcctaaaaagcttcacaaagtttctattgaatgacagctttcttcttctctttctccagggttgagttccagaataaattctacagcgggaccggtttcaagttcttacccttctccttcgagcatattcgggaagggaagtttgaagagtgagtccctgtgagggccgtgtgccccatgctaccctccccgcctccctccacagtgatcagctgtgcctctctgcctgttggttgtgatctgtgggcaccagctcattcgtgtcaccctgtctgtgagtcatttagatagaatagtcctccttgggtctcccaccacccctagctttgtgtgtagtgtagtgattttctggctgtcactcatactcactgggcaccagccttgccctcttagcctccatccatccagacagcccttcccacctcctggtggtgagccagtctgcattcccacgccatcccaaagccctttcatcttccccgtgcattgtagatggaaggagcacccatgccattcacatctagactttgagttccctgcatctgccaccgtagtttctagcaggagtagtggggggagtaatacagattcttccctagaaggggacactggtaacatgtcccactcttggat

SEQ ID NO: 86506 - DNA, 1004 bp, Homo sapiens
gactgatgctcttccctgatggagaccctgagatcttccccacccccaatcatgatgtcttcagtgtgggactggggtcctcttggttctgcctgcagcctgcctggctccgcccctagtgccccctcctcaccacactggccccaggtctcaggaggggtgtcctgggcagggaaggtcagtgtcactgatggtttgctgtttggaagccattggcagggctgccgtgcatgtggctgtgagggctgcacagtcctgccaaggggcttcctccttgtcaccccgaaccttgtaatcgtgtgctggcgtggcagccctggctaagttaatccccaccgctttcagtggtagaaagaattccctgagtgggccaggctggtgccctcctcctaccctggcttttctgagtgagctgcctggagccctcatcccctctcccaggctgggctggccctgggcggggccactgtgtgctggcccactgtgacctgacccgaccttgtgcagcccccctgccctggtgtcctgggttttcgtgatgatctttgctctgtttccagtggggtttgaagcagagttcagggaaccctgcccaaggtcctcctgttcagacattcctatgttgaataaagtatgtttgacttccccggagaagctgcctgtcactgtgcccacagcccctgcgtcgctccaggctcagccatcttgagcccctgtggacccctgaccttcgcctccctcctccagcattgctgcttttccttctatcaaaggccacagcttcagtaggcctggctgggcagttggtttgggaaattctcaccttgtcccaagtttcccaggcgccttcccactcacaggatccaagtcagctctgcagacactacctgtgggaagaggggactgggcagcccatcttcgtctcccgtttactcattgcacatccagacagcatgggggcagaggggcactgggtatctccccacgcgcctctccctcttctc

SEQ ID NO: 86507 - DNA, 1050 bp, Homo sapiens
tcgctacttcgctacttactgcactacttcgcagcatcacaactatgatggaaatccttacttacgttaaatatctggtttctaggtcacctccctgacggggacggtagggaccgtcttctcgttcatcagtagggaagtagctatggcagtgcctgatacaaaataaactccaaatgtgtatttattagatggttggatggaagttatttgcgtgtgaaagcgcgttttacccgaaggcgctctgtgagggccagcgggtccccttcggccctggagccggggtcacacgctccccaccgcgtgcggtcacgagacgcccccaagggagtatcctggtacccggaagccgcgactcctggccctgagcccgggcttagccttcgggtccacgtggccggaggccggcagctgattggacgcgggccgccccaccccctggccgtcgcgggacccgcaggactgagaccatggaggcggtggcggtggccgcggcggtgggggtccttctcctggccggggccgggggcgcggcaggcgacgaggcccgggaggcggcggccgtgcgggcgctcgtggcccggctgctggggccaggccccgcggccgacttctccgtgtcggtggagcgcgctctggctgccaagccgggcttggacacctacagcctgggcggcggcggcgcggcgcgcgtgcgggtgcgcggctccacgggcgtggcggccgccgcggggctgcaccgctacctgcgcgacttctgtggctgccacgtggcctggtccggctctcagctgcgcctgccgcggccactgccagccgtgccgggggagctgaccgaggccacgcccaacaggtaccgccccgaagcttccccgcgtccgcccgaggcgcttaccccctcccggagccgctgccacccaaatcgggaggctgagcggggagcgctggccggaaggcccagctgcgccgcctccagcagctgtgtggccttgagccagccactctgcctttcagagcctcggctggcccacctgaaaaacggaaagaaga

SEQ ID NO: 86508 - DNA, 1044 bp, Homo sapiens
tgtgaaatgggtacgtggacagacctgtccagtagcctcccatgtgagaatcctcggactgagagggtactaggagggctaatacagcgcagccctgtgattccccacctctgtccctggaatgaaggaaatctgggtgttagttctggctttgccgatgcctcttgggtggcctggctgaaactaatctctcctcatcaggccagaagggaatctgtgaaatgggctttgaaacctgccttgcctttctccgcccggtcccagcgggggtccgatcggcatcaaggcttcacccactcccagagccttcgggatcagccccaccccatcagcaggacacagcccatgccactggaaatctcgcgagaatcccgcgctgaagcgaagtcgagacgtttgaccttcctccgtttccgtagttccgagttgcggtttctccgttagtgcttccgggttgcagccagggaagcctccgcggtggtgcaagtggaacccaagccttgaggtttcagtgagtagggggccgacgtgagctttagcgtccccctttagcctccctcttcgattccttgaagaccctggtgcagcttagcaagagggcccaggatttttggatccccagccctgtgacaagggttcctgtccagtttccccctcccaggatttcgactcagttcagcgaagtcaccgccccgtctgagaaatgaggacaccaaggcttagagcacagccccgaggcgccgtctaccaggccccgtcccctcccccggctcctgtcggtcagcactgaaaccccgtccctgctccaggcctccttctctggggtccaaggtcccatacaggcctctgcctcggccgcaggcccttcagtcaccgtcgcctcgtctccctgactgtccgcaggcctgggcagcatggccgtattccggtcgggtctcctggtgctgacgacgccgctggcctccctagcccctcgcctggcctccatcctgacctcggcggcccggctggtgaatcacacactctatgttcacctgcagccgg

SEQ ID NO: 86509 - DNA, 1039 bp, Homo sapiens
gggtgggcaggtagtatagtcccaggcacaaacacctcccttgcagccttcccaccccattgagtttgtgagcatagaacttggtgtcatggaggaactttgtgccattttgctttaatctctcagggttaaagaacccatttcccctgctgtttccacagagaggctatgatgaccttcagaccatcgtccccacttgccagcagcaggacttctccattggctcccaaaagctcagcaaagccatcgttctacaaaagagtatggctagggaaagcactggaggggatggagccaagcggggctgtgaagaggccagtgcctcctacccacccatggctcggccttggtgtggtgattgccatgggatagttggggtctggggtaaggggaacaaagtcagccttatcttcttggttgagaatacttctgtacctgtcctttttttcttgcccccaccctagccattgactacattcagtttttgcacaaggagaagaaaaagcaggaggaggaggtgtccacgttacgcaaggatgtcaccgccctaaagatcatgaaagtgtaagaggggtgctgaatggggggaaccagaacttctgaggcaacttcattgcacaccctcccttgttcaaaggccacatcagttactgctgtacagataatactcttagttcctgagctagccagtaggactgtgtatccccaactgtccttacacatggcagacactcaggaaatgcctgttggattaatgtaaggaaggttggagagagagggccacctttcctgacctggaagcagtatctccctgatactgaaccccacccagaagctctctggggctgccattcctgggagtacacaggatagtcccgtcattcttcttgggtgggcggagctgctgcagcacctcagccctggcctgcatgcttttaggaactatgagcagattgtgaaggcacaccaggacaacccccatgaaggggaggaccaggtctctgaccaggtcaagttcaacgtgtttcaaggcatcatg

SEQ ID NO: 86510 - DNA, 1351 bp, Homo sapiens
tactatgcccggctaatttttcttttggtatttttagtagaaatggggtttcaccatgttggccaggctggtctcaaactcctgacctcaagtgagctgactgccttggcctcccagagtgctgggattagtcgtcatcttttgttaaaccaggatttgatttttttcttttcttttcttttcttttttttttttttgagacagagtctctctctgttgcccaggctggagtgcagtggcacaatctcggctcactgcagcctccgcctgccgggtcaagcgattctcctacctcagcctcctcagtagctgagattacaggcatgcaccaccatgcccggctaatttttttgtgtttttagtagagatggggtttcaccgtgctggccaggctggtctagaactcctgactgcaaatgatcagcccgcctcagccacccaaagtgttgggattacaggtgtgagccactgtgcccagcgtgatttttttttttttttaaagcaaacttgtcctttggttttgcagaacaggcctgctccctctcatctagcccatcatttcttggggcctgaaccccagtggtccaaagtattgcttgtgaaatttaaaaaatgtgaatatgatgtggggatgggcctcttctacattaccttggcccagggggatcagctggctgggaggattagtgagcacctctgtattttgaggtctgagtcttctggagctgtgtagttaatcttcggtttctgataacccctgggtccatctggccatcagcctcagcagtgagcaaagcaataccatactcatttctatgttcctgttccttcctctgctcctcctttggagaagcaataattcatgggggatgatacagtagcactttacaaatggctccatgtcattcatcccaggggccataatctcttgcaccacctattcttacttcctgttcagctcctttacagcttttattttcaactgcttcccaacttggtggggcctcctttaaggatgagccaatagtaagaatgtggctgtaatcagcagagacccctctgaggggtatctgttctgcagcccctagtgaaatcatgtgatgtgagacagaaacctaaacatggtacttgattctaaacctgtgccagtctatagcctctgcctccccaagcagagctcaagccaaacgcttctgtcctctttccttctgcattaaccctttgctgatcctcaggggccactcccccaacacccctgtacttgggtgagggatgttggacagagcctgttttcatgtactgcaggtgggggtgtgctgacatgtttgctcttggttgatggagaaggtac

SEQ ID NO: 86511 - DNA, 2475 bp, Homo sapiens
cagcacttttggaggctgaggtgggcggatcaccttaggtcaggagttcgagaccagcttgaccaatatgatgaaaccccgtctctactaaaaatacaaatattagccaggtgtgatggtgagcacctgtaatctcagctactcaggaggctgagacaggagtattgcttgaatccaagaggcagaggttgcagtgagccgagatcgcgccattgcactccagcctgggcaacaagaacaaaactccatctcaaaagaaaaaagaaatatgtagggtctggtggagaggatgttggaagctgagatattttctccagtgttttcaactcaccttgcatttaggctcagcagctcagccttctgttattattatgtaggcttagagccagattcagagaggctctttgttttgtgttctgattttatgtctttaaagtccaaaggggattttacgctgggagaaggtatcaagcaagactttgtgctcttcccacagtacgccgcagagctctccacccagaacgagccatggacaaccacagtgacagcgaagaggagcttgctgccttctgtcctcaggtatcttgagtgtgggagctgcttcactgtccagttttctttagctaccttttaaccatccgacagctcacatttaggccataaccaggtttgaggccttagactccccttgttcccaagacaaggagagaagtgagactttgttcctagatctcaatttttttctttatcatatcattcctgtaatcaacctaggtctcaattagagcctgatgcccagcaccgctcttccgtatctctttttaccctaccattatggaagaacttctggagctagtatgatcatcttttaaacagcccagttcacccttgggtctgtgcagtatgtgtatcctcctaccactttgaaaaattatctctggatcaattatttgccttaaagtaagtgggtaattgactcccccaagactgcttttcttcctgtgcttaagaggttatgaatgagtgttttctttgggagagcagcctaaaaggggtcaagattttttttgttgttgttactttcacatgtattgattaaaaaaaaaataaaggggagagggagttttcaacgggaagttaccatctatccctggttacattgatttgatggccttcggataactaatgctagctgattagtaaagctgtacctggtgactacacctggttcctgatggcattatctcacatttgttggtcttttcctaagctggacgattctactgttgccagggaattggccatcacagactctgagcactcagacgctgaagtctcctgtacagacaatggcacattcaatctttcaaggggccaaacacctctaacggaaggctctgaaggtgaggggagcctttgacctcagttgataatggctctgactgttgcctcttagcttccctgaacagaggggatactggtgcttgcccctctcctgttttctgagctatggatcaggcggcagagcagcctgagtgctgtggctacagccaggatggcactgctgcccttcttgaagactttagtcccttagtagcctcaggcactagcctcacaggggacatagaagagagggggaattgtgtagagatcacagccacctataagtggaggggaaaggtataccagtcccatgggtttatttcgccctgagaaagccagggtgggaaaaatctggtcatgtggggctggggcacaggagggccaggtaggtgccatgactcagacacttctgtattccaccagacctagatggtcacagtgatccagaggaatcctttgccagagaccttccagacttcccttccattaatatggatcctgctggcctggatgatgaggacgacactagcattggcatgcccagcttgatgtaccgttctccgccaggggctgaggagccccaggccccacctgccagccgggacgaggctgcgctgccggagctcctgcttggtgctcttcctgtaggatccaacctcaccagcaaccttgccagcctggtctcccagggtatgattcagctggccttgtcaggggcctcccaaccaggcccttctggagcacctgcccagagagcaacgagaggcttcctccggtcccccagttcagacctggacactgatgctgagggggatgactttgaacttctggaccagtcggagctgagtcagctggaccctgccagttctaggagccactgaggcagagactccttttgggagtcactgtggtttaggtttttttctccccatcccacttaaggtgatggggcaagggaagaactcagctcccctcccctgaattatatttgtatgctgggtggcctggctgatgctcagaggcctccttagagaggacactcactcccctcccaccagctggatgcccatttctgagctcagtcactgaagt

SEQ ID NO: 86512 - DNA, 1904 bp, Homo sapiens
gccattaggactaacacaggagcttggtgactgctcatttggtgtggttgccacttagatgaggccgttttcttgcttcaagataggaaagaaagctttcttgtgtacattctgtgtcatattaaatatgtgataggttgttgtgtttttttgggttttgtgtgtgtttctgttgacttaaaaaaccaccaccaacattgctttcagagagaatttttggctaagtcctattcaaaccaatttcttggcaggaaaggtgcagccctatggggttagccatgtaaaaggagtttgaatagaaggggacatgctccttttcttcccaaacagaatcacctttggatgcaacagtggctgcacgtccatgcttgacttacagagtctttctgtcatatctctaccctaacccttcacacccaccccagtcccctgccatgtgacagaaacttaatactctttcttgattccccagttctgcttgctgagctgtgggatactgacctttttggctgtcttgggccgctacgtccctgggcttctgctgtcctacttgatgcgtaagtatgacatatacctcccctacaaagtataccctgctcatagctttccaactatggctaactctaggtgtggggagaggactgttatatttcaattctctaggatatgacctttgcatattttcatgacctgtttagtgtcatgaaaatatccttctttagcaggctctccacatacaaagttcatttcttaccaagtcagaaattgatgagggtccactaacatatattgttggtattaccaactataaaggactgcctgtccctgtttaaggagagaatttttagagccagggtattgtcagcagaacataactcttaggggtttctctgctaggttctatttatgccagagtacttttttcccacttggagcatagttttgtaaatttagttacttcctgttggcatgtactcagcttgcttggggctggaagaactaagtacttatgcctgtggcttttgtatatcaaaacctcgcatgatttgttgtgtaatttccatttatggctcagtgacacccattgccaggttctgcccttggcctgtcagcagcatactgtgctgtgcacaaccctgcagtaggctttgtgggtggctgtagaagtccctgccctcaaagactccttcatgtgtaggggagactggtgaagatgactggcagacttgggcagatctgttccacactttgtgtccaagccctaaggaccaatagcagcgctacagttgggaatgttttttgcagccccttctccattttgtcactgtttcccatgcctcctcacagttgtcactgtcatgatgtggccccttgctgtgtaccaccgactgtgggatcgagcatatgtgcggctgaagccagctctgcagcggctagacttcagtgtccgtggctacatgatgtccaagcagagagagagacaatgtaagtgtcatggtgtcattctttccacttacgcaatttggggcgaaaaggagaagcccataggtctgacatactgggtgggtcctcaaaagtggaagtcgggggtagttggtgggggtgaggattgataggtaaaaatgatattctgttctagggaaacctgtgcaggcttgccagtttttatcatttgtaatcctaggctcccgttttaaacctatctgataaaagctctttcaagttgaataaaagctagacagtgaagataaattcctagtatttgtggtttgttttttttttttttttttttttgagacagggtctcattctgtttcccaggctggagtgcagtggcatgatcatggctcactgcacccttgacctcccaggctcaagtgatccttctactcagccccgccaaa

SEQ ID NO: 86513 - DNA, 1032 bp, Homo sapiens
tcccaggtagctgggattacaggtgcacaccaccacacccggctaatttttgtatttttggtagatacggagtttcaccatgttggccaggctggcctcaaactcccgacctcaggtgatccacctgtctcagcctcccaaagtgctgggattacaggcttgagccactgtgcctggccagaacttgcttttcaatatagcttttatgccaactttctgtgtgaccttaatcaaatatttttcaggcctcagttcctagatctgtaaaaagatatgtaattgaattaaatgctcttgagtgcatctctgtcagtttgttgccctacactagggtctaatttggtagaaagatgtttgctttcattataacaacttgttatcaaggatgaatttctccgtgaaattaatagagatatagactggaaagcagaaggagctttaagaggttatttgatttagtcctctgcctttacagcagcaaattattttctctgccccataggtagagtagttaaggtccagaaggtttaaatgatttaccctaggtgtataactagttaagtgtcagaacaaaaaaagctagacctcaagtctgtttaccacagagcccatcgtacacacgtggccttttctgaaattaggataactaggtaaatgatctttcttctgtttttcttcctctgtaggttttttgccctgacatctcttcgtcttgtgtttttacttgcatttggcttgatgatcattgtgtgtattgatcaatggaagaacaaaatctggcctgaaataaaaggtgagtttggtagcatttagaacaatctgaactgaagatggcctttcctataatttgtacctttagtattaggggtttatgaggaggtgtatggagctggggactgtcttttgaagtctgaatcatttgctttaggaggcacttgaagggcttgtgccccaattatggttccttagagctgggttctgcccttcccattgttactaagcacaggaaatctgtactcaccacctgagtta

SEQ ID NO: 86514 - DNA, 1031 bp, Homo sapiens
caaagtgctgggattacaggcgtgagccaccgcgcccggctacacatcagatttctaatgaaatctgttgagtgaatgttcctgatgatagtctttgcagggttcttgtctttgtgagccgagaagactcccaaggatgccttggtttatttacttcccctctctttacctttagtttttatctgccctaattgtatggttgagtgctttctctccactgttagcagctagctgatttcatttctggtttttttgcaagcaacaactgtcactgcatgatataggttgggttaatttttcctttgaatttaccggtgacttgggctcattaaccaggcggtcacaagtgctgtacagtaacaggctttctgtccctgtagaatgggatgctttgttttgaagtgcccttgagacaatcttaatctgtaataacaaaggaacctagaaatcatgtctttgaaaatagacatgtggtcattatttatgattatagcaaactttaatttactggtactaatagtgaggctccatggtatagttaatcacaaaagtttatgtttggttctggaatttctcacgatgtttctggacaccaattgctattccagggatattttatttagactgatcatttaattggattttagtccctgacagagtggagggacagttcacaaaaggggaaaaaaaaatcaatggatatataaaatttcactctcacaaataagaaaagaattcaaatatatgtaaatggaaattatttactaatttctatcttaagttttttttttggcgggggacaggatctcactgtcgcccaggctcgagagcagtggtgtgatcatggcttattgcaacctcaacctctgggctcaagccatcctcccacctcagcctctcaggtagtggggactacaggtgtgtgtcaccacacctggttaattgttttgtatttttcgtagaaacaaggtttcaccatgttgcccaggctggtcttgaactcctgggctccagcagtccacccaccttgg

SEQ ID NO: 86515 - DNA, 1038 bp, Homo sapiens
tttagtttctcttttattgtattgaataatgggacaaaaatgacatatcattaactgagatttttatgcattttgaggtattaggagataggagtacaaaaaaaaacccatcagaattcaggtaggtagctcttaattttcagtgttttgtatcctcagtcatattttgccgtaactgtgaatatgccctcttacatcttaaaaaaaaaaaaaaaagatggagatagatgtagataccttgtcaccatagtattccaaggttttcatacttttttttttttcaggtaccagagaatttatggtggccatatcagaggtcttccagcctagattacttctggtcactgatctgttattgtctctagcataataatagaaatgtcaggccgttccttccaatagcttgtgttttcattagtctcaacctcatctgtgaatgagtgatttgggggaagaatgtgagagtcaacaagcatgtatcctgacaggatcagaaaagaacaggtttgggtaactttttggtttgacttgtactctgagatcagaggagggtaaatgaacactggaaatgtgtgaactccaagctccctctcccacctaacatgaagagatagttcaaggaggcctacataactgctgagctctttcagttttttttttttttttttttttttgctggggaatcgggggttgttgggctggacagggtctccctctgttgcccaggctggagtgcagtggcacaatcatagctcactgcagcctctacctcctgggctccagcagtcctcttgcctcagtcttccaagtagctgggactagaggcacatgccactgggcccagcctatttgcaaaacttttgtagagacagaatctcaatatgttgcccaggctggtctcaaactcctcatctctaacagccctcccggcttggtctcctaaagtgctaggattacaggcatgacccactgcaccttgactgctttgtggtttttaacaatctgtgaatctacatagtctatgaattaggaatattg

SEQ ID NO: 86516 - DNA, 1058 bp, Homo sapiens
tttaatttttatttatttattttttttgagacggagtctcactctgtcgcccaggctggagtgcagtggcacgctctcagctcactgcaacctctgctgcccgggttcaagcgattctcctgcctcagcctcccgagtagctgggattacaggtgcttgccatcacgcctggctaatttttgtatttttagtagagacggggttttactgtgttagccagggtggtcttgatctcctgacctcgtgatccacctgcctcggcctcccaaagtgctgggattgcaggcgtgaaccgccatgcccggccctatagtttctatccaacttactgtcattagtgatgccttttattacagaaatactaatatatttgattaacgtgcttctgattaaataaaaattcccactggaattttatttaatatatagtatatataccataatacctttctaaaatctgaaatattttgaattccaaaacataactggccccaacactgttagataagggtatatggacctgtattattaccttcattgtacagatgaggaaactgaggcatagagcaattaaataagctgcccagagctacatagaagtagagttaatgggccaggcgtggtggctcacgcctgtaatcctagcactttgggaggccaaggcaggcagatcacctgaggtcaggagttcaagaccagcctagccaacatggtgaaactctgattctactaaaaatacaaaaaatagctgggcatggtggcatgcgcctataatcccagctactggggaggctgaggcaggagaatcgcttgaacccaggagacggaggttgccatgagccaagatcgcgccactgcactccagcctgggagaaagagagagactccatcgcaaaaaaaaatagagctaatgtatgaacccaggtagtctgggtgtagagtgctttcttgtaaccactgcaccgtactgcctctcaatgtagataaaagcaggtagctatgctccataaaaggacttctgggtgttataaggagaattgagggtggcttttctgagg

SEQ ID NO: 86517 - DNA, 1079 bp, Homo sapiens
cacaccctggacctgcaggggtagaggagaggccacctccactgctcctatgcccaccccaggtccacaagagcttgcagaggatccgggaacgcaagttggccaacttcatcccgtggggccccgccagcatccaggtggccctgtcgaggaagtctccctacctgccctcggcccaccgggtcagcgggctcatgatggccaaccacaccagcatctcctcggtgagtctcaaagtttgcaccttttttccctgaatcagtttcctgactatacctcacctctctgcatctgctggccctgcttctagcttttttgctgtgggcatagcccagccttggttccccagctttctgggccacgttattctttgaagttctttgtaacccctgttttctgcacaccccaagctcttcgagagaacctgtcgccagtatgacaagctgcgtaagcgggaggccttcctggagcagttccgcaaggaggacatgttcaaggacaactttgatgagatggacacatccagggagattgtgcagcagctcatcgatgagtaccatgcggccacacggccagactacatctcctggggcacccaggagcagtgagtcccccaggacagggaccctcatctgccttactggttggcccaagccctgcctgactgaccaccccctcagagcacagatcagggacctcacgcatctctttctcatatacatggactctctgttggcctgcaaacacatttacttctcctcttatgagactatttatctttaataaagcactggatataaatcaagtcactgctccctttaaagcctttgggttctggagatgcggtggggatgcctgttctttctccatcattctgacagggtcctcacccacttccagcatcttcaattctgaaccaacagcttcccctaggtttttcctctgcctagttttggagaacgctggtggggtttgacccacctgaaattcctttccagggtaaaaaggcccagagatattactttgttctctgtctgaccctttctgggtccccgttccctcccaccctcactgtatca

SEQ ID NO: 86518 - DNA, 1128 bp, Homo sapiens
gatcgcctccaaggcacccctggagacccccacccagctactgctcagggacatacaggtacacaccagggagagccaggagagtggtggaccccaaagctttctggggttgtgaggaactcccttccccatcaaggtgaccctctccctggccccctaggaaagttgcggggacccagaggccgttgccctcatttacctgaggaacccgattctgagacacactagtggagccttgtatgccccactcctgcccctgccctatggagtcagcgccccaggtgagtggtcccatggcccaagtcccctggatgggatggggtggttcagaggtaagaatctgaatcccttaactggcagggatctaagcatccttcatggacctgccagctcctcacttttcgaaggatgaaggtgaaactggaagctggccagggtggaggagaggaagccagcacacacaaaagggccccctttggccaccttctctatgggtctcattctgactactgatgttccttcaggagtttgtacactcccctattttttcattatcctcttgagactatgccatattacctttacaagtggtagaaaagctaccacttttgtagaatgtgctggcctcatccaactgtacttctccctaaacggtgtagtgactggcccaggtcctaaagttagaggattaaagggtgctgggagaggaaccccggttttctgactcctagtccagcctgttttctgacctatggtggtgagcctcagtatggagttacagaatctggggtgtgaatctacagcccttcccggccgtccgtctccctaagtccaaatgcaggcttagtgggattgggaaggggattcctgggaggcagaggttgagagtctggctccgtgggaccactgctttcccttcactcttcctgtcgttcgtaccctcccctccctgccaccccatccccttatattccctctgaccttcccctggttcatgccttcctcccagggcgcagctctgtgtcccctctccaaaccgtccctccgcccccaccctcccacaggtccgggctatgcacccctgcgcgaggaggcggtgcggctgttcttggcgctgcaggcgctgga

SEQ ID NO: 86519 - DNA, 1021 bp, Homo sapiens
ggcctggactgaggcctttacattctggagaggggagaggagtgaagggggcagggcaggaggccccagggtactgggaaaaggtgggagtggctagaggcagtgaggaggcgaatctgagggactaagtattcttggagaagggggaagcctgggagtcctggtattctccagttccagaaggcccctggagatttggttactcgtttataactgtgcagactctgtggcagttgctgggtcatggataatgaagagacattcagagaggtctccactgggtgtgagaagtgtaatcacgggggcacacaggctgctactgggacacagtggggctgctgcttccccactcagaacattcttctaccctagttgctgcttccctccacccacaccatcatccattcttgtccagggtaccgactgaatgacggcttttggcacgaggtgaattttgtggcacaggaaaaccatgcagttatcagcattgatgatgtggaaggggcagaggtcagggtctcatacccgttgctgatccggacagggacctcatatttctttgggggtaagtgggggccaacctgaccagacctctgtttctgggtgggaaggctccatctaagtccacccagatggggccacatggagaattttggagggatcaagccctcttcccctctggggcctcagggagtggaaggtcattgccatctacactttggttgtagtcccctttcttcctttatgtctggctccccctcagcatgtccctgggggagggtctttggggtctcccctggggaggatctcacaggggtggttgctccaggttgtcccaagccagccagtcgatgggactgccactccaaccagacggcattccatggctgcatggagctgctcaaggtggatggtcaactggtcaacctgactctggtggagggccggcggcttggattctatgctgaggtcctctttgatacatgtggcatcactgataggtacccagaagcccctaaca

SEQ ID NO: 86520 - DNA, 1034 bp, Homo sapiens
tagcctgtctcatcatcctttgtgccattgtgcatctagtgcctttgccatcctgcagccttggggatcaggggcagggaaaggatgctgacagtcagagggtagtcttgggaggtcagcttagtgatcagtgctactcacagcctaaaagtatggcaacccatccttcatcatggtagtaggggaagtctggagaggagaaagcaccagttaggagatgcctcctccatgttaagaatcattcccttccgtgtcatccctcccttctgtcctctgtgtcctgggaatgtacctgggggcagataccagggatcaagctcaggtggcacctctgaaacaagacgtggcatagctccgcaattagattcggacagttctccctgaactcgaagggcctcagctagctcagcagtcatgggtcgaggggttcggaagtgggtcttgaggggagccacgttgttgaatcgaacaccagacaggcagcctgagaaacctggggtgttgtagcgctggatctccgggtcaatgactcctgtctctgagagagaggcaggcccagaaagagggacttggacccaaaggccctgccactctcactgtccacaggtttcccactcatccttcccactgccctcagccattcccagggccttcactttccttgaggatccaggaacatatgccacagctccttgcctaaaacgcgtccgcacccgcagcttacccatcacacgccctaaatacaaggccttgggtgagtccaactggctgtccaccaacagcgagaacttctgctctgtcagtgggaagtagtccacctgaggtggggagggggagggggagggcgatgagggagcggggaccagaagcagatgcctgtgggctggactggaactgtgtggaccctgggaatatacttgggggcagatactggagatctctcattctgtccaaactggcggtgccagctgggtgagtcctagctcaatctgaagtgggcaacccctgggcctagatgtaggatttggtatata

SEQ ID NO: 86521 - DNA, 1388 bp, Homo sapiens
tgtgtcccttgttctgatatctggtgccttgcctcagaagtgggaccattgtaaacagcccttaaggagtgggaggggaagtgaaacgggaggggactccgccttttcaatcacaaaagtcatgagagtaacctggttcctcttccctgctctgggacaggtacagccaagctgatgctctcaagtacgtggggatcgagagggagaccgacgtcctttagccctcccaggccccacggcagcacttatggtagcggcactgtcttggctttcgtgctcacaccactgctgctcgagtctcctgcactgtgtctcccacactgagaaaccccccaacccactccctctgtagtgaggcctctgccatgtccagagggcacaaaactgtctcaatgagaggggagacagaggcagctagggcttggtctcccaggacagagagttacagaaatgggagactgtttctctggcctcagaagaagcgagcacaggctggggtggatgacttatgcgtgatttcgtgtcggctccccaggctgtggcctcaggaatcaacttaggcagttcccaacaagcgctagcctgtaattgtagctttccacatcaagagtccttatgttattgggatgcaggcaaacctctgtggtcctaagacctggagaggacaggctaagtgaagtgtggtccctggagcctacaagtggtctgggttagaggcgagcctggcaggcagcacagactgaactcagaggtagacaggtcaccttactacctcctccctcgtggcagggctcaaactgaaagagtgtgggttctaagtacaggcattcaaggctgggggaaggaaagctacgccatccttccttagccagagagggagaaccagccagatgatagtagttaaactgctaagcttgggcccaggaggctttgagaaagccttctctgtgtactctggagatagatggagaagtgttttcagattcctgggaacagacaccagtgctccagctcctccaaagttctggcttagcagctgcaggcaagcattatgctgctattgaagaagcattaggggtatgcctggcaggtgtgagcatcctggctcgctggatttgtgggtgttttcaggccttccattccccatagaggcaaggcccaatggccagtgttgcttatcgcttcagggtaggtgggcacaggcttggactagagaggagaaagattggtgtaatctgctttcctgtctgtagtgcctgctgtttggaaagggtgagttagaatatgttccaaggttggtgaggggctaaattgcacgcgtttaggctggcaccccgtgtgcagggcacactggcagagggtatctgaagtgggagaagaagcaggta

SEQ ID NO: 86522 - DNA, 2090 bp, Homo sapiens
actcagaaggctgaggtaggagaatcgcttgaacctgggaggtggaggttgcagcaagccgagatcgcaccactgcactccagcctgggacagagtgagattccatctccaaaaagagaaagaaaagtggttccttgaactggccagacaaaaaggagctgcgaggtgtatgcacctttggtgatgtctatgtttacctcacacattgcagtgaattcctatagactaaggcccaggagggctccatggataaaggaagagatatcctatttccgttcgtcaccacctcccattttcttttctctcccaagcagaaaagaatgggttagacctttttctgctttcagatcctcttaacagttgctggttctttccaccccacccccaccacacatgtgcacatccagcacacaccccctactcatgcacaccctgtagtctgagacttggccccctcttccccagcacctgctgctggccccctctgatgtggccggatggggcaccttcataaaggagtctgtgcagaagaacgaattcatttctgaatactgtggtgaggtgagtgctatagttttggcccacattcttactcgggggagactgatgagaaactctgattttctgtgggccaggcttctttgaattaatctctaaataactcagctgtgttctcacgtggcctcttggggagatcccacagaaccgtttgcagtactgaaaccactgttcaactctttggcaactccagacacaagagatgaggggggctcttttcagccttaaaactggttggcctgggtgggaattggaacagcataacttgaacttgctctcttgtgattctcatcatgatgctcagtaagcacccatgtgagataccacccagccctttctgggggcagggtaccatgccctgagcaggcagcctgatactcctatttgttatttgtctatctctctagctcatctctcaggatgaggctgatcgacgcggaaaggtctatgacaaatacatgtccagcttcctcttcaacctcaataatggtatgaagtcactttgtctcatcccaaggtggtcttttttttttttctttttttgagacggagtcttgctctgttgcccaggctagggtgcaatggtgcgatcttggctcactgtagcctctaccctctgcctcccgggttcaagtgattctcctgcctcagcctcccgagtagctgggactacaagcacctgccaccatgcccggctaatatttttgtatttttagtagagactgggtttcaccatgttggccaggctggtatcgaactcctggcctcaagtgatccacccgcctcggcctcccaaagtgctaggattacaggagtaagccaccgcacttggccccaaggtgatctttctaccagattgcccttgctgtagtccaagtttagatcagctccgaatcttccagcagatgcatagagcaagggggcaggatcacacttggggatcccacaggccacagtgcccttgctttggaagaacctccatttctgggttctgtttgtaataggagtgctgagcgtctttacctgagaaatctccctgcccagtagatgagaagatccataattcaaagagggacccaaagggagtgctcccacacaaggctgaattctgaggctgcatgctttcctctgctcctgttagcacactgggcttcaacattcccatcagactaaagtgtttctgttaccatttaactgattttaaattcaagctgagaagctgtggaattgcctgctgtgcttatggttttccttgatttactttatacagattttgtagtggatgctactcggaaaggaaacaaaattcgatttgcaaatcattcagtgaatcccaactgttatgccaaaggtgagtcccagtaacctgggaggtggggtgggggatggatgcctctttactgtgatttccattcgttgttgaacattttccttagctgagctattttttgtccaaagataatcatgattaatatctggtatcattttaggcccctctcaatcttagttttctaatctgcttttttcagcga

SEQ ID NO: 86523 - DNA, 2217 bp, Homo sapiens
caggttacaaccgaatgtggacactcggcagaagcagctggccgcctggtgctcgctggtcctgtccttctgccgcctgcacaaacagtccagcatgacggtgatggaagctcaggagagcccgctcttcaacaacgtcaagctacagcgtatcctccctcaggctcttccacagcccatacacatgcacttctgcgctttcacacatgcccagacgcccccccgcgccagcccccttttacccatggtaggcagattcccacccaaactggacttaaagagtgaaaatgtgtagctgacattttcccctggcaaatgcagtaccataccctcttgttcttggcagtgatgactgctcggatgtcattaaggtcttagaatttctgccctgaagccaagttccaagttttttaacctaaacccttttgactatttgtatcttccatccttttctgtgtgaggcccagacttgggtaactacctttaattattttctctgcccccctcctgccaggaagtaagggtcatttgtttttgctgcctgattcatccctaaaatatctgtggagaaaggctgaaggaaggcaacagacagagggtgaggaatgacagtacctttcattttctaaagcttctttctttcttttttttttttttttttggagacagggtcttcctctcttgctcaggctggaatgcagtggcacaatcacataaagctccttttaattggaagagtttctctttaccttcctcctttgaatatccaggaaatgccaattcatatcatgttgggaaattgcacacatatgtgtgtgggagaggaaggggcaggtgtttctcaacatgggactggctctgaaaatttttatcctacccaactcatgtgtatgccgttcccttaaccttaaaccaggaaagcttcctgtggagtcgatccagattgtattagaggaactgaggaagaaaggtgggttcagttccccagattccttatttttcttcctagttgggttttcctgagggcaaattaggataagtctttttccctttaataactttttctctctcctggcttgaaggccagagtcttctgtaaagtaggcagcccaattcccaagtcctttcttctttgtacacaaaattgaaatctctgtctgtgccctaaacctgaagagaagtggaagaaggatgagtgccttgtagataataatagtaaaataaatattgaatctttctttctgaaagctgagtctcttccactctgtcccaccttggtatttttttgcctctttgtttctttttagttcatgatactttttttttgggtggggagataaggtctcactctgtcatccaggctggagtgcagtggctcagtcctatctcactgcagcctcgactcccaggctcaagtgatcctcccatctcagcctcctgagtagttgagacctcaggcatgtgtcaccacacacctggctaattttttgtattttctatagagagaatttttttgtattttctgtagggtctcatcatgttgcccaggctagtttcgaactcctgggctcaagcagtcctcccgccttggcctcccaaagtgtaagccactgcgcgcctggttatgctttcataagtatctgttttacagggaacctcgagtggttggataagagcaagtccagcttcctgatcatgtggcggaggccagaagaatgggggaaactcatctatcagtgggtgagatcattattctgccaagtattcaacagtgacccatggaaaaggttaactatattagggcctagcagatagccggtgttcccagatccagactgagcaaaatggggagggggcagaaagaggaagtgtaggccttctagggaaacctctttaagtgactcaatgtctttggctgcatagaacctccctttctttgcctgtaggaggccgggggctatgtgaggccatatttggagaatgcagaactgggaaccctgagtgctattgttggctggagcctctggccacaggagataaatggggaaaggaagggaaaaaacctggggcccctcccccactgcactgttatgggactgtccacaacatgaatgagatattctgaatcagtgtgggtgtggggacagaatactcttccccctaaaccaccagtcccaaacattcccaaggaagagaagagggtaagaagcatcaaca

SEQ ID NO: 86524 - DNA, 1626 bp, Homo sapiens
tactggctatattctttgtgttaggatagatcctctagggtcagtgtctagtgacaatggctccgatctccctaggcctgattttcacggcccctttgtggccctgaagcagatggtgtcattctcgtgcatcagacacaaatgctaggtgtgggggaggctgagtctgagaggagaaccaagaagggggaaataagcacaaactcatttcatgctgattcaggctttcttccaccccttactcctaaggagtgcctgggaagtgtggatggcagctgtagcagtatagatggcttatgcataccctgcctctgggaggtctcggcttccagccagagcactctcctcagaggccttgggcctcaggagctgattgtctctgcctatctctccctgttcagagttccacgggctggatgaagccactctactgcgggctctgcaggccctacagcaggagcacaaggccgagatcatcactgtcagcgatggccgaggcgtcaagttcttctagcagggacctgtctccctttacttcttacctcccacctttccagggctttcaaaaggagacagacccagtgtcccccaaagactggatctgtgactccaccagactcaaaaggactccagtcctgaaggctgggacctggggatgggtttctcacaccccatatgtctgtcccttggatagggtgaggctgaagcaccagggagaaaatatgtgcttcttctcgccctacctcctttcccatcctagactgtccttgagccagggtctgtaaacctgacactttatatgtgttcacacatgtaagtacatacacacatgcgcctgcagcacatgcttctgtctcctcctcctcccacccctttagctgctgttgcctcccttctcaggctggtgctggatccttcctaggggatgggggaagccctggctgcaggcagccttccaggcaatatgaagataggaggcccacgggcctggcagtgagaggtgtggccccacaccgatttatgatattaaaatctcaactcccactgcctgcctcttaaattactacagtactggaatggggatggggagggctgtgaagtgttgccacctgagtaaatcccagcctgggagaggggagagaaaagaaagcttatggcttttgtagaagaaaaggtcctccagggccctgtgggctccagtgagcctgtggttttacatctgctgggtgggctgtgtggaggagtgctgatggaacacagcttggggacagactgctttctctctgaattggagtcacttaagggctcccccttccctcaccatctccctcatggaagtcctgaactactctgaagcccctccctccacccatctggtctgggtggggtaactgtggccaaggggagctgaggggggtaagccggatgtggactttggtttattggagactggcaaacagaaggggaggaaggagagcccatatagcaaaaacagccactctggccagggttaggctgcggccaaggtggcctggaggggatggatgaccgggctctcggtttgggggagggacttatcctggggagtacacacccattccctatgcagaccagagggacaacaac

SEQ ID NO: 86525 - DNA, 1096 bp, Homo sapiens
tgaagggctttcctggccaccaggagcaacgggagggggaaggggcaggctagggaggggactaggaggggctggaggagactgggaaaggagcccaggtgagggggacagcagggactgggccacagtcatcacagccagtgagaaggcactagccagagaaaggagaggggctgctgtggtggaggggaaggaagaagtggaggggcacggaggaaagaaaggggaactaagagtgacctgagaacaagtgggagagaacgtaggtggagaagtcgtggggagagaactccagggacactgagagagtgggaccggaaactcgggtgtgctggaggagaatggaagtggagagctggtggggtgtggagagggatttgaggagacctgggaagaaatgggggagaatggggaggggctgggatgacatgggggagaagtgatggggaagatgggacctggggaaatgggggttccaggggaaaatgggtttccaggagacaaaggagttccaggagaagatgaggaggtggagaaggctgtccagctcctgtgctccagggaggtgctgctctggagctcttctgggaaggagggtatgttgagaccacagtcccacatgccctatgcccttcccaggagcaaccccaggggttgggatgagcaaggacacaactcagtacataccattggatgggtctgggagggggacgggcagggcaggtaatggtgctggctcctcctgaggcagaaaaaggagtccgcagtcacagtggggaagagcagtctgagatggaaggtgtcagaccggggttcctaagctaggacccatgaacctataggagtctgtacatgagtttcaagggattcagaagcatatgtgctgaaatgtatagaggtaaaagggcatgatgtctgcaacttactcttaagtggttccgaaaaatatattatgtatgcacacatacagaggggagaggaagagacaatgatgacgctaaggtggcaaaacactaacaagtggcaaatctgggcaaagggtatccagtggttctttatataattcttgcaacttctctccacaagtctgaaatta

SEQ ID NO: 86526 - DNA, 1025 bp, Homo sapiens
ttcctcattaactgatggcaggaagccagagggctgggcagcttccacccctgcctcccattgtgaaaagaaagtcccttttaaatcctcccctgcctcaccccacaagtctttgctcccccaattcctaaggcatggcatatggattcacggcgttcttgtttccagcatttttattggttgctgctaatgtggtgtgagcatatcccctacactctcccagctgggagtgggcccctctagaagcatccaggcttgggtgggattgcttagtggttgactcttggcaggggaggtgctagagatgaagatggtaggcagcagaactaacacctccacacagcaaacagttcacatatgtttggctcttcactataatggagctgcactctccatgcccccctggccttctaccccttcagtgttgggatcttccttgctcagttttgttgatcagaaagcatcagattctgagaacacaagctccatggtgggccctggtgtgggggagatacatggcttctgttctgaattcactggagggaaaagaaaaagtgatgaagaaacctccaaggtgggaggaaggcgaagctgcagccaggtaccattccctgggctctccctcccttgggcccgccctcaccatcctgccaacatccccggcgaatgtcacccccttgcttgcccgctgctcctgggagccggtgctgctgccactcagagagttccttcgcatgatgcctgggagcaggatgggggaaggagagcactaagtgaggaaaggggaggtggggagagggggtctattcccccggggcagacccccagggcctggagaaaaacagtcgacagaaaggggtctcagggaaaagatggaagctgggtgactgcagtctcaccagggcctgggggctcagagcgctgtaggctgttgcggcgggaggtggggaagctgcccttggagaggcggcgctggcggctggacagcatagcagctggggccacaatacccggtgggggctgct

SEQ ID NO: 86527 - DNA, 1149 bp, Homo sapiens
ggaacatcgtgaccggcctaggcatcggggccctggtgttggctatttgtatccgtccgtgttgtagactcaaggggaccgcatataggggcaggggaacagagtgtgcaagagggctgaaccacccgtttaattttggggtaaaatgggtagtactttcctttgttattcctaaggtactcttttaatttgatttattaataataacggaattggggttcagggtttagaaacagcagcggcgggaagccggaatcactgatttgggagagtaacaagagtggtagagcaaatctaggaaaggggaatgtgcatattctgtgtggtttcctgaacctacctccccagatggttacaccttctactcgatttcccaggagcgtttcctagatgagctagaagacgaggccaaagctgcccgagcccgagctctggcaagggcgtcagggtcctaatctggatgggtattgatcatgtccaacctgctggagccccttcacatggtggatgatgccccatgaccctgtagaaattgaatcctgctcacaacattgttggccttcttactaaccttggaccgtgattgagcccaagaaaccagggacttacgcatttggccaatgtcaaaagaacagaactttgcccactgcacacttgctgtgtacaatgactgagccctttcttgtagtttgtttccttgtttgagaggtgtgcatgcgaccgtggcttttcccaaagtttctgactttgtggtttacccccttcaccttccagggacgcagttgttacgaggttagacgtggcagctctgtgcagtgtttgagcctacagtgggatacatagggtcaaattgagaataataaactgagtcattctcctggagtcaagtgagtatggaggctgagaggcagcatatggcacttcatgctggaaagcttcacaagcagtagctgcagtggtggcattgccccagggagctgtaaatgtttaactagaattactttttccatgagatctttccacctgatttaagggagagatcactgggcagtttgagactgaacccacgtcttaggggaaggaaggtcactcttctgtcctctacccacaagaacatactgtaactctactgcttttcccatccccaga

SEQ ID NO: 86528 - DNA, 1061 bp, Homo sapiens
caaggtcttgctgtgttgaccaggctggtcttgaactcctgggctcaaacagttctcctgccttggcctcccaaaatcctgggattacaggcatgagccaccgtgcccagcctggagtttaacataatagcaggttatcgttataaagggaaatgaacaagccgaacttgggcctccatttccagttttataaaaggaaaacaaggaaacatttcagccctatcctagatttttccctctcaaatcttgcacacccatcctaatcctgggtcttggcacttctgtaggttgtcctctgttttcctttaactgatgggtgaaatgctttctgttaaatgaattctcaccatgctggtcctgctcagtggtgcatacctggctccaacactcatggttttggatgaaagcacttgctgcaatgattcctactgccaacagcatgaagtcttccttcactgaagtaaacttttccctgagtgattaaaaccacattaattttaaagctagaatggaacttgatcttccaaatcatagggtcatggaacttcaactatgaattatttgtgtcgatcatcttggattttttagacatggaaggaaatggtcaagtaatagctcattgacctgctctcccattctcccccaacttaactgggattaacatgagccttatgtcttgaatggtttataggccttttttagttctatctgtttccctaacaattgtaactgtgaggcttttaaccagtctgactttacagtaatcaaacactcttgtccaagttgcaaccttgtgactgttttttttttcttttttctttttctgagacggagtctctctctgttgcccaggctggagtgcagtggcgccatctcagctcactgcaagctccgcctcctgggttcacgccattctcctgcctcagcctcccaagtagctgggactacaggtgcccgccaccacgcccggctaattttttgtatttttagtggaaacgtggtttcacgctgttagccaggatggtctcgatctcctgacctcgtgatctgcccgcctcagc

SEQ ID NO: 86529 - DNA, 1078 bp, Homo sapiens
ggggttttcttggcatagagctcaagcctcctctccagtttcaagaaggtttttccctgaagcccttggaaatacacaggaatgcttcttttgatttttctaggatcccattgatggatggaaactctagtttttacttagagtaaggctgcttctatcaccccaaaacaaagcatttcttttcttctgcctcctttctcccccgccaagttcagggatgcctaggaaaacagcaagaagtactgtaaccctcactcacccctactccaggcttctcttctctttgggtgtgtgtcctgtccctgtactctgcaatgacaatgaggctcttgtgacagtcttcttgatttttggctttcaagcaaatccaaaatacactatcattcctcaccaagtgttctttaatagataaaatgacgtgaatggtcccatgatcaagtccctgccccgaacttacttaactcagatctcagttactaatgagttttgctctgtccatctgcaggatggatgtggagaaaggcaagattgaagacacaggaggcagtggcggctcctattccatcaaaacccagtttaactctgaggagcagtggacaaaagctctcaagttcatgctgacgaatcttaagtggggtcttgcttgggtgtcctcacaattttataacaaatgacttttttccttagggggaggtttgccttaaaggcttttaattttgttttgtttgcaaacatgttttaaattaaattcgggtaatattaaacagtacatgtttacaataccaaaaaagaaaaaatccacaaaagccactttattttaaaatatcatgtgacagatactttccagagctacaacatgccatctatagttgccagccctggtcagttttgattcttaaccccatggactcctttccctttcttctctgaaaaaaactaatttaaatttgcttttcttttttttaactgagttgaattgagattgatgtgttttcactggatttttatctctctcaacttcctgcacttaacaatatgaaatagaaacttttgtctttactgagatgaggatatgttt

SEQ ID NO: 86530 - DNA, 1997 bp, Homo sapiens
ccattttttaagtctctgtggtttatcaagtcttgtggttatcaagactaaagccatatagttctgaggctgtttgggagatgaactctacctctaagctgccagagttgtaatgccctcttatttctttcccaggagccatttattgaaactcctcgccaggatggtgtctctcgcagattcatccccccagccaggtgcctactacttctcagcccccattccttgccaaaggctagtagaattttaattaaatccaggaatcgagacctggagccaggtgatagagatgcatcatcacctagccttttggccctttcagaaaagatgtattcccttatacctggcccgtcaccttccagtatggattttttcctgtagctgttcacagagtgggaaaggatagtagctttaatgatgaagtattgaaaaaaattgagggagtgattgaccaatcaccaagagatgggctcttgagaagtttcaaactagcaaatgttgttagatgttcaggtccttagttctcattgctgcaggtaaagagcttgctggcaaggggtataatattttctaaaatggcctttcctggttctcccttcttttccactgtagacatatgaattttttatgctccctctccctccttagtccaccaaggccaaccttcatgctgagtgtccctgtggaagaccagcatggccttcctttgggagagaggtacccttgggaggtcagtcgggctaggagtgggtatgttccttgaggcccctcagctggtgcttgagagtctctgccactggcattgtagtaggtggaggaagcctctctgttccctcatgtggcccgtgggcggggggctgtctgcaggatgatgtccacagaaagtgccaacagcttcactctgattggggaggcatctgatggcggcaccatggagaacctcagccgaagactgaaggcaagtcggccccattccggtggcaagcagtaggcctggctgggagagtgggtaattgagcaggaagcatgggggaggccctaccctgactctcccacacttccaggtcactggggacctttttgacatcatgtcgggccagacagatgtggatcacccactctgtgaggaatgcacagatactcttttagaccagctggacactcagctcaacgtcactgaaaatgagtgtcagaactacaagtgagtgtctccagagccagggctcagagctgttactgctctgagactgcttggcccttacccaagagccgtactccactcaggcaaatggagctctagtaagtatagtctgcctgtgtctttggcagacgctgtttggagatcttagagcaaatgaatgaggatgacagtgaacagttacagatggagctaaaggagctggcactagaggaggagaggctgatccaggagctggaagacgtggaaaagaaccgcaagatagtggcagaaaatctcgagaaggtccaggctgaggctgagagactggatcaggaggaagctcagtgagtgctcaccctgttctatcttctcacactcgaggctccaggagaggaaatggcttccagctgaatgtgtctgaatagtttgtaaactagtcagctgtcagtcagcagcatgcctgccccagatcctgcatattgcttccatgccctttttctagaggtttgttgggagagttacctatgaagagtcagcatgattaagtgaaaaaagtatgttggttaaatagtgcagaaaccagagctccagtcttggctctgtcctgtagggaatgggctcatttggatgaatcagccactttctagccatccttagctgaaaagatgagctaattagcctacatttgttccctccaagcttaaacatttcatgggggccaggtatggtcgttcatatctgtaattccagcactttgggaggccaaggcagaaggatcacttaaagccaggatttaaggccatctggggcaatatca

SEQ ID NO: 86531 - DNA, 1566 bp, Homo sapiens
ctcccggggtcggcttcgcgggagaggaaaatataggatggctttctgtaccgcgtctgatgatggagagtcccggggacacctccgcggacacgtgttggactcagggctttaggcccgtgacagctggtaatcccccagcccaacaacgtccctggacactgcccctgcccttggcggctggcctgcctagtatcatagactaggtctgggtgggggttggcacgtttgtgagctcacatcttccctaactacctgtcttttgtctgcttatcaaattcagacagcttcagacacaggaggaagggagggaagggggaggacagaggagacaggcaggtgctgtcctcaaagccctgcgttcttctgagatggaaaaatggatcctcaaaaaaataaagtatttgcagtctgggggcctctcagcttcttattacagttacaaggtgagggaaagacagttggattgggattctccatcctgctcttacctctgtccccaggtactgaattgctctctttgttaattttaggttgattctttcagggagcggatcacaagtgaggtgagtgaaataaatagaaaaatggttgttggttgagaatttcccaaagaggagatacctggagagagagagagagagagagagagagagagaccttcccacagatattaattcagctgtattttccctcttccttaggcagaagacttggtggcaaattttttcccaaagaagttattagaacttgatagttttctgaaggtgagagaccctattctttcctcaaattccccaatttttttggccctggtattactgtcaactgggataaactgttgattcttcttctttttatttttttaaactgtaaaagcactttcatttcttgctcttcaaatcaaatacttctttgttcagcttgaaaagattaatgttttggggtgggtgtctttcaggaaccaatcttaaacatccatgacctaactcagatccactctgacatgaatctcccagtccctgaccccattcttctcaccaatagccatgatggactggatggtgtaagtgtcctatatttatctttgtgttcttgagcagtaggtcctctgtcctctgtttccttgtcagtttaagatgtacagagggaacagtgggatttggatctgggaactaggactctgttacagacatgatgactctagtatagttcttttatttcttatttatttatttatttttgagaaagggtgtcactttttttgcccaagctggagtgtagtggcgggaatgctgctcactgcagccttgacctcccgaactcaagcgatccttcctcctcagcctcgcaggtagctgggactacaggagtccaccaccatgcccactgatttttgtattttttgtagagatggggtttcaccatgttgcccaggccggtctcaaactcctgagctcaagtaatccacccgcctcagcgtcccaaagtgctgggattacaggcgtgagtcactgcacggggactccagtatattccttttagaccctcagtttcatttacgac

SEQ ID NO: 86532 - DNA, 1034 bp, Homo sapiens
tcaagcagttctctgcatcagcctcccaagtagctgggattataggtgcttgccaccacgcccagctaatttttgtatttttagtggagatgaggtttcactgtcttggccaggctggtcttgaactcctgaccttgtgatccacctaccttggcctcttaaagtgctgggattacaggcatgaaccaccgcgcctggctaactttttgtatttttagtagagatggggtttcactatgttggctaggctggtctcaaacttctgatctcaggtgatctgtccacctcggccccccaaattgctgggattacaggcatgagccaccgcgccttgcctccaataacctttcttaaagctttgtatgtacttaggaaattgtgcagaaattaataacataagctatgaggctgaggaagggattaaacttgcttgaagggtatcttgtgatggagatgtgggtgtcaaaactaggctcatccctgcctctttgtatccttagcccacttataagaagcgaaggttggatgagtgtgaagaagccttccaaggtaagaggcacccttacctcacctcccctcaccccatccctgacttgcaaccctgagaagcaggatggatctagtgttctcctgaccaggaggcaagatctaatcttacttcccagaggtagcattcccagctcctccaaacgtgcttgttattgagtgctctaaacctggttttccaataaacagaggatttaagacttttgttatgttttagacgctcatctgtagttctttttttccatacattctcgttgattctaatagtggtgtcatggtaggattgtgacaaaggcagaggtcatagcatctgataggtatagggaaaatgagagagaggcaggggatgctgtgtccttccctcttccctgatcatttgaccttcacatctctgccaggaaccaaggtgtttgtgatgcccaatgggatgctgaaaagcaaccagcagctggtggacattattgagaaagtgaaacctgagatccggc

SEQ ID NO: 86533 - DNA, 1036 bp, Homo sapiens
tcctgggttcaagtgattctcctgcctcagcctcccgagtagctgggattacaggtacctgccaacacacccagctactttttgtatttttagtagagacggggtttcaccattttggccatggttagccaggctggtctcgaactcctgacctcaggtgatccacccgcttcggggtcccaaattgctgggattaccggcatgagccaccatgcctggccagactaggtattttgacttctgtgttcctggcatctggctccagccgtctgaattgtgtacttcatggcttcagccttcaggcaaaggtcctcatatatgttttgacctccaggtcaaaatgtgggtacagctcctgattcccaggatagaagatggaaacaactttggggtgtccattcaggtaatgtacttgaattacatactgggaagagtggcttgggagatactctcatctcccctgcgttacctttttttcctttttctttggggctgctgtggatgacatggaagtggcttttgatgcacctgttgtttgtttgttttaggaggaaacagttgcagagctaagaactgttgagagtgaagctgcatcttatctggaccagatttctaggtagggctgcttgggcttggccgaggcgttgggggctgatgaggtggtgggcaccatcaagggtctcctgcatcttcctcctcttctctctctttccagatattatattacaagagccaaattggtttctaaaatagctaaatatccccatgtggtaagtaaggggtttgtggcctgagggtggaggtggcaggatagtgaagagtgactgttactgggaaggagctgtctggaaacaattgggctttggggactagctttttcctgtaccctccttgcaggaggactatcgccgcaccgtgacagagattgatgagaaagaatatatcagccttcggctcatcatatcagagctgaggaatcaatatgtgagtaatctcagtccttgtccatagttgctgtggcttctcttagttctgt

SEQ ID NO: 86534 - DNA, 2537 bp, Homo sapiens
aaaaaaaaaaaaaatacagtaagtcttcacttaatgttgtccataggttcttagaaactgcgactttaaaaatgatgtatatcaaaaccaagtttttttttcattaacattgtaacaaaatgacatcgaacaaaatgatgttatttgaaaccaggttatttgaggaccttctgtacttgatttgcttacctgctgtactttaatttccttcaagtcgcagttgctaagaacctattgatgacattaaggacttaccgtatgcagatgattgcttggggatttgtgaaggggtctctcattttcttgatgaggtaagggttgtacagatatgtgattcccctgatccctcttctctcaggtcactctacatgacatgatcctgaaaaatatcgagaagatcaaacggccccggagcagcaatgcagagactctgtactgaggccagggccagggccaggggactctgtgagtctggctcaagaccgacattgccttggtttgttacatgactatcgtgatggggaaactggctggaaatagtaatcacacctctctgtttttagttagagtctaatgaaactctcatctagttctgtgatgtgtttacctcttttttcaggcctcaggaactcttctatttccttccctaataccccacacccaacctgtcgtaatttctggagaactccaggtttgtgtgtgcaggatgttggcacaaaaatacctgtgttttcattctccccctctctccctcctgtgtcttgcgctttatgttttcttccgtttgataattagttggttaaaagctgagggaaccggaaggaaagtgctaggtgttttttaggaactagggtggcggggggacgaacttctcttcctcacatgaggttactgtttctttcctctgtggggcattggatcctcccacagttgccctggtgatgacttagggcttcccatctgtgtacatcccactttgaatcttgatcgtgacaagaaataccttaggccttcagtcaattccgaagctccttcagttgtttttataatgggcgttttcacatgcacatatgtgtatgcatgtatacgcccatacagacatgcacacacagactcctactccattagctaacataccctccctctccacaacccctgtcacatacctttcaggaggtgacagttgtcttagttgtcatctacccagacaaacgtcctgggcccgtcctccctcctgatactgtagcctcttggtacccagggtgagttggtggagaacagagagatgagaagcagagggcttggggaaagcctgttcctctctgactcagccctttttggcattattgcaagagcttgactcctggttgccttttcccagccagttttcagttggggtgaaggtttctgcaagtgtgaggtccagatgctgctgctcatgttgggctttccttttgggaactatttctctttatttatagtgtcgggcttccggggaaagcaatcattggtgtgtatgtgtatgtgcatgcacacacgtgcatatacacatttgtgtatgtggaaatgtgctgggcaagtcaaaactatagaagagttgcctcctgtctctcgaatcttccagagatatcacttaattgttaacagcttttgtgttaatccccttcagcccctagctcttttattctaccacggctggagagttgatacctgcagtcagcctgccagtgactcttagtgtctgtttctgacttatttttcctgtctctgtcttccaacccccaataatatttccaccggggatgcatcatttttactcccaatattctgtagagagggagtcaggatgctgtcttcccacgaatagtactcagtaacaaaccaattgcattttagttgggcagtgctcccacccaccctccagatcccttccagctaaaacccttcccccttccctccatgtgtttctcagtttcccgtttcgtttgttggactgttccactgcccctcctcctcaccctatcacccatggatcgtaatgtaaaattcttttaccatgtcaagaaattattaaaaatacaggtactttgacctctttctaaagccgcagaccctggtgcaatgctctggtggctagggatgtactcatgctcatatgtgtgcacgcttggacacccacctccatggacacctagccaccctgttgtgtgtccttatgccagttgagctgaatcttttccccagtatagtggaaagactgaggcttctgcctactgagcaaggttgggtgcttcatttgtgttcagtctgaattatgggaaagttagctcttcccagacctaagctgccttctctccctactttcagaagatcctagttccttccttcccgagtgatacccatgaactgccagtagaggctgctatcgttccatgtgtaaggaatgaactggttcaaggcgcgtcctacccagtcattttctttaccttatactaattcttcctgaataatgtcttcagtttcttgaggagactcct

SEQ ID NO: 86535 - DNA, 1027 bp, Homo sapiens
ctggcactgtccctcattaccatctttgccctggcctatgttttgctgaccagcccaggtggttccagccagcctccccactgcccctctgtatcccatagggcccagccctggccacaccctggccagagccagctgtttgcagacctgagccgagaggagttgacagctgtgatgcgctttctgacccagcggctggggccagggctggtggacgcagcccaggctcagccctcggacaactgcatcttctcagtggagctgcagctgccccccaaggctgcagccctggcccacctggacagggggagccccccacctgcccgggaggcactggccatcgtcctctttggtggacaaccccaacccaatgtgagtgagctggtggtggggccgctgcctcacccctcgtacatgcgggatgtgactgtggagcgtcacggcgggcccctgccctatcaccgtcgcccggtgctgagagctgagtttacacagatgtggaggcatctgaaagaggtggagctacccaaggcacccatcttcctgtcgtccaccttcaactacaatggctctaccctggcagctgtgcatgccacccctcggggcttgcgctcaggggaccgagctacctggatggccctctaccataacatctcaggggttggtcttttccttcaccccgtggggctggagctactactggaccacagggccctggaccctgcccactggactgtccagcaggtcttctaccttgggcactactatgcagacttgggccagttggaacgggagtttaagtctggccggttggaagtggttagagtccctctacctccaccaaatggagcttcatccctgaggtctcggaactctccaggtcctcttccccctcttcagttctcgccccagggttcccagtacagtgtgcaaggaaacctggtggtatcctccctctggtcatttacctttggccatggggtgttcagcggcctgaggatttttgatgttcggttccagggtgagc

SEQ ID NO: 86536 - DNA, 2354 bp, Homo sapiens
attccgtatttgagctgtggctctaaacaatagtcactagccatgtgtggcaactgggcacttcaagtgtggctagtgtgacagaggaactgaatatatatatatatatatatacatatatatatatatatatattttagacagagtcttgctctgttgcccaggctagagtgcagtggtgtgacctcagctcattgcagccacaacctactgggctcaagcaatcctcctaccccagcttcccaagtaactgggaccacaggcatgtaccaccatgcctggctgatttttttattgtttgtagagtcagggtttcaccacgttgcacaggctggtctcaaactcctgggctcacatgatccacccgcctcagcctcccaaagtgctgggattgcaggtgtgagccacctcagctggccctaagttttaattttcatagccacgtgtggctagtggttaccctatcggatagggcaagttggaagaagataggagcttgctcttgcccagacctcctggctcccagcacagtgtgctctgatgctctctctgccttttgtcacaccagtgcagtggacatcatggggaagacagggacctggcccagagaccttacctggtgtggaactcatctcctttccctccccctggcagggctgaaaaactgggtggtagctgaagacgtggtgtttaaacctgtggctgccccctggaacccggagcactggctacagcgcccacagctgactcggcaggtcctgggaaaggaggacctgacagctttttccttgggaagccccctaccccgctacctctacctggctagcaaccagactaatgcgtggggtcaccagcgcgggtaccgaatccagatccacagcccccttggcatacacatacccctggagagtgacatggagagggccctcagctgggggaggtgaggagggccctggcctgggtggaaggaaaggacagcccctcccctgccccagtccttggagacaaactcccttcccacggctaccattcatccctgtacctcccctcaaacccaagttagatacacggtgggaaatggtctcacacagaatcggatctaagggactcctgggccagtaaaggcacttgacatttcccaaaaccaccttcttatgattcctggccagataccagcttgtggtgacccagagaaaggaggaggagtcacagagcagtagcatctatcaccagaatgacatctggacacccacagttacctttgctgacttcatcaacaatgaaaccctcttaggagaggttggttgccctagggacataggaaagggacacctgtgggcatggcatcttggctgcccagcctctggccaaaggttagagggaatggctgatttccagttcgcagattcagaggccatggagttttctgatgaccaacacaggtcatccctcctggggtgagattagctctgggacactggctcccccctctccccgcacagctgcttacatggattgctccacgtgttgtatgggcatgaggctggggagagtggaagccaggctgagactggaggctgggattgtgactgaagggtggttctttgggtcacgcttccatagtcctccagctcctccttcttcttgcaggatctggtggcttgggtcacagccagcttcctgcacattccccatgccgaggacatcccaaacacagtgactctggggaacagagttggcttcttgctccgaccctataacttctttgatgaggacccctccatcttctcccctggcagtgtctactttgagaagggccaggatgctgggctctgcagcatcaatcctgtggcctgcctccccgacctggcagcctgtgtcccggacttaccccctttctcttaccacggcttctagtcctgagggtgtggcgggcggcgtggttaggcacatgtacttttccctgtttctactttctattctccgtgtttttatcacacctgctccccagattcccaccccctcaatgttcctctcacacgaaacccccatcagtccctttggttaattcttacttcctgttcatctctaaagtgttaaattataaaaatgatttttaaatattcaaagaaaaatatcacaaatcctactactcagaaataggtggtcacattacatcagacatctctttatgcatgtgcattcaaaaggaagagtagatagaattttgtaaaacagatgttgtatgtaatttataataaaaagtattagaggaattttacttgaatttattgtttgacctgttaagtatctagagtcctctggagaatactaaggagtctggccagggaaat

SEQ ID NO: 86537 - DNA, 1135 bp, Homo sapiens
tgcaagtgtttttttgagacaaagtttcactcttgttgcccaggctggagtgcaatggcaccatctcggctcactgcaacctctgcctcccgggttcaagcaattctcctgtctcagcttcctgagtagctgggattatggcgcataccaccatgcccggctgatttttttatttttagtagagacggggtttcatcctattggtcaggctggtcttgaagtcctgacctcaggtgatccacccactttggcctcccaaagtgctgggattacaggtgtgagccaccatgcccagcctatgtgcaagtgttttcaagaaagattcctagaagtcatctactcttcttatccctctcccagtccctggaaaaagactcagagctgcccttgtttttttttgtgacttttccctcaaagtctccctgactatacctctgttccccagggtggctgaggtcctggaaggcaaaggagcagggaagaaaggccgttttcagggcaaggccaccaagatgagccggcggatggaggcgcaggcgcttctccaggactacatcagcacgcagagtgctaaggagtgagggcttagggcactcacctcctgtttccacaggaatcttttggtcaataaaatagattgactcagaatggttgcgctaccacttgtatttatatgactaattcgtactgtatactccattgtgcttgtgtggttactttccgtttataaatagataattttctaatttagttcatgcactgtaatgtttagaaggtggtggattaatttataccaaaccttgtgcttttgcactcagttggataagaaatgaacatctgatcagctgagtccactgctcccataattttgttataatccacaaaggcacatggctttttcccgcccctaccgccccaccccctgagatggactcttgctttgttgcccaggctggatatagtggtgtgatctcagctcactgcaacctctgcctcccgggttgaagggattttcctgcctcagcctccagagtagccaggattacaggtgtgtgccaccatgcctggctgatttttttgtttttgttttttgtttttgtttgagatggagtctcgctctgtcaccaggctggag

SEQ ID NO: 86538 - DNA, 1080 bp, Homo sapiens
aatcacttgaacccgggaggcagaggttgtggtgagtggagatcacgccacagcactccggcctggaccaacagagtgagaccccatctcaaaaatataaaaaaaaaaagaaatatgttacataccaggcctcctgggtttgatattaacatatttactgtaactctgtatcttttgttttttgtgttttttttgagatggagtcttagtgtgtctggagtgcagtggcatgatctcggctcagtgtaacctgtgcctcctgggtccaagcggttctcgtgcttcagcctcccgagtagctgggggatcacaggcatgtgccaccacaccaggctaacttttgtatttttggtagagctggggtttccccatgttggccaggctggttttgaactcctgacctcaagcaatctgcccaccttggcctcccaaagtgctgagattacaggtgtgagccactgtgtccagcctgtatctttctttaggactgtcccctacctcctttactctctaacagatttctgcttatcctggtgaatcctatttaagggagatggaaacaaacctggaggttgattacaaactgcagaggctgagaagggcagcttgctggctttcagccagtactctctcttggctaagggatatgggactttatgtgtacataggcagcaaggccagcctcagaaggaggggccaggcttcctgcagtttcacagccaccactccaacctgggtctcatgtctgtgtcctttgttgtaggaaggagggtgattcagagttcatgaatatcattgccaatgagattgggtcagaggtaagaggagcatgagattctctaccccggcctggatagagacctagggagacataagtgaggggcgctagtttagccaaagtccctccacatgaacacatgaggaggaggaaatagccattcattcaatactgttttcttagtactagctatatgccaagctctgttttaggtgttgagctagatctatgttattgctctctctggggctgtgatgtttattagcttctgagctcctttcatcagagctctagctcctcaa

SEQ ID NO: 86539 - DNA, 1322 bp, Homo sapiens
aaaaaaaaaaaaaaaaaaaagtggtgagagggtatgcttgttccagtttttagaggaaaagctttcagctttttcttgttcagtaagatatgttatctgtggccactgtacttctgacagggagttagggagatttcggagtgcgattgagctggacaccccctctatgactgcagagcaagtagctgccattgagcagagcgtcaatgaaaaaatcagagatcggctgcctgtgaatgtccgagaactgagcctggatgatcctgaggtggagcaggtaagggtagagccagagggatggtttctgcggaatgattcctcatcagattcagacagtccctcccctctccttgagtccaggtgagtggccggggtttgcctgatgatcatgctgggcccattcgggttgttaacatcgagggcgttgattccaacatgtgctgtgggacccatgtgagcaatctcagtgaccttcaggtaagtgaggaacggctgtggagtggctgagaagagggattgggggagaggggatcacatggggctgggagtgggagagggggataatcgaggagtcctaagtgaaatctccccttcactgtttcagagctgaggaacagataggtttctcctgccttcaggttctaggatccgctgtggtttatgcatgtgcacacgtgtgtgtgtgtgttacccccttgcctcatgtaggtcattaagattctgggcactgagaaggggaaaaagaacagaaccaacctgatatttctgtctgggaaccgggtgctgaagtggatggagagaagtcatggaactgaaaaagcactgactgctctgcttaagtatgcctgtttcagtaccttcgattacctcccatttctgagattttcgacataatctcttacctctgggagataagatgcaatcgtaaatgataaagtgcggccaggcgtggtggcccacatctgtaatcccagcactttgggaggccgaggtgggcggatcacgaggtcaggagatcaagaccttcctggctaacaccgtgaaaccccgtctctactaaaaatacaaaaagaacttagccaggcatggtggtgggcgcctgtagtcccagctactcgagaggctgaggcaggagaatggcgtgaacccgggaggtggagcttgcagtgagccaagatcgttccactgcactccagcctgggcgatagagcaagactctgtctcaaaaaaaaaaaaaaaaaaaagatcaagtgctttggatagtaaatcagaaccacgaaaagtggttaattcctttgtatgttttctcccagttgcctaag

SEQ ID NO: 86540 - DNA, 1038 bp, Homo sapiens
ccccgacaggcaccaataaatgccctatttttttccctgtgtctcccaagagaaaaagtaaatttcagattgtgttccccctcctagcgccagagaaaggaactacaacaaagcctagctgctgagtccagagcgcacagcacagtcgccctcccagctcttccgtcggccgggaggagtctcctttgctcttgtctactgctggagctgctaataaagtttcattcgaatacttgagctgccgcgccctgcgtttccctcatgagcttcttccgcccgcaacacgagactcagcaccacacaatcagcgtggcaaagcctgaagggcgggacaggaagtgaggtcactcctcaccggggtgaaaggttagcggaagtgtccttctttcctttttgctggtagggccgggtggttgctgccggtaagtagaagcttgggttgaatctttcaatccgctgccatccgcggcttgggggtcgaaggtccgggcggcgccgggtgcattccttccctaggtctctggcggctacgtatccgatcctgtcctgcgagcagggccctcgggcggccttgaccaaggcgacagtgaacacagtctgaagttccggcccaagacctgggcttgctggcaggagtcagctctgggcatctttggctttacggatttttaagtggccctttctccttgctctctgcagaaatgggcaagttcatgaaacctgggaaggtggtgcttgtcctggctggacgctactccggacgcaaagctgtcatcgtgaaggtatcagcctcgcgggactctgcgtccttgcatgccgggaccaggctggctgcggcggggcgggcaggcttggaattcaaggcctgtttctggggcagtagccagtgagcacggtcagggtgaacgtgggagagtttttgagagaggaagaagcacagtaaaagcaaatgtgagctgaattgggctcccaacgcataaagccttctccaccagaggctttaaatatatagtaatagtggctgacattgcacgcttg

SEQ ID NO: 86541 - DNA, 1006 bp, Homo sapiens
tttcaggtattgtcatgtgcagtccttgaagtaatcataggggattccttttcttttcttttcttttttttttttttgagacgggatctctgtccaggctaagtgcagtggcgtgatcactgcagcctcgacctcccgggctcaagcgagtctcccatctcagcctctcgagtggctgggactacaggtgcgtgccaccatccccagctatagggggttccttcctgttgctaaggtttggaggtgttctgttatttacctgaagtgctgcagctgggaatctgtaagaagaggaggaaattgcttttagaaaggtcacatagcccctcactgttttcctcttatccatgattttgtagcttcttgagagagttccctaggctctggccacatacaccactgcgttttgttgttgtggggacactggagtacccctggattcccctctcccatctcctgagactgatctctggagttaggctgtggtgtcttaaccttggctgtacacttcactagcagtggagcaagtgaatagataccaagtcctgtgagcagtgcttggcatatagcaagtacttcttaaatgttaactgttgctacttttaaatctcttacctctagtaagccgttccagatgcttcctgatggagataaacactgttctgtttctctttggtcatttctcatagctttctgtgatttttctctttataatggtggatcttggagacctgagggtggaaatattttttggacactgcactacctctaacacagggcctaaataggccctcagtgaataacaaatgtaattcttactcatttagaacattgatgatggcacctcagatcgcccctacagccatgctctggtggctggaattgaccgctacccccgcaaagtgacagctgccatgggcaagaagaagatcgccaagagatcaaagataaaatcttttgtgaaagtgtataactacaatcacctaatgcccacaaggtgagcatt

SEQ ID NO: 86542 - DNA, 1034 bp, Homo sapiens
aggcgtgagccaccgtgcccggccagtacaagtgttttttaagaagtacaagaggccgggcacaatggctcacgcctgtaatcccatcactttgggaggccaaggcggatggatcacctgaggtcaggagtttgagactagcctgaccaacatggtgaaaccctgtctctactaaaaatacaaaattagctgggcatggtaatcctgtaatcccagctatttgggaggctgaggcagaagaatcgcttgaacccgggaggtggaggttgcagtgagccaagatcacaccattgtactccagcctgggcaaggagagcaaagctccgtctcaaagaggtgcaaggccgggcacagtggctcacgcctacaatcccagcactttgggaggccgaggcgagcggatcacagggtcaggagatcgagaccgcactggctaacacggtgaacctgggaggtggagattgcagggagccgagatcacaccactgcacctccagcaaaagaggtgcgagaattgagaaagtcctgaacaataattgccagaacccagcagcatgcaccttaaagtttgctgctggtattgcacatttactctgggttggctgacctaaaggggcagagagaggccggacaccatggctcacgcctgtaatcccagcactttgggaggccgaggcaggtggatcgcttgaggtcaggagttcgagaccaacctggccaacgtgatgaaatctcatctctactaaaaaaaattagctgggcatggtggctggcacatgtaatcccagctattccggaggctgaggtgggagaatcgcttgagtttgggaggtggaggctacagtgagctgagatggcaccactgcactccagcctgggtgacagagcgagactccatctcaaaaaataaaaataataataaaagggcagagagagctgtttcttgggtgctgggatgtggtggggttgaggcagctagtgtttgggctgtcatgagagtgactgcattggcagaacttgaacaataaggaaat

SEQ ID NO: 86543 - DNA, 1050 bp, Homo sapiens
ccaggtcccattttcagtgcccaagatccccctggtattccgaggacacacccagcaggacccggaagtgcctaagtctttagtttccaatttgcggatccactgccctctgcttgcgggctctgctctgatcacctttgatgaccccaaaggtaagctcatggggagcctcaggagggaggtggggagggttcccagtactgaccctgtttcccaccacccagtggctgagcaggtgctgcaacaaaaggagcacacgatcaacatggaggagtgccggctgcgggtgcaggtccagcccttggagctgcccatggtcaccaccatccaggtgatggtatgacagaatcctggggcatgcaaagcatgccatgcacctgggcatggggaagtggagctgtgtctgggaccaccccttgctgtctccccctagatgtccagccagttgagtggccggagggtgttggtcactggatttcctgccagcctcaggctgagtgaggaggagctgctggacaagctagagatcttctttggcaagactaggaacggaggtggcgatgtggacgttcgggagctactgccagggagtgtcatgctggggtttgctagggatggaggtgagggctatgcaggcctcctgcaggggagagggtatagggtgtgcaagattacggtgcagggagaggagagggcttgatgctaaaggcccacccctccttgctccccacagtggctcagcgtctgtgccaaatcggccagttcacagtgccactgggtgggcagcaagtccctctgagagtctctccgtatgtgaacggggagatccagaaggctgaggtaagcaggaggggtgaagaacaggggctgggctgggtaacctgtctgcctgccaggaacttgcccaatgaaggatcagaggccccaaaccccactgacctacctacccaccatcagcctctccaggcctcccgacctcatacccccatggggcactgcctgccctacccccagcccccagcccttctcccatgagcctttgccatctcc

SEQ ID NO: 86544 - DNA, 1035 bp, Homo sapiens
cttggtacacatggctgcaggtgacaggtcccctcactttatcaccccttaccccacccagatttccttccaggccccttccctgcagcctgtctgggttgttgtcatggcaacaccaggctgccttggcctgtggctcccagaggcctctgctgtgtagttgccgtggtaacattcaggcaccaggtctagtctggtgtgctatccttagcaacgtgccctcaccccacacccccacctctctagctaccttccccaccacttctcagtcatggaaattagacacggccctaaaatgagcgtaggcaaaatgaaggtgacaggctgagtccctgggaggctagaatggagtggttggtggccagggcaactccatatcccctgcttatgggtgtcttgctgcagggggtgtgggtatggctgccgtgcagctgtgccgtacagtggagaatgtgacagtgttcggaacggcctcggccagcaagcacgaggcactgaaggagaatggggtcacacatcccatcgactatcacacgactgactacgtggatgagatcaagaagatttcccctaaaggtggggggcataatatgggagggggtagggaggcacaggacagggaggggagctccagatctgtggatcctaatgttgttcttgggttcccctactctatgacaggagtggacattgtcatggaccctctgggtgggtcagatactgccaagggctacaacctcctgaaacccatgggcaaagtcgtcacctatggtgagttagtgggccagggatggagagagcatgtgagggcaggagggagggtctaaggggtgggatatagaggccagggcttttgaatgaagaaggggtagggactcaggtgctctgtagacgatcagggttaggaatggtcctgtatgctgcattcagattgctgactcttgggtaccagctcttttcattctctgtcacaacttttcatatgagtgatagtaaattctacattcttttttttttttttttttttttgagatg

SEQ ID NO: 86545 - DNA, 1040 bp, Homo sapiens
tcctggtgtctgggttggggaggggtcatggccctgatttggatggcctgagggttagcatgagccagggtaagtgagacttgttctgggtcaaatctgggactggccatgaccctaaatgaccaatgcactcctcgcagctctcctgggttgttctgtatctgctagtcctgagtccctgggtggagggcttccgttcttgttctccagacctcatctcaggccagaacttggaaggaaagaccccagcatgccctcagttctcgtattcagtggagtgtgggggcttgaggacatgaaaaagggcgtaagtggcagtcccatcccccttccccatggaccctaactcttgttaatatacagaattcccatcattcctggcagggatcaagacagacccagattgtcccagaacagcacccacacctccctcttcatgctcttcagagagcgcagagaagtcttttctcctgacgctccctccttttccctgcccttcccttgaccccacttgctaagctggagagaaaggttctgttatctttgtcccctttccctcctgcacagaggctctcgtgggggtgggggggaagccttttactgctgcgtaggcctctgtagcccttcttgtctgttgcccctcctgcaccatctctgagtgaagatgttttctgggctcccagtgctggctcaaacacacttctcccgaggtgaccacaccctgctgtaagcgctcagagaactttgcctgcactttggtatggccctgaccacacagtgccgtcttcttttggttgtgtgacttccttgctgctattatattattattattattattgttagctaacattattaagtgcttattatgtgccagacattgtgctaaaattttttttttccatttggaaaaactgccctaattgacagataagaaaactggagctggaaaagtggagctcaaaaagattaagtaatttttatgcatccgaagtcacacagtcagtaaacagttgagaccgcttttgtaaccacagcagttt

SEQ ID NO: 86546 - DNA, 1024 bp, Homo sapiens
cgttcctggtgccccttttcgtgctctcccagcttgcgccactatggccctggccctttaaggctgagcgcgaggccccgcctcgcccggcgccccgcccctcccgctggatcccgcagccgcggctcttcccgacgcgttccgccttccccagctgtgcactctccatccagctgtgcgctctcgtcgggagtcccagccatgtccgacgagagagaggtagccgaggcagcgaccggggaagacgcctcttcgccgcctccgaaaaccgaggcagcgagcgacccccagcatcccgcggcctccgaaggggccgccgccgccgccgcctcgccgccactgctgcgctgcctagtgctcaccggctttggaggctacgacaaggtgaagctgcagagccggccggcagcgcccccggcccctgggcccggccagctgacgctgcgtctgcgggcctgcgggctcaacttcgcagacctcatggctaggcaggggctgtacgaccgtctcccgcctctgcctgtcactccgggcatggagggcgcgggtgttgtgatcgcagtgggcgagggagtcagcgaccgcaaggtgagcgggttgcgtagggcagggcagggctgcgcaggccactgggcagtggggcacgagtgggcgagcgccgggggtgtggcagggcgggagaaactggcgcggacctgggtgcacgagcgtggaaagcgtagccaaggaacttgtgtttgggggctcctggagagcggcatttatgtggggaggggagacgaaattatcgccccttccccaaccatttttagttgtggccgccgcccagaagctgtgctggtgggggggaaaacaataaggtgcccatgcgcatgcgcacaaccacactaccgtccccaccccccccccccccccccattaaaaccacacctgtacccctacccaccaaacactctctgggtaattgtggtctgtgactatgagtgacggttagtgccccctttccccgagggagcttgagggg

SEQ ID NO: 86547 - DNA, 1041 bp, Homo sapiens
caagggaggcacaaagtcactgaaggagaccactgttttgttgctgtcctctaggcagcgactgcgtccccccagagccccctccttctctgagccccttctgcagcgtggcgaaatctcacaaatgcaagcttttgcccccagggaggtggggaggcagtgatcaagaaagaaacctgacaaacccagaccaaccatgggggtctccctcctgttaacacccctccctaacagccctcctggtggttccctgtctgcccctcccctttatgggtcaagcctgctggcgtctgtttcattgtgctgtgggggaaggggagagtcaggggtgagtgggtgtctgtgtgcatgaacataaggcctccgggttcattctgacactgaatgaaaaactcaccaattattcgtccagtctcattaatatgcagacagacatctgttatttaggagtcaacagcagaggcattttcttgtcgggaggggcactagtgtacagggctctcttgtctctccgctgctagcgggtagctactcaggaatcatcccacacctcccgacctggagcctcccctctctctgaccctcactcacagctttgaggacagcaagtaagggattgaccagacagagatggagggagatctgggaacctggctggaaggaaggaagcaggagaggagctgccttgtgtagaacaaactgagaacaaaacgctaaaccctttcctggggaagagaatgtggagttgggggagagagctgtgccaagagtgcctgccccactgggaatctcagggacatgacccctccccccacaccttcctcagcctgcaggacaagtctgagtgcatctgaagcagggagagggtcactatggcaacatgaagtcctcacccagagactgcagaaaacgtaataagaggagttcagaaaaatggagaccaagggacctcaatctttttttttttttttcaatttatttatttttttttattgatcattcttgggtgtttctcgcagagggggatttggcagggaggga

SEQ ID NO: 86548 - DNA, 1016 bp, Homo sapiens
aagagcaagactccgtctcaaaaaaaaaaaaaaaaaaaaaaaaaggccaggtgcagtggctcacgcctgtaatcccagcactttgggaggccaaggtgggtggatcacctgaggtcaggagttccagagcagcctggccaacattgtgaaacccccgtctctactaaaaatacaaaaattagctgggtgtgatggcatgtgcctgtaattccagctactcaggaggcagagacaggagaattgcttgaacccaggaggcggaggttgaatgagccgagattgcgccatcacactctagcctcggcgacagagcaagactccgtctcaaaaaaaaaaaaaaaaaattagcttctacctcattaatcctaagaactcatacaaccaggaccctggagtcgattgattagagcctagtccaggagaatgaattgacactaatctctgcttgtgttctctgtctccagcaattgggcagatgtgtgaggcacctgtggtgacccgagagtgggtgttggacagtgtagcactctaccagtgccaggagctggacacctacctgataccccagatcccccacagccactactgactgcagccagccacaggtacagagccacaggaccccaagaatgagcttacaaagtggcctttccaggccctgggagctcctctcactcttcagtccttctactgtcctggctactaaatattttatgtacatcagcctgaaaaggacttctggctatgcaagggtcccttaaagattttctgcttgaagtctcccttggaaatctgccatgagcacaaaattatggtaatttttcacctgagaagattttaaaaccatttaaacgccaccaattgagcaagatgctgattcattatttatcagccctattctttctattcaggctgttgttggcttagggctggaagcacagagtggcttggcctcaagagaatagctggtttccctaagtttacttctctaaaaccctgtgttcacaaaggcagag

SEQ ID NO: 86549 - DNA, 1045 bp, Homo sapiens
tctttcaagcattttatttgagagactatcaaaccttataccaagtggccttatggagactgataaccagagtacatggcatatcagtggcaaattgacttaaaatccatacccctactattttaagaccattgtcctttggagcagagagacagactctcccattgagaggtcttgctataagccttcatccggagagtgtagggtagagggcctgggttaagtatgcagattactgcagtgattttacatctaaatgtccattttagatcaactggaatggatggtacagctgtgtggtgcttctgtggtgaaggagctttcatcattcacccttggcacagtaagtattgggtgccctgtcagagagggaggacacaatattctctcctgtgagcaagactggcacctgtcagtccctatggatgcccctactgtagcctcagaagtcttctctgcccacatacctgtgccaaaagactccatctgtaagggatgggtaaggatttgagaactgcacatattaaatatactgagggaagactttttccctctaactctttttcccatatgtccctccccctcctctctgtgactgccccagcatactgtgtttcaacaaatcatcaagaaatgatgggctggaggctgggcatggtggctcatgtctgtaatcccagcactttgggaggccgaggcaggtggatcacttgtcaggagtttgagaccagcctggccaacatggtgaaaccccatctgtactaaaaaaaaaaaaacaaaaagtagccaggcctggtggagcatgcctgtaatgccagctatttgggaagttgaggtgtgagcatcgcttgaacgtgggaggcagaggttgcagtgagccaagattgcaccactgcactccagactgggtgacagagtgagactttgtctaaaaaaaaaaaaaaagagagagagagaaaagctaggtgcggtggctcacgcctgtaatcccagcactttgggaggctgaggtgggcagatcacgaggtcaagagatcgagaccat

SEQ ID NO: 86550 - DNA, 1051 bp, Homo sapiens
cccctagacttccaaatatccatacctgctggttataattagtggtgttttcagcctctgattctgtcaccaggggttttagaatcataaatccagattgatcttgggagtgtaaaaaactgaggctctttagcttcttaggacagcacttcctgattttgttttcaacttctaatcctttgagtgtttttcattctgcagatgctgagtttgtgtgtgaacggacactgaaatattttctaggaattgcgggaggaaaatgggtagttagctatttctgtaagtataatactatttctcccctcctccctttaacacctcagaattgcatttttacacctaacgtttaacacctaaggtttttgctgatgctgagtctgagttaccaaaaggtctttaattgtaatactaaactacttttatctttaatatcactttgttcagataagctggtgatgctgggaaaatgggtctcttttataactaataggacctaatctgctcctagcaatgttagcatatgagctagggatttatttaatagtcggcaggaatccatgtgcagcaggcaaacttataatgtttaaattaaacatcaactctgtctccagaaggaaactgctgctacaagccttattaaagggctgtggctttagagggaaggacctctcctctgtcattcttcctgtgctcttttgtgaatcgctgacctctctatctccgtgaaaagagcacgttcttctgctgtatgtaacctgtcttttctatgatctctttaggggtgacccagtctattaaagaaagaaaaatgctgaatgaggtaagtacttgatgttacaaactaaccagagatattcattcagtcatatagttaaaaatgtatttgcttccttccatcaatgcaccactttccttaacaatgcacaaattttccatgataatgaggatcatcaagaattatgcaggcctgcactgtggctcatacctataatcccagcgctttgggaggctgaggcgcttggatcacctgatgtcgggagttcaagaccag

SEQ ID NO: 86551 - DNA, 1053 bp, Homo sapiens
taatttaatctcctattattggacaactacattgtttctaaaattatactattcctatgactaaacctttgcatatatcttttatctccctaggatatatttctaaaactagcattgttgactgaaagtgtaaatacgtgttaaggtgtttgctacataatgccatatttcctttttaggaaactaagctactttggatttccaccaacactgtattcatgtacccatttttctcttaacctaactttattggtctttttaattcttaacagagaccagaactttgtaattcaacattcatcgttgtgtaaattaaacttctcccattcctttcagagggaaccccttacctggaatctggaatcagcctcttctctgatgaccctgaatctgatccttctgaagacagagccccagagtcagctcgtgttggcaacataccatcttcaacctctgcattgaaagttccccaattgaaagttgcagaatctgcccagagtccagctgctgctcatactactgatactgctgggtataatgcaatggaagaaagtgtgagcagggagaagccagaattgacagcttcaacagaaagggtcaacaaaagaatgtccatggtggtgtctggcctgaccccagaagaatttgtgagtgtatccatatgtatctccctaatgactaagacttaacaacattctggaaagagttttatgtaggtattgtcaattaataacctagaggaagaaatctagaaaacaatcacagttctgtgtaatttaatttcgattactaatttctgaaaatttagatctagataaagctatagtgtggattattttatgtatatttacttgagaaaataattattaaatattagtggaaaagctatactttgggtatgatataggactttcgaattggaattttcctttctatctgtaaaagcaagtaggtatagttttattccccagaaggcatctttttctcccccttgtctcacatgggtgaatttaccagcatatttaactaaattcagactggttccaaatgtac

SEQ ID NO: 86552 - DNA, 1016 bp, Homo sapiens
tttctttcctttctttcctttcctttctttcttgacagagtcttgctctgtcactcaggctggagtgcagtggcgtgatctcggctcactgcaacctctgtctcccaggttcaagcaattttcctgcctcagcctcccgagtagctgagattacaggcgccagccaccacacccagctactgacctgcttttaaacagctgggagatatggtgcctcagaccaacccaaccccatgttatatgtcaaccctgacatattggcaggcaacatgaatccagacttctaggctgtcttgcgggctcttttttgccagtcatttctgatctctctgacatgagctgtttcatttatgctttggctgcccagcaagtatgatttgtcctttcacaattggtggcgatggttttctccttccatttatctttctaggtcatccccttctaaatgcccatcattagatgataggtggtacatgcacagttgctctgggagtcttcagaatagaaactacccatctcaagaggagctcattaaggttgttgatgtggaggagcaacagctggaagagtctgggccacacgatttgacggaaacatcttacttgccaaggcaagatctaggtaatatttcatctgctgtattggaacaaacactttgattttactctgaatcctacataaagatattctggttaaccaacttttagatgtactagtctatcatggacacttttgttatacttaattaagcccactttagaaaaatagctcaagtgttaatcaaggtttacttgaaaattattgaaactgttaatccatctatattttaattaatggtttaactaatgattttgaggatgagggagtcttggtgtactctaaatgtattatttcaggccaggcatagtggctcacgcctgtaatcccagtactccaggaggccgaggcaggtggatcagctgaggtcaggagttcaagacctgtctggccaacatggtgaaaccctgtctctacta

SEQ ID NO: 86553 - DNA, 1252 bp, Homo sapiens
atttttcccttcttgtgccatttcatcattagttccatgtattatttaagatttcttatcaaccagcaccttgggatttttttgtgtatgtgttggtttagggggtttatttgtttttttcttttttttcggtaattgaaaatgtgaagcaaaatgtcacctgttttttctttcatgtctgacactcatgtcttgtttacccccgacatgcagaagctgaaatccccatttcatacagtcttcaatgtggaggcagtagggatggagaaaataatgtactttgtgctctccggtactctttctttcctattgtctgaggggatttgggcataatttattttgctgcagagataaaaatttgttatatatattttttatcattcagggccaaggaatatagattttttttttcagccttgtctcagctgggtgtctttatttactctgtcttaaagtgttccttttattatcattattattttttaatcattgaattccatttggtgctagcatctgtctgttgcattgcttgtgtttataaaattctgcctgatatacttgtttaaaaaccaatttgtgtatcatagattgatgcttttgaaaaaaatcagtattctaacctgaattatcactatcagaacaaagcagtaaagtagatttgttttctcattccatttaaagcagtattaacttcacagaaaagtagtgaataccctataagccagaatccagaaggcctttctgctgacaagtttgaggtgtctgcagatagttctaccagtaaaaataaagaaccaggagtggaaaggtaagaaacatcaatgtaaagatgctgtggtatctgacatctttatttatattgaactctgattgttaatttttttcaccatactttctccagttttttgcatacaggcatttatacacttttattgctctaggatacttcttttgtttaatcctatataggttttttgaacctataacataagctacaacatgagaaatgtgcggttagatagatatgtcccttctgaaggtcagaaaaaaatataatggaggtaaaacctgaacaagcttggaaactgatggtagacttcttcaaggcagcccttgccctaattaaaattcttgtctttctagaaaaagtctagctgttgatttaccacagaaaataataataataattactattattattattttttgagacagggtcgccctgtgtcacctagattgcagtggtgcagtc

SEQ ID NO: 86554 - DNA, 1018 bp, Homo sapiens
taaattactgggactaggattttggtgtttgatacatgttactaaattgttttttagaaagattaaaccagtttatgctcttccagcccctgtggtatatgatagttcccattttcctgtaccttgccaacactgggtgatatccagttttaaaatctaaatcttgcattgctatgagaactacaattagagaaggcttatcttctactgcccattctctgtacagagcaaatccctctagacctgaagccccttggagttgtcaagaaacctttgagatgactccccactctgtatctgagctgtcaccagtattctccacttcttcaggattgccatggcaactaaattgatgaaaagatttaggaggccttttctctctttgcaattcctatgatcctttttgaatgtgggtttgggactctgtcaatatacccatcatctaattctgtccattgtgttttaaagtttaaggttgcaatttctgattacatctgccttagccatactgtattatatttgacattcaatatacaatgtccttgtttttctgtatttctaatcttattcccagagatgtgtctatttgttcaggattcattttgcaacgtgtttttactaagcatctacccaaaaccgttgaagtcagatttcaggctgtcttacgtctaaagtagcacaggcaggaaaaactattgaagtgggatttttttttccctttttgtactgaaccgagaaaaagtatatagatgatagagaattcctaatttggtatcattgatatctgggtttttgtttgtttttacagaagactgattaactatacttatttattaatttatcttctcattaataaacacttgctgagtgcttactgtctgctaggcattagggagacaaatatgattaagggaagcttcctcctatcaaggtcatgtgttccatttgggtatactaatgcattagcaatgtaaatcaagtagtgagagatcatctgttcccgataggagatggatta

SEQ ID NO: 86555 - DNA, 3327 bp, Homo sapiens
tggtaagtctgtagatagaacagagtattaagtagacttaatggccagtaatctttagagtacatcagaaccagttttctgatggccaatctgcttttaattcactcttagacgttagagaaataggtgtggtttctgcatagggaaaattctgaaattaaaaatttaatggatcctaagtggaaataatctaggtaaataggaattaaatgaaagagtatgagctacatcttcagtatacttggtagtttatgaggttagtttctctaatatagccagttggttgatttccacctccaaggtgtatgaagtatgtatttttttaatgacaattcagtttttgagtaccttgttatttttgtatattttcagctgcttgtgaattttctgagacggatgtaacaaatactgaacatcatcaacccagtaataatgatttgaacaccactgagaagcgtgcagctgagaggcatccagaaaagtatcagggtagttctgtttcaaacttgcatgtggagccatgtggcacaaatactcatgccagctcattacagcatgagaacagcagtttattactcactaaagacagaatgaatgtagaaaaggctgaattctgtaataaaagcaaacagcctggcttagcaaggagccaacataacagatgggctggaagtaaggaaacatgtaatgataggcggactcccagcacagaaaaaaaggtagatctgaatgctgatcccctgtgtgagagaaaagaatggaataagcagaaactgccatgctcagagaatcctagagatactgaagatgttccttggataacactaaatagcagcattcagaaagttaatgagtggttttccagaagtgatgaactgttaggttctgatgactcacatgatggggagtctgaatcaaatgccaaagtagctgatgtattggacgttctaaatgaggtagatgaatattctggttcttcagagaaaatagacttactggccagtgatcctcatgaggctttaatatgtaaaagtgaaagagttcactccaaatcagtagagagtaatattgaagacaaaatatttgggaaaacctatcggaagaaggcaagcctccccaacttaagccatgtaactgaaaatctaattataggagcatttgttactgagccacagataatacaagagcgtcccctcacaaataaattaaagcgtaaaaggagacctacatcaggccttcatcctgaggattttatcaagaaagcagatttggcagttcaaaagactcctgaaatgataaatcagggaactaaccaaacggagcagaatggtcaagtgatgaatattactaatagtggtcatgagaataaaacaaaaggtgattctattcagaatgagaaaaatcctaacccaatagaatcactcgaaaaagaatctgctttcaaaacgaaagctgaacctataagcagcagtataagcaatatggaactcgaattaaatatccacaattcaaaagcacctaaaaagaataggctgaggaggaagtcttctaccaggcatattcatgcgcttgaactagtagtcagtagaaatctaagcccacctaattgtactgaattgcaaattgatagttgttctagcagtgaagagataaagaaaaaaaagtacaaccaaatgccagtcaggcacagcagaaacctacaactcatggaaggtaaagaacctgcaactggagccaagaagagtaacaagccaaatgaacagacaagtaaaagacatgacagcgatactttcccagagctgaagttaacaaatgcacctggttcttttactaagtgttcaaataccagtgaacttaaagaatttgtcaatcctagccttccaagagaagaaaaagaagagaaactagaaacagttaaagtgtctaataatgctgaagaccccaaagatctcatgttaagtggagaaagggttttgcaaactgaaagatctgtagagagtagcagtatttcattggtacctggtactgattatggcactcaggaaagtatctcgttactggaagttagcactctagggaaggcaaaaacagaaccaaataaatgtgtgagtcagtgtgcagcatttgaaaaccccaagggactaattcatggttgttccaaagataatagaaatgacacagaaggctttaagtatccattgggacatgaagttaaccacagtcgggaaacaagcatagaaatggaagaaagtgaacttgatgctcagtatttgcagaatacattcaaggtttcaaagcgccagtcatttgctccgttttcaaatccaggaaatgcagaagaggaatgtgcaacattctctgcccactctgggtccttaaagaaacaaagtccaaaagtcacttttgaatgtgaacaaaaggaagaaaatcaaggaaagaatgagtctaatatcaagcctgtacagacagttaatatcactgcaggctttcctgtggttggtcagaaagataagccagttgataatgccaaatgtagtatcaaaggaggctctaggttttgtctatcatctcagttcagaggcaacgaaactggactcattactccaaataaacatggacttttacaaaacccatatcgtataccaccactttttcccatcaagtcatttgttaaaactaaatgtaagaaaaatctgctagaggaaaactttgaggaacattcaatgtcacctgaaagagaaatgggaaatgagaacattccaagtacagtgagcacaattagccgtaataacattagagaaaatgtttttaaagaagccagctcaagcaatattaatgaagtaggttccagtactaatgaagtgggctccagtattaatgaaataggttccagtgatgaaaacattcaagcagaactaggtagaaacagagggccaaaattgaatgctatgcttagattaggggttttgcaacctgaggtctataaacaaagtcttcctggaagtaattgtaagcatcctgaaataaaaaagcaagaatatgaagaagtagttcagactgttaatacagatttctctccatatctgatttcagataacttagaacagcctatgggaagtagtcatgcatctcaggtttgttctgagacacctgatgacctgttagatgatggtgaaataaaggaagatactagttttgctgaaaatgacattaaggaaagttctgctgtttttagcaaaagcgtccagaaaggagagcttagcaggagtcctagccctttcacccatacacatttggctcagggttaccgaagaggggccaagaaat

SEQ ID NO: 86556 - DNA, 1008 bp, Homo sapiens
attaaagcagccagtgtaaatattgaaactttttggcctggcttgtttgcaaaggtcctggccaacgtcaacattgggagccacatctgcagtgtagagggggggaaaaaaacgtgactgcgcgtcgtgagctcgctgagacgttctggacgggggacaggccgtggggtttctcagataactgggcccctgggctcaggaggcctgcaccctctgctctgggttaaggtagaagagccccgggaaagggacaggggcccaagggatgctccgggggacgggcgggggaaagtgaatttccgaagctaggcagatgggtattcttatgcgaggggcgggggcggaacctgagaggcataaggcgttgtgaaccccccggggaagggggcagtttgtaggtctcgagggaagcactaaggatcaggttgggggcacagtgtgtccgaggaggaatcctcctgataggaactggaatgtgccttgaaggggacaccatgtgtataagaacatcagctggtcgccggggatggtggcttacgcctgtattcctagcactttgggaggccaaggcggatggatcacgaggtcaggagttcgagaccagcctgaccatcgtggtgaaaccccgtctctactaaaaatacaaaaattagccgggcgtggtggcgcgcgccagctactcaggagctgaggcaggagaatcgcttgaacccaggaggcggaggttgcagtgagccgagatcgcgccattgcactccagcctgggtggcagaacgacactccgtctcaaaaacaaacaaagaaataaacaccggctggtatatatgagaagatgggcccttgcggaagaagaagtgccaggaatatgtctgggaaggggaggagacaggattttgtgggagggagaacttaagaactggatccatttgtgctattgagaaagcgcaagagggaagtagaggagcgtcagtagtaacagatgctgccggcagggatgtgcttgagggg

SEQ ID NO: 86557 - DNA, 3391 bp, Homo sapiens
atgtcctaaatggtattgcctaggttttcttctagggtttttatggttttagatcttatgtttaagtctttaatccaccttgagttaatttttgtataaggtgtaaggaaggggtccagtttcagttttctacatatggctagccagttttcccagcaccgtttattaaatagggaatcctttccccattgcctgtttcagtctatccaatttctagatttatttctcattgtctttgttgtaagatttgcacatttatcagagatttgggaattagtgtgctcctctctctgacttttgaaactggtaatagtttacttctgtagaaggggagcaggctagagactttgttttcctttagtacgccttcatactgtgactttttaaaaaattatatacttgtatgatttcacaaaagaaacctcaaaataatacactccaggaaaagtattttaaatagaaaaagtaacctctaacatctcggcttgtgttttctcccagtcgtttccacttgttccatgtgacacagaccagcctcaagacaagcccccagactggttcacaagctacctggagacggtgagtgttctgtctcgcttgggttttaactgcggtgttggcacaggtggaatgtggaagaaatagaaaactgaacccaggtggctgctgcctctagtaccggtgaagagtggtagcttataatttccaaacttagaacagttccagtcgagaaagctctaacctttgcagtgaagtgtcagaaaaagagggagtctaattctaagcatgtaagggagagggacaactctctgcttgagaaaaagttagaaatttacttatcaaaaggatgttttgatattttcttcgaaccagtttagctgtggaaggaatagaccttttgctatgtttctgtctattcagtagcagttgtttattgtgtttttgtattataccagagacagttaggtttcagatctattgatatcttcacatttttttctgatattggaactgagttttttccctaccttctgctccatattctagttcagagaacaagtggttaacgaaacggttgagaagcttgaacagaaattacatgaaaagcttgtcctccagaacccatccttgggttcttgtccctcagaagtctcaatgcctacttcagaagaaacattgtttttgccagaaaaccagttcagctggcatattgcttgcaacaactgccaaagaaggattgttggtgtccgctaccagtgtaggtaagcagttgcttgggagtagctagctagtgatagaccttacagcttttacctccctggctttctgtgtaggtaaagggaaattaattgtaccctgtttctgagcattagatgttgtagctgtgagttggaagcacaagctactcttcacccacatgctttgtatgttgtaactattcagattgttgtgttcaaatgtgcatttggattagcaaagccaggcaaaattatgttcccctgaacggacaaaattagatcactaagggtagttcctcggttgttccaaatgcctttttttttttttttttggtgacagggtctctgtcacccaggctggagtgcagggtgcaatcatggttcactgcagcctcaccctcccaggctcagacaatcctcccacttcagcctgccaagtagctgggatcacagactgccttttaattatttttttggagatggggtctccctatattgcccaggctagtctcaaactactggactcaaatgatcctcttctccatggcctcccaaagtgctgggattacagacatgagccactgtgcctggccccatgtactttcacatcttaccttcctcccatagattttcatttaaaatggatatgggttaagtgttattatcctcattttattaatgaggaaaattgaggcatggcatagtcagatggcatgctcaggttacctgctagttggtactggagcaaacatagaagtatggtcttatatctccctaccccaggtacttcctattctgccattgtgtattgtgccattctttccccacagcctatgcccatcctacaatatctgtgaagattgtgaagcagggccatatggccatgacactaaccacgtcctgctgaagttgcggagacctgttgtgggctcctctgaaccgttctgtcactcaaagtactctactcctcgtcttcctgctgctctggaacaagtcaggtaaaaccctctacatggagatgcttattctctgattgacttcttggttctggtgacagggtatgaatcacaaaactacagatagtctccttagttctgctcattttcaattgatgtgcaataatgaagacagttatccaaagttagtgaaatagaaataatagctataaaaagaaattaagaaactaaagtaggctgggcacaatggcccataactgttatctcagcaacttgaggggctaaggtgggaggagtgcttgaagccaaatatttgagaccagcctgggcaacatagcaagatcccgcctctacaaaaaaaatttaaaaattagccaggcgtggtggtgcgtacctatagtttcagctacttgggagtctgaggtgagcagattgcttgagcccaggaatatgaggtggaagggagccatgattagaccactgtactccagcctacatgacagagtgagaccctaattctaaaacaaaaaaagaaattaaactggaagctgacactgatggaaattgcaattggctccacatagcttcagaatttatttgtgactttcttttaagacttgcttttattatctcacaggctccagaaacaggttgataagaactttcttaaagcagaaaagcaaaggttgcgagctgagaagaaacaacgtaaagcagaggtcaaggaacttaaaaagcagcttaaactccataggaaaattcacctgtggaattcaatccatggactccagagccccaagtctcctttaggccgacctgagagcttgctccagtctaataccctgatgtaagcccaggactggggtgggagccaaaactttaggcccagctctctgaaactggaacttcaaccaatttccgtcttatttattggtagcccttaacacctaaatctttaaaactttccattatctggtcttagtattttttgtttgtttgttttttgagacagagtcttgctctgtcacccaggcggtagtgcagtggtgcgatctcggctcactgccagctctgctttcgggttcacgccattctcctgcctcagcctcctgagtagctgggactacaagcacccgccaccacgcctggctaattttttgtatttttagtagagatggggtttcaccgtgttagcca

SEQ ID NO: 86558 - DNA, 1027 bp, Homo sapiens
tgcagtgagccaggattgtgccattgctctccagcctggatgacagagtgaaacccaatctcaaaaaacaaacaaaaaaaagaggctgggcacggtagctcacgcctgtaatcccagcactttgggaggccaaggctggtggatcacaaggtcagaagttcaagaccagcctggccaagatggtgaaaccccatctctactaaaaatacaaaaattagccaggcatggtggcaggtgcctgtaatcccagctactcgggaggctgaggcagagagttgcttgaacctgggaggcggaggttgcagtgagccgagattgtgccactgcattctagcctgggtgacagagcaagactgcatctcaaaaaaaaaaaaaaaagcaataaaacaagttcgtgcaaggcttttccactataaaggaatcctcttctcttttttccctctagatacttgtgtccttttgttcctttatgttcatggttttgtgtcttggccacagctttccaggctaaataactgtgattcttcctgcattgattgatctgagatattttgcttacttattggtctggagaaattttttgtaacagacctcaaagcatatcttggtttattttagccctgcgggaggcaagaagcctacaaactgctacttctggacactgactgttgatgatatgatgctttctcttgattgatggttctcctgtcttcattctccagatgtgactccctgcatgtctcctctgccacatgacagtcctttaatagagaagccaggcttggggcagatagaggaagagaatgaaggggcaggatttaaagcacttcctggtaagggattaaacatttgtaaagtatttgcatcctccctttccatatcataccctattttacagctatcccctactgaccctaccttagcatgtaaatgggcttgctttctgtagcatctcatgttttgaagtctcctcaccttcacatggcacagatagcagctattccttggtttagttttagcatgggta

SEQ ID NO: 86559 - DNA, 1052 bp, Homo sapiens
gggtggcacctgaattgtgactgccagacttgactagttagatgtgctcttcttcactgagactgaagggagagtgatcttagttagaagttctgatcttggcggggcgtggtggctcaagcctgtaatcccagcactttgggaggccaaggcaggcggatcacaaggtcaggagatcaagtccatcctggctaacatggtgaaatcccatctctactaaaaatacaaaaaattagcctggcgacgtggcgggtgcctgtagtcccagctactcgggaggctgaggcaggagaatggcatgaacccgggaggcggagcttgcagtgagccaagattgcgccactgcactctagcctgggcgacaaagcgagactccatctcaaaaaaaaaaaaagaaattctgatcttgtttgtgtctttagactctacgtatgctacctgactgttctaattagagcatcaggagtaaagaagccatcatactcatttctccatcttctcaggggcagaattacagctgcattccacagtggaatagcagccagttgtgctgcctggattctgcagtaaggaatcttcctgtaatttgacagagctccttagcagagacccctatgggtagctgagttgtctgctttctccaagggcagcagtcccagaaacagtggatagaagcaggagtaccaacaaagtttctcaaggttaaattctgctgtaataaatacctttataggccgggcacagtggctcacccttgtaatcctagcactttatgaggctgaggcgggtggatcacctgaggttgggagttcgagaccagcctgaccgacatggagaaaccccatctctactaaaaatactaaaaattagccaggtgtggtggctacatgccaaggattacatgcctgtaatcccaggtacttgggaggctgaggcaggagaatcactttaacccgggaggcgaaggctgtggttagccgagatggcgccattgcactccagcctggcaacaagagtgaaactccgtctcaaaaaaaaaaaaaggaataaat

SEQ ID NO: 86560 - DNA, 1026 bp, Homo sapiens
tgatccagctactcaagacgctgaggcaggagaactgcttgaacccgggaagccaaggttgcagtgagctgagatcgcaccactgcactccagcctgggtgacagagcgagactccgtctaaaaaaaaaaaataataaagtgtacatgtggccaggtgcggtggctcatacctgtaatcccagcacgttgggaggccgaggtgggcggatcatgaggtcaggagatgaagactatcctggctaacacggtgaaaccccatctctactaaaaatacaaaaaataagctgggtgtggtggcgggcgcacctgtaatcccagctactcgggaggctgaggcaggagaatggcgtgaacctgggaggtgcagcttgcagtgagctgagatcatgctactgcacttcagcctgggcaacagagtgagactccatctcaaatcaatcagtcatgtatatctttatatttttttccacatgtgtgtacaaatacataacaaaaaggtctggaaagacagtaccaaaatgttcacagctgttattctgataggatttatgggtaattttttttttttttttgagataaggtctcactcgcccaggctaaagtgcgagtagcaagtttatggctcattgcagccacaacatcctggggtccccctacctctgtttcccaagcaactgggaccacagccacatgctaccacaatgagctaaatttttttttttttgtagagatgggatttcgccacgttgcccaggctggtcccaaacttctgagctcaagcagtctgcctgccttggcctcccaacgtgctgggattttaggcgtaagccaccacacctggcctgggtagctttttttttttttgggacacagtctctgtcacccaggctggagtgcagcagcgcggtctcggctgactgcaacctccgccttcccaggttcacaccattctcctgcctcagcctcccgagtagctggcactacaggcgcccgccaccatgcccgggtaatttttttgtattttt

SEQ ID NO: 86561 - DNA, 1033 bp, Homo sapiens
atagagcttcttggaaacctgagtgtttctgcctaccttgtttctgtgagctttgattctattttgttttgcatagtcttcaaacttagaatatggtcatagttccagaaccagcccttccctttagttcttccctctcctctggctttcataattctagcttatgatccacaaggctttaccaagtaaggatagtacttaggcctgcttttagcttccaccttaaaattggttgctttcatcctttagtgacatttgccttgcctgaaggaccacttggaaatgagaaggaggagattatccatatcgctgaggaagaagctgtcatggaggaggaggaggatgaggaggatgaggaggaggaggatgagctcaaagatgaagttcaaagtcagtcctctgcttcctcagaggattacatcatcatcctgcctgagtgctttgataccagccgccccctgggggattctatgtacagctctgcgctctcacagccaggcctggagcgaggtgctgaaggcaagcctggggttgaggctgggcaggaaccagctgaggctggggaaagactccctggaggggagaaccagccacaggagcacagcataagtgacatcctcacgacctcacagactctggaaacagtgcccctaatcccagaggtagtggagcttccaccgtcactgcccaggtaccactcacagccccctcagctggggtgttcttcagaggtgaaataaagagaggaatcgacctgatctcaaaacctgttttttcctcagtatggaaagagactattttccatagcaaagtctgaatttagatgaataaaagttgtatttcccagtatttgtggattctggatttaaagaaatatttgttttagttggccttaaattatctgagtatagtctgtctgcttatattttgattattgagagctggttgtgtttttttttttttttttttgagacagggtctcagtctgttgcccaggctggagtgcagtggcacaatcttggctcactgccac

SEQ ID NO: 86562 - DNA, 2524 bp, Homo sapiens
tacatcatcatggttccccaggagtggatttaccagttaccataccagaagtttcttcagtccctgatcagatcagaggaggtaatgatcagcctaagctttttctctttttctctgctcctgtctaatggaaaccaggtataaatagcctctctctcttcgtgattcttggtggttttttgaaacttgcccttcacaggccaggcgtggtggctcacacctgtaatcccaacactttgggaggccaaggcaggcggatcatagggtcaggagttcgagaccagcctggccaacatagtgaaaccctgtctctactaaaaaatagcaaaaattaaccaggcatggtggcgggcacctgtaatcccagctacttgggaggctgaggcaggagaatcacatgaacctgggaggcggaggttggagtgagccgagatcgcaccattgctctccagcccgggcaacagtgcgagactccgtctgaaaaaaaaaaaaaaaaaaacttgcccttcactctctccatgctcctcctgcatactctaatttctattctctggctgaatatattgttagacctcatagaggtagtggaaagaacacaggctttggagccaaacaatctaggttccagctccatctccccctttcctgactagcagttcagcaggtttctaatggctgtgagtctgttttcttactacaaaatatatcagtgtgttaggattatagagttgatttttctgattcaataaacaatcatcttgcattgcatttctggacagtttctccttatcacttaaactacccttaaaacttcccaaatactttaaaaaaaaaaaaaaagacttcaaacactgtgatcagattgccacctgcctcaataatagccttgctgtgagttaggaaacagtaggtgcttatggatgctgcatctaaccaacagctcttttgcttttagagcccagaggctcatcaggacttgtaaacagcagacagaagagctatgaccactcaaggtaacaaccttgtgcagtctcttttttcagaagcaggtggatattcttgtattccttctgcttaaaagagcctctcacagtatgtacccatcttcagagagcagagaaggggagcctttgttccgtcttattcttgtttcttctaaaggctttgagcaacactgaacaaacggctaaagctgatgtttaagagtgttctgtttgggaggccgaggcgggtggatcatgaggtcaggagttcaagatcagcctggccaacatagcgaaaccccatgtctactaaaaatacaaaaattagccaggcatggtggcgggcacctgtaatcccagctactcaggaggctgaggtgggagaattgcttgaacccaggaggcggaggttgcagtgagctgagattgcaccattgcactccagcctggctgacaagtgaaacaacatcaaaaaaaaaaaagagtgttttatgtttcagacaaggaaatagtgtccacaaattacctcactcttagcactggggaaaaggtagaaaggttaagcccagtatacatttaaataattttttcttggacatacctggttctctgcttccactcatattaggccagtgtccagaaaatcacatttcctttgcaaggtgttttctctgagagaataattgagcagacaaactgttgatatccttgtgtgtcctcgatcacattaattttcagctaggagtgagagccatcatggttaccagagtggtgtgtttcctgcagtgcccctatcttgcttgcaccagtagagctgggccctccatcaaaccatgatctgtagctataaagctgataatgaaagcaattgtgttctctttttccatctaattttttctcttaaggaaatcttattccaaggattagagcccagattatcttgtaaaaaggtaatgatttgtgtttgtttggggagataatttggttttcctctgcaggcaccatcatgggagcagcattgctggaggactggtgaagggggctttgtctgttgctgcctctgcatacaaggccctgtttgctgggccaccagtcactgcacaggtcagtgtgtgtgttttattttcctgaatctcaactccatgtcaccagtgaaagtgatggcatctgtctgggttgaagagtaacatggcattgtggaaagggcataggctttagatttagtctttagttaacacacaacacaactctgccactttttttttttttttttgagacgaagtctcgctctgttgcccaggctggggtgcagtggcgcgatctcggctcactgcaagctccacctcctgggttcacaccattctcctgactcagcctcccgagtagctgggactacaggcgcctgccactacacccggctaattttttgtattttttagtagagacgatgtttcaccgtgttagccaggatggtctcaatctcgtgacttcatgatcttcccgcttcagcctcccaaagtgctgggattacaggtgtgagc

SEQ ID NO: 86563 - DNA, 2271 bp, Homo sapiens
ccttttctcctccttcaagtacacagataactaatctaaaatagggccttcccagtccgaaccgttggtatcaagtacacaggagtgccatagccttgaatctaattacctagtactttgaataaatctggaaagactagtatgcttgcaagatgatacaaatgtataaaataaacatttaaattatacagaatttttttttttttttttgctttgcttgtctctacacagccaataatttctgaagatcagacagcagccctgatggcccatctctttgaaatgggattctgtgacaggcagctgaacctacggctgctgaagaaacacaattacaatatcctgcaggttgtgacagaacttcttcagttaaacaacaacgactggtacagccaacgctattgaggagtgaccttgtattaaataactgcctgctgctcagagatgatctttattctgtcattggggtatgggatagaagcccttgcttatttttaatctgatgaatctgtatagagcccatcgttgagttaccaagacaatacctgctacagtattttggggagcaaactaaagaccagaacttaaattttcactttagacattggatgaatagtatgaagacagtttttcagttgatttggataaaactattttagtgcattgacaagtgtaacttcaacttcatatagaaccatttttctttctgcttttattgaaactgagtatttttctttggctaatgtggattttttatggggatatctgttaattttcaggttttgaaagacattaacctcggaagttgtttttaagaattattctcataattcttattctcataatttctgtaatccacctcaagcttcatagttatttggcattgaaataacacccagagcatgatagaaatgttgttactcttcctctctcaaggagaaagtaattttcctgcaatacttaataattggcaccgttgctttctaaagactccatggtgcattcaagagtatccaacttcaagggaatctccgcatttcaatgaaaggaggaagagtgtgctgataaacctaccagcacctattgagcaatgtctattatagtaattttgcatacatttttatttaagggaaaaaatataggtattgtgaaatattttgctaatcttatagaaaaggaaaaaatcccgttatttaaagggaaaagtaaatttaacagttgccttttttcttaatgtcagggcagatcttattttacagtacagtgggggaaatagaaacatgtgaaaggcaaaaggcaggctcctaaattaatgtcagtgaagttcagggtgggcaaatgagtgtgtgtgaggtataggaaatgctgatgacttctttaatgcttgaagtccgttcacaggtatctagccctagaatgcctagaacaggaagaggcagctggtgttctgcaaaacttggacaggggcaaagttgctgaaaaagttttggtttaacccgaagataagtggaaaagagcttgtccatgaacccaggttctcactctgtttacagaagtgtgttgagtacagttggtgaaggaagaggtaacaaaaaatgctaaatattttatccatgaaaatgacttccagaaaaggaagaatatgaaccccagaccgaaggggaaaagatagttaatagtattatctaacctggttggtatttgtaatgaatggtgattttaattagtcattagccataatgatgtttatttacagtataactcctgaatgctacttaaataaaccaggattcaaactgcaagccagccaggccgttcattatttaaaacgttttaatcggggcttccgggtagaaggtggagcggcagggtgtaattgggttgatgggtgggacctgtcttgaccatcggagttttataatcgagggccaggagggcccgggttgctctcctggttatgtatgtacttgtacataaccacctaaagaatggtgaaataaatgttcttggaaattcctacccggactggctagtccttgcggaagcagcgtccgggccctcgggtaacgtttgaagagctggcagcgtctcaggctgctgcgtggcgaaggggcggaccgggggacgggggggtgggcccttaggggctggggcgggacttccctgggcactgagtcaaagcttgaggggagtgttcgctcccgcattttcgattccactctcttccgtttctgtcgctgcagtcgtccgcgggtaaggccctccctagac

SEQ ID NO: 86564 - DNA, 1048 bp, Homo sapiens
ctcactcagctacacctcatgggcagagagtcttccaagctgaccccatgaatctttgttggctcttgggaatagcaagtctagccccttttctgagtctcaccttgcctataagttattaggggcaacaggcatagggctgtctggaagctgctggaaaacaggtggggcagctgtcccaggtaccttggcagagtggggagccagagggaagggcaaatgagggagctccccgctccccacccccagacagtataatggggccagagctttccttttcctcccagccatggcaacaaggcctgcttcctctccaggggcaccctgacctgttcatacctgagccattcagagcagctggtctttcagagctatgaatatgtggactgccgaggaaacgcatctgtgccccaccagctgacccctcacccaccatgacctgtctgctgtccctgtactccaggcacctgcaaccctggtctatatctcccacaactccctggtgactaaggaaggactacagaggctttgccaaaggagaagccctgcctcatcacacccttacctcccaccccctcagcacaggaagcttgctttgaagttaacttcatacacacacactcatatcctccagtttcccccagattctttcaggggctgccatcagattctgcccttggttagttttttgttttttttttggtagagacagagtctcactgttggtccaggttggttttgaactcctgggctcaagcgatcctcccttcttggcctcccaaagcacttggattacagatgtgagcctgtgcctggctggtctttcttgaggaaaatctgacctggcattttcttgaggcaccttagattccctggagtggcacctggcctttctgtactgagcacctggtcagtctgaagggggcatttcaccccagctccatcagggctggcagtcccgtctgaatgtggagagagctgtagttttatctggcttttaaaacatggacctgccggctgggcgcagtggcttacacctgtaatccca

SEQ ID NO: 86565 - DNA, 1049 bp, Homo sapiens
aaggtgctggcttttgacatgctgtgaaactgccccaagggacagtcagataaaacaaattacttgcttcagaagcaaaccctgtctgtcaagttattggatacaagctgagaccccagagccctgctcacagataagtattcagtggagaaagtaggaagattactataagtctgaagttaaatatcctctttttccgacctccagtaaagggaaatgtattttggaacttatgtaaaaatgtctttgtgatttttgccttagaaaacaaacctgactcctttgttttaagtccaagggctgatggtccacccccagggatggggggtgtgtcctgtcacacaggaggtggtgctttgtgtggcttccagtctctgctggctctttaggagttcaatttgggaaagggaaaaataaggcaacttaagttgctgccatcagttcctgggatgaatggctaagtgatgatgctgatgaacaatttgcagctaagaggctgtttgggagttgaagaatagcccatgattgcagataaacaccacctgccatgctgtccaccgcagccccccttctacttgggaggcagaggttctccttttccttctctctccattgcttttatgctaatgctttagagctggatgagaaaaccggatttatagaaagtctagttggttcctctggcaaaagccatttccaattgaagcttgtctacattttaactaaatcagaaaaatggtggctgcagaggctctttaaaaaaaaaaagaaaaaattattggccgggcgcggtggctcacgcctgtaatcccagcactttgggaggccgaggggggcagatcacgaggtcaggagatcgagaccatcctggctaacacggtgaaaccccatctctactaaaaatacaaaaaattagctgggcgtggtggtgggcgcctgtagtcgcagctactcgggaggatgaggcaggagaatggcttgaaaacccaggaggcggagcttgcagtgagccgagactgagccactgcactccagcttaggcgacagag

SEQ ID NO: 86566 - DNA, 1046 bp, Homo sapiens
atagaatttgcttccccaccccatgtctccccatgaggagagtgttaatactattttattgtttgaccaccttcatggtacttttctcttgagtttaagaccattttcttttgttagttccagtaagggtagaaattggttgggggaaaaatattttttggcatgttccagatgtgtctggctctccctcaggaagcggtgggaaggcctggtgcacatctctgagctccggcgggagggtcgtgtggccaatgtagctgatgtcgtgagcaaaggccagagggtcaaagtcaaagtgctgtccttcactgggaccaagaccagcctgagcatgaaggtaggtgagatggtcagcctgttcttacatgtgatggccaagggaatggaagaggacagcaagtgagacagctcccttgtttttgtgccttaggatgtggatcaagagactggagaagatctaaacccaaatagacggcgaaatcttgtcggggagaccaatgaggagacctcaatgcggaatcctgatagacccactcacttgtcccttgtcagtgctcctgaagtagaggacgactcactggaacgcaagcgcctcacccgaatctctgacccagagaagtgggagatcaaacaggttggggcctttagttttcatgaccagatagtcattcagcatgtagcatggtgcttaggggtgtgccctggagcacgatggcctgggataacttttggccactgtattagtctgttttcacactcctgataaagacgtacctgagactgggcaatttactaaagaaagaggtttattggacttagaattccacttggttggggaggcctcacaattatggaggaaggtgaaaggcatatctcacatggcagtagacaagagagcttgtgcagggaaatgccctttttaaaaccatcagatctcatgagacttactcactatcgtgacaacagcgtgggaaagagctgcctccatgattcagttaccgtccactgggtccctcccacacacgtggaaattcaagatgagattt

SEQ ID NO: 86567 - DNA, 1049 bp, Homo sapiens
tgctgttgagttgtacatattgtcattttgagagagtgttagggttttttgtttttttttttcttggaagacgttttatcatgttgcctaggctggtctcaactcccggactcaagcgattctccctccttggcctcccaaactgctgagattacaggtgtgagccaccatgcccaactgagagaatattttcaaaaagtttcctgagaaattatgtgctttcctttgggaggccgaggcaggcggatcacttgaggtcaggagttcaagaccagcccagccaacatggtaaaacgccatctctactgaaaatacaaaaattagctgggcatgatggcgggtgcctataatcccagctacttgggatgctgaggcagaagaatcgcttgaacgtaggaggtggaggttgcagtgagctgagattgggccactgcactccagcctgggtgacagagtgagactctgtctcaagtatgtgctttctattataatagtctgagttttatgtggcccagccctggaagttaccgccagtctcaccggtggcttcctaattgcaattgaagaaatgggaaataaagtaacaagtagcttccccacatgctgacactggctagactgaccctcttatcacatgccttcttcctttctgttctaggccatgggtatcaatgatctgctgtcctttgatttcatggatgccccacctatggaaactttgatcacagccatggagcagctgtacacactgggggccctggatgacgagggcctgctcactcgcttgggccgccgggtaagggacagactcaacttcctgtgcttttgggaagattccctggtcagcctttcacatccttcggtctgtacaaaatcaggctgaggccgtggataagctttgagtaaaattctaaatgtttgtttttaacctgaatttctccactgtcactttaaactgtttcttctttatacaaaaaggtgttctgttcataattttgcctgaggatgtattactgaatgtagccttaattagaaacggcatctgcaaa

SEQ ID NO: 86568 - DNA, 1027 bp, Homo sapiens
gatgggggtgccatgaagttggggtagttggcctgttgccattccaatgcttgatgtggacttttttttttttttttttttttttgagatggagtctcactctgttgcccaggctggagtgcagtggaatgatcttgcaatctctacctcccgggttcaagcagttctcctgcctcagcctccagagcagctgggattacaggcgtgcgccaccgtgtgctgctaatttttgtatttttagtagagacagggttgcaccatgttggccaggctggtctcaaactcctggcctcaagtgatcctcttgcctcagtttcccaaaatgctgggattacaggcctgagccatcatgcctagcctgatgtggacacttttgatagggtcttgtagggctccctagaattgctccatgttcagttagtagctgttgagtcggaaatgttcctctgtcccactgcttggcaggataaacaagcccttgcagatcagaagaaggccaaattccaccagactgaaggggaccacctcaccctgctagctgtgtacaactcctggaagaacaacaagttctccaacccatggtgctatgagaactttatccaggctcgttccctgcgccgggcccaggacattcgcaagcagatgttaggcataatggacaggtaagctggaatctgatgactctgcatgtttgagttgaaccaccttgagtatcatgtcttttcatctctgtgtgtacctataaagctataggcaccttttctcttgctcctcacataacccttttcctccagcttttccatctttgttatattccttctccccaagtaagggtatgcctgagaattacctcagatacctaagaggaagattatctgttagttgttgaaaaaaatgctctttgtttgcaaccctctggaacattattactgtggaattgaatacctgtctaaacaaagtgtctgtctctgagtgcctccgtctgcccactgtgtagagctgcctctgtagtacacttagggctgga

SEQ ID NO: 86569 - DNA, 1901 bp, Homo sapiens
cgtcccaaaaaaaaaaaaaaaaagaaagaaaaaaacaactacctagtgatgtagtttaaaaaaaaaaacttgttttaaagtagcatttttaaaaaattggactctatctagaaccctaatataaaactgatttaaaaccaccatgttatcacagtagaagggttagaaatgtggctccttgcatgtttggccttctccatcccttgtggcagtgtgaggcccctcttcagagccctagaattctgtggaaacattctaataaacatcctcacattttatagagcaagaaacagattagagaagggatgtgattggctccatgtcacttaactagttagagccagagccaggactagaatacattctcctgagacctttcttgtggttagaggtgtgcgggtgcttcagtattggggtgtggctgtcataaacagactgcagtcttataggtgtcaggcaggagaggtaatagtataaaatgtaagctcagctgaggcctactagggaccaggttgactgtagagtggggcctatatccagaggcttgagtactatctctgtcccccctcagggtggtgtaccatgagctggtgctcaccaccaaggaatacatgcgtgaagttaccaccatcgaccctcggtggcttgtggagtttgccccagccttcttcaaggtctcagacccaactaagctaagcaaacagaagaagcaacagcgtcttgaacccttgtacaaccgctatgaggaacccaatgcctggagaatatctcgagctttccgacggcgctgaaaggcaagattgttcctttgcctctccagcagcagtagccagggcttggacttatcgatgacaggctggtcctgaggatacagctgtcccgtgactgactgtcttaactgagcattttctcaactcgactctcatttcttccctgctggtaaaatagaaacagggatttaaacctggctttggcaagagcctgcagcctccatcaccccaagtccttgggcccagttgggagctcatatctaacacagagacacattgcatcaacttcaagaaagggacaatttgtgcagctccaggatgggaaggtggagtgggtgagcatcttgtgcagggacatggtgagtgccctgatgccccagctagcaggagctactgtgctcatctaaagtgtttgccccacttcccaccccgtctccagcccctgtactttggcttgacctcgtggaaatatttattttcttaaggaaacaaaaatggttttctgtgactgttttcttttagccgaaaggttaggatattggcctgggctcagggtgagggagatttagtatctgtgctctggcacacatgatgagaatcccctgaatcccctgaaaccagaacgcagggcctctttgcgctcggaaacgacgtacaacccagacttccagccttgtctttcagcatcagcactagccgggccgtgctgggggatcacccgatgatcaaccatgtcctctccacagagcacttcagtctggaggcctgagtggctacagatggcacatattaaatacagaaggtttccccttgctccctccacctcccacattcgcaatgtgcagcatgtcccatttccttttgaaacatactaagtaacaacacagcttttattttattttgtttttatttttttcccctgaggtcctggatggactttaacaaagggattttatggtcaaaacctccctttccccactccaaacagaaaacaaacataacacctctcctctcagctggtttgtgctgccagtatctgtgctgcagggcttgttcttagtggttttttcctagcacttgcttggagaatagccacctccttgtgccctcctcacagctcctgaggagggt

SEQ ID NO: 86570 - DNA, 1058 bp, Homo sapiens
tgggaaatggtggcacgtgcctccatcatgattcttgctttacctaacctgaattcttgccaagcctaagtctgtgggctgatgctttgttgcagagctagcttggcactttgcaccaagaatctcaagtgctctttctgaccttacccccattttttcctctgccaaggtagcatctctaccccaaaactgttttgttcccaggtcgccaggctctggggcatccagaagaaccggccagccatgaattacgacaagctgagccgctcgctccgatactattatgagaaaggcatcatgcagaaggtgggggctgtgggtctagggacaaggtggtggggggcagtggctgtgagaagctgactggggagagggtcagcagggcagttctcagcaactttgtaggatcagataatgaatcagtcagagagacaagaaattgtggagaatcccaaggttctcctcccccaaaaaagtgcaacactgtaactgagaagcccaagcatggagaagttgagatgaaaaaggagtaagaactgtgaagggagagtcagcttctcaggaaccagcatgggagagaaatgccccgagcatctgcctgtactggtagaagggccacattccccactcccccaccttaccccatacaaaggctgggcggctagccaggctgaccagaccttctctctccccataggtggctggtgagcgttacgtgtacaagtttgtgtgtgagcccgaggccctcttctctttggccttcccggacaatcagcgtccagctctcaaggctgagtttgaccggcctgtcagtgaggaggacacagtccctttgtcccacttggatgagagccccgcctacctcccagagctggctggccccgcccagccatttggccccaagggtggctactcttactagcccccagcggctgttccccctgccgcaggtgggtgctgccctgtgtacatataaatgaatctggtgttggggaaaccttcatctgaaacccacagatgtctctggggcagatccccactgtcctaccagttgccct

SEQ ID NO: 86571 - DNA, 1176 bp, Homo sapiens
gggacttttgttgactatttacaactcagttttacatttaaattcaggcagtgttaatatgccaaggtagggaatgtgcctttttcagagttggccaggagctcctggctgggacacggagaggcaggtgtggcgtaaggcctcactcccggctgggaaggtctctgatcacacagaagcagccctgcccagcctggtcatttgctgtccgcttttctctgtgaccacagcagccctgaacaaccagtatgtgtcttcttctccagatagtgaaaaaggtgtccagataaacccacctaagtgaaatggccatcctctaaactgggtacctcactgcacagcttctaggtagccttccaacttaatctaacttgagcctcacagtaaccctgtaaagttagtagagcttgttcttgtattgtgaccttttttaaaaaaaaggaactgaggttcagaatgattaagggcctggcccccagggttgtccagctccataaggtggagctgggcaagattttgggtttgctgctccctgaagctggattctttcatacgatactctttctcaagaagggggctccctgggatctccaggtgtactgcacttaccctcaatccagccccggagaagcaagtgaaaagggtgggtccctcataggctagaatgtgcagctctttctccaggtgggatgtagcaccccgaagtagagctttctgctctgctcctggaaaaggctagggagctggggctggggctcccctcccatgaccaggcagtggtcaccccatgggacaggcacagctacttacgcgaacacagcaggttggtgtggctggctaactaggacctctcgaaagtctctgtgggggcatgagggagaaaaggccattgggagaattactgcctttactttgggactacttttatgctgataacttgggatttcttgatagtccttcacccctgaaaccccgtatttacttaacaagatttagctcttagttcttcaagtaaaattaaagtctcttgtgtaagagccaacacatgcccagctgcggatgggagctgttcctggacagccttctactgcctgggaagtgatggaacaggaactcagggtgcccttaccccctccccagacctgttccctttctttgactgacagagcaccatcc

SEQ ID NO: 86572 - DNA, 1353 bp, Homo sapiens
ttttttttctagtaagaatgtctaatcagcaggaaagaaccagtgttaacattctgagatgtgaaataggagcctcaagaaagaatatattagcatgcctgtacagccttggaaagcctcaagttggattttcacgatactctgaggacccagttaccaaaatcctaagcttcatggctcagcccaaggatggcatgttgaaaactcaaaactaaccctcctcccattttacagaggaggaaatggtggctcagagtgtgtgagggactacaaggacagggtcaatgtcttgttcatgtatgtatttcctgacctccgctatgacctgctgtttagcctgccaaggactgccacggaaatgggggtcatcatggaactagaaggggtccatcaggccccagcctcatggggacagttctcatccattccatcattcattcaccagtctgagcacctgctttatgtcaggcactgtacaatgttcattcatagtagagatagtaataatgataattgtaaattttttgaatgttgaattattaatagtattagaggcctggcacgatggctcacgcctgtaatcccagcactttgggaggccgaggcgggtgggtcacctgaggtcagcagttcgagaccagcctgaccaacatggtgaaaccctgtctctactaaaaatacaaaaattagctgggcatggtgcctggcgcctgtgatcccagctactccggaggctgaggcaggagaatcgtttgaacacgggaggtggaggttacagtgagccaagatcgtaccgttgcactccaactgggcaacaagagcgaaactccatctcaaaaaaaaaaagtattagagaagggagatgaatgggagtgactcttcaaagtgtttttttctatcagccactgcttcacagtcttgcgcggtgtcctaagcaggaataaacagagtcccacagtgtcagccaaaggcttcaggaattggaaagctctagagacacccttcctcttgcaccaagcagcaagcaggccttgttagcctcaggaatcccgcttgcttgggcaggttggccattcagctgtcatcacttcccaagtggaaaccaaggttgtacacgtctggtgtagccagagtggcaattgctgatggccactgtagaaaatacatcccttgccctctaagcacctctgaccttgacttggccaggggtgtgggggttcctcaacagggaggatcagtgagcaccaagcaccaagaggatttgggctccattcccttaacaaaatcagggccgcagccacgtcctcacaaggcagagccagagcctgtgtgagccacatgtgccaggccttg

SEQ ID NO: 86573 - DNA, 1091 bp, Homo sapiens
aaggcagcccctaatccccaagacaagctgtgtctacagctgtttgttggctaccagatttatgggagtaggaagggtaggaccccagagacagaggtcatttggaaggcatttttgcagttcatgcagaaaactattgttaaaaaatgcacctgtgttcaaatatttattggtggaatgtgtgtaaatgtaattccaagccccatctcaactagcagtccatatgttctgagcccctgggcaaaatgttggaaaaactccatccattactctgggcccaacactaataaatctccttattacaaacccctcaagatggaccttttttaatccttgggtcttcaaacagataagttggctgcctgtatctacagccagagaggatgtgctctctagaggaattttctaggtcggaagtgttaaataggtggcatatgtgcagccaacgcccattcctgaaccggtggaagacattactaattgatcacagcactctcttattgtgatcacagcactcttattgtgatcaactaaactcaacaggagagtgctgtgatcaattagtaatgtctttggctctttcaggacagtgttcagtagcagctgggcagaatcagtagtgagttattcctgtttgccattctcaatccactgatttgtaaccttccctgctatccacttcactccctgtggaagatgggttcaagaaagttagaaccatctgtcatttacaggcagtgctcagatatattagccaattgtatgttcaaatacatgctttaaaacatgtggccaatcaaattttgtatccacttacccagtatcacatcatttatgctaccaatcacaggactatgcatccaaacaataacacttcatgatttctttaataactgcagagttcagcatatgcacaaagcccatttttaatcagatagttaagaaccaatgagcagcatttctctatttggtggagttaatattgatcgatttctttctttctttctttctatttttttgagacggagtgtctgtcgcccaggctagagtgcaatggcatgatttcgtctgactgcaacctctgcctccca

SEQ ID NO: 86574 - DNA, 1085 bp, Homo sapiens
atgatgttgtccctatgctctgttcttgtgtacacagttggttatcagtgggacctagtcatccactcatcacttaaaagttaaaggttggaacattgctcaagacaaaggttataggtttgttataggagaacaacccagttgctccttttaccacccctttccttgcaggatgagcagcagcaagagatggccgcttctgccgccttcatagaccggcattacgggcacctggtagacgccgtgctggtgaaggaggatctccagggtgcctacagccagctcaaagtggtcttagagaagctgagcaaggacactcactgggtacctgttagttgggtcaggtaactttatcccagaacatccaagctggacgggaccttgaagatcatctagtccagactccctcattttaccatcaaggaatctcaagcgcagagagggagagaattctccacaaattccatcatcgagaagagtataagtgggaagtcttgtttgttgttggtttttgtctgttgtttttcactgcacctctttggatcatgatttgaaaggggcatatcagaaaacaacacatttcatttattaaagtatcacaggcaagctgaccctgattctttgtaccaaagttaagtagccactgtcttttgtgggtggtagtggttaatttatacagtactgattcgcagaatgtttaagctttttaaacatagtgacgcttagtagtttttttggaagctaacttgttttatccaaggggattttacatgtaactgaagttcccctgtcttcaagcactaaaacgttgatcttaaccttttttttgaagtgcttgcctggtaatagaaaacgggttctctgcctattttaaaatagtgaatatacgtaaattttctctggaaggctgaggcacacttcaccatcaacatgaattactgtactatcctgtactgcagtggtgccttcagggactcgaggaatgtaaggttgcctttcccctttctaaataccctcagattcctaacatcgagcccatgctttgtttgatttgttctattccatccattgtcccttttgttact

SEQ ID NO: 86575 - DNA, 1034 bp, Homo sapiens
aggtggagggtttgcggcgctctgagcgcaggggtccctctgctggccatgcctggtgctgcagcattccggccccaggtcagagcgtgcctggggcccaggagaggctgtctaggctggcacccttctgccaatgacccccttaaggagctctggacctttgcctgatccccattctgggcacctcctccttggcaacaggtgtggccaactggagctgttgggatgcagctagcttcagcttatttaagtcagttgtcaagtacccttcctcacccctgcccatccagcttccactgggtcgagggtggggttgccctgggtacttgtggattgccctggtaccagcctgtctagctgcataggtaaggcagcctagtcagacttgagggagcactggcttgagagtcaggcagaccctgtttagccactgactggctatgtgacctttttataccttcattttctctgctataaatgggaaagaattaatcctatcttgcagagctgtagtgaagattatgtggcatgcaaagcatttaggggtgtgattggcagttattaaagcttatttcctccctttcactcaccatctgtggttgatggtgagccactttgaggcacgcagagaggggcccctgcctccctagccagggagtccacaccagggttgggctttggggagggggagtgggggcagctgtagctccttctgacagtgggggtgagttgtgggcactgactgtagggaggtccccttgtgcctgggcaggaggcggacctgagacggacagtggaggagagcagccgcatccagcggggctacgggcactactttgacctctgcctggtcaatagcaacctggagaggaccttccgcgagctccagacagccatggagaagctacggacagagccccagtgggtgcctgtcagctgggtgtactgagcctgttcacctggtctttggctcactctgtgttgaaacccagaacctgaatccatccccctcctgacctgtgaccccctgccac

SEQ ID NO: 86576 - DNA, 1093 bp, Homo sapiens
tcccttaaggcgtccgtgctctggtgtgtgtcccagaaatagacacgaccctcggtctgagcgcccctgcaccccagcctgcccaccgcgcggaacacctgcaagctccggtccgggtgccgcgctgaccacagccccggcatcacgtgacctcccgcggctctgtctgccccgccccctccagacgcctgctctgcgctgcgcattcgctctggccatagcgggcctcgtgtcgctgctgatgcagcccgagggcgccctcggcgaggagctgcaagtgccgcagcccagggccgccagttggctgaacttaggctccatcaagaagtacttggggaagctcttcaacagcaggtgggccggcggagggtgtgaggaagggagggagggagggaggaaagcggggggtggggggggcgcgggggggggacacggacgccaccaggcacccccacgcacatcgcggcctgagctgggctcggggagcggcctcatgactgcaaagacttgttcccagcccgaagaaatctaaaaaccacaagaaaactgcgaacgccacggacacctccccatcaaaagccacgaaacccccaccatggaccaccacgaacccccagtggctgaacacctcggaaccccgaccaccgacctcctcccggggccccaggtaggacagcctggatgctgggcaccgagccaggggcctcggggctgggggcagcttgggtgctagcgagaggaagttcctgggggcgggcatgcggggagacacagcacccctgtggggggggcttctttctccaggctgggccttggcctccagacgcctctctgcccaccaacccctttgtattgagaggggcctcgacccctcctcatcccctcagtgaaaacaataaagacaaatttttgttgcttcagtgacttctgtgggcctgcgggcagggagggaccagtccatggaacgggaagtgggaccctgtagtttctgctgtgagagaaaaagacctcagctgttgggggtcctcccctgcctcccctggcaacccatccaccttcccccactccacccacacatggccttgtgggtctg

SEQ ID NO: 86577 - DNA, 1071 bp, Homo sapiens
gacggcgctgatggctgtggttctgcgggcagctgctgtagccccgaggctgagaggccggggaggcactgggggcgcccgaaggctgagctgtggcgcgcggcggcgggcggcgaggggcaccagcccggggcgccggctcagcaccgcctggtcgcagccccagcccccgcccgaggagtacgcgggcgcggacgacgtctcccagtcgcccgtcgccgaggagccgtcgtgggtgccgagtcccaggcccccggtgccccacgagtccccagagcctccttcgggccgctcgctggtgcagcgggacatccaggccttcctgaaccagtgcggggccagccctggggaggcgcgccactggctcacgcagttccagacctgccatcactccgcggacaagcccttcgccgtcatcgaggtgagcggagcccggcgtgggccgtgacgcagcgaggggatggggttgtgcggccacctgtcctcaggcatggcaggatacgctgcgggctctgcgcagcggaagcgggaaggagcccggcagggcccagaccagcgccgccgggaatgggagaggccgtaagctcctccggaagcctcccgcccagcccgagtgaggatcctgggggaccccacccgccaggtgtgatgctctgaagaaggcccccaacatgggcgcagttaggggttcagaaggacctggacaggagccgcttgcactgcccctcccccaaagatgtcccggagtccaaggtcggagggaggagggcgggaggtaccccagcgtgagacaagggagtggcaagacccaacggggcaaagggcggagcaggtgggcactggtggccagaactgggtcctgacagcttctggaagggtagggtcaccgagacggccctgcaggccaggctgtgggagccagcggctcaggtccgtgtcacgctccttgaaagcccactcctccgcaggtggacgaggaggtgctcaagtgccagcagggcgtatccagtctggcctttgccctggccttcttgcagcgcatggacatgaagccgctggtggtcctggggc

SEQ ID NO: 86578 - DNA, 1019 bp, Homo sapiens
ccctgtcatgctgctcattgatggcaatgttgcttactggcacaacacgcggcgtgttgagttctggaaccagatgaagctccttggagagagtgtgggcatcttcggaactgctgtcatcctggccactgatggctgagttttatggcaagaggctgagatgggcacagggagccactgagggtcaccctgccttcctccttgctggcccagctgctgtttatttatgctttttggtctgtttgtttgatcttttgcttttttaaaattgttttttgcagttaagaggcagctcatttgtccaaatttctgggctcagcgcttgggagggcaggagccctggcactaatgctgtacaggtttttttcctgttaggagagctgaggccagctgcccactgagtctcctgtccctgagaagggagtatggcagggctgggatgcggctactgagagtgggagagtgggagacagaggaaggaagatggagattggaagtgagcaaatgtgaaaaattcctctttgaacctggcagatgcagctaggctctgcagtgctgtttggagactgtgagagggagtgcgtgtgttgacacatgtggatcaggcccaggaagggcacaggggctgagcactacagaagtcacatgggttctcagggtatgccaggggcagaaacagtaccggctctctgtcactcaccttgagagtagagcagaccctgttctgctctgggctgtgaaggggtggagcaggcagtggccagctttgcccttcctgctgtctctgtttctagctccatggttggcctggtgggggtggagttccctcccaaacaccagaccacacagtcctccaaaaataaacattttatatagacatttggttttgcttttctgttctccccaacagggaactctgccattggctgggattgatcttgggtttcttgaaacactagatctggtcaagccccaccttgggcctcccgtgatctttcccctgttccaagatttcccac

SEQ ID NO: 86579 - DNA, 2142 bp, Homo sapiens
accttgtggttgggaaggccaatagacagcaagggcaaaggtgcctggacaccaatgggctggacagccaggatggggctgtggaaacctgggttggattgtttgggagacctttcttccgcatctcctttgttgacctgggttgcctggtctttttcaggttgaaaaacattttagagacgtggaaagccaaaagatactgcaacgttcacaagcccagcaaccacagaaggaggctgccctgtcatcctgagtccgtacacatggaggactcttccagcatccagccaaggaggcgctggtggtggcttcagcggaggcaggccgggggagggaagggatcctatatgtcctgttggctcttaacaaagggtcagcatttccaaatcttagacttgaacaaacaaaacacccaacaaaaaagaacaagagaataatttaaaagttgaatcattacttgactaacagacttcggtccaccatgtccttttcacagccctcttctggaacagtcaccttgttaattttatttttgaaaattattttcccactctgccctttacttctgactttcctttcctagtttgttcctgccattctgtttttataagtggctacacttgccttctgaatgattgaaagaaacttttacatcttttcttccaaaataaaagtaacaagctgactgtgattcttaaattgagaccagagcagcaaacgtctcactttaaatttttgttttcttttcctttttttttcttttttctttttttttttttttttgcacagggcatggcttgaattagttttatttttcttaactttaaatatatatatgaaaatatatattaaaatgttctctaaatattttctgcttcttgcaggtctctttttactagatcatggctgttcttcccacctcatccctctgaaaataaaaatgtattgccctccccaccatccatcatagccaggccactaacttgacttggtgcaagagattcttgctgcgaactttgtagagccagtgtgcagatagaatttggctttgagggttcctgatggctttttagtctttaactgtgtgtgtaccagtctcacatttggcccaaacctcaggattctccctctgcctgtcttacttcatggtactagaagaccttcctcgccactctctccacatgagagagtcagctgccctttctcctgtgcctctgcaggaagaactctcttgcatggcacatctcagctcctcattgagggatagttttctttgataagaaacctggagtccatttactctgacctctctttaaatctatatccagagccactagcccaggaaaaacttgggtgacccgtaatttctcttctcctgctgtccttttgctcttacgccccaccccaactccccttaaattttacaggcttatgacagtttgtatgtgctcagccaatgagcagaaaacctggaaagaatttctggactttagcccaccagtttgtctggttgactaacctgctgagagctaaaattggcacccattgccccgtgccttcaggcagtctcctggggcagagtatgccaccatccgaatatcaggcactgagtgggatgtgggtgatgctcacatgactggctagagctttgggggtggggtgggggttaactactatttttttggccatgatctctttccccttccttttttttttaattaaataaatggatcaaattaaataattcaagccctgccttcaaaatgaaattttttttttagtattatttagcaaaaacaataaaacccaaatttttttaaccatcactcatgtctcaggtttgtgcgtccttcagaggccccaggggagaggatccaaggtatgtctgtctgatttgacctttctctttagagtctcttcttcctactatttaccctctcttttcacccccgaggactcatccagaaatataatgcagggtataatttaagatgggggtccagggtttggagtggtgtgtaggtggagtgtggggaaaaggctgtagtcacatacatagaaccatttgttacaggactgtttggaggcacaaatggtcggcgagctgagaagtaaactttcagatccacctgccactggtct

SEQ ID NO: 86580 - DNA, 1044 bp, Homo sapiens
ctgggactacaggcgcgcagtcccacgcccagctaatttttgtatttttagtagagacagtttcatcatgttgaccaggatggtctcgatctcctgacctcatgatccgcccacttcggcctccaaagtgctgggattacaggcgtgagccactgtgcctggcctttcttttttttttttttttttgagacagggtctcacttttattgcctaggttgggagtgcagtggtgcgattttagcttactatagcctcaatctccccggctctggtgattctcccacctcagcccccggagtaactgggactacagacgcatgccaccactaccggctaattttttgtatgtatttttagtagagacgagtttttgccctgttgcccagtctggtctcgaactcctggactcaagcaatctacccacctcggcctcccaaagcgcggggattacaggtgtgagccaccgcgcccgacctgttctcctgtctttctaaaggtggtatttctccctaggccaatggttgacaaactatgccagcaggccacatctgctcatctgttttacctattgtccatgctacttttgtacaactatggcagaactcagtgctagttgtaacagatgatatggactgcaaagcctaaaatgtttgttacaagacccttaagagaaaaagtttgccagcctctgccctaggctgctatcttaatttggattcttgaggccactatcacatttttatggctctccagatctctgatgcttcagagtaacaatttctgggctctcccaagaataaatgtgcatgagtttcattgcttttctagccagtggcacccaaggaatgtttcttggctactatatgggctgctggcatctagttgttggctgagtggtgagctgggaacttgggatcagccttctggagttatttattcatcagacaggagatgtgggatgcccccaagaggttacatttcgcctgctgtcttctccttccagcattaaagactgtaaatggcaagaaaaaaacatcgtagtca

SEQ ID NO: 86581 - DNA, 1031 bp, Homo sapiens
cctgcctcggcctcccaaagtgctgggattacaggcatgagccacctcccctggccggaaatgtatatatttttaaatctctgaccatcatttgccatcacatagtcccccagccacactctataatgttaaaagtgctttattttcttcctagtgcttatcactgtctgaaatcaccttgatttcagttacttgtttatagtctgtctcccccacccacttcaggctatatttagcctagcatagtgaatgtctggcacatggtaggtatgcagtaagtattagaaggaaggaaggaacgttttcttggaataccagtaactgttcaggtatgtcgtggatttttaaaatttgtttcacttttcatttctgagaaaacagaatctgtccaaacaagtctttcctggcctcctttcttcagcttaggtcctgactgttggcaagaatgaagatgaatcctattctgagtctctttcctctcttccaccctagcttgccagcaaagcacggacagagaaggaggagaagctgagccaggcctatgcaatcagtgctggtgtctctctagagggccagcagctcttccagaccattcacaagacgtgagttgggatcggagaggtcctttgtcctggggtaatgctacctggttgtgctgtctggtggcaggcttttgggtggttgtcttcctaaaagtctactggggaagctgggtagggtattggcaatatgccagcatccagaggtgcaggtgctgtagccccctttccacacagaagaatagtgtaatcacggacaagttgtcttctctggtctttagttgcttgtctgtaaaacttagttttggattagattatccctaaggatcccttctagacctagtagtccataacttagaactagtgatttcttctctttgattttgttgttttgtgcctttctttaaaagctgatgcagtttttattaagggaaagttatatctatatcacttttcccattgtagattgggatgaacacagggagttagagc

SEQ ID NO: 86582 - DNA, 1082 bp, Homo sapiens
acattatgctaaaagtactgtggagtaagatatagggagtttgaagaacagcagtgtttttccaactgtgctgttaatgaatgtgtgacctctgggaactgttttgtgattggtcctctgaatctctgatagtcattgtttctccttttttctgtcttccctcttgcactctctcccttcaaggtgctgggaaatgccaggatgattaaaacacccctcttgccctccagaatctcacatttgttgggagtggtgagggacagcagcatttaacttagtgataacaatatggtgagacccgctctgcactagtggtcatatgtccaaggtacgtgacagcatagagcagggaggagcaaactttttctataaagggccagatagtaaatcttttaggctgtattggccatatggtcttggtcacatctactcgaccttgctcttgtagcacagcagccctagacaatgtgtaaacaaatgggcatggctgttttccaatgaaacttatctaagacaagtggttggctgaatttggcccacaggaggctgtttgccaacccttggtatagagtagtgagcattttagggaagacacttcagatgtgacagtggaggaggggcttgaaaaataaatggcaattattcagagaaagggaaggaagagaaaagggatcaagctgatttgggagtgctcagtttgtccacctctgcaatttagaacttgatgcttttctgttgagctgaactggaggttgttagttctcaaaaaggagggaagatactattaaagaacagtatttatttttcagacagcatgtaacactttatttatttatttatatttttaagacagagttttgctcttgtcatccaggccagagtggtgatttatttatttattaattatgtaaatttatataaaaatatacgtttatataaaatataaatagattatttatttatataaatatatattttttttaagacagagtttcgctcttgttgcccagcctggagttcaatggcacggtctcagctcactgcaacctccacctcccgggttcaagcgattctcctgcctc

SEQ ID NO: 86583 - DNA, 1054 bp, Homo sapiens
tcctgagctcaggcagtctgcttgcctcggcctcccaaagtggtaagattataggtgtgagccactgctcctggctcaatttttgtattattagtagagatggggtttcaccatgctggccaggctgatcttgaacttctgacctcaagtgatctgcctgcctcagcctcccaaagtgctgggattacaggtgtcagccaccatgcccggccctaagtcacttttttgacaattccgtttatttagtcaaaattgaagttgatcataataatgcctcaagccctgtcatagcctgtgctgtcccctgtacttggaacatttttccttccagaatgactggagccttaccacccatcagcactcagttaaatggcacgtcttccaagaagtcttctctgatcacccaggctgaagtaatttgcctgcattattctctctcatagtaccttgtccttcacagttaaggtgaccatatcatttgtagtccaacctgggacatttttgagagtaaaggggaatgcttttattttacacagggacaacaggtatagattaggttaccctattcatagcttttttttttttttttttttttgagacggagtctcgctttgtcgcccaggctggagtgcagtggcgccatctcagctcactgcaagctccgcctcccgggttcatgccattctcctgcctcagccttcctagtagctgggactacaggcgcccgacaccacgcccggctaacttttttgtatttttagtagagacggggtttcactgtgttagccaggacggtctcgatctcctgactttgtgatccgcccgcctcggcctcccaaagtgctgggattacaggcgtgagccaccgctcctggccatagttgtttacttgtctagtgtctgtctcactaaactttattctgcagggatggggaccatacctattttatttactattgaatatacagagccttgcacagagtatttaataaatatttgttggatgaataagatgcctccaattttagtagcaggtgcttttcattaagtctct

SEQ ID NO: 86584 - DNA, 1713 bp, Homo sapiens
ctcccaaagtgctgggattacaggcgtgagccaccgctcccagccttataatcatcttgtccaagtatcgttaagtcctctgaggctctgattcctcatatgcaaaatggggttaacatattttataaaattcattcattaaactcttgtgtggaaggtgtgcatataatggagactgcagctccctcctctttccccttttcattccacgtaggtcatttatccttaacttctaaaatggactctacaagcacttaaccgagcggacgcagctatacaaatacttttcagattcccctttatttcctcttctttcccactccacctaggatcccgccccaaccagcgccaggccacgccccggcgtgtgacgcaagcacgctccgtgcgcgccgtcgcgtcgcggcgctcactgggggcccggctttcgcccgctgctgccgccgccgccgccggccgcggctgcactcccaagatggcggctcctccgggcgagtacttcagcgttgggagccaggtgtcgtgccggacgtgccaggagcagcggctgcagggcgaggtggtagcctttgactaccaatccaaaatgctggctttaagtatccttccctgcgtgaagcccgagtccgggccggcgtgtaggtgcggtggtcggggggtgggggacgacggcggcggctggggctctctccgggcctaggggcgaccggctaccgcggcgcccggggcgcatgcgcacggccctgagctcccctccccctcccgcgggcccttcggtcagctttggggatcctgtctctctctctttgcgggagctggggctttaccgaggatcagtgggtggaggagggcttgacacggggatggctttttggggggaacgttatgagaggggacacagtaattaggagagggggtggtggtgggagggggctgatggattggagcccggatggaaaggaggggcgggtgaaatattatggggaggggtgtttagggtaaggaactgctggtagggcaaaggtatggaatttaggagggcatgtgcactgatgggatttcgtccaaggaagggcggtgggatggtgaccaaattggtccttgcctgttttgggggagagtaagttcagggcagagtttgtatctgagctagggatagtggcttgtttcgctgatgcgtgtgtatgtgtggtgggggggctgtgctgatttttaggcttctcggtcatttggaagttgctgtttaggggatgtttgcactggaaacctgttccagagagggcttgccaggggcttatgtggtttggggatgtgtgagttacaggtgaaagagtgaagttctcatgctgccttgatcagtccagcacatggagtccttttacgtagtagcagcctcccttttgaaagtagcaatgttaaactgattggaaaaggtggcctgcttctttggggtggaagtgacttctgaattactccaggaaactcagtcttggaaatgaaacacttccttgttgggataaatgtgccacggcttccctttttatgtgagccacaggtgggtttattggaatttttttttggaggagtaattttttatggcatcttttttttttttttttttttaagatggagtctcgctctgtcgctaggatggagtgcggtggcgcaatctcggctcactgcaacctccgactccctggttcgagcgattct

SEQ ID NO: 86585 - DNA, 1048 bp, Homo sapiens
agaatcccggccctggagattatatatccgccttcgcatcagcggagcagggacgctgggagcgcgcgcggcccgccggctagtcagtcccctgacccggaaccgcactggtgccgccgctagccggctgcccacgtgcctgcaacagtggccacgtggggccctgaggaaacgcctttacaaaggtttgtcccctgcgctgcccagtagggaggaaaaccggaggagagcgcaggaggaaacagtaccggctggaggccggtcttgcaggagcgggggactgctgggggcggggcttggtggtgaccgctggcggggcggggcctggggctcagaggggtgggctttggagatcagagggtcgacgctgcttcgttgcctggactctggtttccgccctggagcaagccggggcctggtcggcagctgggccgccatggagtccacgctgggcgcgggcatcgtgatagccgaggcgctacagaaccagctagcctggctggagaacgtgtggctctggatcacctttctgggcgatcccaagatcctctttctgttctacttccccgcggcctactacgcctcccgccgtgtgggcatcgcggtgctctggatcagcctcatcaccgagtggctcaacctcatcttcaagtggtgagacagagaagccctccggcatcctggtccccacccccgagggccctgagtcatgtgtaagccctggtctctttcagcaactgtctcaagggccttcccacccctactctgtagtccctgattttttttccccttgagcatctttgtgcagcttggactcaaacctcagagtccaaccatcctactcattagaccagtgttcttcaaactggtctgatggaaaaatcacctaaggggcgtgtctaaaatgtaaatatcccatcctcatctcacacttactaatttagaaactccaaggggttgggaatttattttttattttttatttttggtttatgggaattcatattttaacaaatatggtgatttaagtagtggagagtcctacctc

SEQ ID NO: 86586 - DNA, 1091 bp, Homo sapiens
atgtatgtatgtatttatttatttattttgagacggagtctctccctgttgttgcccaggctggagtgcaatggcgcgatctcagctcactgcaacctccacctcctgggttcaagtgattctcctgcctcagctgcccgagtagctgggattacaggtgtgggccaccatgcccagctaatttttttttttttttttttttttgtatctttagtagagacggggtttcaccatgttggccaggctggtctcaaactcctgacctcgtgatctgcccgccttggcctctcaaagtgctgggattacaggcatgaaccactgtgcctggccttatttttatatttattttatggagcagggtcttttagagctagatgctaagcctcttgggtctgccaggcaggtccacactgtgccagctccctccccccagggcttctctagggggaactatagttcccatttccttgctggccggggttcttgtcacagggattcttgagttggagatgttgtctctgagagggggcttggacctggggtgcagctcatggtgtgttcagagcaggcggaaggcttggccttgctcttgggaagctagatctgttttttattgtgaattcttgttcccaaggcactgctaaaacctgtgcctcatggcccagggccactcgtctatttggaggcagtgtctctttgcctggacaccgtttttttagactaaggctgtgctggcagtagtctcaggggttgccccacgagcacctacatcatctcccccagaggaccaggctctccctcatgctgcctgaagaatctaccacagaagtccccactgggctgatggggttcctgaagaggaggcagacccagcgggatgggaaagaagtgtcactcaggtggtgcactgcccatggccacttgtgctcgtgagctgggcagggcagctcctgagccagagcttgctatttttccagcccctcgcatggctagaaacacacagccccaaggccaggcacggtggctcacgctggtaatcctggcactttgggaggctgaggtgggcagatcacgaggtcaggagatcgaga

SEQ ID NO: 86587 - DNA, 1017 bp, Homo sapiens
ctgtaatcccagctacttgggaggctgaggcaggagaatcgcttgaacttgggaggcagggattgcagtgagccgagatcgtgccattgcactccagcctgggcaacaagagcgaaactacgtctcaaaaaaaaaaaaaagaaaaaaccattctgagaagtggtccacaggcttcactagattgccaaaagagttcaggacacaaaaaatatgaggagccattaataatagccctgcctcgcacctcttgatcttcccaggccctgtgccaagctcctccgcgtacattctcccgagcctaactaccctgggtgttgggtgctgttctgcctgccagtttacagatgcctgcatggagcgcagggtggtgccctgtgtcttgccctaggaaggggagagcctgaattgaaccccagcgtcctctcactccagagcccttgctctcaaccactacgtgatgtgtgttcacttgtgttacttaaggaattgtgaaaattgctaggtgagagtcagacccagcttgcctatgtggaaatagtatctgaattgtggtagaacctgttgagcctaaattggcctcactagtcacacaagagcacagaaatagatcatgggaaactgtccttggtggggaggggtcatcggtgtcacagcgtcatgggctcagggtgtgaaatgttgttctccgcctccttccaaactccctcaggccaggacaggaacaagagcttttccccaatctccaagagacagaacaaggtaattagaagctgctgtctcccccacctggtgagggaggtcctgagggcctgggtgctggtgggagattctgccctctagggtaggccagttacctagggctgtctcttaaataaagggaacctgggccgggggcggtagctcaagcctgtaatcccaacactttgggaggcgaggcgggtggatcagctgaggtcgggggatagagaccatcctggctaacacggtgaaaccctgtctctactaagaatacaaatg

SEQ ID NO: 86588 - DNA, 1049 bp, Homo sapiens
cagtttctcccttcacttctgccagggactctagatcagccctgcatctccccactgctatggatacagatcagaagcccccctgcactttctcctttggtgcacacctagtcccatggcaggcactgttgggagtctatagggtctccccagctggcagtagacactcacctgaaaaggggtctgttgggtttggccaccatagccatttcctatcccttgggctctgggagcctcatcagttagtaagataagaaaccagggtctatccagttctgcagatttctcctgtggctgtgggcaggtatccctccctctcatccctcatccccaggtacaaactgatgagctccaaggtctccttcgactctcagattcctgagttaggggcctctaaccctgctccatctctccccagggatgccgttctgagtgcctgactgcctcgccccgaaggatggcctcggatgggcattagaggcacggcggccccgggctcccgtcccgtccgtctgtctgttatcgtctgtctctcttgacatcaccgcagctccaccccctcccgtcccagcccccaacgccagcttcctgcaggcccagagccggcatgaactctcccaacgagtcgggtaagagctgggaggttggagaagagcaccctggggtagcttcggatgcaatgggctgtgtgggtttcccttccaggccagctgacctttactgtctgagctataagggaatgagggggtaaggagtggagaagtgttgcaagaaagggcccatgaggtagacctgggaatcgagggatcgatggtccggtctggtcctgggaaggcaatgggtcctactctgccccccatgcttgccctctcaacttaggggtgttcagctccagcttcgccttcccctgctagccaagacaggtgggcctgagggggcagtgtgtatcccttaatctctctgggcagtctgggatgatgttggaggaatttctttactatagcagaatgctcagcttccttttcgtgatggtggcttctttacttagt

SEQ ID NO: 86589 - DNA, 1217 bp, Homo sapiens
ggcttctgttggcctagcttgggggaggcactaggcaacagaagctctcagaggctgaggaaagtggtaggctgtggccatggtcaggaggggtcaagataaattcctagtgcctttgacctttgggtgggatgtcttggcttgtaactttttttttttttttgagatggagattcactcttattgcccaggcgggagtgcgatgacacaatcttggctcaccgcacctctgtctccagggttcgagtgattctcctgcctcagcctcccgagtagctgtgattacaggcatgcgccaccacacctggccaattttgtatttttttagtagagaaagggtttctccatgttgatcaggctggtctggaactcctgacctcaggtgatccgcctgccttggcctcgcaaagtcctgggattacaggcgtgagccgccgcgcctggccggtttgtaatttttgatgaaactgtcggggtagagtgaaacaatctcagactcccaagacttgattcacactgcttgaccctgtcacctatgacctagggggtaccctggcctggggccagagcaggtgtgttgggagggggttgcatggtggtactggactccaggatccagagagggtcttcaagggacacctgactccccaggaattttgagggagttgtttgaggaacaagatctctacagggtaacattgtgaacctatggcctttggagcattgctttgtaccatgtgcccctcacttgtctgccctcctccacccaccctttgccagagtttggggtttccaccctacttccataggctcagccctgagcttgtagggtgagatgtagcctgtttccttcatccttgtccggctgtcttggctggatgtgggaggtggttttggatcccggagtggggtaggggtctgtctggaagaaagagttggtgtgaggtagtggggtgggcaggggtctgtctgcttatgatgtcctggaagttgggccactccctggtttggcatccaagtgttaggtcatctgggacacagctcctggtgtccctgacttcccactgagacccaacagatttctctggcagatgtgggaacaaacagctcaggttttaaacatcaggctccccttctccccttcatgtcccaccccagacaggaatctgtgcttgtcccgatcagaccatgaacactgctttgtttctcagggaggc

SEQ ID NO: 86590 - DNA, 1124 bp, Homo sapiens
ggtgtgagccaccgcgtctggcccaggagctgattttattaaaaatttgtttttcatacctagtcctgcagacaggacctgattttaaaaagaaaaaaaaagagtatctgctgaatgaaacctgtgatacgcgacaagattttcacgtgcttcaaatgccaaagcaatcagaaaaaaaaaaaagaaaaagagaaaaaaaagatgtcacataccattttctggccttggagataaatgagaggagagactgtggccattgtactacagtttttccgaggggatttgcctttcctctctcacccttccaccctgtttcaatcaagagtctgtagcaaggtagacctattcatacaggctccccctctgctctgtggtaccagattgttgctagttcccaggcatctgtggaggaggattttgggcgagggccctggctgaccatgaaatccacgctaggcctggatgagagagaccctagctgcttcctctgtacctacagcattgtcatggtgctgcgcaaggtaaggattctgggtgctgagacccaaaggaaagaccatttttctccctctctctgacctactgccctactccaccttaggaaggggctgtttgctccctcgtaccctatacaagtagcagcacgaagcccctttggttgtatcttccacttacctaccttttcactgtcatccataggattgggcccaggtggaaggagagagtgggttatggtatgcctctgcacttccaggccctgggtggggtggggtgagcacactgccaccctcaaatctccctagtggttaagggttgtgtgcagagacatgccagtacatgtgccaacatatccctgcctgtgactgttatgatggaacattgtgtaaacacatataaacaaaagaaagtgctggacacagtggctcacacctgtaatcccagcattttaggaggctgaggtggaaggatcacaaaggtcaggagttcgagaccagcctgggcaacaaagcgagaccctgtctctacaaaaaaatacaaaaaaaaaaaatcagctggatgtggtggcacatgtcttatagtcccagctactagggaggctgaggccagaggatcacttgatctta

SEQ ID NO: 86591 - DNA, 1072 bp, Homo sapiens
aactggtctccttatctgtcttcccgactggcccagagctgagttcttactaatccccgctaacctggagttaggtgcgcgttgcaaagcagtaacgaatccaatcagccggggaggcagacagcagggccggaagaacaaagctggaaagggaaacgtcgcaccggctctgcccagcggcgccagcccgggcaaccttccgcagtcgcgaagccacgcccctttcccaagtacctccgcgctaactcctcccccctggccccgcctctcaccctggattgcctaaggccccgcccaccaggcgtggccccgctctgggagggccgcaatcccgccaacaatgactccacccctccttccgctgagaaacctgtcccttttatttaaagaataccttttacgtcagcccgtcttacgcagcttcgcgtcatcagtgcaaggcgcggaggcgggacttcctgtccctggtataacagcttccgggagaagccggaagagaccggaccctgaacagaatcgcagattgccagcccttttcccgacccctacggaaagacgagtccaggggccgtcctggcgaggtcaaaacatttagtctggtcttttcaggtgaggacttccccatccaggcacagtgccggtccaatccccctttaatttcccatgactcctcgcgtcctgaagccccgcccccagttccccagccccgccccgaagtttgaggggtgtggacggtttgtgacccccttagccgaccctactcctcactggccgggacaactggtcttatcacggaggctggggccaggcagcccttcggttcgggtgggcccatggaccccagtccaacgccgagggaataggaccatccaaaagcggaaccttcgcctcagaaaaagggtgcgggacccctcctcaccgtgcggtcacggtacggacagggtagatcacaggctgagggacagagcaaagacccctgaggccggacacctggggtcctgccgggcccctccccacgagagttccctgtgtctgtgccaatcgttttcgtctttctttgccgcagtttctt

SEQ ID NO: 86592 - DNA, 1009 bp, Homo sapiens
agagtttcacaatagaggcaaagggtagggtaggtctttaggtttaggttggggtgccggaattaggaaggtttgtgcccccttctacacaacactgaactccttttttttttttttcagggctgggtcagttagaacctaaacaaactagagacctggttgcaacccctcaggctctgctgatgctgtccccctttgttcctgcagcgtggaccctgccagcagccaggccatggagctctctgatgtcaccctcattgagggtgtgggtaatgaggtgatggtggtggcaggtgtggtggtgctgattctagccttggtcctagcttggctctctacctacgtagcagacagcggtagcaaccagctcctgggcgctattgtgtcagcaggcgacacatccgtcctccacctggggcatgtggaccacctggtggcaggccaaggcaaccccgagccaactgaactcccccatccatcagagggtaatgatgagaaggctgaagaggcgggtgaaggtcggggagactccactggggaggctggagctgggggtggtgttgagcccagccttgagcatctccttgacatccaaggcctgcccaaaagacaagcaggtgcaggcagcagcagtccagaggcccccctgagatctgaggatagcacctgcctccctcccagccctggcctcatcactgtgcggctcaaattcctcaatgataccgaggagctggctgtggctaggccagaggataccgtgggtgccctgaagaggtgagtggcctgggaagtgggaagctgcttgtgctcatcccccagcccttggttgcctctaaggaggctggtgcagacatgggagctgcagcaaagtgtaagatccagcccctaccaagggcaggtagatactttcttagaaatacacccttcaggccgggtgcagtggctcccgggactttgggaggccgaggcgggtgcatcacgaggttaggagttcgagaccagcctgacc

SEQ ID NO: 86593 - DNA, 1382 bp, Homo sapiens
tcagtcacagacactgaccctccaatagccccagaagcaagagcctagggcccagcaatccatacccagtccttggagttgggcagggtaggacgctggccaagggccagtgctgtctcttgcttacagcctgaggactacgggagcagcagctgtggcctggccgctcccaatgctgggggcttggcttggtgccccatccccttcctgactgagctctatgaaggactcttaaaaaaataaaataaaatgcaagcaaagtgctttgaaagaagggaggacaccctattcctgctaaggggtagaggaagaaggtgaaggcggctaggtgcccataagagaaggctggcacaatcttcattcccgccagtgtgatttcagtctcaaaagatgagtatttggctgagaaatggaaggatactccaggctccctacggagttgtgctggggccatgctgagctgcccttgcaggcagccctgggtgctgggggcagacatgcaggacactgggaagagtcagaaccacaggtgggagggaatctcagagcccaggctccccactgagcttggccagcagctttgaactccttcagaggaccctaaaagtgaaggaagatgacatcctcatttctacctgagttgtgctcgcacgggagggacatctgtactcctgtggatgagaaggggaggccgcatacttgcctcctgtgtcctatggaggagatttccatcacatcctttccacccctccctccccggcccttgggcccagctctggccaggaaaagtggggaggccgtaaaggagaaagaccatgcctttcattttcttcctatgtccttatcgtccatacatcccaaatactaggaagctgaagaagacggtgactcccaccagggagacagtggcaggtgctgtgaagaattggcggtaattgattcggaagtaccagaccacacccaacagcaccacaaagacaggcaccatgaggctgcccacattgacaccaaggctgggtggctcagtggccgagggggccaaggaggctgaggggcctggaacagctgaccctgggggtgagcggtggcagtgaatcacacagttgtcggtaatgttcagagaacgcagtgtgcgggctgggtcttgtagcaggcggccctggtagatcagtttcatctggctttcttgtccagggaagtatttgctgtaaggatgaaagacatggaagaaaagatagagggtgaggaatgagaaggcaaacaggcctggaccaacaaagcaggggagtggggaaaaactggagggtggatttttttttccctcatctttatccttttttttttttttttttttttgagacggagtctcactctgttgccag

SEQ ID NO: 86594 - DNA, 1682 bp, Homo sapiens
ttcagaggtgccttggactcacaacaacacccccacccccgtgtgtgcagccgtgttgccgcccgctgtgctatgagcagtcagagcgccgtctccacaagagtttacaaatgaaaatggaggaaatgtctttgtctggcctggataacagcaaactagaggtgagggctcccccacgtgtgcctccagttctttctcttgatgtctctacgtcgctgtatctggcatccacaccaaagaggaatttgggtagtcagccttgttccttaaagggaatagccagctgaaaaagccaaggatccaggaagaagaaagaacacgaagtcaagatggggaaaatggcaaagaaagcatgatttttggctggggccagttggcagcagatttggttggtgagagtccagggggctgtgactcttgtgaccgtagatgttctcccctggggcccaggccatcgctcaggagatatacgcggacctggtcgaggattcttgtttgggattctgctttgaggtacaccgggctgtcaagtgtggctacttcttcttggacgacacggaccctgatagcatgaaggattttggtgagcttcagggtgaaggagcagcagtccagcccttccctgggactgcctggagtttccttctctggaaactgtgctagatgtagcacctggagctcctgtgagccgggggagggattgaagaggccgtgggaccccaggtgggaacaagaggagagggtcctgcccaccctgatcgccagcctctcctgtccccagagatcgtggaccagccgggcttggacatctttggacaggttttcaaccagtggaagagcaaggagtgtgtttgccccaattgcagtcgcagcattgccgcctcccgctttgctccccatctggagaagtgcctgggaatgggtcggaacagcagccgaatcgccaaccgccggtgagggaaccagagctgcccgttctctgcagcctgtgccatggtgtagtcccccgggggcattgggaaggtacagagggtgggttttacttggccccagatgctccacctgcttctgaagttgggggcagagcggggtgaccaccttgacccctttctcttccttccccttggcccctttctcttccctccccttggcaggattgccaatagcaacaatatgaataagtctgagagtgaccaagaagataatgatgacatcaatgacaacgactggtcctatggctcggagaagaaaggtgcttggggatctggggaaacccggggggcattgggatgaggtgggaagcaggaattgggtatacagtggtcacaaattgttgccttgaatgatgaagagagagtgtagttacgcgatttccttttccttttttttttttttttttttttgagatggattctcgctctgtggcccaggctggggtgcagtggtgagatctcggctcactgcaacctccgtctcccgggttcaagcgattctcctgtgtcagcctcctgagtagctgggattacagtcgcgtgctaccatgcccagctaatttttgtatttttagtagagatggggtttcaccatattggccaggatggtctcgatcttctgacctcgtgatctgcccgcctgggcctcccaaagtgctgggattacaggcatgagccaccgtgcccagc

SEQ ID NO: 86595 - DNA, 1105 bp, Homo sapiens
ggcggggcagggccggccggggagggggcgcggggcctttgttagggagccaggccccagcccccgggacaatagagacaccctcccggactcctctccccggccggccggggctgctggcgggcggggaaggagaggggctgggacgcgtcccactctctgggggtcggtctgtcccggcccggcgccggccccggcggctcggctgtcctccccccagtcggtatgatgcagcagcagtgccgcagggacgggggaagagccgaggcccggcctcctacccttcccagtgcccccggctcattcgtcagtccccaccccactctaggccggcagctcctgaaactcgtacccaccgttccgaggggccctgggttgtgggttctgtgtctgaatccttgggtgggggttcctggactttggggctcttggagagacttccgggctggtcctgagggagggcgggtggttatttaaaggaagaacaggtaaggggagtgcccgctcctggcgtgccaccctaccaggctcttcccccccaccccccgccgttcctgctcatggtggctagaaatgtcccttagctctaggctcctgtgggctctgctcccctcgtggagtggcaggctgatttcaagggaagacagagtggggtgaaggttgtagggtcctagggccatttctacttctggtagcagtacccccccaagtggacatcctggctgaaagcagaggtgactctgaggagagtctttagggaaggcggggggtgtatttaggagtctgtgcagttctttgccacaccctgtgggtttgctttgaggccttggagttccttctcctccccctgctgcattgcaccatgggtatcaaagaggggtttgagttttggggacctagggtgagctgctgcctcctatagacccagactctgattggcagtggagtccagggcctgagctcaggcctgggaaagactaggccccctttaggtttcaggccttgaaggaccatccagacttagggagcctgggccttggggagggagagaccctgatgccaggactgagctttgggcagcgaggtggggagggaaggtggccgc

SEQ ID NO: 86596 - DNA, 3508 bp, Homo sapiens
gtagcatggtgtggtggcacatgcctgtagtcccagctactctggaggctgagttggaaggatcacttgagcctgggaaggtcaaggctgcagtgagctgagattgtgccactgcactccagcctgggtgacagagcaagaccctgtttcaaaaaaaaaaaaaaaaaaaaaaaaaaaattagagctgtgttctcagatcccaggggctctctgcagagacccaaaatctagggagcctgggaggggtaagatggggtgatgatatataaatgctcagcccactgcctagcactgggccagcatgctcagtcagcagtagttggctatgttccaacccttgccgcttctgtctcccccagagcctgtctccccaggaccgtgcagcatataaagagtacatctccaatgtgagtctgggagcagagcagcagtggggtaggggtgggggaattcaggggtgtcgaactcatggctgccacctttgtgtccccatcctgcagaaacgtaagagcatgaccaagctgcgaggcccaaaccccaaatccagccggactactctgcagtccaagtcggtaaggagcccctcccagatgcaggggcgtggggcggggggcactgcctggaatggttgggcagagaccagagaccactgatgtgcctccatccctccaaggagtccgaggaggatgatgaagaggatgaggatgacgaggacgaggatgaagaagaggaagatgatgagaatggggactcctctgaagatggcggcgactcctctgagtccagcagcgaggacgagagcgaggatggggatgaggtggggcagacagggcacagtgggaggggaggggagtcctgccaggagggccacctggtgactccacatcctttctcaccccccagaatgaagaggatgacgaggacgaagacgacgacgaggatgacgatgaggatgaagataatgagtccgagggcagcagctccagctcctcctcctcaggggactcctcagactctgactccaactgaggctcagccccaccccagggcagccagggagagcccaggagctcccctccccaactgaccacctttgtttctcccccatgttctgtcccttgcccccctggcctcccccactttctttctttctttaaaaaaaaaaaaaaatacggtgggggtagggggctggaggagcccaggccaggactctgcagcctcagagacatcagcccttgggggtcctcctccagggacagcaactatcagactaagccagcaccggaccagcctggcccaccccacccacttctgcacttgcggttccggcatggacaatggaccggagagtgggggtggggggtcccaaagagtttgatgaggccctccacacctgcggcccaatccaaggtggggtggaagcttggggaagacccattccttcccagaggggcctgccacctggacccctgcattggaactggaggcagggaacatggggaggaggagggtcggtgccttcaagaaaacaggcactgccctggtggccctctcccctgccccctgcaggaaggagctgcctggacccgttcatgggggagggggcagaagtgttttttatatatgtgtatatatttttttttaagctctgagctgtcaacgagacgtttcctaccgatctcggctgccgtctctgttgtcatttctgggagagggagggtttaggggtagatttggaaccttttaaaaatggtcttgatgtatgtggaagagagtatgtgtatgtgtgttcctgtacatagcatgggtgcagctgtggatgtgtgcaaaagagtgtgagtgtgtgtgtgtgtgtgtaaaggggtctgtcctagagcccacatcagtttgttgtgaatctggaaaaagggtcggtgagggccgggagatgttgaccctggtgggagcaggctgaggctgccccgttctccacatcctctgttttgcccagtctctgattccattagggggagtgtgctgaagccattctcggatgcttcccagaccaggctccctctgccagagtcacatgcatccgagctgctggtctccattgtccagcaggaaggcggaaaggcaggcaagatggtgtgaagcttaaagcttgtatttgatggaaaaggtctcccctgttcatctgagaggccaagcctggccaccccaggctcagaacctgggcttcaagaaatgtgctgggagctcctaacttacacatccctccagccttccttgaatcctcccaccaccccctatttcctttaatttctcaggtctgctccctcctcccccaaccccacagctgggcaagaagtctgcaaaagctgcatctgcagctgtctctaactcttcccagccatctcccgtattttttggtaccttgattccttgactcttaataagccaagccaccttatctctgtagttcttatttttttgttgactaaatttggggggttcttttttatggtcatgtcactgacctattaaattggggcttggtgcttttccaccttccccctctgaatgaaagccaaggaatgggggaagagcgggaactctgccgcggaggtggagcaagaacggtgaagggccctggtcccagagaggctggtgggtccctctcccaaaggaaggcagacagtctctgctttgccttggaccttggtgctgggggtggggaggcctgggggggacactccccactcccattccccttcctttgtcctaatcctggaattaagtacaggggtttataggttctatttcttcccaagagccctgcaaagaaccccagtttcctatttggatgcccctacactgttgtgtttcagtggaatgtattttcatttaaaaacaactttgaatggggcactttttctttcctgttttaaaaattgaaaaattcttacagtacaaacaggactgtcagggtgggggtgttggtgctgtaagaggtcactcttgagtgcattttggcactgggatgggatggctggggtgggaagacccccatccccacccccaacttcttttctaatatttaaggagtgttttgtaggattcaacaaccaccacaacttgaatttgtatcatgggaggtgggagggagtggcttagaggtgtctgcctatgcttaaagccaactgtggaagttttgttttcccttttttgtataataaagtgaaaaacaaaggtttgactgctgtctggtcactggaatcaatgaaggttcacaggggtgacccaacaggtttgatctataaaaatgcttgaagccaatttgccttttcttcctagaactatcttcctcttccctaaagattccataggcaacctaccttcacattgttctgtgctactgttcttgcccttttctcaattccatttgttcaccttgggttgtgagaccactaaagattctgagaagttggagaacaaatgcattttcacccaaagtacatggtcttgg

SEQ ID NO: 86597 - DNA, 3365 bp, Homo sapiens
tgacaggagcaaggcctgcacccgacgccactgtgagagttctatggtgttggagaaacgagtgggggaggctcagcgctgccactgcgcactgtgtgaccgtgggtaatgccatggcccccttctgggactcttgctcagaaggagagaataggatgtaggattcagtgtctgggcgacccctgcagctcccaccatctgtggtagaagccagcaggtctgctctgtggtgagtcccgccaggaggcgggcagggcgccagcctccactccctgcatcacagcgtgggaggcagaagagccagcgaggaggggtctgggtggccttcatagctcagggtgagatacccttgggtcctgagtgaccccatcccctcctccccccagatgaaatatattcaggacttccagagagagaaacaggagttcgagcgaaacctggcccgattcaggtaaggcagtggagcccagaggagggccacggggcactgggggcagcagaataggctaaccctggccagagccttgagtttgccatctctgaggcatggaagaggatgggtcacatgtgagccctagtgtgtcatgctcagggacagagacaggcaggcagccaccgtcccactgagccccagctgaaaggcccaggaggcttggtgggtggggcagctagcttgagtctgccctggcagcgtcccctgctgatccttgctccccgtgtcctggctagggaggatcaccccgacctaatccagaatgccaagaaatcggacatcccagagaagcccaaaaccccccagcagctgtggtacacccacgagaagaaggtgtatctcaaagtgcggccagatgtgagtgtccggccaagggttgggggtggaggatgcacggcggtggccaggggggagccgcgccaggtcggccgggcacggtgcaggggagcaggagaggaggcccctccccaggggtgggctgcatggacagggcccgggccagctggcgtgcaagcgtgtgcgtgtgtgcgtgcgtgtatgagccagtccccttgcacccaggcgggatccccgcctctccgccttcccctcctggcctgtgggggacactgatgtgacctcccatggcctgagggggcgggggcctctgtgcccccttcccccttcccccctccccctgcccctggctgcctgtgcgtgtctgacggcttttggtttgcaggccactacgaaggaggtgaaggactccctggggaagcagtggtctcagctctcggacaaaaagaggctgaaatggattcataaggccctggagcagcggaaggagtacgaggttaggcttccgctgcgctcctccccgtccggctcttcacgagcctctgccctccgactccgtggccaccgcactctgcgggaggtgtcactccccatccctctgttgagggaggggccttctgggcccctcacctctgcccctaccttccccaccccccacccccatgagatctcaggctagggcagggcagggcaccacgtctcgtgtgacaccactgacgcgcagccacccccagctttgctccctgcctgccctccccagcggctctccccctgcccctgccctagctaactccacaccccattgccctccgtccccccacctggctctgcaggagatcatgagagactatatccagaagcacccagagctgaacatcagtgaggagggtatcaccaagtccaccctcaccaaggccgaacgccagctcaaggacaagtttgacgggcgacccaccaagccacctccgtgagcgctgccctgggatgggtgggcgagtgggcagctgggaagttgggctgggctctgcaggtgagaaggcctgctgccctgctcgcttacgggctgcacctctctccccgcggctctgataggaacagctactcgctgtactgcgcagagctcatggccaacatgaaggacgtgcccagcacagagcgcatggtgctgtgcagccagcagtggaagctgctgtcccagaaggagaaggacgcctatcacaagaagtgtgatcaggtgagctgtggcaggggccaccctgccttggggttttgaagcatgaggtctgatcccatcttgggccagtcagtccctggtggcgtgtgccttgggtacctgcctccaatacagtgtggggctgggctgggcttagcaactgagcccgtccaggcagggagtccagcccacacccaggctctggaggcccgctgaaggtcactgtcctccgagtactgcagggtctgtggtgacactgtctccagactgatcctgactccactcactttcccagaaaaagaaagattacgaggtggagctgctccgtttcctcgaggtgagtgttcctccggtggggcagtgggcagagaagactgggacttggcaggcagagccctggtgagcccctggagatagggcaccatgcagtctgggtgccaggcatgcagccccgtgctcctctttcctgtccagagcctgcctgaggaggagcagcagcgggtcttgggggaagagaagatgctgaacatcaacaagaagcaggccaccagccccgcctccaagaagccagcccaggaagggggcaaggtgggcagagggtgcggccgcgcaggcgggggtgggcaagactgggctccctggcagcacccacggaccccgaccctctgcacctggacagggcggctccgagaagcccaagcggcccgtgtcggccatgttcatcttctcggaggagaaacggcggcagctgcaggaggagcggcctgagctctccgagagcgagctgacccgcctgctggcccgaatgtggaacgacctgtctgagaagaagaaggtcaggctgcctggcggagcgctgtgcccccaggggggctgccagggccccctcttccccttggcgggccgtgccacctcgcccctggccgcctgagccacgcggtgcctgggctgggacgtggggccggcgcccagcagccggaaggcgggaagctgtcagctgagcgccgcagaccaggcgggggcgagccccaggcgggagacatctgcaccagcccatgcttctgcccgccggcgggagcgcctgggctgctgcgcggggagcgcgcgccccctgggggtgggtggaaggctgacgcccgggccatccccgcaggccaagtacaaggcccgagaggcggcgctcaaggctcagtcggagaggaagcccggcggggagcgcgaggaacggggcaagctgcccgagtcccccaaaagagctgaggagatctggcaacagagcgttatcggcgactacctggcccgcttcaaggtgacaggggtggg

SEQ ID NO: 86598 - DNA, 4031 bp, Homo sapiens
tgcgccgggtaaccgaggcggctgaggacgcgcgctggggtcggggccggacggcgggagcgaaccgcggggtgcggtgggcgcccagcggggacccgaagcgaccaccgagcaggcgaccgggcgcgagcagaccagggcacttgggaggacgccgagagccgggggaggggaaggcaggaagcgaggcctgagccgagccccggccgctggcggaggagcccgcgcttctcggagccggcaggcgcagttctccccggccgccggagggggcggcggggccggtgagcgctgcgcccccgcctcccggccgccgtcctcccgccctctccttggctcggctccccggaggccggggcgggggcgccggcggggctgggccgcaggctcgggggaggaggcggcggttcccgccgcggtcgcgcctctgtgccgggctcctccgtgcgcgtcggggtggctgggcggtggcggcgcctctggccggggtgggtggctcgggggcggggggcaggctaggccgcttctctccggctgcttgcccgcctgtgcgggcggggacggcgaagggagcccgggaggggggagcggcgggaatccggatccggtccccgggggcggtgcggccgctccgctccggggctggcggcggctgcgctgcgtccgggtccccgccgggttgcggaggcggggggaaccggccggggggaggcgggaggaggagactggggcgcgtgcccgcttccgtggccgcgcgcgccctttacccgcccttcctcttcccccgccctccagcctggggcctccccggggcgggcgctccgaggaggaggagattttttctttttttttttttttggctggggttgggaagcggggcggagggcgggcgctcgctgcacgcgggagctaggagcaggccctcgcgtggccaggggagggcgcgcgccgcggagccgggctgcaggggctgggggagggggtcacgaggaagaggaggggcgcactcccattcccatagaccccttaagtctaataaggtcatggctgagtctctcagagtgtggacctgcccccttctactctgggcggttagaaagtcgttagtcgttcacctctcagccttcctgagtgggaactggtatgtcttccaaagggtgaggtggctttgaccccgggttgcccggccagcacgaccgaggaggtggctggacagctggaggatgaacggagaagccgactgccccacagacctggaaatggccgcccccaaaggccaaggtaggggcatccacccccggccctctgaaacttaaaccctctttccctcgtggctgcggggctcactcccttcttcaagggctttttcagtctgcatacactgaactgggggagaaagtgccttgagtatttatgaatcaagcatctcccacacttggggtttggctgaatccaaattatttggcctggagtggctcacctcccctctctccctgtccctcaccctctgtgttagaggaggcctgccttctggggttcccattcagcctgaagtgtgtcccagcccagtgtcctggaatgggaggaaggatgagtgtagaggaagggtcaggaaggggttggggaaggcttctcaggctttttaggaagaccatgaggcttttgtagaggcaggtggagaaaagggctgttttggtggttttaggccccaagccatgggatatatgtactcaactagatctctgcctcattcagcagtgatccagtctagatggggatagagagtaggatgaagctggacagctggccatgcttgtgggacattgaggggagaggggattatgggtccacgtggcccattctgcagaatctctggcccaggttaccagatgcaaatgaaaatggagagcccttttgacttctggccttgggtggctattctcccagcccatccacagtggcctagagctctctggggctgcatttcagtggctgaaaaataactgttccagacctgttcttgcttccctgggtagttgggctgacaagacagcttgtaattctgggggttctccctggagcagggccctgagagtttctgtgcacctgcctaccttgcctcagagctgccctgtatcctgcttctgcttctgtttcctttttcttatttgccagaaattctcccttgatctgctttaaggggctagggggtggtgggtgtctctaacattggtttccagctgtgcaggagagacatctgcatggattttccttactgtccacaccccattctcagtcgttgcacatttagaatatccactcagaacttgaacttggcagcacatttagatatattgcttccctgcttccctccttctctgacaagctacctcgtttcccacaaagccctgaatcactgtaccttcatttccacccctcttccccttacagcaaatagctgcccgttgcagcttggcacagtataaatgataatagccttgaagcaagccagacttgagttcgagcctggctttctaggtatagcatggtctggactggagtccctgccctgatccaatatggccacagtttccttagggctgagccatatcttgtctgtgccttcagatgggaagcaaccaggggctgggatgccctagggaggaagagttgagcactcaagaactggggaacagatcggggggatagcatgagccaggcatgatggcctctgttactctttaccagaccgttggtcccaggaagacatgctgactttgctggaatgcatgaagaacaaccttccatccaatgacagctccaagttcaaaaccaccgaatcacacatggactgggaaaaagtagcatttaaagacttttctggagacatgtgcaagctcaaatgggtggagatttctaatgaggtaactgatcccccttttctgacatacacacataccccccactcagcgtggtgggggaagtgaaacaggctgtaaacaggaaggaaagagaccaggagaggcattcatgtggtctcccgttagctctctacctgcccctttgcattttgggaggtggcacggttgacagcactggcttaaagttatgccactttctatctgagtggtcttgagccaaacagcctgagctgtgctgagattgacggaggtgctagcatgctgagattgacggaggtgttagcatggacaaccaggttgaggtcagttagtccccttgttgctggcctttggtgtgtactgactgcctgggcctctgcggtaggcatgggccagtgcctgggtgtcatgctgcctgcttcatttggctgttggcctctgctcttctttggtaaatttagtctagtaaagagtagaagagacccgttataagatgggggtatactactgtgtggcattttccttttcccaacttccccttcctcccacccctcttcctccaggtgaggaagttccgtacattgacagaattgatcctcgatgctcaggaacatgttaaaaatccttacaaaggcaaaaaactcaaggtgagttactaggaggaggagcatgaggggtatgggaggaaaggtccaaagaagggatgtatttgacctccattgtgtccttgtcccttcttccagaaacacccagacttcccaaagaagcccctgaccccttatttccgcttcttcatggagaagcgggccaagtatgcgaaactccaccctgagatgagcaacctggacctaaccaagattctgtccaagaaatacaaggagcttccggagaagaagaaggtggggggaggagagttaaggtgggaggaggggagaggctgggagcagctggtgtggtgtgggtcagttggaggtaggccttggagaaacctggcatcagggatgagggtgagtcagcacagcagaataggtcctgggcagccacacctgattgccccttcctcggcccacacatggtcaggcacaggcaccatcacagatgtaaaccagacagcaggtgctcagaccaacc

SEQ ID NO: 86599 - DNA, 1029 bp, Homo sapiens
agagcagaggccaacagccaaatgaagcaggcagcatgacacccaggcactggcccatgcctaccgcagaggcccaggcagtcagtacacaccaaaggccagcaacaaggggactaactgacctcaacctggttgtccatgctaacacctccgtcaatctcagcatgctagcacctccgtcaatctcagcacagctcaggctgtttggctcaagaccactcagatagaaagtggcataactttaagccagtgctgtcaaccgtgccacctcccaaaatgcaaaggggcaggtagagagctaacgggagaccacatgaatgcctctcctggtctctttccttcctgtttacagcctgtttcacttcccccaccacgctgagtggggggtatgtgtgtatgtcagaaaagggggatcagttacctcattagaaatctccacccatttgagcttgcacatgtctccagaaaagtctttaaatgctactttttcccagtccatgtgtgattcggtggttttgaacttggagctgtcattggatggaaggttgttcttcatgcattccagcaaagtcagcatgtcttcctgggaccaacggtctggtaaagagtaacagaggccatcatgcctggctcatgctatccccccgatctgttccccagttcttgagtgctcaactcttcctccctagggcatcccagcccctggttgcttcccatctgaaggcacagacaagatatggctcagccctaaggaaactgtggccatattggatcagggcagggactccagtccagaccatgctatacctagaaagccaggctcgaactcaagtctggcttgcttcaaggctattatcatttatactgtgccaagctgcaacgggcagctatttgctgtaaggggaagaggggtggaaatgaaggtacagtgattcagggctttgtgggaaacgaggtagcttgtcagagaaggagggaagcagggaagcaatatatctaaatgtgctgccaagttcaagttctgagtgg

SEQ ID NO: 86600 - DNA, 1036 bp, Homo sapiens
agccacccaccccggccagaggcgccgccaccgcccagccaccccgacgcgcacggaggagcccggcacagaggcgcgaccgcggcgggaaccgccgcctcctcccccgagcctgcggcccagccccgccggcgcccccgccccggcctccggggagccgagccaaggagagggcgggaggacggcggccgggaggcgggggcgcagcgctcaccggccccgccgccccctccggcggccggggagaactgcgcctgccggctccgagaagcgcgggctcctccgccagcggccggggctcggctcaggcctcgcttcctgccttcccctcccccggctctcggcgtcctcccaagtgccctggtctgctcgcgcccggtcgcctgctcggtggtcgcttcgggtccccgctgggcgcccaccgcaccccgcggttcgctcccgccgtccggccccgaccccagcgcgcgtcctcagccgcctcggttacccggcgcagcgcggcctccgggcttcccgctccagcggctccctccctggctctgagtggcggcgccctcccccgctcggccgggcacagccgcagctccctcccgcggcggcagcggctcctcctccgggcgaggcggcggcgctggggcggcggctgctgctgctgtggcggcggcggcggcggcggcggctgtggctgctgcctgctgctcctcgcggcgaaaagcacaaagcacagcgccctccgcctgcaggcagcccgcccgccgccggccccggcctcagctcgcacaccccccgccgccgccgcagcctcagccgccggagcggggaggaggagggagaagggaggaggaggagcgggagggggggcgggagaagcggggcagcgagcgcgtccttccccgtagagcgcacaccgacccccggggagcgagcgccagcccgcccgcctcgccggctccgctccctcccacagcctgcccgggcgggctccgcggggggcagctgggaggaggggcgggagctggggggacccgggcgg

SEQ ID NO: 86601 - DNA, 1023 bp, Homo sapiens
ggtgctgggctcccctcgcggctgcccgccgccgccggggggcagcgcctgcggcctgctttcctagggatggccgaggctttttgacaagctgattgcgtggcggggattggctggtccgggtgtgacgccggtaacaacaaaggtggagttggaagaaattagattaaaggagaggaaaaaaattaaagggggagctggcataggacaggaggtagagaccgagggagagatgcgccaagcggtgtctcccggttccaactccccccacacccgcctcgaccctagaagatccctcgcgcaaacccactgggattttgctctttcccctaccccggcccagtgaccgacgccggggtagctgctgcttcttgaaaaatccccgcaactcccaccccgacacccgtcactacgacccagggggagaactttttgctcggactcctcggatcctaaacccagcgaaacgggacattgagaagcttgtcctaaaacccggaaggcccttgcggagcatggagatcggataaggcggggtgctcccccggttttccgatgtgttgcaaatctaagagcttctttctcgctttttttttccctgtaactacccccccccccttttgcttcagggttgcaaaagcaaagagcaattaaaaaaaaaaaaccgcgcacacactcagacacacaccagtggcgacaggggagagttggaaagacgcaggagagaagcaggaggcaggaggcagcggggatggagcaatgggagcgggaagcaggcaggtttccttgcaaatccccctccggcctcacgccgtctcgccggccccggcaggggagcgaggaccccggcgaacagatggaggagtggagctcgctctaggcagctgggcttggccggagaatggaggagccaccaagcgaccggctgattggaagagaaacgcagagcgatggaggcggggtaggaggacgatttctctgcggggactggcggcggcgtacacgcccgggtcgggcgctgca

SEQ ID NO: 86602 - DNA, 1186 bp, Homo sapiens
gcgcgagggatcttctagggtcgaggcgggtgtggggggagttggaaccgggagacaccgcttggcgcatctctccctcggtctctacctcctgtcctatgccagctccccctttaatttttttcctctcctttaatctaatttcttccaactccacctttgttgttaccggcgtcacacccggaccagccaatccccgccacgcaatcagcttgtcaaaaagcctcggccatccctaggaaagcaggccgcaggcgctgccccccggcggcggcgggcagccgcgaggggagcccagcacccggttctcgctgccccgggtggcagcggggcagcctccgacaagacgtcccttggttcactgtcctgcaggccggggatgaaaggcctggacagggtccaccacccactctcccactgccacggccgtggttgactgtctttgcctccccttttcagaggaaaggttatcaggacaggacgcagggagccagaagaccatctgaaggaagcctgcttccaacgggcccagcctccagccaccgctcctggggcagcgccattgctcctggctctcaggctgccagtctcccacaccgacgctctactgcccgcatctcggccagctgggtcacccagcccctttcgactctcccctggcacgcagccttctccttcactcggcctgcctcgctgctgctgtaattcctcttgtctcctgggagaaatgagattgctttcccaggacttccacatcccacttctatcaggtttcaccaacagggaggaagccctgtcaagatctggtgtgtcctgttttttttttttttttttcccagagggcactggcatgtaggagaagcggatttaccactagtagatgttaatgaaatttcagcttctaggcccctaacttgcaggacctgcccaaggccctgaacttaattttgttttcatcatttggtatttttttgttaaaagagccaccgaccacctccccgctaccccagaactgcacgtgtttctggccctacaaacccagatcgtcccttggaatatacacagggcaatttgtgtaggatcacactgcgctaaaagtgaggcatggtgggctaggcgcactggctcacacctgtaatcccagcactttgggagaccaagacaggaggtcttaagtgattaagcc

SEQ ID NO: 86603 - DNA, 1096 bp, Homo sapiens
gtcaggagtttgagaccagtctggccaacatggtgaaaccctgtctctactaaatatacaaaaaatagccgggtgtgggggcgtgcacctgtaatcccagctacttgggaggctgaggcaggacaattgcttgaacccgggaggtggaggttgcagtgagccgagatgagatggtgccagtgcgctccagcctgggcgacaagagcaaaactccgtctcaaaaagaaaggaattcaatttgttctcaagggtcagggagaatggagggtggggtaccttccaggtaggtaggggagtggtttggccaagggcagggaggtgggaatggtgtatcgacagcacagggaagtcttgactgcagaggtgagtccttctagaagaggttcatataagatggaaaaagcaaggtcaagtttgaagaaccctaactgcccagaagggtttggacttgattcaggaggcattagggagtcttgcaggttcttgggctgggaagtgacatgattaaagtgattcacctggaagtgaattcatacaggaggaattcgctgtaaggaggcaaactgggaatctgtgcatgtcagtgagtcagtagcagaggcgggctgacatagcccatgctatcataggacctgcagtcagcatggggcccgacgttcagcaagagtgagcactggctggccatggtgctcacgcctgtaatcccagcaccttgggaggggctgaggtgggcagatgccttgagcccaggagtttgagaccagcctgggcaatgtggcaaaaccctgtctcaaaaaaaaaaaaaaattgtggccaggcgtggtggcaagcgcctatagtctcagtattccagaggctgcagtgggaggatcacttgagcccaggaggtcaaggcttcagtgagccgtgatcgcgccactgcactccagcctgggtgacagagtgagaccttgtctcaaaaacaaaacaaaagaaaacactagtattgtgcagggagtggcaggagcagagggagctggagtaaggcagggcttcttggagggagagacatttgatctgactcctgagggacaagcagtaactgtcccagtgatga

SEQ ID NO: 86604 - DNA, 1542 bp, Homo sapiens
gagataaaacaggactggtccaaggttcaagacagccagaccctctcctaactccagaggtgcctttcgtgcccggggagggctcttctggccccagggtctctcaccctgtctctctcctgtccctcccctccagctggatgctgatgatgccaaggcaacctttgatgaggaggaaggtcgggatgaatacgacgaagtggccatgcctgtgtgaggggcgggcccaggccctagaccctcccccaccattccacatccccaccttccaaggaaaagcagaagttcatgggcacctcatggactccaggatcctcctggagcagcagctgaggccccagggctgtgggtggggaaggaaggcgtgtccaggagaccttccacaaagggtagcctggcttttctggctggggatggccgatggggcccacattagggggtttgttgcacagtccctcctgttgccacactttcactggggatcccgtgctggaagacttagatctgagccctccctcttcccagcacaggcaggggtagaagcaaaggcaggaggtgggtgagcgggtggggtgcttgctgtgtgaccttgggcaagtcccttgacctttccagcctatatttcctcttctgtaaaatgggtatattgatgataatacccacattacaggatggttactgaggaccaaagatacatgtaaaatagggctttgtaaactccacagggactgttctatagcagtcatcatttgtctttgaacgtacccaaggtcacatagctgggatttgaactgagccgtgcagctgggatttgaaccaggccttctgatttcaaggtccgagctctgtcctctgtcagtcatgcgtccactttcccttcccctgtgactcctcccttccccactctgctcccagcccctaccttgagaccctcttctctgggcccagagagaggcgtcctggtgaggacaaggtacaggcaaggatgatccagggattgggcctgggactcaggcctcctaagtgtttggttcctccctccaaacactcattagttcactcattcattcattccacaaacatttactgagggccccggaatcagtggactccgaggggactgagacaagccctgccctggggtgggggtggggggcaaggtacagttgattctacatttggatagggagtgggggagggtgggaaggtaggggcgggagagtgagggggtttgtaatttattaattgcgtattttctaagagttttcaacatagtttggcttcacacacaacttcaggcccctcatttgagagccattatcctcaactccatctaaactgaatcttggggagaacccagatctgaccaattggggtaggagacagcaggctctccaagaacatgggcaaatttatttttttataaaacaaaaagataaaaagagttgaaagacgtgaaagtggtgagagatggaggaaacagaatcaggaagtggtagaaaagagaggaggtggctgggcgcagtggctcacgtttgtaat

SEQ ID NO: 86605 - DNA, 1082 bp, Homo sapiens
tggggatcagacctgtcctgggagggggaggaggagtcaggcctggctggaagtaggagaagtgaggaagggagattcagcaaggggatgagggaggggtcaggaatgaaatctgagcggcaaaaatggggatacggtgttggggtcagtgggccagatcccgggaggaagtggaggtggtactggggtggaggggtgacagggattcgtgcacaaatattgggagttggagggaatggtgcagtgttgttggggtcagctggggtgatggggacgtcagtggaggatagtgtgggaatccctgaagtgtaagatcgtcttggggatcttgccgcaagatcagggtggtggaaaggcgtagagaagaagtgttacagggatcggcaggggtgaggtcgggggtcacggcggatgatgacggtcagtgagcctgtggtgcaggtgagtgaggcgatgaatgcaatcgtgttgaaggttgcagagcaacaccgcaggtccttgtgagtgacgtggggtccctgcagtaaggttggatggccactctagcggaagataactgaaggtgaagggtgggctctggctgttggaagtcactggatcttatgctgggggcaatgttagaagatcattgtgggcatctcggggtggggctggctggatcagagggttgatgctggagaggtgggtgctcgtgtcgggtgatgttagagtcgatggaagtgaagatggggttcacccggtgatgtggtcggggcggcgggggtcaggggttagggcaggccgtgcgctcacagctgctcctgcagctccaggatcacgccttccagctcccgtttctcgcgctggttctgcgccgccgcctcctccagctgcagctgaagccgccggttctccgcctccaggtccttcagctgcgactcgcgcagacgcaccagctcctccaggtagccctgcggggcgccggctcagcccgggcggctgggaggacgtcccggccgcggcccccatccccgccccgccccgggatgcccggatcccccgcccggcccgcccgccccccgggcccgccggcgtcgcgcacc

SEQ ID NO: 86606 - DNA, 3041 bp, Homo sapiens
ttttcttttagacagagtctcgctctgtcacccaggctggagtgcggtggtgtgatctcagctcactgcaacctctgtctcctgggttcaagtggttctcctgtctcagcctccgaagtagctgggattacaagcgtgcaccaccacctgccgctaatttttgtatttttagtagagacagggttttgccgtgttggccaggctggtctcgaactcctgcctcaagtgatttatccgccttggcctcccaaagtgctggctgggattacatatgtgagccaccgtgcctggcctccataaggtttttgaagggtgaccaggtgtccgcctggacccagctgctggggtactgcatgtgtagaggcagggaggcctgagggctgtgggcagaggctgagggcgtcaggcaaaggcctagcctgggccagccccatcacagacatcacttgtgtccctcctcttcccctgggctggtgcctgcttggccaggatgccttcgtgaagatcgtgaggcacgagggcaccaggaccctctggagcggcctccccgccaccctgtgagtagccgggtcctgcaccactctcctctggtacttcctgaccctttgctccctgttgaatggctaggtggggcaggtgatgctttaaaagtttgggtccttttgggagtcccagctaacctctctctgtatccccagggtgatgactgtgccagctaccgccatctacttcactgcctatgaccaactgaaggccttcctgtgtggtcgagccctgacctctgacctctacgcacccatggtggctggcgcgctggcccgccgtgagcatagtcttgggcctttgacctccctctgtccccacctcggcccaaacccagtcagtcccagctcccagccccaacctctgccagcctagggataggggggtgttctaggtccccagacctgggacagcaggtaggtgatgccatgtaagacctgtgatctcacttctccccattgtcacccccaatccccacacagtgggcaccgtgactgtgatcagccccctggagcttatgcggacaaagctgcaggctcagcatgtgtcgtaccgggagctgggtgcctgtgttcgaactgcagtggctcagggtggctggcgctcactgtggctgggctggggccccactgcccttcgagatgtgcccttctcaggtaggcacccaagctgcagggggtgggtgagggaaccctggggtgatgcacaaagggtctacagccaagtcccagctttgtgactagtgaccatgaagttacttagcttttctgagccatgggtttctcatctgtgaagtgggcctagcaggtagagtatttgcccaggcggtcaggagattaattcctacagagtgcctgcttctgagcctgcatgtagcagacaagactcacagctgggagggagtggtggcagtgaaaggtggacggtctggggccacttccttgcccttcccgtctctaatcagtgcatcccccaccccaagccctgtactggttcaactatgagctggtgaagagctggctcaatgggttcaggccgaaggaccagacttctgtgggcatgagctttgtggctggtggcatctcagggacggtgagtggactgggctggaggtgaggccagcggaggtctccctgcggggggcctgaggatttttggagatgcccagaagcagaccccatgaggcctttgtccctcccagccgcaagagccatctgggaggtaggggtgggggtccaggaagtggagctgagccctctccccgcccaccccaccaggtggctgcagtgctgactctaccctttgacgtggtaaagacccaacgccaggtcgctctgggagcgatggaggctgtgagaggtgagggcccagattgccgtggcaggggacaggtggggtcctgaatggggtctcactgagccggcctcgcgtttgcagtgaaccccctgcatgtggactccacctggctgctgctgcggaggatccgggccgagtcgggcaccaagggactctttgcaggtcagtgtgtgggtgtcgggggtgggggcatggcggacctgcgacctgacccctgacacgggcctcctttccactgcaggcttccttcctcggatcatcaaggctgccccctcctgtgccatcatgatcagcacctatgagttcggcaaaagcttcttccagaggctgaaccaggaccggcttctgggcggctgaaaggggcaaggaggcaaggaccccgtctctcccacggatggggagagggcaggaggagacccagccaagtgccttttcctcagcactgagggagggggcttgtttcccttccctcccggcgacaagctccagggcagggctgtccctctgggcggcccagcacttcctcagacacaacttcttcctgctgctccagtcgtggggatcatcacttacccaccccccaagttcaagaccaaatcttccagctgcccccttcgtgtttccctgtgtttgctgtagctgggcatgtctccaggaaccaagaagccctcagcctggtgtagtctccctgacccttgttaattccttaagtctaaagatgatgaacttctgcctggtgcctgtccctctggggcctggggtggctgggagggaggcttgggagggaccctggtgctggtttggctgcccagagtggcacctatgaagaggacctctccagtttggcgagagtcggggtgaggacctagagtgtaagggaccacaagtagacattctggtggtgaggtccctttggggacctcccccccatgttagggttagaattgggggtggtaggggctgggcacggtggctcacgcctgtaatcccagcactttgggaggccgaggcaggtggatcacaagggcaggagattgagaccatcctagccaacacggtgaaacctcgtctctactaagaatacaaaaattagctgggcatgctggtgggcgcctgtagtcccagctactcgggaggctgag

SEQ ID NO: 86607 - DNA, 1046 bp, Homo sapiens
gggcaggccacctcgtctccccgagccttagttttccccggcggaggggggcggacagtccctgctttagaggtcattgccagggttgttgaggcaacagatgtttcgagggcggtggatgagggttgggttaaagtctcacagtgggccgggtgcggtggctcacgcctgtaatcccagtgctttgggaggctgaggcgggcggatcacgaggtcaggagatcgagatcatcttggccaacatggtgaaaccctgtctctactaaaaatgcaaaaattaactaggcgtggtggtgcgcgcctgtagtcccagctacttgggaggctgaagcaagagaaccgcttgaacgggggtggatgttgcagtgagccaagatggtgccactgcactccagcctggcaacagtgcgcagagcgagacgccgtctcaaaacaaaagtctcacagtggcccagcctcctttcctgccatccctggagttgtggtctgtttgaggtttggttttcaggactgaagcttcaagatggctgaccaggaccctgcgggcatcagccccctccagcaaatggtggcctcaggcaccggggctgtggttacctctctcttcagtaagacctaggggaggtggggtgggggcgggtggggatggggcagaccggagattggaggctgtgtggtcctgggggaggagtcctaggggtggggtcctgaaaggagccttcagacccgcttcctcccccagtgacacccctggacgtggtgaaggttcgcctgcagtctcagcggccctccatggccagcggtgagtacctgacctggaactagtgaggggtggtgcctgggcaaaagaaagatctcccagaggctggccgtggtttctcatacctgtaatcccagcgctttgggaggctgaggtgggtggatcacctgagatcaggagttcaaggccagcctggccaacgtggtgaaactctctcactactaaaactacaaaaattagccgggcttggtggcatgcgcctgtagtcccagctacctgggaggct

SEQ ID NO: 86608 - DNA, 1022 bp, Homo sapiens
cgggcgtggcggcgcgcgcctgtggtcccagctactccggaggctgaggcaggaggatcgcttgaacccgggaggtcaaggctgcagtgagcctagatcgcgccactgccctccagcctcggcgacagagcgaggctgaaaaagatgctgtctaaaaaaagatgctggaagtgcgtgctgctgccacgttaagcgcgacgtggagaccgcgaagttggccggcagctctcagcgctggacaggcatggaactcgcccgcgcggccccgtcaagggggcgggaccgtcgcaggtccgggcggagacgcgagtgggcggagccggggacactccgggcttgcggctggtcggcccgcggcgggcggggcctcgtggcgcggtgtaggggcggggcccccttggctgctttcggcgtcggcctaggtgcgctgcgagcgcgcgcggaccgcgcacaggcggcggagccggtatgggcccgcctgaccctgggcgccgcgccgcacgagcaccagcctagagccaggtaggcggcactgggccggggctgggggcggagacggaagcgggggtctccgggcggccgtgcgagccagggcaggtgctggggccgtcgagctggcgtggtccccctcacctggcggctctccgccgttcggggccgggagtgtcgccgagggtcggggagacgtcctggtcctacgttcctacttcccgctctcccggctgcgccccgggcctgcattttggggcgggaacccagagactgctctttctctccgggccccgggtctggcccgtccggccgggcggggagggccgggcatcccagcccgcagtcctgaggaggcgacgggcccttcttggtcaccggatctgtttacacgtcaccctcgatgcccggccgtccctccacgcccagtaacttgggctctcaggtgcctgcccggggccttggtgctggagtgggggctgtgggggcagcacaggtactctgattttggggccacgagggccaaatccgcg

SEQ ID NO: 86609 - DNA, 1050 bp, Homo sapiens
agcgattctcctaccgcagccccccaaggcgctgggattacaaatgtgagctactgagctggctcgctcctatcctatcctgccctgtcttgtcctgtcctgtcctgccctattctgccctattctccaaactcggttgacatgctaggcaggccccagagtgagttgaaggatggtttccaggacaaagataaacagccccaaagccctttcctcaaggtgctcagcaggacagggagcagggattggtgggagacagtctcaggctgaatctaatttaagatacaaggttgtgcgccagttgccaggtgtagggagaggaagtagattgtctccaggtggggaagaagagatttcattccaccttaggagcatctccttgagctgagtctgggaagattttaactggcaggtggaggaggaggtgttgggaagagccctgggaaaccagatgggaagggcaggcttggcagggattgaatgccatgttcaatgccagtgggcttcaggagctgctgggtgcctggcacgggctgggctgtggtgggggctgtcgaaagagaagtggcttcctagtctccagatcggccctgccttcgaggaattgatatgggagggtgaggagagaaaatgtaccacagaacagattagccagtgacaagagtcagcctgcttggtgccaaagggcctgggccaggcagagatggatgatgggagatgggccaggagagaggagaggcccagggaaagcctgatactgggccgtggaggaacggcagtgtctgcacaggggatggagactgctgcagcctgagcaaggaactggagctgaggatgaggcaggggcagggggatggctaaccaagctcgaggcagcagaagtcggaggagggaaagggtgccaaccgagctgtggagtcgtgtggcaggggttctaagcctggagctagagcagacccagacagcggataagacacctggcctgctgaggacctagtactagtctgtgccctggtgacacatttgtgcttattttccttcctgtgtatc

SEQ ID NO: 86610 - DNA, 1367 bp, Homo sapiens
cggggtgcaggtatgaacatagtgtcaggcaaggaggcatctggaggggaaccctggcttttcctggggggactccctccctgcaccctagccctgtcctctcccatggctactgatgccttcccctcaccccagaggtggcccacatctgcacagatcagacccacaaaaatcacgtcttcctgactctcataagcctgcccagtgaggcccaggcattaggccatgtgctggggactcagacccacacatatacgcatgtcagcattcatgcttacaggtccgcacatgctggggcaagtgtcacacacggggcgctgtaggaagctgactctcagcccctgcagatttctgcctgcctggacagggaggtgttgagaaggctcaggcagtcctgggccaggaccttggcctggggctagggtactgagtgaccctagaatcaagggtggcgtgggcttaagcagttgccagacgttccttggtactttgcaggcagaccatgtggaccctggtgagctgggtggccttaacagcagggctggtggctggaacgcggtgcccagatggtcagttctgccctgtggcctgctgcctggaccccggaggagccagctacagctgctgccgtccccttctggtgagtgcccctcagcctaggcaagagctggcagcctgggttttcccaaagggtcatcttggattggccagaggaggacgccaggcacaagtctgtggtttatcattttccctgtctttctaggacaaatggcccacaacactgagcaggcatctgggtggcccctgccaggttgatgcccactgctctgccggccactcctgcatctttaccgtctcagggacttccagttgctgccccttcccagaggtgagcgtgccatcagcccagtggaggggcttaggtctgcatttatgcttttcctgcactctaccacctgcagataaaagggccctgccaatgcaggtttctctgtgttccacaggccgtggcatgcggggatggccatcactgctgcccacggggcttccactgcagtgcagacgggcgatcctgcttccaaagatcaggtgcagctggggtgtgggtgcagggcaggcagacgggcagcatgtggagtctggaacccaggagcccagctggcgggggcagccctgattcctgcccttgtgccctcattcatgtggcatctgtactaagcaacagccctgctgtggacagaggggcagcactggggataggagggtgcgggagaaagtgcaagactccaggtccaggcgttgtgggggtggggagaggtcgagctgggccggtctaataccaacccatggtcagtgggtgccccttc

SEQ ID NO: 86611 - DNA, 1085 bp, Homo sapiens
ggtcatcttgtccacaggtaacaactccgtgggtgccatccagtgccctgatagtcagttcgaatgcccggacttctccacgtgctgtgttatggtcgatggctcctgggggtgctgccccatgccccaggtacaaatctgggggagatgggggtatgtggagggaagtgggggcagagttgggggccaggggcagggggtgaagacggagtcaggaccattttttctcaggcttcctgctgtgaagacagggtgcactgctgtccgcacggtgccttctgcgacctggttcacacccgctgcatcacacccacgggcacccaccccctggcaaagaagctccctgcccagaggactaacagggcaggtgaggaggtgggagagcatcaggccaggggctggggcggggcctcattgactccaagtgtaggaaaaagtttcctccatcctggctgcccctcacgtttgctcctcttccagtggccttgtccagctcggtcatgtgtccggacgcacggtcccggtgccctgatggttctacctgctgtgagctgcccagtgggaagtatggctgctgcccaatgcccaacgtgagtgaggggctggagccagcttggctgtgtgcccccagccacctggccctgacacgcaccttacaggggctctgtggcatggggctggctggctgcttgctgggagcctggctgatgcagggttcatgctaccccctagtgggggattggggcagtgccagccatcagcctggctgctccctgtgtgctactgagcctggaagtgacaaagacccacccctgtccccactcaggccacctgctgctccgatcacctgcactgctgcccccaagacactgtgtgtgacctgatccagagtaagtgcctctccaaggagaacgctaccacggacctcctcactaagctgcctgcgcacacaggtaccagaggcagggtgcagatacaggggtggggccccctttcctcccttttaggcctggccttaggatcactgcaaggtggtgtaagcggtaccctccatcttcaacacctggttccagctgtggagccgg

SEQ ID NO: 86612 - DNA, 1231 bp, Homo sapiens
ggctacctacaacgccctttcctgcccaccccccaggctgtctgctgctcggaccaccagcactgctgcccccagggctacacgtgtgtagctgaggggcagtgtcagcgaggaagcgagatcgtggctggactggagaagatgcctgcccgccgggcttccttatcccaccccagagacatcggctgtgaccagcacaccagctgcccggtggggcagacctgctgcccgagcctgggtgggagctgggcctgctgccagttgccccatgtgagtgcctccctgcctgcccctggataggggagctaagcccagtgaggggacaggaacataatgccattctgtgctcccttccccgccaggctgtgtgctgcgaggatcgccagcactgctgcccggctggctacacctgcaacgtgaaggctcgatcctgcgagaaggaagtggtctctgcccagcctgccaccttcctggcccgtagccctcacgtgggtgtgaaggacgtggagtgtggggaaggacacttctgccatgataaccagacctgctgccgagacaaccgacagggctgggcctgctgtccctaccgccaggtcagtgccaacccccatcctggggctgggtatggccagggaccaggtcccacctcgtccaaccctctcgcccccctctgaccatccagggcgtctgttgtgctgatcggcgccactgctgtcctgctggcttccgctgcgcagccaggggtaccaagtgtttgcgcagggaggccccgcgctgggacgcccctttgagggacccagccttgagacagctgctgtgagggacagtactgaagactctgcagccctcgggaccccactcggagggtgccctctgctcaggcctccctagcacctccccctaaccaaattctccctggaccccattctgagctccccatcaccatgggaggtggggcctcaatctaaggccttccctgtcagaagggggttgtggcaaaagccacattacaagctgccatcccctccccgtttcagtggaccctgtggccaggtgcttttccctatccacaggggtgtttgtgtgtgtgcgcgtgtgcgtttcaataaagtttgtacactttcttaacagtgtctgatttgccgccctgcctgccctccccagggccccagaacaggggttcacgtccactgccaacactcccctcccctaccccacagaaagacataca

SEQ ID NO: 86613 - DNA, 1035 bp, Homo sapiens
agcccccaaccagaatcaagtcttaatggttaaagagctccatcacccaaaaaggattgagggcctaccttcaactgaacagctaatgcataatctcagaaactgtgagtcaaaattccctggaataactccactttatccccaatctccttgccacctagaccaaggtccattcaccaccctgtccccagcactgactgcactgctgtggccacactaaagcttggctcaagacggaggaggagtgaggaagctgctgcaccaatatggctggttgaggccgcccaaggtcctagaaggaggaagtgggtaaatgccatatccaaaaagatacagaagcctcaggttttatcgggggcagcagcttccttctccttccccgacctgtggccaagtcacaaagcaccacagctgtacagccagatgggggaagggaggagattagaactgtaggctagagtagacaagtatggaccagttcacaatcacgctatcccaagcagaaagtgatggtggcttggactagcacggtggtagtagagatggggtaaagattcaagagacatcattgataggcagaaccaataggacatggtaataaactattctcaggaaaggggaggagtcatggctttcagccatgagcatccaccctctgggtggcctcacccacttcctggcaattctagccaccatgagtccaggggctatagccctttgctctgcccgttgctcagcaagttacttggggttccagtttgataagaaaagacttcctgtggaggaatctgaagggaaggaggaggagctggcccattcctgcctgggaggttgtggaagaaggaagatggccagagctttgtgtccactgcaagccctctggcttctggagtgggtgctgctgctcttgggaccttgtgctgcccctccagcctgggccttgaacctggacccagtgcagctcaccttctatgcaggccccaatggcagccagtttggattttcactggacttccacaaggacagccatgggag

SEQ ID NO: 86614 - DNA, 1981 bp, Homo sapiens
ctgtcaagtttagataatcccctcctccctctgcttttttcctctgctcttcccttctgtaaattttaaaacattttcctcccctctggccagtgggttgtcaccagagcacttgctgtgggcccatctggtcttgccttctcagcgccacagggaaggccaagctgttctagtggtggaagtgccaccattttggggtagtatctttgaccatctttggtgacgttacgttatcccaggtgaggtggaaagcgtctcacctggaacctgatataactcaggctgcaattccatccagttcccacatcaacggagccacacatttggcactgttatcttggtatccctcatcccagaagaggcatctccatatcccagaaaagaagatcctatcatgaataaaagctgtatggcccagagaggagctcatgtgtctaaagtgaagggtatattttcttctgttgtgttgatgtttccttcttaatttataggatttttttaatgtaaaaaattgcactgaactctataaacgtaaatgctgctttttgtagctcatataaaaaaggttccatatttgtagtatactgcaataatattttttacatccagctctttaagtgatcctcgttctggtggctttgtgtaaatatgtttgccctagttgaattaagaaactctaaaggttataaaatgaaaacaaaaaataaaatatttgttttctgctagatgcaaaactgactaagcatgtatattttaccaaacttatgtattttttgaagttatgaactataaaatgttaaaacattttttgctgggacaaaatgttaagtaatttgcagtatgtagtgcccccagtattgggatttttgagctaatgggcagcagtcagctgggggcttctgagggatgctcatctttaacagtctccctcatgtacttttgctgttttacacagagaaacaggtagaccccacagaggagaaggaggggattcaacagctttattgtctggaagcagtgagatttggtgattgtctggggggattcctgggtttccctgggtaccttgttccaggcagtcagtccatttgccttcctagtacttagccccctctgacaattttttttttaatgtgccttttgggttggtagaaacggaagtagaagtaggctggaggatgagttgggacagtcttccttttgttgggaggtgagcacatttacagatattttgcttcatagtttccatgccctctgcccagctcagtttagacagtaaacgttccttgtttcttttctcccatgacactgacaagaggaattaccacctcagcctcttttgcccctcttcttgcctttcacccaggctctcagccctaattaacacactgacccaaaggtgcttgtgttgcaggtcccatctcctttgatgaggttaacaattcccactttggcattttcctaactattcgtgtggctagaattggttggttggtcacttgacaagaaaaaccatacttacctgggccaaggctctgttcctgccttcgcaaattctcaaaagagtaaagtttatgaaaagaaagtggcaggcaaacacaactcttgactgccctcccaccctcctacctgttcagtactcatctgattcagaagcatcacttcttggataactagcactggaaaaatgaaatcatctgtgtaagtgaagggactcatttttctttgctttcagcccatgtaaataaataatacagtattaacattttcgtgctgcttcccattagcttgtagattgagccatactctggctgcctctttgccttcctaggggcattttctttaacttccagaatagtgattttaaaagtaaaaataaaaataaaccttacttacaagcataacagattgtatttaactttatcacatatgatagagatatatatgctgtaaaatgagggaaaggaactttctaataaac

SEQ ID NO: 86615 - DNA, 3756 bp, Homo sapiens
acctacctataatgaatgataggatataagagattagtattttataaggtttatgaaatgtactcctaaacctgctttttgttttttatttttctaaatcatcatgtagtgcacctggaagtggtcccatgttcaaaccaaccacagtggctgtagatgaagaaggtggagaagatgataaagatgaatcagctacaaatagtggcacaggtgccactgcttcttgtggcctgggatctgaattctccacagataaaggaggccctttcactgcagtacaaatcactaataccactggactggcccaggctcctgggttagcctcccaaggcatcagctttggcattaagaataatctggggaccccattgcaaaaattgggagtgtcattttcttttgccaaaaaggctcctgtcaaactcgaatcaatagcatcagttttcaaggaccatgcggaggaagggacctctgaagatggaacaaaacccgatgagaagagttctgaccaaggactgcagaaggtaggagactctgatgggagcagtaatcttgatggtaaaaaagaggatgaagaccctcaggatggagggtcccttgcctcaacattatccaaattaaaaaggatgaaacgagaagaaggagctggggctacagagcctgagtattaccactacatccccccagcacactgcaaagtaaaacctaattttccctttctactttttatgagagccagtgaacaaatggatggtgataatactacacacccaaagaatgccccagagagtaaaaaaggcagttctcccaagcctaaaagctgcatcaaggcggcagcaagccaaggagcagaaaagacagttagtgaagtctctgagcagccgaaggaaaccagcatgaccgagccctcagaaccaggaagcaaagctgaggcaaagaaggccttaggaggggatgtaagtgatcagagtttagaaagtcatagtcagaaggtttcagagacccaaatgtgtgagtccaactcttctaaagaaacctctctggccaccccagcagggaaagaaagccaagaaggacccaaacatcctactggtcccttcttcccagttttgagcaaagatgaaagcactgccctccagtggccatcagaactattaattttcaccaaggcagaaccctccatttcatacagttgtaaccctttatattttgactttaaactttcaaggaacaaagatgccagaactaaaggaacagaaaaaccaaaggatataggaagctcctcaaaggaccatctccaaggcctagatcctggtgagccaaataaaagcaaggaagtgggcggagagaaaatagtacgttcctcaggaggcagaatggacgcacctgcttcagggtctgcctgtagcggcctgaacaagcaggagcctgggggtagccatgggtctgagacagaagacacagggagaagccttcccagcaagaaagaacgatctgggaagtcccaccggcacaaaaagaaaaagaagcacaaaaaatccagcaaacacaaacgtaaacacaaggctgacacagaagagaaaagctctaaggcagagtcaggggagaaatctaagaagcgcaagaaacgaaaacgaaagaagaataagtcatcagccccagcagattctgaacgaggacccaaaccagaaccccctgggagtggcagtcccgcaccaccaagaagaaggcggagagctcaagatgactcccagcggagatccctcccagctgaagaggggagcagtggcaaaaaggatgaaggtgggggtggtagcagctcccaagaccatggtgggaggaaacacaaaggtgaacttccaccttcatcctgccagcgaagagcaggcaccaaacggagcagccggtctagccatcggagccaacccagtagtggagatgaggatagtgatgatgcttcctcacaccggctgcaccagaagtctccatcccagtacagtgaggaagaagaagaggaagattcaggcagtgagcattcccgcagccgctcaaggtctggccggcgccattcctcgcatcgttcctcccggcgttcttactcaagtagctcagatgcctcttcagaccagagctgctatagtagacagcgcagttactctgatgacagctacagtgactacagtgacagatcacgaaggcactccaagcgctcccatgactcagatgactcagactatgccagctccaaacaccgatcaaaacggcacaaatattcatcttctgatgatgactatagcctcagttgcagccagtcccgaagccgatctcggagtcataccagagagcgctcaagatcccggggccgcagccgcagcagcagttgtagtcgtagtcgaagcaagcggagaagccgtagcaccacagcccacagctggcaacggagccggagctatagccgggaccgcagccgcagcaccaggagcccttcccagagatcaggctccaggaagagatcatggggtcacgagagccctgaggagaggcattctgggcgtcgggacttcattcgttctaagatctaccgctcccagtccccccactatttccgatcaggccggggagaaggtcctgggaagaaagatgatggcagaggagatgacagtaaagcaacaggtccaccttcccagaacagcaacattggcacaggaagagggtcagaaggtgactgcagtcctgaagacaagaactctgtcactgccaaactgctactggagaagatccagtcaaggaaagtggagaggaaacctagtgtgagtgaggaggtgcaggccacccctaataaagctgggcccaagctcaaggaccccccacaaggttactttgggcccaagctccccccatctcttggcaataagcctgtccttccactgatagggaagctcccagctacccgaaagcccaataagaagtgtgaagagtctggcttggaaaggggggaagagcaagaacagtcagagacagaagaggggcccccagggagtagtgatgccctatttgggcatcagttcccttcagaggaaacaactggccccttattagacccacccccagaagagtcaaagtctggagaagctactgctgatcaccctgtggctccactaggcaccccagcacattctgactgctaccctggggacccaaccatctcccataactacctccccgaccccagtgatggggacaccctggagtccctggatagcagcagtcagccaggccctgtggagtccagcttgctgcctatagcaccagaccttgagcatttccccagttatgcacctcccagtggggatcctagtattgagtcaacagatggggctgaggatgcttcactggcccccctggaaagccagcccatcaccttcacccctgaggagatggagaagtacagcaagctccagcaggctgctcagcaacacatccagcagcagcttctggccaagcaagtaaaggcctttccagcctcagctgccctggccccagccacaccagccctgcaacccatccacattcagcagccagctacagcctctgccacctccatcacaactgttcagcatgccatcctacaacatcatgctgccgcagctgctgccgccatcggcattcaccctcacccccatccccaaccacttgcccaggtgcatcatattccccagccccatctgacccccatttctttgtcccacctcactcact

SEQ ID NO: 86616 - DNA, 2078 bp, Homo sapiens
tttgggaggccgaggcaggtagatcacttgagaccaggagtttgagaccaccctggccaacatggtgaaacctcgtctctactaaaaatataaaaattagccaagcataggggttcacgcctgtaatcccagctacttgggaggctaacgcatgagaatctcttaaacctgggaggcggaggctgcagtgagccaagattgtgccactgcactccagcctgggcaacagagtgagactccatctcaaaaaaaaaaaaaaaaatcttaattatgggcactaacagttttgccagctgttcattacttgaacttcccccataataagggctaatggaaacaggactgctttttaataccataatggtcttttccaaagttctggaaccatttttctggaagaaatacaggtagttccatttttctaggtgggattactgtgtcagtctgtgtgtatgtacacatatatatgttgtacaggtgcttcccttctccctagcccttttagagttgatggctttgtccctgattgttcagtataatagtttacagattcactaagagagctcgtgtagtaatgcttgctttattttttttttctcttccactcttgttttattttttacttttttttctttgtgatgtgacattttcagctgatgtattgaaagcaaatccttctaatttgggagcccagatcacaagagtgagtttttctactagtgtctttagctgtatatctttttttgtgtgtgtctttttacccttcccccctcccaatttaaaaagattcaaaacacatttcataaatattaggtaagaaaattcctctgtctgttgaacatcatgcctttctacaaagcaatgtccactttatactgggtcaaattccttttcccaatgctgttgtaaaagcataggttaatgtatatgtttcgttttgtttgtttcttgttattatctaatgtcttgaaaataattttagttctgtcttcattgcagatagatatgtctgggttctgtcaccagtgtgtcataacactgttcttttttggttgtagtttgttttgttttattttaaggaaaattatacagtagcttctgaaaataaaagacccattctgttacctggattttaagtaataaaatctttgacttatctctgctctccctcctcatcccctggatattcctctcagggccatgaaggaatgcaaagcctcacatactactttcagcaggctgaccagataaaagtggtcagactggtgagctctaaacatgctagcgctggaagacctgtcttgggtttatttaatagttataggaaacctctactcatgctgaaagaaaaaaaaaccacctttttatggtgaaataaaagtatgctttctatttgttctaatttaaataaccccccccccccatgtaagctgtacattgcttttcaagatcttacacctgggtaattttctgtactagcctaacccctttctgttctctttggcttgtgttattacaatttatctcatgttatgtttgtctagttttgcatcctggaggagcaggtgattaaatagtccctttctttcctcccagtgttctaaaatttgcttgttgcatttgagatcattttattttgcctaataaagcaaatgatatgctgtcctaattagaaatgcagatactgcaagtgctatacccaaagtaatcagccattgtgttttcaattgccataagagaatatgataatgtgttcaacactaataccatgactgttggttgagggtcatgtcctaaaggctttgctttctgattcccaagttactgtaaatcatccaccctctgtatctttctttcttttaacccagagattaaaagatctgaagcagagagagtttgctcgaaatgtctcttcaagatcccgcaaggatgagaaaaaacaggaaaaagcccttcggcggctccatgagttggcagagcaaagaaaacaagctgaatggtgaggatattttttatcagagggttgtacagataattataatccttaaaattttaaattatagatttcagattataat

SEQ ID NO: 86617 - DNA, 1046 bp, Homo sapiens
tgttggcttagtgtaagttacagacaaatttgatactacagatttttctatccctacgtccttgcctccttaattattttgcatatctttaaaaaatttgtctgctgatggatatgacagtagaatcattttctttagcatttcaagaggcctaaaattcaaactccaaagaatattgtttcccaaaagtaaattaattaatagcagcaccacctttatagtcaatcctccttccctccctcccttcctcccttcctttcttcctctttttcttttcttctctctctctctttctctctttttggctgcttcctttgtaccttgttacctactcaggatttttcttccaatcttagcctcttgtttgtgccactaaaggtcctcctagtacataaactagagaggtcacaaattatctcatagatatattttatctggccttcacattattagtttttccctttttaatttcagttgattcccaaattttaaaaattcaattttacataatttaggctttggcttatcttgaaaaattaaaattatcagacaacattgggcctacatttcaacataacagttgactaaagctgaacagttgccatctctttgctcattctgcaactagctgtgatctccacttcatcttttctcttacaccaatctgtgtgactcattatgttacctgccaaactcctgtaaacatttgaatttgtgactcaggcctatgcttttccttccttcccacacaggttcccgtggcttctgactgatactggggaactggcacattgaaaagctgcctccttgctaatagtgttgggaccaacttccttgcgatttcagtctctggtagtctgatccagattatcaaaatctggtactgtaaagcatcttcagaaattctttaggccaagcgtggtggctcatacctgtaatcccagcactttaggagactcaggcgggcagatcacttgagcccaaaagttcgagaccagtctgggcaacatggcaaaacccggtctctacaaaaaatgcccccaaaa

SEQ ID NO: 86618 - DNA, 1027 bp, Homo sapiens
tatatcccttatccaaaatgcttgagaccaaaggtgtttcagatttcagattttttgggggttttggaatatttgcattatacttatcagttgagcatccttagtccttttaaacatttgtttatttgaagacaattgttagtatgacgacacacagattacccaccaaagtaccacttgtgtttcatccagcttttactggtaccactaaatattatgaaaagcccttttttgtcttctcagatagactgttttctctataacattcacttaaagttttaccaagttcattttttgtttctttgtatttcatgggtcttgaaggattatgttgacaaagagaaggcaattgccaaagccttggaagacctcagagccaacttttattgtgaactgtgtgataagcaatatcagaaacatcaggaatttgataaccatatcaactcctatgatcatgcacacaagcaggtgagttgtagttacttgctaacagaagaaggtacctatctattgttacaacaattggattttatgagtataccccccaaaacttggtgtctatgatttcttgtgtctgccaatctttatctgcagtcatccaacacactttgttttttcagtggcagaaatcctgacatagacaccacctccagcccacactcccacatatacactatttgacaaattgtgttttgtaaatcttatataatgtttttgccttttattgatttctaagtttttatttaattttgtaattcagctgagggtcactgggagctttgtttccatttctgctcttaacgcgttaaactttgaagagttattcagcagactgttattttcaagttccctacataagatttcatgctttattggctaccattttctattattaagtcattttgctattcaatataccttggaagttagataaattttgagaaggaaaataaaattagatgctatcttaactttaacaaaaaactctgttgctgcatgttgaagagctgataaatgaattacactt

SEQ ID NO: 86619 - DNA, 2493 bp, Homo sapiens
accctcgcagccagtgttaaatccactctaggaaatgggactttagagcaccagattaaaaggaaaactattcttttctctaagggcaactaattgtttctttttatttaaacttttcacagccccattaaattgtaaagcatctcctagtctatgaggaacatcaaaaaaaattgtaaagcatcttttgaaaacaaattcaacatactgagttgtaattataaagttttactgcatcatgtttaaaaatgtactttttctatttaaccatgccagttgagatttttttttttaaactaggttaaaaagttgtgtaggaggatatcagtgggcagagtaaagtgatacttgatgggaagttatttggggatcttaaaaggaatttttaaagttttacaatttaaacctcctgatgccattgcttaaaagtgctttgcattacttattaatgtaattttgccatagtaatttgaaattaatcccaactggacgtcagccaaggtggttaattgggtttaaactaggaaaggaaggtcttgagtgtaagctgtgagaatggcttgtgtttggttcactgtagctttctggtctctgcactccaaggcaagatctctaaccacccaaaacccaatgtgtaaaatgagctgttggtttggctttgcaccttaccttgattatgtgttcctgttacagggagaacagatcccattccaatcgttgtcaagtatgatgtcatgggcatgggtcgcatggaaatggaggtaaattgatctcattaactcataagttttgtgagatattttgaaataatactaattccaaattcagatgtctgtgcaagaatacatttatcagatgaaatgtagttttaatatttttctttggatgactaaaaaatatattttacattttcatttagtgctacttttgagacaaatagaatataaacagagctgctgttttaactggcacataaagaagttaagtgatttgccgagggttatacagcaaggcaatatcagacttagatccagaccttggtacttgcttcagtaggcagtgttgctcagctcttaaaatgttgctgtgataaaagctttgcctttgtagaattgggtacggctgtcacctgtaatacctgcttttcattgcctaaaatattttcttcattgactcctaattcctttttttttttttttttttttttttgagatggagtttcgctcttgttgcccaggctagagtgcaatggcgcagtctcggctcactgcaacctccgtctcccgggttcaagggattctcctgtctcctgtctcagccttctaagtagctgggattacaggcgcatgacaccatgcccgggtaatttttgtgtttttagtagaaacagggtttcatcatattggtcaggctggtcttgaactcttgacctcaggtgacccgcccgcctcggcctcccacagtgctgggattacaggtgtgagccactgtgcccagcctcaattttcaaagaattaggagtcgctgggcgcagtggctcacgcctgtaatcccagcactgtgggaggccgagacaagcagatcacctgaggtgaggagttcaagatcagcctggccaacatgatgaaactccatctctactgaaaatacaaaaaaaattagcagggcattgtggcgggcacctgtaatcccagctactcaggaggctgaggcaggagaatcacttgaactcgggaggcagaggttgcagtgagcggagatcatgccattaaaccccagcctgagcaacaagagtgaaactccatctcaaaaaaaaaaaaaaaaaaaggaaagaaagaaaagaaaattaacattgaagtgaagtctactttcaacaaatgtgccttttggaaactaccagcctgaaagtaacaaactattttgcatgtgattttctctgtgaggtgacaataaagcaagcagtagctaagcaaaattacaatttttttttgttttcagataatactgtagttgtgcaaataactttttcatagctaatcttgggggtactttaggaattaaatctaatcatatctatttttgtcaagcttgattatgctgaagatgctaccgaacggcgccgtgtcctagaagtagaaaaagaagacacagaagagctgagacaaaagtacaaggtatttaaacaaagctattcattgggagatggggaggtgctcactgaataagaaagaactcaaattttgttgaaaatcatcactgttgctaacagcatttgtttgacatttggtggtaattagtagtagatctcagatttctattacattcctatttattggctctgtataaactatagagataataatacctacttctaaagtgtgttagaaagattacatgaattagtgtttgaaaacacaatgcctgttacatagtaggtattcaagtagtggtagcagtaaaaattgttaaaagtcctttgaggccagacacaat

SEQ ID NO: 86620 - DNA, 1880 bp, Homo sapiens
attgcactccagcctgggcaacaagagcgaaactccatctcaaaaaaaaaaaaaaaaagttgagttttctagagaatacatattagcagacactcttgctacctaccttttgaggtcatcactacaaattggtattcagatattgtaagtgatgttctttaggattatcattgatagcaactgaataaactgagggggttttttgttttgttttgttttgttttttaatgctgcagcctcttcctgtatgtagtgtttggtgtcttttcccactgggatctttccttggtctatagcctctttaataatgttaagaaattactacttggcccaggcaataatgtcaccttcaagattgctttgaaagtcatactgtttattttctgtgagttaactctgagtggagtaattttaaatgtgacagctcttgtgatgtcggtttctctagagctgtccttcaaagattggttttgttgtgtgctgaaagaaggatattggccagcctgggaagtctcggttaacaggaagcaaagttctgaggagagccacttaaagagttgtattcattcataacagaattcaaatgcacaaagttctccaagcactgaagatctaagattattttctagactgcttaattgttttatatatatatttctagagaagtcttgcggacatctcacccatactccaagcctcctagagttcttttggtgaagtaaatgacttgattactgtccagttagttgatctgatagagtcttagatgtcatttcttttaaaagtcctaccttgggccctgaatactgatttacgagaatgaatagttaaatgaaagattggaaactagagctagttctcttactttaaactgacaccctaccccctgccttattgaagagggtgttgttcatgttctcaagtagcagtacaaaaatctcacaccttggtctgaccagtatgaaaacagctgctgtagcacaaaatgtccttcctctgtccccggctgagattgggggagggacaaagcccaactgttaactttaccccatcctgtctgcctgctagaaggcctgtttcctaccctaatggtttctgcctaacaaatggtatttcttttttacagcattatgatcctggacttgttgtggtgatggtaatcttagcagtggtaattttttattttcagactgaattactccttttgtcatcagtgcaccaatatgttaggcttactttctctgttgtagccttcatccttctgcttggtctttttcattttcctttcctttccttatgcaacttgtctgatccttgttcattaaagggtaatgttaagaagggatgtatctgtttgtgttagaactgccaataaaatcagttaaaacattaaattctaatactgtcaaaaacttgatttccccacaatgtaatgggcactagcacttgctactgcaatttataaataaattaaaacaaactttgactgccttagaaggcaaaagtactaatgcagagtttataaacaggggtttacagaggtaatgaatttgtaccaaaactttcttgattcttgcaaaacgaattctgacagatcaaaaaagataccaaaataaattgctttgacatttctttttaattcattcattggactatttgtttttaccagtaaatccctgactgagacgttatgaaagtgatattgcacctaggaagtcatttttataacctgtctttaatttggtccttttgctaaagattgcagtcactgcttatttattataccattgggcatagggtagtaatgcattttcattttgctttactggcagtcctttgattgtatctaaaagaaggctgtattctagaagttgttgttt

SEQ ID NO: 86621 - DNA, 1072 bp, Homo sapiens
ctgtctctataaataaataagcaagacctgtctcaatcaatcactataaatattttactgatttcttaagaaaaatcattttttgtctgggcgctatggctcacgcctgtaatcccagcactttgggaggccgaggcaggtggatcacctaagttcaggagttcgagactagcctggctaacatggcgaaaccccacctctactaaaaatacaaaattagcggggcatggtggcgagtgcctgtaatcccagctactcgggaggctgaggcaggagaattgcttgaacccaggaggcggaggttgcagtgagctgagttcatgccaatgcactccagcctgggtgacaagagcgaaactctgtcaagaaaaatcattttttgagaaaatattttcattaatattatagtgacatagatacatttttctgaagtctttacagaagctaagttgtctttctatcttactttcccttttcaattcatgttttcctttataaaaaggaaataatgcttaatatttattatgtgccaaatattgatctagagtctggatgttttgcatggtctcatttaatgaaatagatattaatatgctcatttaattttattttttttaattttttttttttgagatagagtttcactcttgttgcccaggctgtagtgcaatgacgcgatctcggctcaccgcaacctctacctcctggttcaagcgattctcctgcctcagcctcccgagtagctgggattacaggcatgtgccaccacgcctggctaatcttgtatttttagtagagatggggtttctccatgttggtcaggctggtctcgaactcccgaactcaggtgatctgcccacctcggcctcccacagtgctgggattacaggcgtgagccaccatgcccggccactcattttataaatggaaagttttggaaagatgatacagctaccgagggtctgccattcaaatataagcctaactttgaaatcaatatttataccttttcccttcttaggaaaagctgatactgaaaataggaataggttggtgggggaatagcaaatat

SEQ ID NO: 86622 - DNA, 1347 bp, Homo sapiens
acataatttaacctagaatatatccacatttattgcatattgaggcaatttatgacagatttctttgaccatactaaacctttgatataaataaccattcaaaaaagccctgtcactctagtgtaaacagtaggcatcgcatgtgatttctgggcttatgcttttgtaagttcttcacattgactagttcattgtcaactttccttttgatttgagtttaggactcttaacatatctcacatgcaaccatccactaaaattttaagcctggtccttttgggcttttttgtcaaagctttaaaaattattttgacccatgcaaggcttttgccaacaaaagttgcagttcttggtgctccagtgctgatgtcttgttactgaatagattggagaatagggcatgcagactctggaatgaagttatctgtggcaggatattaaattgtactttgtaaactgagtttatttttgtacccattttcttattcacatttcattctcctttagtatttgttaaaatatttcagaaattttaaaaaagttattatatatggccgataattattagtattaaaaaataaaagacctgaagaaaagataatgttgacaagatatctgaaggaaacaacacaaaaaaagcactactgatgagaaatattatgaacaattgtttattatagaaacagaggatatgtttaattcagaataaagcaagagtgaatgatagttgtattttgtagcatttagactggattcagttctggaaattgttttataaccttttgtcagctttgaaatggaatgtagttcaaaatttttatttttctgtgaaatacatttagtcaataggtgtagcccagaaatggtgcctgaagtttctttgttacattgtgtaagtactatttgatgatttggctgattctttggtgacagacaaaagtttagctcctaggaaaaatgaatggggtctgatattatttcctatctcaccctgtttagaaggttcgatgagtacatttagacaaccaacacatatttactgacctaacactacattcttgttataccagcagtaaataccctaagacatggagagtagataagacatggttcctgactttcaggtttatttcccagtccctcaagtcttgcttttttttttaactgctgtagacctttgaagtttccttgaagccaaggatgatgttttctacttttgtgcactcctttcatacttaaattaagtatgtgatcagtctgaatatttaattaaaaaattgtttcaacccccttgtgagtaggaagtctcactaatttttgtgtaaaagtacttggtgcagggtgtaa

SEQ ID NO: 86623 - DNA, 2363 bp, Homo sapiens
ccagacagtttaatgtgcaatatttggttttaatgcagaaatttgtggtttcgtcagctttataaattgatttcaggaaatatgggattttcaaatgatttacctttgttttctgctaacattacttatattgtgacttttaatcttttctggattaatactataaattacattttaatacatatagaatactttgtgtttagaatttttcagtgttgtccattgggtgaatatgatcattttttctgatacagttagtgcttattttagccttgtcttggtacttcacaataactgtaaaaagcaaagaattggacaaagaaagggctgcagatgtttccaataccttgaccccttaaacgaaagctgacatttaattgttgtttgtagcatttttttcatgcagtttacattgaaataccttttcgaatgtgctcctgggaagatgagacattatgtatgttggtttctacccctacatgcactaatggttctttactgttaacttattgctaggcctgtttcattctaacatcttagcatttttgttagactacatgttgaaatgcatcactcagtctgtgcttgagctcattttatttttctgtttaatcaacttaatttcttgttttactaacctcactgttttttcagtttaatattggctgcatgctagttaaatatttatattatatatattatttttttaaaccaatcaagtctagcctggattttgctctgattgttttttcatttctagtggtggggcagtcttacacttataacttactttgtatcatgaaagcctgacacataaacaaaacaactaaacacagtgtagattttctttaaaaaaaaaaaaatcttaaagtggtgctgtttaggtggtggatatgactgtataagtaccttgattttatgctttttagtgttattttaaaacttcataaatgtattcttccccttttccctttccccttttactccatttaaaaatgttatatacaaaagttgcccaacacaccatcagaaaggacccttaccccatatgttcttcccatgtaaaatactagccagcttttctttttacattaatgtccctcttattgggcacatttaccctattattagcacctttttgcatgcatatatgtagaagtatctcttgctcatcatctgtttaaatgtctctaggaagggaagaatatattattggaatatttttggtttgtctctctgttctgtctgtcaggataatattggacaccgcttactccagaaacatgggtggaagctgggccagggattgggaaaatctcttcagggtaagtgtttacatttaccagagaaaaaggaagaaaaccatttctgatgcagatcttgtacctgaatgtatttgttgtgtttttaaaaaagtacttgggtttctccctactacctttttccccttagagtagtctgtttgtcctataactgtattttaagtcactgttaagcctctatatttgccagtaatttgcaagagtaagctgctgtgtcatcgaaactttcaagtcaaacatactgtgtgtggctcagcctgttttaaattttttttttggtggaggtgatgggtgagtggagtaaaaggaatgcaaaatatcagagtatgctttctttgtgctatttagtaatgtattctggcttcagtattataaagagaatcattcagtagcagaatttaatttttattcttttaaattctccctgaagctggtgattgccctggctcttttgctctgcaataagaaatttatgtagtggtagagaagaaaaattaacctccatgaaacataaaatgaaagcagaggtttttgagggctctctgagcagagaggttatttctcaggttcctatcaaggtctggaaaatgtatggcttaaagtttccattgcatttgttactctgtttataccagtcatttgtattaaaaacaaaatactaatatttcagcttctgagttctccctagttggaaaccaaccaactgcgttctctttttagctttctcagattcaagagctactgtttgttctttgcagatgtgatatgaatgctacctcagaaattatgggaattggccgggcgcggtggctcacgcctgtaatcccagcactttgggaggccgaggcaggtggatcatgaggtcaggaattcaagaccagcctggccaactggtgaaaccccatctctactaaaaatacataaattagccaggcgtggtggcacatgcctgtagtcccagcttgggagcctgaggcagagaattgtttgaacctggaaggcggaggttgcagtgagccaagatcgtgcacctgtactcca

SEQ ID NO: 86624 - DNA, 1714 bp, Homo sapiens
tggagattgtagtgagctgagattgccgttacactccagcctgagctacagagtgagactccgtctcaaaaaaaaaaaaaaaatcctggaataattggaataatttgcaaaaattacagtcgttaacagagagaatagattgcttgtttcccaaagactggttattgagtttcttgttctttcacagagatagttttgatcatttcagaggtagacaagtctggtttgttttactttgttataaattattttggtgtgcctccttgtgttagccgtcatccttaagcctattggatttttgacgagtgtttataaaacctttttttcttttactgataggaagggagaccatactgaatactagcccttcctgcagagtcacagagctgccttttttcctccaaaagcaggtagtttgaaatgataggaaaggtccagtttttctgtgttggtcattcatttaccctaggaggttggtgaggggaggagagattctgggagatgtgtctattgtttctattgcctttgttatgattggaaggacttagagtggcaagttaaatattttattatagtccctgagaaagtggatttaattaaagaacagttttaacctaaagttttagaagagaaatgccactaccattttctatcaatgatttttttctgagaaggtgacagccatcctcttgagtggttttgtaaaagtggtgctaatgtgtataaccttaattttttcttttttttctccctctccctttaacatttgcttttcctttcactgttgtcagtcacaacacgctgctcttgaatctctcagctggtcttgactcgtgaatttacttatgctttcactctttaataaatacattacttgcaagcagtgaattgaaaacaagacaaaaaaaaaaacgaccattagtgattggacagtttcttactttgtgttacatttaactgttcttttgacagcccagtttttaaagccaggttcgtatggaaatgctttcactccacttgcactgcttttggaaatagcatactgcttcatctgtctgtttatttgagtgcattcataatataacacaatcagcataatgtctcatctccacttagccaaagattgagttttctttaaaaaagaaacaacaacaacaacaacaaaatggagggggggggagcaacaatttttgtcagcattgtttaatgcctaaatcttggtgccaaatatagttatgagtctgttaagagattaaacaattatctgataaaccatatactcttaaagtcattctgctatccttgtccttcctagaattattcagttgtaggaattatgatatgaaataaggattttctgcacaggtaagtttgttttcatagtagtaaaataagggcctgtttacctttttgttttctgctaacattacttatattgagacttttaatcttttctgttttagggggtaataaagttataaatagtcagacactgaacactgggtaagggaatgtttttcctggcagttcagttaggaggggggaagggaagaagccccagcagccagtagtgttatattatatttttgtgatgtgtagtaatgtggaagtcagtgcttgggatcagtagtgtttctaattctttcaaatggtatagagcaaaaataacttgcagcacacttttgtgcaccataatgattttatatgtatattt

SEQ ID NO: 86625 - DNA, 1835 bp, Homo sapiens
aaaagtagccagacgtggtggcacatgcctgtgcatgtgctgggattacccagctactcaggaggctgaggcaggaggattgcttgaacctgggaggcagaggttgcagtgagtcgagatcacgccactgtactccagcctgggtgacagagcgagactccgtctcaaaaaaaaaaaaaaaaaaaagcgctgggtgcagtggctcacacctataatcccagcactttgggaggccgaggtgggtggatcacagggtcaggagatagaccattctggctaacacggtgaaaccccatgtctactaaaaatacaaaacttagccgggtgtggtggcacacgcctgtagtcccagctactcaggaggctgaggcaggagaatcgcttgaacccaagatcgtgccactgcactccagcctgggtgacagagcgagactcgatctccaaaaacaaacaaacaaaaaaagatgagggatcagatgggagaatgactttaagctatatagaaggcagaatgcatgcatcatagacttaaaacatgttgttactgttgtggttggaagtgcaactacccatcagccgctagtcggtccttgctctacctgactgattaaaattctttctttatggttgtcaggatgacctaataggtttaaaaatgtagtgtaagcttcaaactccagttgctgatgtttagtttgcgcatcttaaggatttggaagtatatgtataattgggttttgtgatgttgcatatctgtctagatctgtggactccactagttccaaactgtaattctttataagactgctgatttgacatttagcagtgaccatatgtggactgcactagaaataatgtgcttcttggagctgaatggtgtagcattactatatggcttttctctctagtcttcattgtgtcatctgtagtgagctatagagtttttttgtttcgggaatttttacaacttgtttgcatgggttcacctagtagcattggttcttgcttatagtctttaatacacaatcagcaaagcttacaatccactcaagagacttactattttgtcactgttgaaaatgggctaaatgatgtaaattgaatgtggctgtcaactaaaacaaaattcagtatagaattagtattcatccagtcatggacatacctgtagcatggttttctcttgagacataataggccgtttcctactgtaaaaacttacagccagcttcatacaataaagtaaattttttcctgtgttttggcaggctcccgtcatacatgtgtattggtggtgctgttaccaaaatgatcattgttactatggtggcatacagcttcatggagcagaaagtttctacttggtatttaattaataaaatgttgaggaatggctgaaacagttaataatgaagtatttttacattgctggtattgtgttttcagcatattggtagtttataatacagacttcttgttgtcaaagatcttcccgcttaaaaattatattccttttctcacgtgtttattagagaagaacaaatgataaaaattagcattttaatgatatatttatgtgtagaaatagggggagaaaaaaaggccaactgaggtaatctaggtgaaaaagtttgttttcagtttagctacatggtttaaccagaattagaagaagaacttcatttccaaccaaagaacaggccgcacagccaccattttggggtcttgagcagagagagaaaacaaataggtggtttgtgagaactctgaattatgtagaaaaccagcttttctacataataaataagctttgccttatttattaaagttaggat

SEQ ID NO: 86626 - DNA, 1056 bp, Homo sapiens
tttaatttttttaaataaatgaatgttcagaaatgtatattagtaattacacttctaatgaaaatttacttctgaaagataaatatatgcattatttgtgatgagatagtttaggttgtaggagagaacttcatggcctacattgtattaggtagaagtagggcacaggatctgggagaataaacaaagatgcaagaaaaaataagaaaaaaaaaaagaagtattgacacacaagataagagggatcttatttctgttgcctgatcatttgtgagtaaaattttaagtgtttttctcttttttcaactttttttttttttttttactttttttggtcacagaaaattttaagttttaagagaaactcctacagtgattggcatcaaagtaggtagtgttccctccctcccaccaaacaaaagaagtcccttatcacctgaggaatgcccactaaataataagtaaatatttaattacatggctggctggctatattaagctgttttgtttttaggggaaaatggtgttacttctaacacagaaagagtgctgaattaaaatctttctctgcagcaatatctattgagaggtgctgactgttttgctacagcatgcaactcaaaagtggctgaaaatatgcagctttgggagtctacagatcattgcaggagctaaaggtctagtcatttttttttaaccaaaggtaatctgcagcagctggtaaccgtggaggtctctgcacaggtttgtgccaagaatatgcctgtgtgaagggttattgtgagtataggattaaggtctttttattttgtagtaggctaaatttgatgcaaaccagcaagatgggaaatgagacatgaagatgcaataatgtattatgcttttagtgaacttccgaagcttagatttgttagtgagatattggtatttcaattttattaggtaaatgttgaaaatatatcaaaatccagtatttgtaaagcatttaataatattttttgaagtttaattttcccttatttgcttcaaccaaccagatatctttcaatgagattt

SEQ ID NO: 86627 - DNA, 1190 bp, Homo sapiens
tgcatgccatacagtaatcaattaaagcttgggatgtaatctaatatttaatatgttgggaaatcagtccaaaaaaatctagaaacacattagaatttcaatggaaaaatatctttttggcccataccgatactttgttgaaggtagcaagttaaagtttagcattttgtgaattgaataaaggagtaaaatgtattttgatcctttatagcttcacctttcttgggcaatataattatgtatgaaatgttcctacataagtagaatatgtatggaaatttttttttaaatgttatattaaaaacatttaaggagtaatatgttttatttaccagactgttgtgaaacatggcaagtttggtctctgtagcttaagaaatgtggtttttgtcaaaagctgattatttctatcttttcacactgcttagttttggacactgatgatatcaagcaatagaacaaggagatttatttacctggctcttagttttaaaaaaacttcttaatttttgaacattattttcactttgaaaaacccgttatttttaaataacacagtctattgttaaaatgtctaaacttgtcattattgtcagcagttactatttgtgcttaagtgtacatatttaataaggatttcggtgagttattggtaaaacttgagtggggaaaaaaagtcaaaaagggaatcttaatctttataaccatcatgacaagccccccacttccccttaagaaacactagcttcttcctcaggaaaataagaaggcaatttagagaatacggatattttaactttagcttttattttcaaaactgcaacatagtaaaggatcaacatatatttatgttcctaattaggttggtgttgtgtgtgtttgtatgtgtgtttagatgtttacagaaatttacacaacttggggtgttcgacatttttcttccacagcagttggcccatattagctaagcagccatgatctggtttgtattgcacggtctgcctttttttaatttcttctctagggtttctttctccccacctccctttcttatttctgtctttctggtccagtgaacactgcatatagtaccttctgtcttaatgtgctggcatgatgctagacttaggcatggcagtaattgatgacgcatgtgataatgctgcagagggagaattctcatctgatat

SEQ ID NO: 86628 - DNA, 1034 bp, Homo sapiens
atggggtttctccatgttgcccaggctggtctcaaactcctgagctcaagctatcctcccacctcggcccctcaaagtgttgagattacaggcatgtgccactgtacctggccaagattgccattttctgaaagcgtagcagaagttcatgagatcttaattatgaatcagaaacctatgtaaagttttcatttttgctcttgtgacttagtttctagtattttattaatgaaaatggtttctagcttgaagtagatagattccagttcgtgagttctattaaaattccttccctgaaacaacttggtacttttgcttgtaagtctggcattaattttcttttcatattagcattaccatttagcattaagtgaaagcagattcatggtaattaccaaaggaattacagatgaccaccacaaatactgaaagaagtcattgatttgatattgcagtgaataccagaagatgttgtaataattttccacttataaaaagtgaattgtccatttaactctggaggtctaagcaaatgtgcttaatgcatatcgtattagtcaatgcaaaaagttaaatatgcccaggctgaaagaaggtgtataatgtatggtcgttcttataccaaatgatttctttggaatttaaacaaatatgtttagtattttattcctaatttaggaagaaaaagcaactaaagttgttctgacattgtacacagatgagtagcacgtaactgttatttagtaagccccatagatagtaaggaataaaagttgttagtgagcaaaacaggagtatcctgccatttgctttaattcttcttgtgatagttttgaggtacaataattcctgtgtgcgtgtcactcaagcaaccagaaagtgtctttgtaatacgcatttggtctcatctcatgaagttccagttgtttgttgtcatccttgtgactctttggtaattacattgatttcaaagaggaattctaattcatcttactgtttcatagaattgagacacaaaatagctttacaggttt

SEQ ID NO: 86629 - DNA, 1010 bp, Homo sapiens
atttaagtcacagaagcatattagtgtattttctgtatgtaatatagttggcattgtaattcaggtatgccagatatgacacatggacaagtgttttaaatcgtttttcctatgtctcgctcccgtaatctggaagaaatgccacaagctgtgaaaattaatgtcagtttggcttgggatactgaaatttatacaaaatcattactcttccctgtctcatagtatgataagtgaaaaggattagaatcagggctgtaccagtttcaaaatactgatgctgaattgacatgattgttagcaaatgcaaaatgatattgacattggttaatacattcttaggagatcgagagtgaccaaagtaaagtcagcataagagaagtttccctggaggtgatttgaagggtaaatggtatataatcacttttcaaatgtgggacatatcaaggacatctcaacatcacagagagagacttaagttgtaattaggaaagattggggttgggaagaactgtgatcagaggacttcatgtgatgatgtatattatttgttttcaaagtaggcatgggaggcaggaagaaacagatctggacaaatagagtattatgccgagtattatttcagggctcttacaatacagtcaaaatgatagaaaaacaggtactcctgttgtacctttccctttcttctatacatgtaacacagttctcattagagtactgcaaagggattctttcatcacagtttctcatgtctttatgataaattgtataaccaaagctaaaatttgtgacttaaaaatatttcaagatacatatgtaataagctatcctgattgtgctgcttcataattgagatacatttccatgtgatttctgtctatctgggtacatgataaaaatttttaaaaggacagtctgtttttcttttctttttttcttttttttttggagacagtgtctggctcttttgtccaggctagagtacagttgtgggatcttggctcatgcag

SEQ ID NO: 86630 - DNA, 2272 bp, Homo sapiens
attcctgtctcgttcaccgttgaatcctcagggtgagctgagattcgaagctaagcagtctggctctaaggtcgcgctttcggcccaacattatgctgctatttagtgaagacgatggacttctgcgcacacggggaagcaacagtgagaaaagacacccggaagtgagcaacagcaaaacatccagatttgtccgcacggtgccccctctgacctttccctccggaagctctcgcggctctcgggcgggagtgcgcacgcgcggccaccggggtcgctccgggtcgcgcgcggagcaggggctagagggaagggtcagcctccagggctggcaggcgcctgcgccgcggggctcccgtcaggacgcgcattctcgctccctccctcggctgcgcgcgcccggtgggcgtgggaggaggcggggaaccggggaggggtgggtgtcgcaggagggaaggagcgaaccggagagcgtcgtcctgagaggagtgaaggcggcaaaatggcggaccgcttctcccgcttcaacgaagaccgagactttcaggtaaacacgggcgtcgccgaggatgcggggaaggcgctggtctagcccagaacctccttcatctccggctcccagccctctttccttccagttttgctccgacttgcgaaccagctcgctcttctcccgtctctgctttctcaagaggcctcccggcttgagggaggccgcatctcctcgcacccgcattctcttacccctgaaactcaggccgcggggcttgcggcttccgcctgtttggcatcggatttcggaaccgggcctgagcgccgtgtgaggggctgtgccctccaggtctgcccgatctgtgccggcgaagggctggctcccaggggacaagaggggtggttgggttgggctgagagggcttgggggagagtattgctgaggccaaggcttccgaaccccgggattttgctctcacggatccttttggggtccttctcttttctttcttcactgtgataaatcaattcctttcattgtctgcttttcctcttccttacctgggaaaaggttgccttcgctatcagacgccttattggttagtcatacattgagatttcgcggggcataagtgttgctgttattaggctgttaattgggcttggaaagcagtaagttactggactatgatccgatgtgagcctaacctcaaatcctatctcgaaagatttgtgagaagcgtgatgataataggccgtccacgcatggggtcactagtgccaaaagcttgatttttctttcttcaattgcaaatgttagtatggaaaaatgcccttacgatggcaagctctattgagtaaaaaataaaggccaaattagaataacttgttttttcgctgttgaaaatacctttctgttgaaattgttaccgcggaaatctcgaagactaaaagggatttagtagagattggctatttctaggtaaaatacatccgtagagtctcaaaaaaaaaaaaaaaacactgcattactaccgcatatcctggcaactgcaatttgggtcgggatgaatctcagaactcaagtttttatcccgctgcagatcctactcaaagcagtacgaaagcactctagatgtgtttcagaaggcagtttaaagagtttgaattccctgagatgataggattggtaaataaataggtaaagcagtttaacaattttaactcagcactgttaacagtctagtacatagaacgcttatgagaagttttgcagcagtaagggatctgggggctgttaaaaagccttgtgatcatgcgcctgctgtatagctgcagcacaatacaggagagtctcaggatgttctaaggatataatgcagattcaccaaagtttgaagcagttcatgttagccttttgatccctgagaaatatatatatatacacacatatatatatattagcaagcactataaaatatgagttggctgcaaggtgtatgagctttattgatttttaaattaccggtagagacatactgataactaaagcccgcaaatgcttttcagaggagagaataatctcaaggtgacctaataaaatcgaaaatagataatatggacagttaagttttgagggaagatgactgtcaaccacagaattccagcaggcttagcaaacaggattttcagggcctttaatgaagattttgaaaattgtggatagcagagtgtgaatgctgtttcctgaaaaacattcagggggttagcctgtactttt

SEQ ID NO: 86631 - DNA, 1051 bp, Homo sapiens
tcttggaaaagtcccaacagagatgaagacgtggaaaaaaaaatcggggtcggggtgtgctggtggggagagggcagagatccggtgaggaatggcttccaccccctggcccattcccctgcaggctggaagatctttctcctgtctggcttctcttcttttcaattcgctgcaccaagtgcttccagtggcccaaaaatgctttttgaagtgtgttttgaaacagcccccaccaacatacaccccaccaggagtactgatcctgcctcccttcatgtctaggggaagcattcgcctttgagcacttgtttgcaaatctggggagtttgagacctcctagcatctcttcccttctttccctgcagtctattcactcccgcagccaaaaatctctggcgttcaggttagcagtttctgggttggtttgtgtgggtttttgttgttgtttggggcttatttttttcaaaaagtgataaagacgggtgggttggagggaggggactgatgggctggtgggctttttagttttcctttgagaaaaagactggtttatttaaaatttgtccagaaaaaaatgaaaaaaaaaaaaaaggtggtatctttgctttagaagaagtctctggataggccctttgtggctgtgggggtgggttgagtgtttacattacattctatatcacaagattgataggatgtttaaagcagatgtttcttatcttcccctgagcccctacaaataaagtcaagacttttctttttttgagacggagtcttgctctgtcgcccaggctggagtgcagtggtgcgatcttggctcactgcaacctccactgcagcgtttctcctgcctcagcctcccaagtagctgggactacaggcgcacgccaccactccttgctaatttttgtatttttagtagacacagggtttcaccatattggccaggctggtctcgaactcctgacctcgttatctgcctgcctcggcctcctaaagtgctgggattacaggagtgagccacagtgcctggcctgtcaagacttctcttaag

SEQ ID NO: 86632 - DNA, 1026 bp, Homo sapiens
ctatagataaataattcatctaagaccatgaagtcacatattaggccttagttattgtctcttgggaaagtacagcgaagacattaaaatgcatatttatgtaacatacagcacatttcatgtgacagataattatctggagctaatggtagcttataaagcagagttgaaagggattagagaatggtgacatggggcaagataaatgtttttgaagaccttttctcccttttccactgaagaaataaagtctttaaaacctaagttgtaattaaatatatttatttgttctaggacctgctcctccaatttaaagtcagtttggccaatgaacacaagcagatttgcagatcaccatgacctcttaacagaaaccaaaaggccaatagatacagtcatctctcagcaagctttttatagtgatgaatctgtgtcagcaatggaaaagcaatacctgcgtaacagtaatctcacaccacaacaaaaaatagatgaacttcatcatggatttactggtttagatcttgaagaacaatggatgtacccctcacgaagtgatcattctaactgtcacaatattcagacaaatgatacagctaagacaacattccaagaatatccacttatcaaaaactgttttacaccccaaactggtctgtctgatatcatgaaagaatcaggagttgatatctaccattatggaagagacagaatatgtactaaaggtcttgaagcaccactacagcaaaaaagggcagagatgtttctttctcaatttaatagatacaatgaaaatgtagattattgtagatacccagagtatgttcatcctaataaggctaagcttaataaatgttcaaattttagtgtccaagatagcaaaaaattagccaatggcacacctgaaacaccaactgtagaagcagacacctacacaaagttatttcaggttaagccagcgaatcagaaaaaaatggaggagacaatccctgatcagcagaatttcacatttccaaaaactacgcc

SEQ ID NO: 86633 - DNA, 1042 bp, Homo sapiens
tcactggctggtccactacgggttttaattggtctttgaaatccaaaagttggcatgagaccagaaaaagaattatcaccatacatcatattaaaataagggtacaaatggcttaagtcatcataagaaagtaagtcataggaatccaacagtggaacaactgaatggccaaatgggtgggtggatcttaggggaaacccatttgaaccaagttgttgaaaacactgattatgccttaaatctcccatcatataattattagaaaagcatgacacttgtgtgcgattcacacggctattgtctccacctctcgttctgtggctattagaatgaccctgtgactccagtagatcttggtatgtattttgtgataagccatctaaatgctttggaccttcctcaggatcataatgtccactctggggcttggcttgaaaattatgtttgtttacattttcaattatcccatacttctgagctgaatagttatcacaaaatccatttggctgctttatttttttatccgtaaccaatttgaagagattttcttctccaggctttgttagtccttctatgtgattgacagattggattctttctgcaccactgtaactaaaatcaaaactagaaaatgctgaagggttttcttggcaatatttctgaaataaattgctatttggggttaagtttgtggatgatagttgggggaaatctgaagaatggttagaaccttttgaagctgcacttaaatgactatttaatttcatcaagttaccttgatttcgataaggaataggagtgttattttttgtttgaacattcatccaagttggtctgtttaaattgatacctcctgaagatgttgctgagtttgataataaattcactgatttaaaatactcagaatgtgggggatcaggtttagcaaactgttgcttttctgtgacgttagcaaaatcattagcgggacaagctgtgtgaggttttagtccatattctgatgttaagccaaaatcagcagtgaatactgcttcctttgcaa

SEQ ID NO: 86634 - DNA, 1009 bp, Homo sapiens
tgttcaaacaaaaaataacactcctattccttatcgaaatcaaggtaacttgatgaaattaaatagtcatttaagtgcagcttcaaaaggttctaaccattcttcagatttcccccaactatcatccacaaacttaaccccaaatagcaatttatttcagaaatattgccaagaaaacccttcagcattttctagttttgattttagttacagtggtgcagaaagaatccaatctgtcaatcacatagaaggactaacaaagcctggagaagaaaatctcttcaaattggttacggataaaaaaataaagcagccaaatggattttgtgataactattcagctcagaagtatgggataattgaaaatgtaaacaaacataattttcaagccaagccccagagtggacattatgatcctgaggaaggtccaaagcatttagatggcttatcacaaaatacataccaagatctactggagtcacagggtcattctaatagccacagaacgagaggtggagacaatagccgtgtgaatcgcacacaagtgtcatgcttttctaataattatatgatgggagatttaaggcataatcagtgttttcaacaacttggttcaaatgggtttcccctaagatccacccacccatttggccattcagttgttccactgttggattcctatgacttactttcttatgatgacttaagccatttgtacccttattttaatatgatgtatggtgataattctttttctggtctcatgccaacttttggatttcaaagaccaattaaaacccgtagtggaccagccagtgaacttcatattcgtctagaagagtgctgtgaacaatggagagcattagaaaaagagagaaaaaaggtaacacaaagttaaccacttaggaataacagtatgttccttttgcctgtcttcattctgtttaccttagtgtagtgtaagagtacttgccttatttctttttgctttatttgttgttgttttaaa
